United States Patent Application Publication US 2018/0126003 A1 - sequence listing, part 43

SEQ ID NO: 72224 - DNA, 687 bp, Artificial Sequence
  derived and/or modified sequence
atgagtatggctgtggaaacctttgggttctttatggcgaccgttggcctactcatgctcggagtcacactcccaaattcctattggcgcgtctctaccgtgcatggaaatgttattactaccaataccatctttgagaatttgtggttctcctgtgccacagattctctgggcgtgtataactgttgggagtttccaagtatgctggcactgtcagggtacatccaggcctgtcgggctcttatgatcaccgcgattttgctgggttttctggggttgttactggggatagcgggtctacgatgcaccaatattggaggacttgaattaagtcggaaagcgaagctggcagccacggcgggtgccctacacattttggcaggaatatgtggtatggttgcaatctcctggtatgcctttaacataacccgggatttctttgatcctttataccccggaactaagtacgaactcgggccagcactttacctggggtggtccgcttcactcatatccatcctgggaggactatgcctgtgcagcgcttgttgctgcgggtcagacgaggacccagccgcttccgcacgcaggccatatcaggcacccgtctctgttatgcccgtagccacctccgaccaagagggggactctagcttcggtaaatacggtcgaaacgcttacgtatag

SEQ ID NO: 72225 - DNA, 687 bp, Artificial Sequence
  derived and/or modified sequence
atgagcatggctgtggagacattcggattcttcatggccacagtgggtctgttaatgctgggcgtgacactgcccaattcttattggagagtgagcacggttcatggaaatgtgatcaccactaacacaatctttgaaaatctctggttctcctgcgccaccgatagtcttggagtctacaattgctgggaatttccaagtatgttagcgttatccggctacatccaagcttgtagagcactcatgatcactgctatcctgttagggttccttggccttctgctcggaatcgcagggcttcgatgtaccaacattggcggactcgaactctccagaaaggcgaaacttgctgctactgccggagctttgcacatactggccggaatctgcgggatggtcgcaatttcctggtacgccttcaatattactagagacttttttgaccctttgtacccaggaacaaaatacgagctgggaccggctctgtacctgggatggtcagctagtctcatatccattctgggcggactgtgtttgtgcagtgcatgttgctgtggcagtgacgaggatccggcagctagcgctcgacggccttaccaggcccctgtcagtgtcatgcccgtcgctacatccgaccaggagggggactcgagcttcggtaagtatggccgtaacgcttacgtgtag

SEQ ID NO: 72226 - DNA, 1295 bp, Artificial Sequence
  derived and/or modified sequence
ggcggcggcggcggcggcggcggcggcggaggcggcggcggcggcggcggcggcggcggctgggcctcgagcgcccgcagcccacctctcgggggcgggctcccggcgctagcagggctgaagagaagatggaggagctggtggtggaagtgcggggctccaatggcgctttctacaaggcatttgtaaaggatgttcatgaagattcaataacagttgcatttgaaaacaactggcagcctgataggcagattccatttcatgatgtcagattcccacctcctgtaggttataataaagatataaatgaaagtgatgaagttgaggtgtattccagagcaaatgaaaaagagccttgctgttggtggttagctaaagtgaggatgataaagggtgagttttatgtgatagaatatgcagcatgtgatgcaacttacaatgaaattgtcacaattgaacgtctaagatctgttaatcccaacaaacctgccacaaaagatactttccataagatcaagctggatgtgccagaagacttacggcaaatgtgtgccaaagaggcggcacataaggattttaaaaaggcagttggtgccttttctgtaacttatgatccagaaaattatcagcttgtcattttgtccatcaatgaagtcacctcaaagcgagcacatatgctgattgacatgcactttcggagtctgcgcactaagttgtctctgataatgagaaatgaagaagctagtaagcagctggagagttcaaggcagcttgcctcgagatttcatgaacagtttatcgtaagagaagatctgatgggtctagctattggtactcatggtgctaatattcagcaagctagaaaagtacctggggtcactgctattgatctagatgaagatacctgcacatttcatatttatggagaggatcaggatgcagtgaaaaaagctagaagctttctcgaatttgctgaagatgtaatacaagttccaaggaacttagtagggttgaagatctgaacataggttacttaaatctaaaaagtcccaaagctagaagaaacttcagatgtctctgggactttctgcaaagtcaatagtaattctccattttgacttgagtagtgttttatcaccatcaccatcgtgagtatcagcaaatatttaggagctcttcaccaatactcctaaatgctgcagatatctttagtagaacatatcaaaaccaggtgcagttttatcaagaaagctacatatgtttttaatttgtaaataaaattgggacatactgcc

SEQ ID NO: 72227 - DNA, 894 bp, Artificial Sequence
  derived and/or modified sequence
atggaagaattggtggtggaagtgaggggatccaatggtgctttttacaaagcatttgtaaaggatgtccacgaggatagcattactgttgctttcgaaaacaactggcagccagataggcaaatcccctttcacgacgtccgttttcctccacccgttgggtataacaaagacatcaatgaatctgatgaggtagaggtatattctcgcgctaacgaaaaggaaccctgttgctggtggttggcaaaagtgagaatgatcaaaggcgaattttatgtcatcgagtatgccgcctgtgatgcgacctacaatgagatcgtcaccatcgaacgcttacgatccgtcaacccaaacaagcccgcaaccaaagacacctttcataaaattaagctagacgtgcctgaagacctgagacagatgtgcgccaaggaggcagcacacaaggattttaagaaggcagttggcgccttctccgtgacatacgaccccgagaactatcagctggtgattctgagtattaatgaggttacatccaagagggcacatatgctaattgacatgcacttccgcagcttacgcaccaaactgtccctcatcatgcgcaacgaggaggcctcaaagcagctggaaagctccagacaactggcatcaagattccacgagcaattcattgtcagagaggacctgatgggcttggctattggaacccacggcgcaaatatccagcaggctcgtaaagtgcctggtgtgacggcaattgacctggatgaagacacatgtacgttccatatctacggcgaggatcaagatgccgtgaaaaaggctcggagctttctggaatttgcggaagacgtcatccaggtgcctcgcaacctcgtggggctgaaaatctag

SEQ ID NO: 72228 - DNA, 894 bp, Artificial Sequence
  derived and/or modified sequence
atggaggagctggtggtggaggtgcggggcagcaatggagccttctacaaggcctttgtgaaggatgtgcatgaagattccatcaccgtggcctttgagaacaactggcagcctgaccggcagatccccttccatgatgtgcgcttccccccacctgtgggctacaacaaggacatcaatgaaagtgatgaggtggaggtgtacagccgggccaatgagaaggagccctgctgctggtggctggccaaggtgaggatgatcaagggggagttctacgtgattgaatatgctgcctgtgatgccacctacaatgagatcgtgaccatcgagcggctgcggtctgtgaaccccaacaagccagccaccaaggacaccttccacaagatcaagctggatgtgcctgaggacctgcggcagatgtgtgccaaggaggccgcccacaaggacttcaagaaggctgtgggcgccttctctgtgacctatgaccctgagaactaccagctggtgatcctgagcatcaatgaggtgaccagcaagagggcccacatgctgattgacatgcacttccgcagcctgcggaccaagctgagcctcatcatgagaaatgaggaggccagcaagcagctggagagcagccggcagctggccagccgcttccacgagcagttcatcgtgcgggaggacctgatgggcctggccatcggcacccatggagccaacatccagcaggccaggaaggtgcctggggtgacagccatcgacctggatgaggacacctgcaccttccacatctatggagaggaccaggatgctgtgaagaaggcccgctccttcctggagtttgctgaagatgtgatccaggtgcccaggaacctggtgggcctgaagatctag

SEQ ID NO: 72229 - DNA, 894 bp, Artificial Sequence
  derived and/or modified sequence
atggaggagctggtggtggaggtgcggggcagcaacggcgccttctataaggcgttcgtgaaagacgtgcatgaggatagcattacagtggccttcgaaaataactggcagcctgataggcaaatcccgttccacgacgtccgcttccccccgccagtggggtacaacaaggacatcaacgaatccgacgaggtggaggtctattcccgagcaaatgaaaaggagccctgctgttggtggttagctaaggttcggatgattaaaggagaattttacgtcatagagtatgctgcatgcgatgccacatacaatgagattgtcaccatcgagagactgagatcagtgaatcctaacaagcccgctactaaggataccttccacaagatcaaactggatgtgcccgaggatcttcggcagatgtgtgctaaggaggccgcccacaaagactttaaaaaagctgttggcgcgttttcagtaacttatgatccggagaactatcagctggtcatattaagcataaatgaagtgacatcgaagagggctcatatgcttatcgacatgcacttcagatctctgaggactaagctctctttgataatgcgaaatgaagaagcttcaaaacagctcgagtcctcacgacaactagctagtcgctttcacgaacagttcatcgtcagggaggacctgatgggacttgccatcggaactcatggagctaatatccagcaagcacgcaaggtaccaggcgttacagcgattgatctggacgaagatacctgcacctttcatatttatggggaggatcaggacgcagttaaaaaggctaggtcctttctggaattcgctgaggatgtgatccaggttcccagaaatctggtaggcttaaagatatag

SEQ ID NO: 72230 - DNA, 894 bp, Artificial Sequence
  derived and/or modified sequence
atggaggaactggtcgtggaggtccggggttccaatggcgcattttataaggcttttgtcaaagacgtgcatgaagactctatcactgttgcctttgaaaacaactggcagcctgaccgccagattccatttcatgatgtacgttttccacctccggtgggatacaataaggacattaacgagtcggacgaggtggaggtgtactctcgggcaaacgagaaggaaccctgctgttggtggctcgccaaagttcgcatgattaagggggagttctatgtcattgagtatgccgcatgtgatgctacatataacgagattgttaccatcgaacgtctgcgttcagtgaaccccaataaaccggctacaaaggatacgttccacaaaatcaagctggatgttccggaggacctccgacagatgtgtgctaaggaggctgcccacaaggactttaaaaaggcagttggtgcttttagtgtgacctacgacccggaaaattatcagctcgtgattctctccatcaacgaggtgacctccaaaagagcacacatgcttattgacatgcattttagaagcttgcgcaccaaactatctttgataatgcggaacgaagaggcctccaaacaactggagtcatcaaggcagctcgccagtcggttccatgaacagttcattgtgagagaggatcttatgggtttagcgatcggtacccatggagctaacattcagcaggccagaaaggtcccaggcgtcactgcaatcgatctcgatgaggatacttgcacctttcatatctacggcgaagatcaggatgctgtgaagaaggccagatcattcctggaatttgctgaggatgtgattcaggttcccaggaacttagtgggcctgaagatctag

SEQ ID NO: 72231 - DNA, 894 bp, Artificial Sequence
  derived and/or modified sequence
atggaggagctggtggtggaggtgagaggcagcaacggcgccttctacaaggccttcgtgaaggacgtgcacgaggacagcatcaccgtggccttcgagaacaactggcagcccgacagacagatccccttccacgacgtgagattccccccccccgtgggctacaacaaggacatcaacgagagcgacgaggtggaggtgtacagcagagccaacgagaaggagccctgctgctggtggctggccaaggtgagaatgatcaagggcgagttctacgtgatcgagtacgccgcctgcgacgccacctacaacgagatcgtgaccatcgagagactgagaagcgtgaaccccaacaagcccgccaccaaggacaccttccacaagatcaagctggacgtgcccgaggacctgagacagatgtgcgccaaggaggccgcccacaaggacttcaagaaggccgtgggcgccttcagcgtgacctacgaccccgagaactaccagctggtgatcctgagcatcaacgaggtgaccagcaagagagcccacatgctgatcgacatgcacttcagaagcctgagaaccaagctgagcctgatcatgagaaacgaggaggccagcaagcagctggagagcagcagacagctggccagcagattccacgagcagttcatcgtgagagaggacctgatgggcctggccatcggcacccacggcgccaacatccagcaggccagaaaggtgcccggcgtgaccgccatcgacctggacgaggacacctgcaccttccacatctacggcgaggaccaggacgccgtgaagaaggccagaagcttcctggagttcgccgaggacgtgatccaggtgcccagaaacctggtgggcctgaagatctag

SEQ ID NO: 72232 - DNA, 618 bp, Artificial Sequence
  derived and/or modified sequence
atggaggacggcggccagagagaggaggagaccagaagaaacgccacctgcggcgccgccgccaagagcgagaacagaggcaagagacacgccagcgccggcaagaagggcgccggcggcaccagccccaccgcccccagcaccaagagacccctgcccggcctgagcgcccccctgggcgccggcagcgccagcagcccccccctgagagcccccgtgcccagaagcgagtgccccggcagaagaagacccgtgctggccgccagaagcgacgccctggagagcagccccatcagcctgcccgccacccccgtgagaagacccctgctgagctacagcgcccccacccacctgggcacccccggcggcgccagaggccacctgcagggcgagggcctgagaggccagggcaagccccccgtgtggagagtgagaagagccctgccccccggctggacccagcaggccgaggcccaggagcagggcagcgccaccagagccggcctgggcgccagaagaggcgtgggcaccgccagctggggctggacctgggccacctgcggcagaaagggcgccagaaacagaaagagaagcgacgagagacccagacccccctag

SEQ ID NO: 72233 - DNA, 618 bp, Artificial Sequence
  derived and/or modified sequence
atggaggacggtggccagagggaggaagaaacacggcgaaacgccacttgcggagctgcagcaaagtctgagaataggggcaaacggcacgcctctgctggaaagaagggcgcgggaggtactagccccaccgcacctagcacgaagcggccacttcctggactttcagcacctctgggagccgggtccgcctcctcccctcccctgcgagcgccagtgccgagaagcgagtgccctggccgccggcgccccgtgctcgcggcccggagcgatgccctcgagagctcccctatttcactgcctgctaccccggtgagacgcccgctactctcctacagcgcgcctacacatctaggaacccctggcggtgcaagaggccacctgcagggtgaaggactgcgcggacaggggaaacctcctgtgtggagggtcagacgagcgctgccaccaggatggacccaacaggccgaagcgcaggagcaaggttcggctaccagggcaggactaggagctcgccgcggggtcggcactgccagctgggggtggacctgggctacttgtggccgtaagggcgctcgcaatcgcaagagatccgatgaaaggccacgtccgccgtag

SEQ ID NO: 72234 - DNA, 618 bp, Artificial Sequence
  derived and/or modified sequence
atggaggatggcggccagcgggaggaggagaccaggagaaatgccacctgtggggccgccgccaagtctgagaacagaggcaagagacatgccagcgctgggaagaagggggccggcggcaccagccccacagcccccagcaccaagaggcccctgcccggcctgagcgcccccctgggcgccggcagcgccagcagcccccccctgcgggcccctgtgcccaggagtgaatgtcctggaagaagaagacctgtgctggccgcccggagtgatgccctggagagcagccccatcagcctgcctgccacccctgtgcggcggcccctgctgagctacagcgcccccacccacctgggcaccccaggaggagcccggggccacctgcagggcgagggcctgcggggccagggcaagccccctgtgtggagggtgagaagagccctgcccccaggctggacccagcaggccgaggcccaggagcagggcagcgccaccagggctggcctgggcgcccggcggggcgtgggcacagcctcctggggctggacctgggccacctgtggcaggaagggggccaggaacaggaagagaagtgatgagcggccccggcccccatag

SEQ ID NO: 72235 - DNA, 618 bp, Artificial Sequence
  derived and/or modified sequence
atggaggacggcggccagcgggaggaggagacccggcggaacgccacctgtggagcagccgcaaagtctgaaaacagagggaagcgccacgctagtgcaggtaaaaagggggccgggggtactagtcccaccgcacctagcactaagcgcccattgcccggactttccgctcctctgggggcaggctctgcctcaagcccccctctgcgggcacccgttcctaggagcgaatgccctggacgaaggcgcccagtgctggctgcacgctcggatgccctagaatcctcgcctatctctctacccgccaccccagttcgcagacctttactgagctactcagctcccacacatttggggactcccgggggcgccaggggccaccttcagggcgaagggttacgcggccaaggaaaaccacctgtgtggcgggtacggagagctttacccccggggtggactcagcaggccgaggcccaggagcaggggagtgcgactcgcgccggtttgggagccaggcgcggggtgggcactgccagctggggctggacatgggctacctgtggcaggaagggagcaaggaaccgaaaacgcagcgatgaaaggcctcggcccccatag

SEQ ID NO: 72236 - protein, 1045 aa, Artificial Sequence
  derived and/or modified sequence
MHQKTPEIYSVELSGTKDIVKTDKGDGKEKYRGLKNNCLELKKKNHKEEFQKELHLDDHKLSNRELEEKYGTDIIMGLSSTRAAELLARDGPNSLTPPKQTPEIVKFLKQMVGGFSILLWVGAFLCWIAYGIQYSSDKSASLNNVYLGCVLGLVVILTGIFAYYQEAKSTNIMSSFNKMIPQQALVIRDSEKKTIPSEQLVVGDIVEVKGGDQIPADIRVLSSQGCRVDNSSLTGESEPQPRSSEFTHENPLETKNICFYSTTCLEASTSPVGTVTGMVINTGDRTIIGHIASLASGVGNEKTPIAIEIEHFVHIVAGVAVSIGILFFIIAVSLKYQVLDSIIFLIGIIVANVPEGLLATVTVTLSLTAKRMAKKNCLVKNLEAVETLGSTSIICSDKTGTLTQNRMTVAHLWFDNQIFVADTSEDHSNQVFDQSSRTWASLSKIITLCNRAEFKPGQENVPIMKKAVIGDASETALLKFSEVILGDVMEIRKRNRKVAEIPFNSTNKFQLSIHEMDDPHGKRFLMVMKGAPERILEKCSTIMINGEEHPLDKSTAKTFHTAYMELGGLGERVLGFCHLYLPADEFPETYSFDIDAMNFPTSNLCFVGLLSMIDPPRSTVPDAVTKCRSAGIKVIMVTGDHPITAKAIAKSVGIISANSETVEDIAHRLNIAVEQVNKRDAKAAVVTGMELKDMSSEQLDEILANYQEIVFARTSPQQKLIIVEGCQRQDAVVAVTGDGVNDSPALKKADIGIAMGIAGSDAAKNAADMVLLDDNFASIVTGVEEGRLIFDNLKKTIAYSLTKNIAELCPFLIYIIVGLPLPIGTITILFIDLGTDIIPSIALAYEKAESDIMNRKPRHKNKDRLVNQPLAVYSYLHIGLMQALGAFLVYFTVYAQEGFLPRTLINLRVEWEKDYVNDLKDSYGQEWTRYQREYLEWTGYTAFFVGILVQQIADLIIRKTRRNSIFQQGLFRNKVIWVGITSQIIIGLILSYGLGSVTALSFTMLRAQYWFVAVPHAILIWVYDEVRKLFIRLYPGSWWDKNMYY

SEQ ID NO: 72237 - DNA, 3138 bp, Artificial Sequence
  derived and/or modified sequence
atgcaccagaaaaccccagagatctattccgtggaactgtctgggactaaagacattgtaaaaacggataaaggggacggaaaggagaaataccgggggcttaagaacaactgcttagagctgaagaagaagaatcataaggaggaatttcaaaaggaattgcacttagatgatcataagctatcaaaccgagaactggaggaaaagtatgggaccgatatcattatgggcctgagcagcacccgggcagcagaattgctggctagggatgggcctaactcactgaccccgcccaagcaaacaccagagatcgtgaaattcctgaagcagatggtggggggatttagcatcctcctgtgggtgggggcctttctgtgttggatcgcctacgggatccagtattccagcgacaaatccgcttccttgaataatgtgtacctgggctgcgtgctcggcttggttgtcatcctgacggggattttcgcctattatcaggaagctaaaagcaccaacatcatgagcagctttaacaagatgataccccaacaggccctggtaatcagggacagtgaaaaaaagaccatcccaagcgagcagctagtggtaggagatatcgtcgaggtgaagggcggtgaccaaatacccgcagacatccgtgttctgtcctcacagggctgtcgggtggataattctagcctgaccggagagagcgagcctcaacctaggtcctctgaattcacacacgaaaaccccctggagacaaagaacatctgtttttatagtaccacctgtctagaagcaagcacctcacctgtgggcactgtgaccgggatggtgatcaatacaggcgatcgcacaattatagggcatattgcctcccttgcatccggggttggaaacgagaagaccccgattgccattgagatagaacacttcgttcatatagttgccggcgtcgccgtctcaatcggcatccttttttttattattgcggtatctctaaagtaccaggtgctggatagtataatattcctcattggaataatcgttgccaacgtgccagagggcctcctggccactgtaactgtgaccttatctctgaccgccaagcggatggctaagaagaactgtttagtgaagaatctggaagctgtggaaaccttaggaagcacctcgatcatttgctcggacaaaacaggcacactgacacagaaccgtatgaccgttgcacacctgtggttcgacaatcagatttttgtggcagatacaagtgaggaccatagcaaccaggtcttcgatcagtccagccgcacctgggctagcttgtcaaaaatcattacgttgtgcaaccgggctgagttcaaaccaggtcaagagaacgtgcctataatgaagaaagcagtaataggagatgcctccgagactgccctcctgaaatttagcgaggtaatactaggagacgtgatggaaattaggaaacggaatcggaaagtagcagagattccctttaattctactaataagtttcagctttcgatccatgaaatggacgaccctcatgggaaaagatttctgatggtgatgaagggggcgcctgaacgaatcctcgaaaagtgttccacgatcatgatcaacggggaggagcaccccctagacaagtccacagcaaagacctttcacactgcctatatggagttgggcgggttgggtgagagggtcttgggcttctgccacctgtaccttccagcagatgagttcccagaaacttactccttcgacattgacgcaatgaatttcccaacttcgaatctatgctttgtcggcctgttaagtatgatcgacccccctaggtcgacggttccagatgccgtcaccaagtgtcggagcgcaggcatcaaagtgatcatggttaccggggaccaccccattacagccaaagctatcgccaaaagcgtcggcatcatttcagcaaacagcgagactgtcgaggatatagcccacaggttgaacattgccgttgaacaggtgaacaaaagagatgccaaggccgcagtcgtgaccggcatggagttgaaagatatgagctctgagcagctggacgaaatactggcgaactatcaggagatcgtgttcgcaaggacctccccccagcaaaagcttatcatcgtggagggatgccagaggcaagatgcagttgtggctgtgacaggcgacggggtcaacgatagccccgcgctgaagaaggcggacattggcattgctatggggatcgccggaagtgatgctgctaaaaacgccgcagatatggtcctgctggacgataacttcgccagtatagtgacaggggtcgaagaaggcagactgatctttgacaaccttaagaaaaccatcgcatattccctgaccaagaacattgctgagttatgccccttcctgatctatattatcgttggtctgccactacccatcgggactattacgatcctttttattgacttgggcacagacatcatccctagtatagccttagcttatgagaaggccgagagtgacatcatgaaccgtaagcccagacataagaacaaagaccgattggtcaaccagccccttgctgtgtactcctaccttcacattggtttaatgcaagccctcggcgcctttctggtgtattttacagtgtacgcacaggaagggtttcttcccagaacactgatcaacctgagagtggagtgggagaaggattacgtgaacgacctcaaggactcttacggccaggaatggactcgataccagagagaatatctggaatggacgggatacacagctttctttgtgggtattctagtgcagcagatcgccgatctgatcatcagaaagacccggcgaaacagtatttttcagcaagggctcttccggaataaagttatatgggtcggaataacgtctcagattattattggactcattctgtcttacgggctgggatccgtgaccgcgctgagcttcactatgcttagagcccagtattggttcgtggccgtgcctcacgccattctgatctgggtgtacgatgaggtacggaagctttttatacggctgtatcccggtagctggtgggataaaaacatgtactactag

SEQ ID NO: 72238 - DNA, 3138 bp, Artificial Sequence
  derived and/or modified sequence
atgcaccagaagaccccagagatctacagcgtggagctgagcggcaccaaggacatcgtgaagacagacaagggagatggcaaggagaagtaccggggcctgaagaacaactgcctggagctgaagaagaagaaccacaaggaggagttccagaaggagctgcacctggatgaccacaagctgagcaaccgggagctggaggagaagtatggaacagacatcatcatgggcctgagcagcaccagggctgctgagctgctggccagagatggccccaacagcctgaccccacccaagcagaccccagagatcgtgaagttcctgaagcagatggtgggcggcttcagcatcctgctgtgggtgggcgccttcctgtgctggatcgcctacggcatccagtacagcagtgacaagagcgccagcctgaacaacgtgtacctgggctgtgtgctgggcctggtggtgatcctgaccggcatctttgcctactaccaggaggccaagagcaccaacatcatgagcagcttcaacaagatgatcccccagcaggccctggtgatccgggacagcgagaagaagaccatccccagcgagcagctggtggtgggggacatcgtggaggtgaagggcggggaccagatcccagctgacatccgggtgctgagcagccagggctgccgggtggacaacagcagcctgaccggggagagcgagccccagcccaggagcagcgagttcacccatgagaaccccctggagaccaagaacatctgcttctacagcaccacctgcctggaggccagcaccagccctgtgggcaccgtgacaggcatggtgatcaacacaggagacaggaccatcatcggccacatcgccagcctggccagcggcgtgggcaatgagaagacccccatcgccattgaaattgagcactttgtgcacatcgtggccggcgtggccgtgtccatcggcatcctcttcttcatcatcgctgtgtccctgaagtaccaggtgctggacagcatcatcttcctgattggcatcatcgtggccaacgtgcctgagggcctgctggccaccgtgacagtgaccctgagcctgacagccaagaggatggccaagaagaactgcctggtgaagaacctggaggccgtggagaccctgggcagcaccagcatcatctgcagcgacaagacaggcaccctgacccagaacaggatgacagtggcccacctgtggtttgacaaccagatctttgtggccgacaccagcgaggaccacagcaaccaggtgtttgaccagagcagcaggacctgggccagcctgagcaagatcatcaccctgtgcaacagagctgagttcaagccaggccaggagaatgtgcccatcatgaagaaggctgtgattggagatgccagcgagacagccctgctgaagttcagcgaggtgatcctgggagatgtgatggagatcaggaagaggaacaggaaggtggccgagatccccttcaacagcaccaacaagttccagctgagcatccacgagatggatgacccccacggcaagcgcttcctgatggtgatgaagggggcccctgagcgcatcctggagaagtgcagcaccatcatgatcaatggagaggagcaccccctggacaagagcacagccaagaccttccacacagcctacatggagctgggcggcctgggggagcgggtgctgggcttctgccacctgtacctgcctgcagatgagttccctgagacctacagctttgatattgatgccatgaacttccccaccagcaacctgtgctttgtgggcctgctgtccatgattgatcctcccaggagcacagtgcctgatgctgtgaccaagtgccgctctgctggcatcaaggtgatcatggtgactggagaccaccccatcacagccaaggccatcgccaagtctgtgggcatcatcagcgccaacagcgagaccgtggaggacatcgcccaccggctgaacattgctgtggagcaggtgaacaagagagatgccaaggctgctgtggtgacaggcatggagctgaaggacatgagcagcgagcagctggatgagatcctggccaactaccaggagatcgtgtttgcccggaccagcccccagcagaagctgatcatcgtggagggctgccagaggcaggatgctgtggtggccgtgactggagatggagtgaatgacagccctgccctgaagaaggctgacattggaattgccatgggcattgctggcagtgatgctgccaagaatgctgctgacatggtgctgctggatgacaactttgccagcatcgtgactggagtggaggagggccgcctcatctttgacaacctgaagaagaccatcgcctacagcctgaccaagaacattgctgagctgtgccccttcctgatctacatcatcgtgggcctgcccctgcccatcggcaccatcaccatcctcttcatcgacctgggcacagacatcatccccagcatcgccctggcctatgagaaggccgagagtgacatcatgaacaggaagcccaggcacaagaacaaggaccggctggtgaaccagcccctggccgtgtacagctacctgcacatcggcctgatgcaggccctgggcgccttcctggtgtacttcaccgtgtatgcccaggagggcttcctgcccaggaccctcatcaacctgcgggtggagtgggagaaggactatgtgaatgacctgaaggacagctatggccaggagtggacccgctaccagcgggagtacctggagtggacaggctacacagccttctttgtgggcatcctggtgcagcagattgctgacctgatcatcaggaagaccaggaggaacagcatcttccagcagggcctcttcaggaacaaggtgatctgggtgggcatcaccagccagatcatcatcggcctcatcctgtcctatggcctgggctctgtgacagccctgtccttcaccatgctgcgggcccagtactggtttgtggccgtgccccacgccatcctgatctgggtgtatgatgaggtgaggaagctgttcatccggctgtacccaggctcctggtgggacaagaacatgtactactag

SEQ ID NO: 72239 - DNA, 3138 bp, Artificial Sequence
  derived and/or modified sequence
atgcaccagaagacccccgagatctacagcgtggagctgagcggcaccaaggatatcgtgaagactgataaaggtgatgggaaggagaaatatcgcggtcttaagaacaattgtttggagttgaagaaaaaaaatcataaagaagagtttcaaaaagaattacatctggacgatcataaactgtccaatagagagctagaagaaaagtatgggacggatatcatcatgggactctcctccacaagagctgccgaactcctggcccgggacggaccgaattcactcacaccaccgaaacaaacacccgagattgtaaaatttctcaagcagatggtaggggggttttcgattttactgtgggttggggctttcctgtgctggatcgcttatggcattcagtactcctccgacaagagcgccagccttaacaatgtttacctgggttgcgtcctcgggctggtagtcatcctcacggggattttcgcttactaccaggaagctaagagcaccaatattatgagttctttcaacaaaatgattccacagcaggccctagtcatccgcgattcagaaaagaaaactattcctagtgagcagctcgttgtgggcgacattgtcgaagtgaaaggaggggatcaaattcctgctgatattagagtactgtcatcacaggggtgtagagtggacaatagctcccttaccggcgagagcgaacctcagcctagatcttccgaattcacccacgaaaatcctttggaaactaaaaacatctgcttttactccaccacatgcctcgaagcctcgacttccccagtcggaaccgtgacaggcatggtgatcaacaccggcgaccgaacaattattggtcatattgcctctctcgctagcggggtgggcaatgagaaaactccaattgccatcgaaatcgagcatttcgtgcacattgtagctggcgtggcagtgtccattggtattctcttctttattatcgccgtcagcctgaagtaccaggtcttagacagcatcatctttctgataggaattatcgtggccaatgtgcctgagggactgttagccactgtcactgtaactctttctctgactgcgaagcgtatggccaaaaaaaactgcctggtgaagaacttagaggctgttgaaacgctcggctccacctcaattatatgcagcgacaaaacgggcaccctcacacaaaaccggatgacagtggcccacctgtggtttgataatcagatcttcgtggcggatacttctgaggatcacagcaaccaggtgtttgatcagagctcccgaacctgggccagcctgagtaaaataatcaccctgtgtaacagggctgagtttaagccaggccaggagaatgtgcctataatgaaaaaggctgtgatcggagatgcttctgagaccgccctgctcaaattcagcgaggtgatcctgggtgatgtgatggaaattaggaaaagaaacaggaaggttgccgaaattcctttcaattccactaataaattccagctctcaatccatgagatggacgaccctcacggtaaaaggttcctgatggtcatgaagggcgctcctgagaggatactcgaaaagtgcagtacaattatgattaacggagaagaacacccattagacaagagtaccgccaaaacatttcacactgcttacatggagctaggaggcctcggcgagagagtcctgggtttttgccatctgtatcttcccgcagacgagtttcccgagacatattctttcgacatcgacgcgatgaacttccccacatccaacttgtgctttgttggcttgctgagtatgattgatcctcctagaagtacagtaccagacgctgtgacgaaatgcaggagcgcagggattaaggtgattatggttacgggggatcatcccattaccgctaaggctatagctaaatcagtgggcatcatatcagccaatagcgagaccgtggaggacattgcacatcgtctgaacattgccgttgaacaggtgaacaagcgagatgccaaggcggctgttgtaaccgggatggagttgaaagacatgtcctctgagcaactggatgaaattctggcaaattaccaggagatcgtatttgcgcgcacatcacctcagcagaaacttattattgtcgaagggtgccagcggcaggacgccgtggtggcagtgacaggggacggtgtcaacgattcccctgcactaaaaaaggctgacatcggaattgccatgggcatcgcaggatctgacgcggcgaagaacgctgccgatatggtcttactggatgataatttcgcgtcaatcgtgactggcgtggaagagggccgcctgattttcgataatctgaaaaaaaccatagcttacagtctgaccaagaacatcgcggagctgtgtcccttcctcatttatataattgttggactgcccctgcccattgggactatcacaatcttgttcattgatctcgggacggatataatcccctcaatagctctcgcttatgagaaagccgagtctgatatcatgaaccggaagcctaggcacaagaataaggaccgactagttaaccagccgctggccgtctattcatatttgcacataggcctgatgcaagcactgggtgctttccttgtgtattttactgtgtatgcccaggaggggttcctccctcggacccttatcaatctgagggtggagtgggagaaggattacgtaaatgacctgaaggattcctacgggcaggagtggactcggtatcagagggagtacctggaatggactggctacaccgcatttttcgtcggcattctcgttcagcagatagccgatctcattatcaggaagactagacgaaatagcatatttcaacaaggtctttttagaaataaggttatttgggtcgggattacatcacagatcattatcggcttaattctgagttatggccttgggtctgttaccgccctgtcctttacaatgctgcgcgcgcagtactggttcgtagccgttccccacgcgatccttatatgggtgtatgacgaagtacgcaagctgttcatcagactctatccgggtagctggtgggacaaaaacatgtattactag

SEQ ID NO: 72240 - DNA, 3138 bp, Artificial Sequence
  derived and/or modified sequence
atgcatcagaaaacgcctgaaatttattcagttgagctttctggcacaaaggacatcgtgaaaacggataagggagacgggaaagagaaatacagagggttgaagaacaattgtctggaactgaagaaaaaaaaccacaaagaagaatttcagaaggaactgcacttagatgaccacaagctgagtaatcgcgagctagaagaaaagtacggtactgatataattatgggactcagcagcacccgcgctgctgagctgctggcacgggacggcccaaattcactcactccccctaaacagacccctgaaatcgtaaagtttttaaagcagatggtggggggtttctcgatcctactttgggtcggggcttttctatgttggatagcctacgggatacaatactctagtgacaaatcggccagtctgaataatgtttacctcggctgcgtgttagggctcgtcgtcatcctaacaggcatatttgcttactatcaagaagcaaaatccaccaacattatgtcatctttcaacaagatgataccacagcaagccctcgtaatcagggatagcgagaagaagacaattcccagcgagcagttagtagtgggggatattgtggaagttaaggggggagaccagatcccagctgatatccgcgtcctctcatcacagggctgtagagtggataacagcagcctcactggagaatctgagccccaacctaggtcttcagaattcacacacgaaaatcctctggaaacaaaaaacatctgcttctacagtaccacttgcctggaagctagtacttctcctgttggaactgtaaccgggatggtgattaatacaggggacagaactataatcggacatatcgcttcgcttgcaagtggtgtggggaatgagaagacccccattgcaatcgaaattgagcacttcgtccatatcgtagccggtgtggctgtgtccatcggcattctcttcttcatcatagccgtgagtctgaagtatcaagtgctagattcaatcatcttccttataggaattattgtggccaatgtgcccgaaggtctgctggccacagtgactgtgaccctcagcctcactgcaaaacggatggccaagaagaactgcctcgtgaaaaacctggaggcagtggaaaccctcgggagcaccagcattatctgcagcgacaaaacaggcacattgacgcagaaccgaatgaccgtggcgcacctctggttcgacaaccagatcttcgtggctgacacgagcgaagaccattccaaccaggtgttcgatcagagttctcgcacatgggcgagtctctctaaaatcattacactctgtaatagggccgagtttaaacccggacaggagaacgtgccaatcatgaagaaagccgttattggcgatgcctccgagacagctttgctaaaattcagtgaagtaattctcggcgatgtgatggaaattcggaagagaaaccgcaaggtggctgagattcccttcaattccacaaacaagttccagctttccattcacgaaatggatgatcctcatggcaagagatttctcatggtcatgaaaggggcacctgaaagaattttagaaaaatgctcaactatcatgatcaacggggaggaacatcccctagataagagcaccgccaagacattccatacagcttatatggaactgggcggattgggtgaacgcgtattggggttttgtcacctgtacctgcccgcagatgaatttcccgagacgtacagcttcgatattgatgccatgaatttccctacatccaatctttgctttgtgggactgctctctatgatcgatccccctcgtagcactgtgcccgatgctgtgactaagtgccggtccgcaggcataaaggtgattatggtaactggcgaccaccctataaccgccaaagctatagctaagtccgtggggattatcagcgccaacagcgagaccgtggaagatatcgcccatcggctgaatatagcagttgaacaggtcaacaagcgggacgccaaggccgcagtggtgaccggcatggagttgaaggatatgtcaagtgagcagctcgacgagatcctggctaattatcaggagatcgtctttgcgaggacttctccccaacagaaattgatcatcgtggaggggtgtcagcgccaagatgcggtggtggctgttaccggagacggggtaaacgactcacctgctttgaaaaaagccgacatagggatagccatgggtatcgctgggtcagatgctgcaaaaaacgctgccgatatggtactcttggacgataatttcgcgtccattgttactggagtagaagaagggcgactcatcttcgacaacttgaagaagaccatcgcttactcactgactaaaaatattgcggagctgtgcccctttctgatctacattatagtgggcctccctcttcctataggaacaatcactatcctttttatcgatttgggtactgatataattccttccatcgccctggcctatgaaaaagcggagtcagatattatgaatcgaaaaccaaggcataagaataaagatcggcttgttaatcagcccctggctgtctactcttacttacacataggcctcatgcaggccctaggcgcattcctagtttattttactgtatatgcgcaggagggttttctccctagaacattgatcaacctgcgtgtggagtgggagaaggattacgtgaatgatctgaaggatagttatggacaagaatggaccagataccaacgcgaataccttgagtggacagggtacaccgcattcttcgtaggtatcttggtccagcaaatcgcagacttgatcataaggaagacaagaaggaacagcatattccagcagggtctctttcggaataaggtcatctgggtgggcatcacgagccagattatcattggcctcatcctgtcttacggcttaggctctgtgacagccctctcctttacaatgctgagagcacagtactggtttgtggccgtcccacacgctatcttaatttgggtctacgacgaggttcgcaagttatttattcggctctatccgggatcttggtgggacaagaacatgtactattag

SEQ ID NO: 72241 - DNA, 3732 bp, Artificial Sequence
  derived and/or modified sequence
aatcctggactctcccgacccctagctgtcggtccccctccctgcgcgcgcgccggcgggtttcctaccctccgaggcgtccgctggcctgcgccctggcggggacgtgggcggggcgggcggcatttaaggctggtgccacctccccggtgcagcggctggcgatcggccgcggaggtgcgtgcagggcccgcgccgccgccggtatctccaccgccaacacctcagccactgccactgccacagccacacgaggccccccaccgtgcgctccgccgctgcggtcccggatccgcgctccacgcccgcagcccgcggcgccaccagcccagcatgcaccagaaaaccccagaaatttactccgtggagctcagcggaactaaggacatcgtgaaaacagacaagggggatggcaaggagaagtataggggtctgaagaacaactgcctggaactcaaaaagaaaaatcacaaagaggagtttcagaaagaactccatctggatgaccacaaactcagcaatagggaattggaagagaaatatggcacagacatcattatgggtctctccagcaccagagctgccgagctcctggcccgggatgggcccaactccctcacccctcccaagcagacgcctgagatcgtcaagttcctcaagcagatggtgggggggttctctatcctcctgtgggtgggcgcctttctctgttggattgcatatgggattcagtactccagcgacaagtctgcatccctgaacaacgtgtacttgggctgtgtgcttggtctggtggtcattttaacggggatctttgcttattaccaagaggcaaaaagcaccaacatcatgtccagcttcaataagatgatccctcagcaagctctcgtcatccgagattccgagaagaagaccatcccttcagagcagctggtggtgggggacattgtggaggtcaaaggaggagaccagatccctgcagacatcagggtgctgtcttctcaggggtgtcgggtggataactcatctctcacgggggagtctgagccccagccccgctcctctgagtttacccatgaaaaccccctggaaacaaagaacatctgcttctattccacaacgtgtctggaagcatctacttcccctgtaggcactgtcaccggcatggttatcaacacgggtgaccgcaccatcattggccatattgcctcattggcctcaggagttggaaatgagaagacgcccattgccattgagatcgagcactttgttcacattgtggcaggagtggctgtctccatcggcatccttttcttcatcatcgctgtgtccctgaagtatcaagtcctggactccatcatcttcctcattggcatcattgtggccaatgtgcccgagggcctcctggccactgtcactgtgaccctgtcgctgacagcaaaacggatggccaagaagaactgcctggtgaagaacctggaggctgtggagaccctcggctccacctccatcatctgctcggacaagactgggacactgacccagaacaggatgacagtggcccatctgtggttcgacaatcagatctttgtggctgacaccagtgaggaccattcaaaccaagtctttgaccaaagctctaggacttgggcctccttatccaagataataacattgtgtaaccgagcagagttcaagccaggacaggaaaatgtccccatcatgaagaaagctgtgattggagatgcctcagaaactgctcttttaaaattctcagaggtcattttgggtgatgtgatggaaattagaaaaagaaaccgcaaagtagctgaaatcccttttaactctactaataaatttcagctctccatccacgagatggatgacccccacggcaagcgcttcctcatggtgatgaagggggcccctgagcgcatcctagagaaatgcagcaccatcatgatcaacggcgaggagcacccactggacaagagcactgccaagaccttccacacagcctacatggagctgggcgggttgggcgagcgtgtgctgggtttctgtcatctctacctgccagcagacgagtttccagaaacctactcatttgacatagacgctatgaactttccgacctccaacctctgttttgtgggactcttgtcaatgatcgatccccctcggtccaccgtgccagatgcagtcaccaaatgccggagtgcagggatcaaggttattatggttactggtgatcatcccatcacagccaaagctattgccaagagtgtggggatcatttcagccaacagtgaaacagtggaagacattgcacatcgcctcaacattgctgtggagcaagttaacaaacgggatgccaaggccgctgtggtgactggcatggagctgaaggacatgagctcagaacagctggatgagatcttagccaactaccaggagattgtctttgcccggacatccccccagcagaagctgatcattgtggagggctgtcagaggcaggatgctgttgttgctgtgaccggggatggagttaatgactctccggctctaaagaaggcagacattgggattgccatggggatagcaggttctgatgcagccaaaaatgcagccgacatggtcttgctggacgacaacttcgcatccatcgtcacaggggtggaggaaggtcgcctgatctttgacaacctcaagaagactattgcttattccctgaccaagaacattgccgagctgtgcccctttctgatctacatcattgtcgggctccccctgcccattggcaccatcaccattctgttcattgacttggggacagacattatcccctccattgccttggcgtacgagaaagctgaaagtgacatcatgaacaggaagcctcgccacaagaataaggacaggctggtgaaccagccgctcgctgtgtactcatacctgcacattggcctcatgcaagccctgggagctttccttgtgtatttcaccgtctatgcacaagagggctttctgccccgcactctcattaacctgcgggtagaatgggagaaggactacgtgaatgacttgaaagacagctatgggcaggaatggacaaggtaccagagggaatacctagaatggacgggctacacggctttctttgttggcatcctagtccagcaaatagcagatctgatcatcaggaaaacccggaggaattccatcttccagcagggtctcttcagaaataaagtcatctgggtggggatcacctcacagatcatcattggtctgatcctctcctatggcctcggaagtgtcacagccttgagtttcaccatgcttagggctcagtactggtttgtggctgtgccgcacgccatcctgatctgggtgtatgatgaggtgcggaagctcttcatcaggctctaccctggaagctggtgggataagaacatgtattattaagaccacctcccttcctatgtctctcagcagcacgttggggcacacttgttcatcttctgaccgtttgctgggctattcccctgcagtgcagacatcgtcaaaattcagacaagaggaaattttcatgcagaaagctgtatgcaggatgctcactgatgttttgcactttaaaactgaaattcaactctttatataggattttcttttctatctccatctcctcattaaaaaatacgtacatttcgaggtaatggtataggg

SEQ ID NO: 72242 - DNA, 3138 bp, Artificial Sequence
  derived and/or modified sequence
atgcaccagaagacccccgagatctacagcgtggagctgagcggcaccaaggacatcgtgaagaccgacaagggcgacggcaaggagaagtacagaggcctgaagaacaactgcctggagctgaagaagaagaaccacaaggaggagttccagaaggagctgcacctggacgaccacaagctgagcaacagagagctggaggagaagtacggcaccgacatcatcatgggcctgagcagcaccagagccgccgagctgctggccagagacggccccaacagcctgaccccccccaagcagacccccgagatcgtgaagttcctgaagcagatggtgggcggcttcagcatcctgctgtgggtgggcgccttcctgtgctggatcgcctacggcatccagtacagcagcgacaagagcgccagcctgaacaacgtgtacctgggctgcgtgctgggcctggtggtgatcctgaccggcatcttcgcctactaccaggaggccaagagcaccaacatcatgagcagcttcaacaagatgatcccccagcaggccctggtgatcagagacagcgagaagaagaccatccccagcgagcagctggtggtgggcgacatcgtggaggtgaagggcggcgaccagatccccgccgacatcagagtgctgagcagccagggctgcagagtggacaacagcagcctgaccggcgagagcgagccccagcccagaagcagcgagttcacccacgagaaccccctggagaccaagaacatctgcttctacagcaccacctgcctggaggccagcaccagccccgtgggcaccgtgaccggcatggtgatcaacaccggcgacagaaccatcatcggccacatcgccagcctggccagcggcgtgggcaacgagaagacccccatcgccatcgagatcgagcacttcgtgcacatcgtggccggcgtggccgtgagcatcggcatcctgttcttcatcatcgccgtgagcctgaagtaccaggtgctggacagcatcatcttcctgatcggcatcatcgtggccaacgtgcccgagggcctgctggccaccgtgaccgtgaccctgagcctgaccgccaagagaatggccaagaagaactgcctggtgaagaacctggaggccgtggagaccctgggcagcaccagcatcatctgcagcgacaagaccggcaccctgacccagaacagaatgaccgtggcccacctgtggttcgacaaccagatcttcgtggccgacaccagcgaggaccacagcaaccaggtgttcgaccagagcagcagaacctgggccagcctgagcaagatcatcaccctgtgcaacagagccgagttcaagcccggccaggagaacgtgcccatcatgaagaaggccgtgatcggcgacgccagcgagaccgccctgctgaagttcagcgaggtgatcctgggcgacgtgatggagatcagaaagagaaacagaaaggtggccgagatccccttcaacagcaccaacaagttccagctgagcatccacgagatggacgacccccacggcaagagattcctgatggtgatgaagggcgcccccgagagaatcctggagaagtgcagcaccatcatgatcaacggcgaggagcaccccctggacaagagcaccgccaagaccttccacaccgcctacatggagctgggcggcctgggcgagagagtgctgggcttctgccacctgtacctgcccgccgacgagttccccgagacctacagcttcgacatcgacgccatgaacttccccaccagcaacctgtgcttcgtgggcctgctgagcatgatcgacccccccagaagcaccgtgcccgacgccgtgaccaagtgcagaagcgccggcatcaaggtgatcatggtgaccggcgaccaccccatcaccgccaaggccatcgccaagagcgtgggcatcatcagcgccaacagcgagaccgtggaggacatcgcccacagactgaacatcgccgtggagcaggtgaacaagagagacgccaaggccgccgtggtgaccggcatggagctgaaggacatgagcagcgagcagctggacgagatcctggccaactaccaggagatcgtgttcgccagaaccagcccccagcagaagctgatcatcgtggagggctgccagagacaggacgccgtggtggccgtgaccggcgacggcgtgaacgacagccccgccctgaagaaggccgacatcggcatcgccatgggcatcgccggcagcgacgccgccaagaacgccgccgacatggtgctgctggacgacaacttcgccagcatcgtgaccggcgtggaggagggcagactgatcttcgacaacctgaagaagaccatcgcctacagcctgaccaagaacatcgccgagctgtgccccttcctgatctacatcatcgtgggcctgcccctgcccatcggcaccatcaccatcctgttcatcgacctgggcaccgacatcatccccagcatcgccctggcctacgagaaggccgagagcgacatcatgaacagaaagcccagacacaagaacaaggacagactggtgaaccagcccctggccgtgtacagctacctgcacatcggcctgatgcaggccctgggcgccttcctggtgtacttcaccgtgtacgcccaggagggcttcctgcccagaaccctgatcaacctgagagtggagtgggagaaggactacgtgaacgacctgaaggacagctacggccaggagtggaccagataccagagagagtacctggagtggaccggctacaccgccttcttcgtgggcatcctggtgcagcagatcgccgacctgatcatcagaaagaccagaagaaacagcatcttccagcagggcctgttcagaaacaaggtgatctgggtgggcatcaccagccagatcatcatcggcctgatcctgagctacggcctgggcagcgtgaccgccctgagcttcaccatgctgagagcccagtactggttcgtggccgtgccccacgccatcctgatctgggtgtacgacgaggtgagaaagctgttcatcagactgtaccccggcagctggtgggacaagaacatgtactactag

SEQ ID NO: 72243 - protein, 943 aa, Artificial Sequence
  derived and/or modified sequence
MSTMRLLTLALLFSCSVARAACDPKIVNIGAVLSTRKHEQMFREAVNQANKRHGSWKIQLNATSVTHKPNAIQMALSVCEDLISSQVYAILVSHPPTPNDHFTPTPVSYTAGFYRIPVLGLTTRMSIYSDKSIHLSFLRTVPPYSHQSSVWFEMMRVYSWNHIILLVSDDHEGRAAQKRLETLLEERESKSKKRNYENLDQLSYDNKRGPKAEKVLQFDPGTKNVTALLMEAKELEARVIILSASEDDAATVYRAAAMLNMTGSGYVWLVGEREISGNALRYAPDGILGLQLINGKNESAHISDAVGVVAQAVHELLEKENITDPPRGCVGNTNIWKTGPLFKRVLMSSKYADGVTGRVEFNEDGDRKFANYSIMNLQNRKLVQVGIYNGTHVIPNDRKIIWPGGETEKPRGYQMSTRLKIVTIHQEPFVYVKPTLSDGTCKEEFTVNGDPVKKVICTGPNDTSPGSPRHTVPQCCYGFCIDLLIKLARTMNFTYEVHLVADGKFGTQERVNNSNKKEWNGMMGELLSGQADMIVAPLTINNERAQYIEFSKPFKYQGLTILVKKEIPRSTLDSFMQPFQSTLWLLVGLSVHVVAVMLYLLDRFSPFGRFKVNSEEEEEDALTLSSAMWFSWGVLLNSGIGEGAPRSFSARILGMVWAGFAMIIVASYTANLAAFLVLDRPEERITGINDPRLRNPSDKFIYATVKQSSVDIYFRRQVELSTMYRHMEKHNYESAAEAIQAVRDNKLHAFIWDSAVLEFEASQKCDLVTTGELFFRSGFGIGMRKDSPWKQNVSLSILKSHENGFMEDLDKTWVRYQECDSRSNAPATLTFENMAGVFMLVAGGIVAGIFLIFIEIAYKRHKDARRKQMQLAFAAVNVWRKNLQDRKSGRAEPDPKKKATFRAITSTLASSFKRRRSSKDTQYHPTDITGPLNLSDPSVSTVV

SEQ ID NO: 72244 - DNA, 2832 bp, Artificial Sequence
  derived and/or modified sequence
atgagcactatgagactgttgactctagccctgcttttcagctgttcggtggcccgcgcagcatgtgatccaaagatagtgaatatcggtgcagttctttccacaagaaagcacgagcagatgtttagggaagccgtgaatcaggctaataagagacatggatcctggaaaatacagttaaatgctactagcgtgacccataagcccaatgccatccagatggccttaagtgtgtgcgaggacctgatttctagccaggtgtatgcgattttagtgtctcatccaccgacccccaacgatcacttcacccccacccctgttagctacacagccggcttttatcggattccagttctggggctaaccacacgaatgagtatctatagcgacaaatcaatacacttgagctttctgcggacagttcctccctatagccaccagagcagcgtatggtttgagatgatgcgcgtatactcctggaatcatattatcctcctcgttagcgatgatcacgagggcagagccgcgcagaaaaggctggagactctcctggaggagcgggagagcaagagtaaaaagagaaactatgaaaacctggaccagctctcctacgacaataaaagaggtccgaaagctgagaaggttctgcagttcgaccctgggactaagaacgtcacagctctgctgatggaggcaaaggagttggaggcacgggtgattatattgtctgcatccgaggatgatgcagccactgtatatagagctgctgcaatgctcaacatgaccggttctggttacgtgtggctcgtgggagaacgagagatcagtggcaacgccctacgctacgcacctgatgggattctggggttgcaactaatcaatggcaagaatgagtcagcacatatctctgatgcagtgggggtagttgcgcaagccgtgcacgaactactcgaaaaagagaacattacggaccctcctcggggctgcgttggcaacacaaacatctggaagactggaccactgtttaaacgtgtgttgatgtccagcaaatacgctgacggggtaactggcagggtcgagttcaatgaagacggcgataggaagttcgccaattattctattatgaacctgcagaatcggaaactggtgcaagtcggaatttacaacggaacacatgtcattccaaacgacagaaaaatcatatggccaggtggtgaaactgagaaacccaggggctaccagatgtccacgcggctgaagatcgtgaccattcaccaggaaccattcgtgtatgtcaagcccacactgtcagatggaacgtgtaaggaagagttcactgttaatggcgacccagtaaaaaaagtgatctgtaccggtccaaatgatacttctccaggttcaccacggcacaccgtaccacaatgttgctatggcttctgtatcgacctgctcatcaaactggccaggacaatgaactttacctatgaggtccatctggtggctgacggcaagtttgggacccaggagcgcgtgaataattcaaataagaaagagtggaacggtatgatgggcgagctcttgagcggacaggctgacatgatagtcgcccctttgactattaacaatgaaagggcccagtacattgagttcagtaaacctttcaagtaccaaggcctgaccatcctggtcaagaaagagattcctagaagtacgttagatagctttatgcagccattccagagtactctttggctacttgtgggtctcagtgtgcatgtggtcgctgtgatgctgtatctgctggataggttttcaccattcggaaggttcaaggttaacagcgaggaggaggaagaagacgctctaacgctttccagcgccatgtggttctcctggggggtcctccttaatagtggaatcggggagggtgcacctaggtcgttcagcgcgcgaattttaggaatggtttgggcgggcttcgctatgataatcgttgcctcctatacggctaacctcgccgcattcctggttttggatcgacctgaggaacgcatcacgggaattaatgatccgaggcttagaaacccctctgataagttcatctatgccactgtgaaacagagctccgtggacatctactttcggcggcaggtggagctgagcacaatgtatcgccacatggaaaaacacaattatgagtctgccgccgaagccatccaggcggtgagagataacaagctacacgcctttatatgggactctgctgtgctggaatttgaggcatcccagaagtgtgatctggttacaacgggcgagttattctttaggagcggctttggtattggcatgcgcaaggactccccctggaagcagaatgtgtccctgtctatcctaaagtcccacgagaacgggtttatggaagaccttgataaaacatgggtgaggtatcaggagtgtgactcgcgctcaaatgcccccgcaacactcacctttgaaaacatggcgggtgtatttatgctggtggccggggggatcgtggccggaatcttcttaatattcattgaaatcgcttacaaaagacacaaagacgctagacgcaaacagatgcagctagcattcgctgcagtaaacgtgtggcgaaagaatttacaggaccgcaagtccggccgcgcggagccagaccctaagaaaaaggctacgtttcgggcgatcacctccactttggcgtcttctttcaaaagaagacggagctctaaagacactcaataccacccaaccgatatcaccgggcctctgaacctctctgacccctcagtttctactgttgtgtag

SEQ ID NO: 72245 - DNA, 3751 bp, Artificial Sequence
  derived and/or modified sequence
gagcccatgagcaccatgcgcctgctgacgctcgccctgctgttctcctgctccgtcgcccgtgccgcgtgcgaccccaagatcgtcaacattggcgcggtgctgagcacgcggaagcacgagcagatgttccgcgaggccgtgaaccaggccaacaagcggcacggctcctggaagattcagctcaatgccacctccgtcacgcacaagcccaacgccatccagatggctctgtcggtgtgcgaggacctcatctccagccaggtctacgccatcctagttagccatccacctacccccaacgaccacttcactcccacccctgtctcctacacagccggcttctaccgcatacccgtgctggggctgaccacccgcatgtccatctactcggacaagagcatccacctgagcttcctgcgcaccgtgccgccctactcccaccagtccagcgtgtggtttgagatgatgcgtgtctacagctggaaccacatcatcctgctggtcagcgacgaccacgagggccgggcggctcagaaacgcctggagacgctgctggaggagcgtgagtccaagagtaaaaaaaggaactatgaaaacctcgaccaactgtcctatgacaacaagcgcggacccaaggcagagaaggtgctgcagtttgacccagggaccaagaacgtgacggccctgctgatggaggcgaaagagctggaggcccgggtcatcatcctttctgccagcgaggacgatgctgccactgtataccgcgcagccgcgatgctgaacatgacgggctccgggtacgtgtggctggtcggcgagcgcgagatctcggggaacgccctgcgctacgccccagacggcatcctcgggctgcagctcatcaacggcaagaacgagtcggcccacatcagcgacgccgtgggcgtggtggcccaggccgtgcacgagctcctcgagaaggagaacatcaccgacccgccgcggggctgcgtgggcaacaccaacatctggaagaccgggccgctcttcaagagagtgctgatgtcttccaagtatgcggatggggtgactggtcgcgtggagttcaatgaggatggggaccggaagttcgccaactacagcatcatgaacctgcagaaccgcaagctggtgcaagtgggcatctacaatggcacccacgtcatccctaatgacaggaagatcatctggccaggcggagagacagagaagcctcgagggtaccagatgtccaccagactgaagattgtgacgatccaccaggagcccttcgtgtacgtcaagcccacgctgagtgatgggacatgcaaggaggagttcacagtcaacggcgacccagtcaagaaggtgatctgcaccgggcccaacgacacgtcgccgggcagcccccgccacacggtgcctcagtgttgctacggcttttgcatcgacctgctcatcaagctggcacggaccatgaacttcacctacgaggtgcacctggtggcagatggcaagttcggcacacaggagcgggtgaacaacagcaacaagaaggagtggaatgggatgatgggcgagctgctcagcgggcaggcagacatgatcgtggcgccgctaaccataaacaacgagcgcgcgcagtacatcgagttttccaagcccttcaagtaccagggcctgactattctggtcaagaaggagattccccggagcacgctggactcgttcatgcagccgttccagagcacactgtggctgctggtggggctgtcggtgcacgtggtggccgtgatgctgtacctgctggaccgcttcagccccttcggccggttcaaggtgaacagcgaggaggaggaggaggacgcactgaccctgtcctcggccatgtggttctcctggggcgtcctgctcaactccggcatcggggaaggcgcccccagaagcttctcagcgcgcatcctgggcatggtgtgggccggctttgccatgatcatcgtggcctcctacaccgccaacctggcggccttcctggtgctggaccggccggaggagcgcatcacgggcatcaacgaccctcggctgaggaacccctcggacaagtttatctacgccacggtgaagcagagctccgtggatatctacttccggcgccaggtggagctgagcaccatgtaccggcatatggagaagcacaactacgagagtgcggcggaggccatccaggccgtgagagacaacaagctgcatgccttcatctgggactcggcggtgctggagttcgaggcctcgcagaagtgcgacctggtgacgactggagagctgtttttccgctcgggcttcggcataggcatgcgcaaagacagcccctggaagcagaacgtctccctgtccatcctcaagtcccacgagaatggcttcatggaagacctggacaagacgtgggttcggtatcaggaatgtgactcgcgcagcaacgcccctgcgacccttacttttgagaacatggccggggtcttcatgctggtagctgggggcatcgtggccgggatcttcctgattttcatcgagattgcctacaagcggcacaaggatgctcgccggaagcagatgcagctggcctttgccgccgttaacgtgtggcggaagaacctgcaggatagaaagagtggtagagcagagcctgaccctaaaaagaaagccacatttagggctatcacctccaccctggcttccagcttcaagaggcgtaggtcctccaaagacacgcagtaccatcccactgatatcacgggcccgctcaacctctcagatccctcggtcagcaccgtggtgtgaggcccccggaggcgcccacctgcccagttagcccggccaaggacactgatgggtcctgctgctcgggaaggcctgagggaagcccacccgccccagagactgcccaccctgggcctcccgtccgtccgcccgcccaccccgctgcctggcgggcagcccctgctggaccaaggtgcggaccggagcggctgaggacggggcagagctgagtcggctgggcagggccgcagggcgctccggcagaggcagggccctggggtctctgagcagtggggagcgggggctaactggccccaggcggaggggcttggagcagagacggcagccccatccttcccgcagcaccagcctgagccacagtggggcccatggccccagctggctgggtcgcccctcctcgggcgcctgcgctcctctgcagcctgagctccaccctcccctcttcttgcggcaccgcccacccacaccccgtctgccccttgaccccacacgccggggctggccctgccctcccccacggccgtccctgacttcccagctggcagcgcctcccgccgcctcgggccgcctcctccagactcgagagggctgagcccctcctctcctcgtccggcctgcagcccagaacgggcctccccgggggtccccggacgctggctcgggactgtcttcaaccctgccctgcaccttgggcacgggagagcgccacccgcccgcccccgccctcgctccgggtgcgtgaccggcccgccaccttgtacagaaccagcactcccagggcccgagcgcgtgccttccccgtgcggcccgtgcgcagccgcgctctgcccctccgtccccagggtgcaggcgcgcaccgcccaacccccacctcccggtgtatgcagtggtgatgcctaaaggaatgtcacgc

SEQ ID NO: 72246 - DNA, 2832 bp, Artificial Sequence
  derived and/or modified sequence
atgagcaccatgaggctgctgaccctggccctgctcttcagctgcagcgtggcccgggccgcctgtgaccccaagatcgtgaacattggagctgtgctgagcaccaggaagcatgagcagatgttccgggaggccgtgaaccaggccaacaagagacatggctcctggaagatccagctgaatgccacctctgtgacccacaagcccaatgccatccagatggccctgtctgtgtgtgaggacctgatcagcagccaggtgtatgccatcctggtgagccacccccccaccccaaatgaccacttcacccccacccctgtgtcctacacagctggcttctaccgcatccctgtgctgggcctgaccaccaggatgagcatctacagcgacaagagcatccacctgtccttcctgaggacagtgcccccctacagccaccagagctctgtgtggtttgagatgatgagggtgtacagctggaaccacatcatcctgctggtgtctgatgaccacgagggccgggccgcccagaagaggctggagaccctgctggaggagcgggagagcaagagcaagaagaggaactatgagaacctggaccagctgtcctatgacaacaagaggggccccaaggccgagaaggtgctgcagtttgaccccggcaccaagaatgtgacagccctgctgatggaggccaaggagctggaggcccgggtcatcatcctgagcgcctctgaagatgatgctgccaccgtgtacagagctgctgccatgctgaacatgacaggcagcggctacgtgtggctggtgggggagcgggagatctctggaaatgccctgcgctatgccccagatggcatcctgggcctgcagctgatcaacgggaagaatgaaagtgcccacatcagtgatgctgtgggcgtggtggcccaggccgtgcatgagctgctggagaaggagaacatcacagatcctccccggggctgtgtgggcaacaccaacatctggaagacaggccccctcttcaagagggtgctgatgagcagcaaatatgcagatggagtgacaggccgggtggagttcaatgaagatggagacaggaagtttgccaactacagcatcatgaacctgcagaacaggaagctggtgcaggtgggcatctacaacggcacccacgtgatccccaatgacaggaagatcatctggccaggaggagaaacagagaagccccggggctaccagatgagcacccggctgaagatcgtgaccatccaccaggagccctttgtgtatgtgaagcccaccctgagtgatggcacctgcaaggaggagttcaccgtgaatggagaccctgtgaagaaggtgatctgcaccggccccaatgacaccagccctggcagccccaggcacacagtgccccagtgctgctacggcttctgcatcgacctgctgatcaagctggcccggaccatgaacttcacctatgaggtgcacctggtggctgatggcaagtttggcacccaggagcgggtgaacaacagcaacaagaaggagtggaatggcatgatgggagagctgctgagcggccaggccgacatgattgtggcccccctgaccatcaacaatgaaagagcccagtacatcgagttcagcaagcccttcaagtaccagggcctgaccatcctggtgaagaaggagatccccaggagcaccctggacagcttcatgcagcccttccagagcaccctgtggctgctggtgggcctgtctgtgcacgtggtggccgtgatgctgtacctgctggaccgcttcagccccttcggccgcttcaaggtgaacagcgaggaggaggaggaggatgccctgaccctgagcagcgccatgtggttctcctggggcgtgctgctgaacagcggcatcggggagggcgcccccaggagcttcagcgcccgcatcctgggcatggtgtgggccggctttgccatgatcatcgtggccagctacacagccaacctggccgccttcctggtgctggacaggcctgaggagcgcatcaccggcatcaatgacccccggctgaggaaccccagcgacaagttcatctatgccaccgtgaagcagagctctgtggacatctacttccggcggcaggtggagctgagcaccatgtaccgccacatggagaagcacaactatgagagcgctgctgaggccatccaggccgtgcgggacaacaagctgcacgccttcatctgggacagcgctgtgctggagtttgaggccagccagaagtgtgacctggtgaccaccggggagctgttcttccgcagcggctttggaattggcatgaggaaggacagcccctggaagcagaatgtgtccctgagcatcctgaagagccatgaaaatggcttcatggaggacctggacaagacctgggtgcgctaccaggagtgtgacagccgcagcaatgccccagccaccctgacctttgagaacatggccggggtcttcatgctggtggccggcggcatcgtggccggcatcttcctgatcttcatcgagatcgcctacaagaggcacaaggatgcccggaggaagcagatgcagctggcctttgctgctgtgaatgtgtggaggaagaacctgcaggacaggaagagcggccgggcagagccagaccccaagaagaaggccaccttccgggccatcaccagcaccctggccagcagcttcaagagaagaagaagcagcaaggacacccagtaccaccccacagacatcaccggccccctgaacctgagtgaccccagcgtgtccacagtggtgtag

SEQ ID NO: 72247 - DNA, 2832 bp, Artificial Sequence
  derived and/or modified sequence
atgagcaccatgcggctgctgaccctggccctgctgttcagctgctctgttgcccgagccgcatgcgatccgaaaattgttaacattggcgctgtgctgtcaacgaggaagcatgagcagatgttccgagaggctgttaaccaggccaataagcgacacggctcctggaaaatccagttgaacgctacatctgtgactcataaacccaatgccatacagatggctctgagtgtttgtgaagaccttatttccagtcaagtgtatgcaatactcgtttcccatcctcctacacccaacgaccacttcacaccaacccctgttagttacacagctggattctatcgtattcctgtgttgggccttactaccagaatgtccatctacagcgacaaaagcattcacctgtcattcctgcgaactgtgccaccatatagccaccagtcaagtgtctggttcgaaatgatgagagtgtatagctggaaccacatcattctgctcgtgagcgatgaccatgaagggcgggcggcccaaaaaaggctggaaaccctgctcgaagaacgtgagagtaagtcaaaaaagaggaactacgaaaacctggatcaactctcttatgacaacaaaaggggtcccaaagcagagaaagtgttacagtttgatcccggcactaagaacgtgacggccctgcttatggaggccaaggaacttgaagcccgtgtgataatactgagcgctagcgaagacgacgcagctaccgtgtatcgagctgccgcgatgctaaacatgactggctccgggtatgtgtggctggtcggggaaagagagattagtggaaatgcgctaaggtacgcccccgacggcatcctgggattacagctgattaatggcaagaacgaatccgctcacatcagtgacgccgtcggagtggtggcccaggccgttcatgagctcctggagaaagagaatatcaccgatccccctaggggttgcgtgggcaacacaaacatctggaaaactggacccttgtttaagcgcgtgctgatgagctcaaagtacgccgacggcgttacaggccgcgtggaatttaacgaggatggggatcggaaattcgctaactattccattatgaatctgcagaacagaaagctggtgcaggtgggcatctacaatggaacccatgtgattccaaacgataggaagattatatggcctgggggggagacggaaaagccccgggggtaccagatgtcaacaagactcaaaattgtcaccattcatcaggagccattcgtgtatgttaagccgacacttagcgacggaacttgcaaggaagagtttactgtgaacggtgatcctgtgaagaaggtgatctgcacaggaccaaatgatactagccctggatcacccaggcacacagtcccccagtgctgctacggtttctgtattgatttactgattaagctggcccgaaccatgaactttacctacgaggtccacttggtggccgacgggaagttcggaacacaggaacgtgtaaataactccaataaaaaggagtggaacggtatgatgggtgaactcctgtcaggccaggctgatatgattgtcgcccccctgacaatcaataacgagcgggctcagtacatcgagttctctaaacctttcaaataccaggggctaactattctcgtgaaaaaggaaatccctagatccactctcgactctttcatgcaaccatttcagtccacactctggctcctagtcggactgtccgtgcacgtcgttgcagtgatgctatacctgctagacagattctcccccttcggtaggttcaaggtgaattccgaagaagaggaggaggatgcacttacactctctagcgccatgtggttctcgtggggggttctcctgaattccggcattggtgagggcgcaccgcgctccttttctgctcgtattcttgggatggtctgggcagggtttgccatgattattgtggcctcttacaccgcaaacctggctgcctttttagtgctcgatagaccagaggagcggatcaccgggatcaacgatcctcgcctgagaaatccctccgataaatttatttatgccacggtaaaacagagtagcgtggatatctattttagacgccaggtggagctgtccaccatgtaccggcatatggaaaagcataactacgaaagtgccgctgaggcaatccaggccgtgagggacaataagctacacgcattcatttgggattccgctgtcttggaattcgaggcttcgcagaaatgcgatctggtcacaacaggtgagctctttttccgtagtggattcggcatcggaatgaggaaagattctccatggaaacagaacgtgtccctgtccatacttaagtctcacgagaatggcttcatggaagaccttgataagacatgggtgagatatcaggaatgtgatagcagaagtaacgctcccgccacgttgacatttgagaacatggcaggggtctttatgctggtagcaggggggatcgtcgccggcatcttcctgatattcatcgaaattgcctataagcgccacaaagatgcaagacggaagcagatgcagctagccttcgccgccgtaaacgtgtggaggaagaacctgcaagatcggaaaagcggaagggccgagccggaccccaagaagaaggccaccttccgggctataacaagtacattagcttcaagctttaaacggaggcgctcctccaaagacacccagtaccacccgacagatataacgggacctctcaatctctccgaccctagtgtgagcacagtggtgtag

SEQ ID NO: 72248 - DNA, 2832 bp, Artificial Sequence
  derived and/or modified sequence
atgtctacaatgaggttactgacactggcacttttgttttcctgttctgtggccagggcagcgtgcgatcccaagatcgtcaacatcggtgctgtcctgtcaacacggaagcatgaacagatgtttagagaggctgtgaatcaggctaacaaacgacacgggtcctggaagatacaactcaatgctacatcggttacccacaaaccgaatgctatacagatggccctatcagtgtgtgaggatcttatatcttcacaggtctacgctatactggtctctcatccccctaccccgaacgatcattttaccccaactcccgtcagttataccgccggtttctacaggatacctgtgctaggactcactacgcgcatgagcatttacagtgacaagtccatccacttaagctttctgcggaccgtgccaccttactcccatcaatcctccgtctggttcgagatgatgagggtctacagctggaaccacattatactgttagtgagcgacgatcatgaaggaagagcagcacagaagcggctggaaaccctcctagaggagagagaaagcaagtcaaaaaagagaaactacgaaaacctggatcaactttcatacgacaacaagcgtggaccgaaggcagagaaggttctccaatttgaccctggcactaagaacgttacagcactcctgatggaggcgaaggagctcgaggccagagtgatcattctgtccgcttctgaggacgacgcagccactgtatatcgagcggctgcaatgttaaatatgaccggttccgggtacgtatggctggtaggcgaacgggagatatcagggaacgcgttaaggtacgcccctgacggcatcttaggcctgcagttaatcaatggcaagaatgagtccgcgcatatttcagatgccgtcggcgtggtggctcaggcagttcacgaactactagaaaaggaaaacattaccgaccccccaaggggctgtgttggcaacacgaatatttggaaaactggcccactcttcaaacgtgtcctcatgtcaagtaagtatgcagacggagtgaccggcagggtggagtttaatgaggacggtgacagaaaatttgcaaactactcaatcatgaatctgcagaaccgcaagctggtgcaagtaggcatttacaacggaacccacgtcatccccaacgatcggaaaattatctggcctggtggggaaacagagaagcctcgtgggtaccaaatgtctaccaggttgaagatcgtaactattcaccaggaaccgttcgtctacgtcaagccaactctgtccgatggaacatgtaaggaggagtttactgtgaacggagatcccgtgaaaaaagttatttgtactgggcctaacgatacttcacctggatcacctaggcatactgtgcctcagtgctgttacggcttttgcatcgatctcctgataaaacttgcaaggactatgaactttacctatgaagttcacctggtcgctgatggaaagttcggcactcaggaaagggtgaacaattctaacaagaaggagtggaacggtatgatgggggaactcctgtcaggacaggcagatatgatagtggctcctttgaccatcaacaatgaaagagcccagtatattgagttctctaagccctttaagtaccaggggttgacaatacttgttaaaaaggagattcccaggagcacactcgattctttcatgcaaccctttcagagtaccctttggctgctggtaggattatctgtccatgtggtcgctgttatgctctacctcctggaccgctttagcccattcggccgatttaaggtgaacagtgaggaagaggaagaggatgccttaactctgtcgtcggcaatgtggttttcctggggcgtcctgctcaacagtgggattggcgaaggcgcacccaggagcttctccgcaagaattctcggtatggtgtgggccggatttgccatgatcatagttgcctcctacaccgctaacttggctgcctttcttgtcctcgaccgacctgaggagaggattactggaatcaacgaccctaggctgcggaatccatcagacaagttcatatatgctacagttaaacagtcttccgtcgatatatactttcgccgacaagtggagctgagtaccatgtaccgtcacatggagaagcataactacgagtctgccgcagaagctattcaggccgtgcgcgataataaattacatgcgttcatttgggacagcgcggtgctcgagttcgaggcttcccagaagtgtgacttagtgactaccggggaactattttttcggtccggctttgggatcggaatgcggaaagactcaccttggaaacagaatgtaagtctgtccatcttgaaatctcacgagaacggcttcatggaggacctggataaaacctgggtccgctaccaggagtgcgatagccgctctaacgccccagccactctcacctttgaaaacatggccggagtttttatgctggtggcaggcggtatagtggcaggtatttttctcattttcatcgagatcgcgtataagcggcataaggacgccagacgcaagcagatgcagctcgcattcgccgctgtgaacgtctggcggaaaaatctacaggatcgaaagagcggacgtgccgagcccgaccctaagaaaaaagctacctttagggctattacttctaccctagcgtcatcgtttaagcgcaggcgcagctctaaagacactcagtatcaccccacagacatcaccggaccactcaacctgagtgatcccagtgtctctaccgtcgtgtag

SEQ ID NO: 72249 - DNA, 2832 bp, Artificial Sequence
  derived and/or modified sequence
atgagcaccatgagactgctgaccctggccctgctgttcagctgcagcgtggccagagccgcctgcgaccccaagatcgtgaacatcggcgccgtgctgagcaccagaaagcacgagcagatgttcagagaggccgtgaaccaggccaacaagagacacggcagctggaagatccagctgaacgccaccagcgtgacccacaagcccaacgccatccagatggccctgagcgtgtgcgaggacctgatcagcagccaggtgtacgccatcctggtgagccacccccccacccccaacgaccacttcacccccacccccgtgagctacaccgccggcttctacagaatccccgtgctgggcctgaccaccagaatgagcatctacagcgacaagagcatccacctgagcttcctgagaaccgtgcccccctacagccaccagagcagcgtgtggttcgagatgatgagagtgtacagctggaaccacatcatcctgctggtgagcgacgaccacgagggcagagccgcccagaagagactggagaccctgctggaggagagagagagcaagagcaagaagagaaactacgagaacctggaccagctgagctacgacaacaagagaggccccaaggccgagaaggtgctgcagttcgaccccggcaccaagaacgtgaccgccctgctgatggaggccaaggagctggaggccagagtgatcatcctgagcgccagcgaggacgacgccgccaccgtgtacagagccgccgccatgctgaacatgaccggcagcggctacgtgtggctggtgggcgagagagagatcagcggcaacgccctgagatacgcccccgacggcatcctgggcctgcagctgatcaacggcaagaacgagagcgcccacatcagcgacgccgtgggcgtggtggcccaggccgtgcacgagctgctggagaaggagaacatcaccgacccccccagaggctgcgtgggcaacaccaacatctggaagaccggccccctgttcaagagagtgctgatgagcagcaagtacgccgacggcgtgaccggcagagtggagttcaacgaggacggcgacagaaagttcgccaactacagcatcatgaacctgcagaacagaaagctggtgcaggtgggcatctacaacggcacccacgtgatccccaacgacagaaagatcatctggcccggcggcgagaccgagaagcccagaggctaccagatgagcaccagactgaagatcgtgaccatccaccaggagcccttcgtgtacgtgaagcccaccctgagcgacggcacctgcaaggaggagttcaccgtgaacggcgaccccgtgaagaaggtgatctgcaccggccccaacgacaccagccccggcagccccagacacaccgtgccccagtgctgctacggcttctgcatcgacctgctgatcaagctggccagaaccatgaacttcacctacgaggtgcacctggtggccgacggcaagttcggcacccaggagagagtgaacaacagcaacaagaaggagtggaacggcatgatgggcgagctgctgagcggccaggccgacatgatcgtggcccccctgaccatcaacaacgagagagcccagtacatcgagttcagcaagcccttcaagtaccagggcctgaccatcctggtgaagaaggagatccccagaagcaccctggacagcttcatgcagcccttccagagcaccctgtggctgctggtgggcctgagcgtgcacgtggtggccgtgatgctgtacctgctggacagattcagccccttcggcagattcaaggtgaacagcgaggaggaggaggaggacgccctgaccctgagcagcgccatgtggttcagctggggcgtgctgctgaacagcggcatcggcgagggcgcccccagaagcttcagcgccagaatcctgggcatggtgtgggccggcttcgccatgatcatcgtggccagctacaccgccaacctggccgccttcctggtgctggacagacccgaggagagaatcaccggcatcaacgaccccagactgagaaaccccagcgacaagttcatctacgccaccgtgaagcagagcagcgtggacatctacttcagaagacaggtggagctgagcaccatgtacagacacatggagaagcacaactacgagagcgccgccgaggccatccaggccgtgagagacaacaagctgcacgccttcatctgggacagcgccgtgctggagttcgaggccagccagaagtgcgacctggtgaccaccggcgagctgttcttcagaagcggcttcggcatcggcatgagaaaggacagcccctggaagcagaacgtgagcctgagcatcctgaagagccacgagaacggcttcatggaggacctggacaagacctgggtgagataccaggagtgcgacagcagaagcaacgcccccgccaccctgaccttcgagaacatggccggcgtgttcatgctggtggccggcggcatcgtggccggcatcttcctgatcttcatcgagatcgcctacaagagacacaaggacgccagaagaaagcagatgcagctggccttcgccgccgtgaacgtgtggagaaagaacctgcaggacagaaagagcggcagagccgagcccgaccccaagaagaaggccaccttcagagccatcaccagcaccctggccagcagcttcaagagaagaagaagcagcaaggacacccagtaccaccccaccgacatcaccggccccctgaacctgagcgaccccagcgtgagcaccgtggtgtag

SEQ ID NO: 72250 - protein, 906 aa, Artificial Sequence
  derived and/or modified sequence
MSTMRLLTLALLFSCSVARAACDPKIVNIGAVLSTRKHEQMFREAVNQANKRHGSWKIQLNATSVTHKPNAIQMALSVCEDLISSQVYAILVSHPPTPNDHFTPTPVSYTAGFYRIPVLGLTTRMSIYSDKSIHLSFLRTVPPYSHQSSVWFEMMRVYSWNHIILLVSDDHEGRAAQKRLETLLEERESKSKKRNYENLDQLSYDNKRGPKAEKVLQFDPGTKNVTALLMEAKELEARVIILSASEDDAATVYRAAAMLNMTGSGYVWLVGEREISGNALRYAPDGILGLQLINGKNESAHISDAVGVVAQAVHELLEKENITDPPRGCVGNTNIWKTGPLFKRVLMSSKYADGVTGRVEFNEDGDRKFANYSIMNLQNRKLVQVGIYNGTHVIPNDRKIIWPGGETEKPRGYQMSTRLKIVTIHQEPFVYVKPTLSDGTCKEEFTVNGDPVKKVICTGPNDTSPGSPRHTVPQCCYGFCIDLLIKLARTMNFTYEVHLVADGKFGTQERVNNSNKKEWNGMMGELLSGQADMIVAPLTINNERAQYIEFSKPFKYQGLTILVKKEIPRSTLDSFMQPFQSTLWLLVGLSVHVVAVMLYLLDRFSPFGRFKVNSEEEEEDALTLSSAMWFSWGVLLNSGIGEGAPRSFSARILGMVWAGFAMIIVASYTANLAAFLVLDRPEERITGINDPRLRNPSDKFIYATVKQSSVDIYFRRQVELSTMYRHMEKHNYESAAEAIQAVRDNKLHAFIWDSAVLEFEASQKCDLVTTGELFFRSGFGIGMRKDSPWKQNVSLSILKSHENGFMEDLDKTWVRYQECDSRSNAPATLTFENMAGVFMLVAGGIVAGIFLIFIEIAYKRHKDARRKQMQLAFAAVNVWRKNLQQYHPTDITGPLNLSDPSVSTVV

SEQ ID NO: 72251 - DNA, 2721 bp, Artificial Sequence
  derived and/or modified sequence
atgagtaccatgcgactgctaacacttgccctcctgttttcatgctccgtggcaagggcagcttgtgatcccaagattgtgaatatcggcgctgtgctctctacccggaagcacgagcagatgtttcgggaagccgtcaatcaggcgaacaaaaggcacggcagctggaagatccagcttaacgctacgagcgtcacacataagcccaacgctatccaaatggccctttccgtctgcgaagacctgatcagcagccaggtgtatgcaatcctcgtctcccatccacctactcctaacgaccacttcacacctacaccggtgagttacactgccgggttttatcgcatacccgtcctgggtcttacaacccgcatgtccatctactccgacaaaagcatacatctctcatttctgagaactgtccccccatatagccatcagtcaagcgtctggttcgaaatgatgagagtatacagttggaatcacattatcctccttgtgtctgacgaccatgaaggtcgcgcggcacagaagcgactagagacactgctcgaggagcgggaatccaaaagcaagaaaaggaactatgaaaacctcgatcagctgtcctatgacaataagaggggacctaaagcagagaaagtgctgcagtttgaccccgggactaagaatgtcacggcattactgatggaggccaaagagctggaagcaagagttataattctaagcgcgtcagaggacgacgctgctaccgtgtatagagcggctgcaatgttgaatatgactggttccgggtacgtttggctggtgggggaacgcgagatctccggaaacgctctgagatatgccccggatggcattctgggattgcagctgatcaacggaaaaaacgagagtgcccatatatcagacgccgtaggcgtggtggcccaggccgtgcatgaattactggaaaaagaaaacattactgatcctccaaggggatgtgtgggcaatacaaatatttggaagactggacctctcttcaaacgtgtcttgatgtcctccaagtacgccgacggcgtgactggccgcgtcgagtttaacgaggatggagatagaaagtttgctaactactccattatgaatctgcagaataggaagttagtccaggtgggtatttacaacggaacccacgttatccccaacgacaggaagattatttggcccgggggtgagaccgagaaaccaaggggatatcagatgagtactcgattgaagatcgtgaccattcaccaagagccctttgtgtatgtcaaacctacactgtctgacggtacttgtaaagaggagtttaccgtgaacggcgatccggtgaagaaggtcatctgtactggtcccaacgatacatctcccggcagcccgcggcatacagttcctcagtgctgctacggattctgcatagacttgctcattaagctggctcggactatgaacttcacctatgaagttcatctcgtggccgatggaaagttcggcacacaggagcgggtgaataacagtaacaagaaggagtggaatggcatgatgggagagctgctgtcaggccaggctgatatgatagtggctcctctgacaattaacaatgagcgggcacagtatattgagttctctaaacctttcaaataccagggcttgaccattctcgtgaaaaaggagattcccagaagtaccttggattcctttatgcagcctttccaatctaccttgtggttgctagtcgggctgtctgtccacgtggtcgctgtgatgctctacttgctcgatcgctttagtccattcggccgctttaaagtcaacagtgaagaagaagaggaagatgcgctgactctcagcagcgccatgtggttcagctggggagtgctgctcaattctggcattggcgagggcgctcctaggagttttagcgcgaggattctgggcatggtctgggccgggtttgccatgataatcgttgcatcttataccgcaaatctggccgcctttctcgttctggaccgccctgaagaaaggattaccggaattaatgacccaagactgagaaacccttccgataaattcatttacgccactgtcaagcagagcagcgtcgatatttatttcagacggcaggtggagctcagcacaatgtatagacacatggaaaaacataattacgagagcgcagcagaggcgattcaggccgtcagagataacaagctccacgctttcatttgggatagtgccgtcttggaatttgaggccagtcagaagtgtgatctcgtgacaaccggagaactcttttttcggtctgggttcgggatcggcatgagaaaggactccccctggaaacagaacgtgtctctctccatcctgaaatcccacgagaatgggttcatggaggacctggacaagacttgggtacgataccaggagtgcgactccaggtcaaacgcccccgcgaccttgacgttcgagaacatggcaggagtgtttatgttggtggcaggcggcatcgttgccgggattttcctcatttttatagagatcgcctacaagcgacacaaagatgccaggagaaagcagatgcagttggcttttgcagctgtgaacgtttggcggaagaatctgcagcagtaccaccccacagatataacaggcccactgaacctgagcgacccgagcgtaagcactgtggtgtag

SEQ ID NO: 72252 - DNA, 3640 bp, Artificial Sequence
  derived and/or modified sequence
gagcccatgagcaccatgcgcctgctgacgctcgccctgctgttctcctgctccgtcgcccgtgccgcgtgcgaccccaagatcgtcaacattggcgcggtgctgagcacgcggaagcacgagcagatgttccgcgaggccgtgaaccaggccaacaagcggcacggctcctggaagattcagctcaatgccacctccgtcacgcacaagcccaacgccatccagatggctctgtcggtgtgcgaggacctcatctccagccaggtctacgccatcctagttagccatccacctacccccaacgaccacttcactcccacccctgtctcctacacagccggcttctaccgcatacccgtgctggggctgaccacccgcatgtccatctactcggacaagagcatccacctgagcttcctgcgcaccgtgccgccctactcccaccagtccagcgtgtggtttgagatgatgcgtgtctacagctggaaccacatcatcctgctggtcagcgacgaccacgagggccgggcggctcagaaacgcctggagacgctgctggaggagcgtgagtccaagagtaaaaaaaggaactatgaaaacctcgaccaactgtcctatgacaacaagcgcggacccaaggcagagaaggtgctgcagtttgacccagggaccaagaacgtgacggccctgctgatggaggcgaaagagctggaggcccgggtcatcatcctttctgccagcgaggacgatgctgccactgtataccgcgcagccgcgatgctgaacatgacgggctccgggtacgtgtggctggtcggcgagcgcgagatctcggggaacgccctgcgctacgccccagacggcatcctcgggctgcagctcatcaacggcaagaacgagtcggcccacatcagcgacgccgtgggcgtggtggcccaggccgtgcacgagctcctcgagaaggagaacatcaccgacccgccgcggggctgcgtgggcaacaccaacatctggaagaccgggccgctcttcaagagagtgctgatgtcttccaagtatgcggatggggtgactggtcgcgtggagttcaatgaggatggggaccggaagttcgccaactacagcatcatgaacctgcagaaccgcaagctggtgcaagtgggcatctacaatggcacccacgtcatccctaatgacaggaagatcatctggccaggcggagagacagagaagcctcgagggtaccagatgtccaccagactgaagattgtgacgatccaccaggagcccttcgtgtacgtcaagcccacgctgagtgatgggacatgcaaggaggagttcacagtcaacggcgacccagtcaagaaggtgatctgcaccgggcccaacgacacgtcgccgggcagcccccgccacacggtgcctcagtgttgctacggcttttgcatcgacctgctcatcaagctggcacggaccatgaacttcacctacgaggtgcacctggtggcagatggcaagttcggcacacaggagcgggtgaacaacagcaacaagaaggagtggaatgggatgatgggcgagctgctcagcgggcaggcagacatgatcgtggcgccgctaaccataaacaacgagcgcgcgcagtacatcgagttttccaagcccttcaagtaccagggcctgactattctggtcaagaaggagattccccggagcacgctggactcgttcatgcagccgttccagagcacactgtggctgctggtggggctgtcggtgcacgtggtggccgtgatgctgtacctgctggaccgcttcagccccttcggccggttcaaggtgaacagcgaggaggaggaggaggacgcactgaccctgtcctcggccatgtggttctcctggggcgtcctgctcaactccggcatcggggaaggcgcccccagaagcttctcagcgcgcatcctgggcatggtgtgggccggctttgccatgatcatcgtggcctcctacaccgccaacctggcggccttcctggtgctggaccggccggaggagcgcatcacgggcatcaacgaccctcggctgaggaacccctcggacaagtttatctacgccacggtgaagcagagctccgtggatatctacttccggcgccaggtggagctgagcaccatgtaccggcatatggagaagcacaactacgagagtgcggcggaggccatccaggccgtgagagacaacaagctgcatgccttcatctgggactcggcggtgctggagttcgaggcctcgcagaagtgcgacctggtgacgactggagagctgtttttccgctcgggcttcggcataggcatgcgcaaagacagcccctggaagcagaacgtctccctgtccatcctcaagtcccacgagaatggcttcatggaagacctggacaagacgtgggttcggtatcaggaatgtgactcgcgcagcaacgcccctgcgacccttacttttgagaacatggccggggtcttcatgctggtagctgggggcatcgtggccgggatcttcctgattttcatcgagattgcctacaagcggcacaaggatgctcgccggaagcagatgcagctggcctttgccgccgttaacgtgtggcggaagaacctgcagcagtaccatcccactgatatcacgggcccgctcaacctctcagatccctcggtcagcaccgtggtgtgaggcccccggaggcgcccacctgcccagttagcccggccaaggacactgatgggtcctgctgctcgggaaggcctgagggaagcccacccgccccagagactgcccaccctgggcctcccgtccgtccgcccgcccaccccgctgcctggcgggcagcccctgctggaccaaggtgcggaccggagcggctgaggacggggcagagctgagtcggctgggcagggccgcagggcgctccggcagaggcagggccctggggtctctgagcagtggggagcgggggctaactggccccaggcggaggggcttggagcagagacggcagccccatccttcccgcagcaccagcctgagccacagtggggcccatggccccagctggctgggtcgcccctcctcgggcgcctgcgctcctctgcagcctgagctccaccctcccctcttcttgcggcaccgcccacccacaccccgtctgccccttgaccccacacgccggggctggccctgccctcccccacggccgtccctgacttcccagctggcagcgcctcccgccgcctcgggccgcctcctccagactcgagagggctgagcccctcctctcctcgtccggcctgcagcccagaacgggcctccccgggggtccccggacgctggctcgggactgtcttcaaccctgccctgcaccttgggcacgggagagcgccacccgcccgcccccgccctcgctccgggtgcgtgaccggcccgccaccttgtacagaaccagcactcccagggcccgagcgcgtgccttccccgtgcggcccgtgcgcagccgcgctctgcccctccgtccccagggtgcaggcgcgcaccgcccaacccccacctcccggtgtatgcagtggtgatgcctaaaggaatgtcacgc

SEQ ID NO: 72253 - DNA, 2721 bp, Artificial Sequence
  derived and/or modified sequence
atgagcaccatgaggctgctgaccctggccctgctcttcagctgcagcgtggcccgggccgcctgtgaccccaagatcgtgaacattggagctgtgctgagcaccaggaagcatgagcagatgttccgggaggccgtgaaccaggccaacaagagacatggctcctggaagatccagctgaatgccacctctgtgacccacaagcccaatgccatccagatggccctgtctgtgtgtgaggacctgatcagcagccaggtgtatgccatcctggtgagccacccccccaccccaaatgaccacttcacccccacccctgtgtcctacacagctggcttctaccgcatccctgtgctgggcctgaccaccaggatgagcatctacagcgacaagagcatccacctgtccttcctgaggacagtgcccccctacagccaccagagctctgtgtggtttgagatgatgagggtgtacagctggaaccacatcatcctgctggtgtctgatgaccacgagggccgggccgcccagaagaggctggagaccctgctggaggagcgggagagcaagagcaagaagaggaactatgagaacctggaccagctgtcctatgacaacaagaggggccccaaggccgagaaggtgctgcagtttgaccccggcaccaagaatgtgacagccctgctgatggaggccaaggagctggaggcccgggtcatcatcctgagcgcctctgaagatgatgctgccaccgtgtacagagctgctgccatgctgaacatgacaggcagcggctacgtgtggctggtgggggagcgggagatctctggaaatgccctgcgctatgccccagatggcatcctgggcctgcagctgatcaacgggaagaatgaaagtgcccacatcagtgatgctgtgggcgtggtggcccaggccgtgcatgagctgctggagaaggagaacatcacagatcctccccggggctgtgtgggcaacaccaacatctggaagacaggccccctcttcaagagggtgctgatgagcagcaaatatgcagatggagtgacaggccgggtggagttcaatgaagatggagacaggaagtttgccaactacagcatcatgaacctgcagaacaggaagctggtgcaggtgggcatctacaacggcacccacgtgatccccaatgacaggaagatcatctggccaggaggagaaacagagaagccccggggctaccagatgagcacccggctgaagatcgtgaccatccaccaggagccctttgtgtatgtgaagcccaccctgagtgatggcacctgcaaggaggagttcaccgtgaatggagaccctgtgaagaaggtgatctgcaccggccccaatgacaccagccctggcagccccaggcacacagtgccccagtgctgctacggcttctgcatcgacctgctgatcaagctggcccggaccatgaacttcacctatgaggtgcacctggtggctgatggcaagtttggcacccaggagcgggtgaacaacagcaacaagaaggagtggaatggcatgatgggagagctgctgagcggccaggccgacatgattgtggcccccctgaccatcaacaatgaaagagcccagtacatcgagttcagcaagcccttcaagtaccagggcctgaccatcctggtgaagaaggagatccccaggagcaccctggacagcttcatgcagcccttccagagcaccctgtggctgctggtgggcctgtctgtgcacgtggtggccgtgatgctgtacctgctggaccgcttcagccccttcggccgcttcaaggtgaacagcgaggaggaggaggaggatgccctgaccctgagcagcgccatgtggttctcctggggcgtgctgctgaacagcggcatcggggagggcgcccccaggagcttcagcgcccgcatcctgggcatggtgtgggccggctttgccatgatcatcgtggccagctacacagccaacctggccgccttcctggtgctggacaggcctgaggagcgcatcaccggcatcaatgacccccggctgaggaaccccagcgacaagttcatctatgccaccgtgaagcagagctctgtggacatctacttccggcggcaggtggagctgagcaccatgtaccgccacatggagaagcacaactatgagagcgctgctgaggccatccaggccgtgcgggacaacaagctgcacgccttcatctgggacagcgctgtgctggagtttgaggccagccagaagtgtgacctggtgaccaccggggagctgttcttccgcagcggctttggaattggcatgaggaaggacagcccctggaagcagaatgtgtccctgagcatcctgaagagccatgaaaatggcttcatggaggacctggacaagacctgggtgcgctaccaggagtgtgacagccgcagcaatgccccagccaccctgacctttgagaacatggccggggtcttcatgctggtggccggcggcatcgtggccggcatcttcctgatcttcatcgagatcgcctacaagaggcacaaggatgcccggaggaagcagatgcagctggcctttgctgctgtgaatgtgtggaggaagaacctgcagcagtaccaccccacagacatcaccggccccctgaacctgagtgaccccagcgtgtccacagtggtgtag

SEQ ID NO: 72254 - DNA, 2721 bp, Artificial Sequence
  derived and/or modified sequence
atgagcaccatgcggctgctgaccctggccctgctgttcagctgcagcgttgcgagagccgcctgtgatcccaaaatcgtgaacatcggggccgtgctgtctacaaggaaacacgagcagatgtttagggaggccgttaatcaggcaaacaaaagacatggcagctggaaaatccagctgaacgccaccagtgttacacacaagccaaatgccattcagatggccctaagcgtctgcgaggacttaatcagttcccaagtttacgccatactggtatctcatccccctactcctaacgaccacttcacacctactcctgtgtcttacaccgctggtttttacaggattcctgtgttaggccttacaacaagaatgagcatctattctgataagtctatacacctgtccttcctgcggacagtcccaccgtattcccaccaaagttccgtttggtttgagatgatgcgagtgtatagctggaatcacattatcctccttgtttccgacgaccacgagggaagggccgcgcagaaacggctggagactcttctcgaggagagggagtccaagtctaagaagcggaactatgaaaacctcgaccagttgagttatgataataagagaggccccaaggcagaaaaggtcctccaattcgatccaggcaccaaaaatgtcacagcgctactgatggaggcaaaagagctggaggcacgtgttatcatcctgtcggcttcggaagacgacgccgccacagtctatcgtgccgcggctatgcttaacatgacagggtcagggtacgtttggctcgtaggcgaacgggaaatttcaggcaatgccttgcgttacgctcctgatggcatactcgggctgcagttgataaacggaaagaatgaatccgcgcacatctccgatgctgtgggtgtggtagcccaggctgtgcacgagcttctggagaaggagaatatcaccgatccaccaaggggttgtgtcgggaataccaacatttggaagacaggtccactcttcaagcgagtcttgatgagcagtaagtatgccgatggggtcaccggtagggtggaattcaacgaggatggcgatcgaaagttcgcaaactacagcattatgaatttacagaacaggaagctagtccaggtgggcatctacaacggaacgcacgtgattcccaacgataggaaaataatttggccggggggggagactgagaagccaaggggttatcaaatgagtacacggctgaagatcgtgaccatacatcaggagcccttcgtgtatgtgaaaccgaccctcagtgacggcacatgtaaggaagagtttaccgtgaacggtgatccagtgaaaaaggtgatctgtaccggccctaatgataccagcccaggctctccgcgacacacagtgccccagtgctgttatgggttttgcattgatcttttaattaagctggctagaaccatgaatttcacatatgaggttcatctggtggctgatggcaagttcggcacacaggaaagggtgaacaactctaacaaaaaagaatggaatgggatgatgggtgaacttctgagcgggcaagcagacatgattgttgcaccactgactattaataacgaacgggcacaatacatagaattttccaagccttttaaatatcagggcctgacgatcctggtgaagaaagagattccacgctcaacactggatagtttcatgcagccctttcaaagcacactatggctgctcgtcgggttgtcagtgcacgtagtcgccgtgatgttataccttcttgacagatttagcccttttgggagatttaaggttaattccgaggaggaagaggaagacgctctcacattgtcctcagccatgtggtttagctggggcgtgctcttgaactcaggtattggcgagggggcacctcgaagcttctcagcccgcattctggggatggtttgggcaggcttcgcgatgattatcgtcgctagctatacggctaatcttgccgcattcctggtactcgaccgcccggaagaaaggattacaggaattaatgacccacggttacgcaatccatcagataaatttatctacgcaacagtgaagcagtcctcagtagatatatattttcgtcgacaggtggagctgtccaccatgtatagacacatggaaaaacataactacgaaagtgccgccgaggcgatccaagccgttcgggacaacaagcttcacgcgttcatttgggattcggcagtgttggaatttgaagccagccaaaagtgcgaccttgtgactactggggagctgttttttcgctccgggtttggcatcggtatgcgaaaagattcgccgtggaaacagaatgtgtcattgtccattctgaaatctcatgaaaatgggttcatggaagatctagacaagacctgggtacgttatcaagaatgcgatagccgatccaacgcccctgctacactcaccttcgaaaacatggctggagtgtttatgctcgtggccggcggcatagtggccgggattttccttatattcatcgaaatcgcctataagagacacaaagacgcacggcgcaagcaaatgcagctcgcctttgcagccgtaaatgtatggcgaaagaacttacaacagtatcaccccacagatattactgggcctctcaatctgtccgatccaagcgtttctaccgtcgtatag

SEQ ID NO: 72255 - DNA, 2721 bp, Artificial Sequence
  derived and/or modified sequence
atgtccaccatgcgactgttaacgctcgctttgctcttttcctgctctgttgccagggcagcctgtgacccaaagatcgttaatatcggggctgtcctgtccactagaaaacacgagcagatgttccgcgaagcagtaaaccaggcgaataaacggcacggctcctggaagatccagttgaacgccacctctgtgacccacaagcccaatgcaatccagatggcactttccgtgtgtgaggatctgatttcatcacaggtttacgctatcctggtttcacacccacccactccaaatgatcacttcacccccacacctgtaagctacaccgcgggtttctacagaattcctgtgctgggactgacaacacgcatgagtatttactctgacaagagtatacatctgtctttcttgagaaccgtgcctccatattctcatcaatcctcagtttggttcgaaatgatgcgcgtgtatagctggaaccacatcatcctgcttgttagcgatgaccacgaagggagggccgcacagaagaggcttgagaccctattggaggagagggagagcaaaagcaaaaagcgtaactacgagaatttagatcagctctcatatgacaataaacgcggacccaaggcagaaaaggtactgcagtttgaccccggaacaaagaacgtaaccgccctgttgatggaagccaaggagctggaagccagagtcatcatactctcggcctccgaggatgacgcggctaccgtgtaccgcgcagcagcgatgctgaacatgactggctccggctacgtgtggctggtgggggagagggaaatctccggaaatgccctcagatacgccccagatgggattctcggacttcaattgatcaacggaaaaaacgagagcgcccacatctcagatgccgtgggagttgtggcccaggccgtgcacgagctactggaaaaggaaaacataaccgaccccccacggggttgcgtgggcaacacaaacatttggaaaaccggacccctgttcaaacgggttcttatgagctctaagtatgcagacggagtcactgggcgtgtggagttcaatgaggatggagaccggaaatttgcaaactactctatcatgaatcttcagaatagaaaactggtgcaggtaggcatctacaacgggactcacgtcatcccaaacgatagaaaaataatttggcccggaggcgaaaccgagaagccccgtggatatcaaatgagtacccggctgaagatcgttaccatccatcaggaacctttcgtctacgtcaaacccaccctaagtgacgggacctgcaaggaggaatttaccgtgaatggtgacccagtgaaaaaagtgatttgcacgggaccaaacgatactagtcccggaagtcccaggcataccgttccacagtgttgttatggattttgtattgaccttcttatcaagctagccaggactatgaacttcacatatgaagtgcatctggtggctgacgggaaatttggaacacaggaacgcgttaacaactccaacaaaaaggaatggaacggaatgatgggggagctcctcagcggtcaagccgatatgattgtggcaccactgaccattaacaacgagcgggctcagtacatcgagttcagtaaaccattcaagtaccagggcttgacaatactggtcaagaaggagattcctagatctactcttgatagcttcatgcaaccctttcagtcgactctgtggctgctcgtgggacttagcgtgcacgtggtagctgttatgctgtatctgcttgaccggttttccccattcggccgattcaaggtaaacagtgaggaagaagaggaggatgccctaacactgtcgagcgctatgtggttttcttggggcgttctgctgaacagcggcataggcgagggagcccctaggtcattctctgctcggattttgggaatggtctgggcaggattcgctatgatcatagtggcatcctatacagccaatctggcggcattcctggtactggatcggccagaagagcgaatcaccggaataaacgatccccgtctccgtaacccctcagacaagttcatttacgcgacagtgaagcagtccagtgttgatatttactttcgccgtcaggtcgagctgagtacaatgtatcgacatatggaaaagcacaattatgagagtgctgccgaggctatccaggccgttcgggataataagcttcacgcatttatctgggattcagcggtcctggagttcgaggcttctcaaaaatgtgatctggtgacaactggggaattattctttaggagcggtttcggaattggaatgagaaaggattcgccttggaaacagaacgtatccctgtccatcttgaagagtcacgagaacggcttcatggaagacttggacaaaacgtgggtgaggtaccaggaatgtgattctagaagcaatgctcccgctacgctcacgtttgagaatatggccggagtcttcatgctggttgctggcggaatcgtggctggcatcttcctgatttttatcgagatcgcctacaagaggcacaaggatgcaaggcgcaaacagatgcagctggctttcgcagctgtgaacgtgtggagaaagaacctacagcagtaccatccgactgatattacgggccctctgaatctctctgaccctagcgtgtcgactgtggtgtag

SEQ ID NO: 72256 - DNA, 2721 bp, Artificial Sequence
  derived and/or modified sequence
atgagcaccatgagactgctgaccctggccctgctgttcagctgcagcgtggccagagccgcctgcgaccccaagatcgtgaacatcggcgccgtgctgagcaccagaaagcacgagcagatgttcagagaggccgtgaaccaggccaacaagagacacggcagctggaagatccagctgaacgccaccagcgtgacccacaagcccaacgccatccagatggccctgagcgtgtgcgaggacctgatcagcagccaggtgtacgccatcctggtgagccacccccccacccccaacgaccacttcacccccacccccgtgagctacaccgccggcttctacagaatccccgtgctgggcctgaccaccagaatgagcatctacagcgacaagagcatccacctgagcttcctgagaaccgtgcccccctacagccaccagagcagcgtgtggttcgagatgatgagagtgtacagctggaaccacatcatcctgctggtgagcgacgaccacgagggcagagccgcccagaagagactggagaccctgctggaggagagagagagcaagagcaagaagagaaactacgagaacctggaccagctgagctacgacaacaagagaggccccaaggccgagaaggtgctgcagttcgaccccggcaccaagaacgtgaccgccctgctgatggaggccaaggagctggaggccagagtgatcatcctgagcgccagcgaggacgacgccgccaccgtgtacagagccgccgccatgctgaacatgaccggcagcggctacgtgtggctggtgggcgagagagagatcagcggcaacgccctgagatacgcccccgacggcatcctgggcctgcagctgatcaacggcaagaacgagagcgcccacatcagcgacgccgtgggcgtggtggcccaggccgtgcacgagctgctggagaaggagaacatcaccgacccccccagaggctgcgtgggcaacaccaacatctggaagaccggccccctgttcaagagagtgctgatgagcagcaagtacgccgacggcgtgaccggcagagtggagttcaacgaggacggcgacagaaagttcgccaactacagcatcatgaacctgcagaacagaaagctggtgcaggtgggcatctacaacggcacccacgtgatccccaacgacagaaagatcatctggcccggcggcgagaccgagaagcccagaggctaccagatgagcaccagactgaagatcgtgaccatccaccaggagcccttcgtgtacgtgaagcccaccctgagcgacggcacctgcaaggaggagttcaccgtgaacggcgaccccgtgaagaaggtgatctgcaccggccccaacgacaccagccccggcagccccagacacaccgtgccccagtgctgctacggcttctgcatcgacctgctgatcaagctggccagaaccatgaacttcacctacgaggtgcacctggtggccgacggcaagttcggcacccaggagagagtgaacaacagcaacaagaaggagtggaacggcatgatgggcgagctgctgagcggccaggccgacatgatcgtggcccccctgaccatcaacaacgagagagcccagtacatcgagttcagcaagcccttcaagtaccagggcctgaccatcctggtgaagaaggagatccccagaagcaccctggacagcttcatgcagcccttccagagcaccctgtggctgctggtgggcctgagcgtgcacgtggtggccgtgatgctgtacctgctggacagattcagccccttcggcagattcaaggtgaacagcgaggaggaggaggaggacgccctgaccctgagcagcgccatgtggttcagctggggcgtgctgctgaacagcggcatcggcgagggcgcccccagaagcttcagcgccagaatcctgggcatggtgtgggccggcttcgccatgatcatcgtggccagctacaccgccaacctggccgccttcctggtgctggacagacccgaggagagaatcaccggcatcaacgaccccagactgagaaaccccagcgacaagttcatctacgccaccgtgaagcagagcagcgtggacatctacttcagaagacaggtggagctgagcaccatgtacagacacatggagaagcacaactacgagagcgccgccgaggccatccaggccgtgagagacaacaagctgcacgccttcatctgggacagcgccgtgctggagttcgaggccagccagaagtgcgacctggtgaccaccggcgagctgttcttcagaagcggcttcggcatcggcatgagaaaggacagcccctggaagcagaacgtgagcctgagcatcctgaagagccacgagaacggcttcatggaggacctggacaagacctgggtgagataccaggagtgcgacagcagaagcaacgcccccgccaccctgaccttcgagaacatggccggcgtgttcatgctggtggccggcggcatcgtggccggcatcttcctgatcttcatcgagatcgcctacaagagacacaaggacgccagaagaaagcagatgcagctggccttcgccgccgtgaacgtgtggagaaagaacctgcagcagtaccaccccaccgacatcaccggccccctgaacctgagcgaccccagcgtgagcaccgtggtgtag

SEQ ID NO: 72257 - protein, 243 aa, Artificial Sequence
  derived and/or modified sequence
MLGFITRPPHRFLSLLCPGLRIPQLSVLCAQPRPRAMAISSSSCELPLVAVCQVTSTPDKQQNFKTCAELVREAARLGACLAFLPEAFDFIARDPAETLHLSEPLGGKLLEEYTQLARECGLWLSLGGFHERGQDWEQTQKIYNCHVLLNSKGAVVATYRKTHLCDVEIPGQGPMCESNSTMPGPSLESPVSTPAGKIGLAVCYDMRFPELSLALAQAGAEILTYPSAFGSITGPAHWEPVSS

SEQ ID NO: 72258 - DNA, 732 bp, Artificial Sequence
  derived and/or modified sequence
atgttgggatttattactaggcccccacaccggtttctgtctttgctttgtcccggcctccgcatcccacagctgagcgtcctatgcgcgcaacctcgtccaagggcaatggctatttcctcatcttcgtgcgaactacccctcgtcgctgtttgccaagtaacatcgacccctgacaagcagcagaattttaaaacctgtgccgagctggtccgggaagccgctcgtctgggtgcatgcttggccttcctgccggaggcgttcgactttattgcacgcgatccagccgagaccttgcatctgagcgagccactggggggaaagctgctggaggagtacacccagcttgcccgcgaatgcggcttatggctttctttgggcggattccatgagcggggtcaagactgggagcagacgcagaaaatttacaactgccacgtgcttctgaacagcaagggtgctgtggtggccacctatagaaagacccatctgtgcgatgtggagatccccggccagggtcccatgtgtgaaagcaacagcactatgcccggcccctccttagaaagtccggtaagtacacctgctggtaaaattggattggcggtatgttatgacatgcgttttccagagctctccctggctctggcccaagcaggggcggaaatccttacatatccaagcgccttcgggtcaattaccggaccggcacactgggaacctgtgtcatcatag

SEQ ID NO: 72259 - DNA, 732 bp, Artificial Sequence
  derived and/or modified sequence
atgctgggcttcatcacccggcccccccaccgcttcctgagcctgctgtgccccggcctgcgcatcccccagctgtctgtgctgtgtgcccagccccggccccgggccatggccatcagcagcagcagctgtgagctgcccctggtggccgtgtgccaggtgaccagcaccccagacaagcagcagaacttcaagacctgtgccgagctggtgcgggaggccgcccggctgggcgcctgcctggccttcctgcctgaggcctttgacttcatcgcccgggaccctgctgagaccctgcacctgtctgagcccctgggcggcaagctgctggaggagtacacccagctggccagagaatgtggcctgtggctgagcctgggcggcttccacgagcggggccaggactgggagcagacccagaagatctacaactgccacgtgctgctgaacagcaaaggagctgtggtggccacctacaggaagacccacctgtgtgatgtggagatccctggccagggccccatgtgtgagagcaacagcaccatgcctggccccagcctggagagccctgtgtccaccccagctgggaagattggcctggccgtgtgctatgacatgagatttcctgagctgagcctggccctggcccaggccggggctgagatcctgacctaccccagcgccttcggcagcatcactggacctgcccactgggagcctgtgagcagctag

SEQ ID NO: 72260 - DNA, 732 bp, Artificial Sequence
  derived and/or modified sequence
atgctgggcttcatcacccggcccccccaccggttcctgagcctgctatgtcccggacttcggattccacagcttagtgtgctgtgcgcccagcccaggccacgggccatggctatctcttcttccagttgtgaattacccctagttgcggtctgccaggtaactagcacaccagacaagcagcaaaattttaagacctgtgcagagctggtgagagaggcagctcggctaggggcgtgcctcgcatttctgccggaagcatttgatttcatcgcaagagacccagcggagacgcttcatctaagcgaacctttggggggcaaactcctggaagagtacactcagctcgcccgcgagtgtggcttgtggctctcattgggtggcttccacgagagggggcaggactgggagcagacacaaaaaatttacaactgtcacgtgctgctgaatagcaaaggagctgtcgtggccacctaccggaagacgcatctctgtgatgtcgaaatccccggccagggacccatgtgtgagtccaactcaaccatgccaggacccagcttggaaagcccagtgtccaccccagctgggaaaatcggcttggcggtgtgttatgatatgaggttccctgaactgagtttagcactggcacaggcaggggctgagattcttacctaccccagtgcattcggatctattacgggccccgctcactgggagcccgttagcagctag

SEQ ID NO: 72261 - DNA, 2081 bp, Artificial Sequence
  derived and/or modified sequence
cttctggctccagaccgccctccggatcggaccctgcgaatggttttggctatatcttcatgctgggcttcatcaccaggcctcctcacagattcctgtcccttctgtgtcctggactccggatacctcaactctcagtactttgtgctcagcccaggcccagagccatggctatctcctcttcctcctgcgaactgcccctggtggctgtgtgccaggtaacatcgacgccagacaagcaacagaactttaaaacatgtgctgagctggttcgagaggctgccagactgggtgcctgcctggctttcctgcctgaggcatttgacttcattgcacgggaccctgcagagacgctacacctgtctgaaccactgggtgggaaacttttggaagaatacacccagcttgccagggaatgtggactctggctgtccttgggtggtttccatgagcgtggccaagactgggagcagactcagaaaatctacaattgtcacgtgctgctgaacagcaaaggggcagtagtggccacttacaggaagacacatctgtgtgacgtagagattccagggcaggggcctatgtgtgaaagcaactctaccatgcctgggcccagtcttgagtcacctgtcagcacaccagcaggcaagattggtctagctgtctgctatgacatgcggttccctgaactctctctggcattggctcaagctggagcagagatacttacctatccttcagcttttggatccattacaggcccagcccactgggagcccgtctcctcttgagggtgacgtagggcagcaggtcgtggcgagtgatgatgcgcagcagctgcagcacctggcgaaagttactttcatcacagcggccctggcgctccagtgccaataagaagtcacgtccatttcggatgagtccacgctcgtggtcatcaatgacatcaacaaagaggaaagaaagcacgcgcacatctctgtgtgtcagatgagtgcccacgatgtcaaacatgcggtgcaggctgtacagcccatgttcctgctcaccatgctcttctggccacacctggcttgcccgccgctttaggcccgccatgctgggggctcaggtacgcaatgctttccagaatccctgctcagcagctgcaatccccaccgtactgaaagggcagggaaagaaccgatgagacactcaagggcaggaactagtctcatgcattcccatattcccagttgctaacaatgcctggcacagtatagtgctttatacatgtttattaaatttttgaagtgtttgtttaaaaataaacactggccaggcacaggggctcacacctgtaatcccagcattttgggaggccaaggcaggaggatcacttgagcccaggcgtttaagaccagcctgggcaacatagggagacccgtttctacaaaaaaagaaaaaattagctgggcttggtggtacacgcctgtagtcccagctgcacaggaggctgaggtgggaggaaggcttgaggccaggagttcaagatcagcctggtcaacatagcaagaccccatctctacaaaaaagaaaaaaattagcaaggcatggtggcatgtgcctgtagtccctgctactcaggaggctgaggcaggaggatcacttgagcccaggagttcaaggctgcagtgagccataatcctgcactgtagcctgggtgacagagtgagtcccccatctcggaaaaaaaagaactagtttaaattctgactgtatcactgaaaggctgtgtagctgtgtgaccgtaagcaagtcacttaactccagattctcagtgctgtcatctataaacagggatgaatgaatatacacctcagagttgttaagaatccaatgagaaaatcacgggtaacccttatataaatggttgtgaaacatttcaaagatacaagcatccttggcctttgcagcccagaatcatccctccacatttttcctacaatccaaccacatcaagaaatgataactgctcagaaagtttatcaatatttaccaaaactcatggatttaaaataaacattaagtttctacaataa

SEQ ID NO: 72262 - DNA, 732 bp, Artificial Sequence
  derived and/or modified sequence
atgctcgggttcataacacgaccccctcatagattcctgagtttactctgtccaggcctcagaataccgcaactatccgtgctgtgtgcacagcccaggcctagagccatggcgatctcctccagctcctgcgagttgcccctcgtggctgtgtgccaagtcacttccacccctgacaaacagcagaacttcaagacctgcgcagagctggttcgcgaagccgctcggcttggagcgtgcctggcctttttgcccgaagcattcgactttattgctcgagatccagccgagactttgcatttgtccgaaccactgggaggaaaactacttgaagaatacacccaactagctcgggagtgcggactctggctgtccctaggaggtttccacgaaagggggcaggattgggaacaaacccagaagatttacaattgccacgttttactaaactcaaagggtgctgtcgtggctacttatcgaaagacacatctctgtgacgtcgagattccaggacagggaccaatgtgtgaatccaattctactatgccgggtccatcactcgagtccccagtgtcaactccagctggtaagatcggcctggctgtatgttacgacatgcggttccctgagctcagtttagcactggcccaggccggagctgagatcctgacctatccctccgctttcggctccataacgggaccagcccactgggaaccagtatcttcttag

SEQ ID NO: 72263 - DNA, 732 bp, Artificial Sequence
  derived and/or modified sequence
atgctgggcttcatcaccagacccccccacagattcctgagcctgctgtgccccggcctgagaatcccccagctgagcgtgctgtgcgcccagcccagacccagagccatggccatcagcagcagcagctgcgagctgcccctggtggccgtgtgccaggtgaccagcacccccgacaagcagcagaacttcaagacctgcgccgagctggtgagagaggccgccagactgggcgcctgcctggccttcctgcccgaggccttcgacttcatcgccagagaccccgccgagaccctgcacctgagcgagcccctgggcggcaagctgctggaggagtacacccagctggccagagagtgcggcctgtggctgagcctgggcggcttccacgagagaggccaggactgggagcagacccagaagatctacaactgccacgtgctgctgaacagcaagggcgccgtggtggccacctacagaaagacccacctgtgcgacgtggagatccccggccagggccccatgtgcgagagcaacagcaccatgcccggccccagcctggagagccccgtgagcacccccgccggcaagatcggcctggccgtgtgctacgacatgagattccccgagctgagcctggccctggcccaggccggcgccgagatcctgacctaccccagcgccttcggcagcatcaccggccccgcccactgggagcccgtgagcagctag

SEQ ID NO: 72264 - protein, 312 aa, Artificial Sequence
  derived and/or modified sequence
MTFGLRKRLSEERGFSLMPRAMAISSSSCELPLVAVCQVTSTPDKQQNFKTCAELVREAARLGACLAFLPEAFDFIARDPAETLHLSEPLGGKLLEEYTQLARECGLWLSLGGFHERGQDWEQTQKIYNCHVLLNSKGAVVATYRKTHLCDVEIPGQGPMCESNSTMPGPSLESPVSTPAGKIGLAVCYDMRFPELSLALAQAGAEILTYPSAFGSITGPAHWEVLLRARAIETQCYVVAAAQCGRHHEKRASYGHSMVVDPWGTVVARCSEGPGLCLARIDLNYLRQLRRHLPVFQHRRPDLYGNLGHPLS

SEQ ID NO: 72265 - protein, 291 aa, Artificial Sequence
  derived and/or modified sequence
MAISSSSCELPLVAVCQVTSTPDKQQNFKTCAELVREAARLGACLAFLPEAFDFIARDPAETLHLSEPLGGKLLEEYTQLARECGLWLSLGGFHERGQDWEQTQKIYNCHVLLNSKGAVVATYRKTHLCDVEIPGQGPMCESNSTMPGPSLESPVSTPAGKIGLAVCYDMRFPELSLALAQAGAEILTYPSAFGSITGPAHWEVLLRARAIETQCYVVAAAQCGRHHEKRASYGHSMVVDPWGTVVARCSEGPGLCLARIDLNYLRQLRRHLPVFQHRRPDLYGNLGHPLS

SEQ ID NO: 72266 - DNA, 939 bp, Artificial Sequence
  derived and/or modified sequence
atgacctttgggctgcgcaagcggttgtctgaagagagaggattttctctcatgcctcgagctatggctatcagttcctcaagctgtgagctccctttggttgcagtgtgtcaggtgactagtacaccagacaaacagcagaacttcaagacctgtgcagagctcgtgcgcgaagccgcacgcttgggtgcctgtttggccttcctccctgaagcgttcgacttcatcgcccgcgatcccgctgaaacccttcacctatctgaacctctggggggaaagctgttggaggagtacacccagctggcacgagagtgcggactctggctgagtctcggtggtttccatgaacggggacaggactgggagcaaactcagaagatttacaattgccatgtcctcctgaatagcaagggggccgtcgttgccacctatcgtaaaacacatctgtgcgacgtggagatccctggacaaggacccatgtgcgagtccaactccacaatgccagggccttctctcgaaagcccagtatcgacaccggcagggaaaatcggactagccgtgtgttacgacatgagattcccggagttgtccctcgcacttgctcaggccggcgccgaaattctcacttacccatccgcttttggcagtatcaccggacctgcccactgggaggtcctgctgagagcaagagctattgagactcagtgttacgttgtagccgccgcccagtgcggacggcatcatgaaaagagagcgtcatatggccatagtatggttgtggatccttggggcacagtggttgctcggtgctcagaaggccccggcctttgcctcgctcgaatagacttaaattacctccgccagctgcgccggcacctacctgtatttcaacataggcgaccagatttgtacgggaacctcggccacccccttagctag

SEQ ID NO: 72267 - DNA, 939 bp, Artificial Sequence
  derived and/or modified sequence
atgaccttcggcctgaggaagaggctgtctgaggagcggggcttcagcctgatgccccgggccatggccatcagcagcagcagctgtgagctgcccctggtggccgtgtgccaggtgaccagcaccccagacaagcagcagaacttcaagacctgtgccgagctggtgcgggaggccgcccggctgggcgcctgcctggccttcctgcctgaggcctttgacttcatcgcccgggaccctgctgagaccctgcacctgtctgagcccctgggcggcaagctgctggaggagtacacccagctggcccgggagtgtggcctgtggctgagcctgggcggcttccacgagcggggccaggactgggagcagacccagaagatctacaactgccacgtgctgctgaacagcaaaggagctgtggtggccacctacaggaagacccacctgtgtgatgtggagatccctggccagggccccatgtgtgagagcaacagcaccatgcctggccccagcctggagagccctgtgtccaccccagctgggaagattggcctggccgtgtgctatgacatgagatttcctgagctgagcctggccctggcccaggccggggctgagatcctgacctaccccagcgccttcggcagcatcaccggccctgcccactgggaggtgctgctgcgggcccgggccatcgagacccagtgctacgtggtggccgccgcccagtgtggccgccaccacgagaagagggccagctatggccacagcatggtggtggacccctggggcaccgtggtggcccgctgcagcgagggccctggcctgtgcctggccagaattgacctgaactacctgcggcagctgcggcggcacctgcccgtcttccagcacagaagaccagacctgtatggcaacctgggccaccccctgtcctag

SEQ ID NO: 72268 - DNA, 939 bp, Artificial Sequence
  derived and/or modified sequence
atgaccttcggcctgcggaagcggctgagcgaggagcggggcttctccctcatgcctcgggctatggcaatatcaagctctagctgcgagctcccactggtcgctgtgtgtcaggtgacgtccaccccagacaagcaacagaacttcaaaacttgtgccgagctggtgagggaagccgcccggctgggcgcatgtctggccttcctgcctgaggcctttgatttcatcgcacgcgaccccgccgaaacactgcacctttccgagccattaggcggcaagctgctggaggagtacacgcagttagcaagagaatgtgggctgtggctctccctgggaggcttccatgagagaggccaggattgggagcaaactcaaaagatatacaactgccatgtactgctcaacagtaaaggagcagttgttgccacgtacaggaaaacccacctgtgtgatgttgagatccctggccagggaccaatgtgtgagtcaaacagtactatgcccggaccaagtctcgaaagtcccgtttctacccccgccggaaaaatcggtctcgcagtgtgttacgacatgagattcccggagctatcgctggctctggctcaggccggagccgaaatcctgacatacccaagcgcatttggatctataactggccctgctcactgggaagttctgcttcgcgcgcgtgctattgagacccagtgctacgttgtggccgccgcacagtgtgggaggcaccatgagaaaagggcctcctacggccacagcatggtcgttgacccctgggggactgtggtggcccgctgtagtgagggacccggtctatgtctggcccgtatcgacttaaactaccttcgacagctccgacgccaccttccggtcttccagcacagacgtcctgatttatatggaaatctcgggcatcccctttcctag

SEQ ID NO: 72269 - DNA, 1749 bp, Artificial Sequence
  derived and/or modified sequence
gcttctggctccagaccgccctccggatcggaccctgcgaatggttttggctatatcttcatgtaggacctactccctatcccgtcggccgcggtgaatcccacctgcggtgctttaacttgtgtaacagagatgctgcctctgggagaggcggggagggacgggccaactggagcgggcggcgggagggtggagggcggggcgcggcttggggcctgggttcctttgccccttgcccaccagggaggggtgggagacgagagagggtgaactttcccctgcgagattctggtgaaaggggaaatatgcttcgagtcagtaaagctgcgcaagtgcacagtcaaggagagagtcttgggaaaaccaaggatagttcccggagatgacttttggactgcggaaacgtttgtcagaggaaagaggcttcagtttaatgcccagagccatggctatctcctcttcctcctgcgaactgcccctggtggctgtgtgccaggtaacatcgacgccagacaagcaacagaactttaaaacatgtgctgagctggttcgagaggctgccagactgggtgcctgcctggctttcctgcctgaggcatttgacttcattgcacgggaccctgcagagacgctacacctgtctgaaccactgggtgggaaacttttggaagaatacacccagcttgccagggaatgtggactctggctgtccttgggtggtttccatgagcgtggccaagactgggagcagactcagaaaatctacaattgtcacgtgctgctgaacagcaaaggggcagtagtggccacttacaggaagacacatctgtgtgacgtagagattccagggcaggggcctatgtgtgaaagcaactctaccatgcctgggcccagtcttgagtcacctgtcagcacaccagcaggcaagattggtctagctgtctgctatgacatgcggttccctgaactctctctggcattggctcaagctggagcagagatacttacctatccttcagcttttggatccattacaggcccagcccactgggaggtgttgctgcgggcccgtgctatcgaaacccagtgctatgtagtggcagcagcacagtgtggacgccaccatgagaagagagcaagttatggccacagcatggtggtagacccctggggaacagtggtggcccgctgctctgaggggccaggcctctgccttgcccgaatagacctcaactatctgcgacagttgcgccgacacctgcctgtgttccagcaccgcaggcctgacctctatggcaatctgggtcacccactgtcttaagacttgacttctgtgagtttagacctgcccctcccacccccaccctgccactatgagctagtgctcatgtgacttggaggcaggatccaggcacagctcccctcacttggagaaccttgactctcttgatggaacacagatgggctgcttgggaaagaaactttcacctgagcttcacctgaggtcagactgcagtttcagaaaggtggaattttatatagtcattgtttatttcatggaaactgaagttctgctgagggctgagcagcactggcattgaaaaatataataatcataaagtctgtgtctggacatcgcctttgggaactagaaggggagttggtattgtaccagctggactaagctccagttctagacctcctggctcattcaacatgcctccctacctaaataaaagtgcaacactc

SEQ ID NO: 72270 - DNA, 939 bp, Artificial Sequence
  derived and/or modified sequence
atgacatttggcctgcgcaagcgtctcagcgaggagcgcggtttcagcctcatgccaagagccatggcaatcagctcatcatcatgcgaactccccctggtcgccgtatgtcaggtgaccagtacaccggacaagcaacagaactttaagacttgtgccgagctggtgcgcgaggccgcaagattgggagcttgcctcgccttcctgccggaggccttcgacttcatcgcgagagaccctgctgagacacttcatctgtccgagcccctcggtggaaagctgctggaagagtacactcagctggccagagagtgcggcctgtggctcagtttagggggatttcacgagcgaggccaggactgggaacagacacagaagatatataactgtcatgtcctgctgaacagcaaaggcgctgtcgtcgccacataccgaaaaacacatctgtgcgatgtggagattcccggtcagggtcctatgtgcgagagcaacagcaccatgcccggacctagcctcgaatcaccagtgtccactcccgctgggaaaataggactggctgtgtgttacgacatgcggtttcccgagctcagccttgcccttgcacaagccggtgcagagatacttacatatccatccgctttcggaagtattaccgggccagcacactgggaagtcctgctgcgagcacgggcaatagagacccagtgttatgtagtcgccgcagctcagtgtggcaggcaccatgagaaacgcgcatcatacggacattctatggttgtggatccatgggggacagtcgtggcaagatgttccgagggtccgggtttatgcctcgccaggatcgacctgaattatctgcgacagttgcggaggcacctcccagtgtttcaacatcgcaggccggacctgtacggcaatttgggtcaccctctcagctag

SEQ ID NO: 72271 - DNA, 939 bp, Artificial Sequence
  derived and/or modified sequence
atgaccttcggcctgagaaagagactgagcgaggagagaggcttcagcctgatgcccagagccatggccatcagcagcagcagctgcgagctgcccctggtggccgtgtgccaggtgaccagcacccccgacaagcagcagaacttcaagacctgcgccgagctggtgagagaggccgccagactgggcgcctgcctggccttcctgcccgaggccttcgacttcatcgccagagaccccgccgagaccctgcacctgagcgagcccctgggcggcaagctgctggaggagtacacccagctggccagagagtgcggcctgtggctgagcctgggcggcttccacgagagaggccaggactgggagcagacccagaagatctacaactgccacgtgctgctgaacagcaagggcgccgtggtggccacctacagaaagacccacctgtgcgacgtggagatccccggccagggccccatgtgcgagagcaacagcaccatgcccggccccagcctggagagccccgtgagcacccccgccggcaagatcggcctggccgtgtgctacgacatgagattccccgagctgagcctggccctggcccaggccggcgccgagatcctgacctaccccagcgccttcggcagcatcaccggccccgcccactgggaggtgctgctgagagccagagccatcgagacccagtgctacgtggtggccgccgcccagtgcggcagacaccacgagaagagagccagctacggccacagcatggtggtggacccctggggcaccgtggtggccagatgcagcgagggccccggcctgtgcctggccagaatcgacctgaactacctgagacagctgagaagacacctgcccgtgttccagcacagaagacccgacctgtacggcaacctgggccaccccctgagctag

SEQ ID NO: 72272 - DNA, 876 bp, Artificial Sequence
  derived and/or modified sequence
atggcaatttcctcctcaagctgcgaactaccacttgtcgctgtgtgtcaggtgaccagtacgccagacaaacagcagaattttaagacctgcgccgagctggtgcgcgaagccgctcgactgggcgcctgtttggcattcctccctgaagcattcgattttattgcgagagatcctgccgagacattgcacttgagcgagcccctgggtggaaagctgctggaagagtatactcagctcgcgcgggagtgtggcctctggttatctctgggaggattccatgaaaggggtcaggactgggaacagacccagaagatctacaattgtcatgtgcttttaaactctaagggggccgtggtagccacctaccggaagactcacctgtgcgatgtggaaatcccagggcagggacccatgtgtgagtccaattccacaatgcccggccctagcctcgagagtcccgtgtcaacaccagcaggaaaaatcggcctggcggtctgttacgatatgagattccccgagctctctctcgcactcgcccaggccggcgctgaaattctgacatacccatcggccttcggcagcatcaccggtcctgctcactgggaggtgttacttcgggccagagcgatcgagacccagtgttacgtggtagctgcagcccaatgtggacgccatcatgagaaacgggcctcttacggccatagtatggtggtggacccctgggggacggtcgtggcgaggtgctccgaagggcccggcctgtgtcttgcacgcattgacctcaactatctacggcagttgcggcgacacctccccgtgtttcaacacaggcgccctgacctttatggcaacctgggccatcccctgtcttag

SEQ ID NO: 72273 - DNA, 876 bp, Artificial Sequence
  derived and/or modified sequence
atggccatcagcagcagcagctgtgagctgcccctggtggccgtgtgccaggtgaccagcaccccagacaagcagcagaacttcaagacctgtgccgagctggtgcgggaggccgcccggctgggcgcctgcctggccttcctgcctgaggcctttgacttcatcgcccgggaccctgctgagaccctgcacctgtctgagcccctgggcggcaagctgctggaggagtacacccagctggccagagaatgtggcctgtggctgagcctgggcggcttccacgagcggggccaggactgggagcagacccagaagatctacaactgccacgtgctgctgaacagcaaaggagctgtggtggccacctacaggaagacccacctgtgtgatgtggagatccctggccagggccccatgtgtgagagcaacagcaccatgcctggccccagcctggagagccctgtgtccaccccagctgggaagattggcctggccgtgtgctatgacatgagatttcctgagctgagcctggccctggcccaggccggggctgagatcctgacctaccccagcgccttcggcagcatcactggacctgcccactgggaggtgctgctgcgggcccgggccatcgagacccagtgctacgtggtggccgccgcccagtgtggccgccaccacgagaagagggccagctatggccacagcatggtggtggacccctggggcaccgtggtggcccgctgcagcgagggccctggcctgtgcctggccagaattgacctgaactacctgcggcagctgcggcggcacctgcctgtgttccagcaccggcggccagacctgtatggcaacctgggccaccccctgtcctag

SEQ ID NO: 72274 - DNA, 876 bp, Artificial Sequence
  derived and/or modified sequence
atggccatcagcagcagcagctgcgagctgcccctggtggccgtgtgccaggtgacttccaccccagacaaacagcagaatttcaaaacttgcgccgagctcgtccgggaagcagcaaggttgggcgcttgcctggcctttctgcctgaggccttcgatttcatcgctagggaccctgcagagactctgcacctgagcgaaccccttggcggcaagcttctggaggagtacactcagctggcccgggagtgcggcctgtggctctcgctcggagggtttcatgagcgcggccaagactgggagcagacacagaagatctacaattgccatgtcctcttaaacagcaaaggggctgtggtggccacgtacagaaagactcacttgtgtgacgtggaaatcccggggcaaggccccatgtgtgaaagtaactctacaatgcctggtccaagcttggagagtcctgtgagcacccctgctgggaagattggattggctgtttgctatgatatgaggttcccagagctaagcctggctcttgctcaggctggggccgagatcttgacatatccctcggccttcggcagcataactggccctgcccactgggaggtgctgctcagggcgagagccatagagacccagtgctatgtagtcgccgcagcacaatgcggtcgtcaccatgaaaaaagggcaagctacggccactcaatggttgtggacccgtggggcaccgtcgtagcccgatgctccgagggtcccggtctctgcctcgcgcggatcgatctcaactacttgcgccagctgcgtagacacctgccagtttttcaacataggcgcccagacttgtacggtaatttgggtcacccactgagctag

SEQ ID NO: 72275 - DNA, 876 bp, Artificial Sequence
  derived and/or modified sequence
atggccattagtagcagttcatgcgagctgcctttagtggccgtatgtcaagtgaccagtaccccagataagcagcagaattttaaaacctgcgccgagttggtcagagaagcagcccgactgggcgcatgcctcgcgtttctgcccgaggcgtttgacttcatcgcgagagacccagcggagacactgcatctcagcgagccactggggggtaaattactggaggaatacacacagttggcccgagagtgcggactgtggctatcactgggcggttttcacgagcgtgggcaggactgggagcagacgcagaaaatctacaactgccacgtgctcctcaactccaaaggggcagtcgtggcaacctacagaaagacgcatctgtgtgatgtggagatccccggacaaggcccaatgtgcgaatctaacagcactatgccgggaccatcactggagagccccgtctctacccctgctggcaagattggtttagctgtctgctacgatatgaggtttcccgagctatctcttgccctggcccaggcaggcgcagagattctcacttacccaagcgctttcgggtcgattacaggacccgctcactgggaagtgctcctcagagctagggctatcgaaacacagtgctatgtagtcgccgctgctcagtgtggaagacaccacgagaagagggcttcctacgggcattccatggtcgtggatccttgggggaccgtcgtcgcccgttgtagcgagggaccagggctgtgtctggccaggattgatctcaattatctgcgacagctgaggcggcacttgcctgtatttcagcaccgcagacctgacctctatgggaacctggggcatcctttatcatag

SEQ ID NO: 72276 - DNA, 876 bp, Artificial Sequence
  derived and/or modified sequence
atggccatcagcagcagcagctgcgagctgcccctggtggccgtgtgccaggtgaccagcacccccgacaagcagcagaacttcaagacctgcgccgagctggtgagagaggccgccagactgggcgcctgcctggccttcctgcccgaggccttcgacttcatcgccagagaccccgccgagaccctgcacctgagcgagcccctgggcggcaagctgctggaggagtacacccagctggccagagagtgcggcctgtggctgagcctgggcggcttccacgagagaggccaggactgggagcagacccagaagatctacaactgccacgtgctgctgaacagcaagggcgccgtggtggccacctacagaaagacccacctgtgcgacgtggagatccccggccagggccccatgtgcgagagcaacagcaccatgcccggccccagcctggagagccccgtgagcacccccgccggcaagatcggcctggccgtgtgctacgacatgagattccccgagctgagcctggccctggcccaggccggcgccgagatcctgacctaccccagcgccttcggcagcatcaccggccccgcccactgggaggtgctgctgagagccagagccatcgagacccagtgctacgtggtggccgccgcccagtgcggcagacaccacgagaagagagccagctacggccacagcatggtggtggacccctggggcaccgtggtggccagatgcagcgagggccccggcctgtgcctggccagaatcgacctgaactacctgagacagctgagaagacacctgcccgtgttccagcacagaagacccgacctgtacggcaacctgggccaccccctgagctag

SEQ ID NO: 72277 - protein, 759 aa, Artificial Sequence
  derived and/or modified sequence
MHLLGPWLLLLVLEYLAFSDSSKWVFEHPETLYAWEGACVWIPCTYRALDGDLESFILFHNPEYNKNTSKFDGTRLYESTKDGKVPSEQKRVQFLGDKNKNCTLSIHPVHLNDSGQLGLRMESKTEKWMERIHLNVSERPFPPHIQLPPEIQESQEVTLTCLLNFSCYGYPIQLQWLLEGVPMRQAAVTSTSLTIKSVFTRSELKFSPQWSHHGKIVTCQLQDADGKFLSNDTVQLNVKHTPKLEIKVTPSDAIVREGDSVTMTCEVSSSNPEYTTVSWLKDGTSLKKQNTFTLNLREVTKDQSGKYCCQVSNDVGPGRSEEVFLQVQYPPKKVTTVIQNPMPIREGDTVTLSCNYNSSNPSVTRYEWKPHGAWEEPSLGVLKIQNVGWDNTTIACAACNSWCSWASPVALNVQYAPRDVRVRKIKPLSEIHSGNSVSLQCDFSSSHPKEVQFFWEKNGRLLGKESQLNFDSISPEDAGSYSCWVNNSIGQTASKAWTLEVLYAPRRLRVSMSPGDQVMEGKSATLTCESDANPPVSHYTWFDWNNQSLPYHSQKLRLEPVKVQHSGAYWCQGTNSVGKGRSPLSTLTVYYSPETIGRRVAVGLGSCLAILILAICGLKLQRRWKRTQSQQGLQENSSGQSFFVRNKKVRRAPLSEGPHSLGCYNPMMEDGISYTTLRFPEMNIPRTGDAESSEMQRPPPDCDDTVTYSALHKRQVGDYENVIPDFPEDEGIHYSELIQFGVGERPQAQENVDYVILKH

SEQ ID NO: 72278 - DNA, 2280 bp, Artificial Sequence
  derived and/or modified sequence
atgcacctactggggccatggttgctcctgttagttttggagtacctggcattttcggattccagcaagtgggtttttgaacaccctgagacactgtacgcctgggagggagcatgcgtctggattccctgtacatacagagccttggatggcgatctcgagagtttcattctgttccataacccagagtataataaaaacacctccaaatttgacggcacacgcctctacgaaagtacgaaagacggcaaagtgccaagcgaacagaagcgcgttcagtttttaggtgataagaacaagaactgcacgctgtcaattcatcctgtgcatttaaatgactctggccagttgggactgcggatggagagcaaaactgaaaagtggatggaaagaatccacctgaacgtgtcagaaagaccattcccacctcatatacaattgccccctgagattcaggagtcccaggaagtaacacttacctgcttactaaacttttcatgctacggatatccgatacaactccaatggctgctcgaaggagttcctatgaggcaagctgcagtaactagtactagccttactattaaatcagtatttacccggagcgagctgaaattttctcctcagtggagccaccatggaaagatcgtaacctgccagctccaggatgctgacggcaagtttttgtctaatgatacggtacagctgaacgttaagcacactccaaagcttgaaatcaaggtcactcctagcgacgcaatcgtgcgggaaggggactccgtaactatgacctgcgaagtgtctagctccaaccctgagtatactactgtcagttggctgaaggatggtacttcgctgaagaagcagaatacatttactctgaacctgcgagaagttacgaaagatcaaagcggcaagtactgttgccaggtgagtaacgacgttggacctggacgatcagaagaagtattcctccaagtacagtacccgccaaagaaagttactaccgtcattcaaaatccaatgccaatcagagagggggacaccgttaccctgagttgcaactataacagttctaaccctagtgttacccgctatgagtggaagcctcacggagcgtgggaggaacccagcctcggcgtcttgaaaatacagaacgtcggctgggataatactactattgcttgcgcagcctgcaacagctggtgctcatgggcctctccagtagctctcaatgtgcagtatgccccacgggatgttagagtgcgaaagattaagcctctttctgaaattcattctgggaactctgtgtccctgcagtgtgatttttccagcagtcatccaaaagaggtccagtttttttgggagaaaaatgggcggctgttgggcaaggaaagtcaactcaattttgactccatcagtccagaagatgcaggctcctattcatgttgggtcaataacagtattgggcagactgcctctaaagcatggactttggaggtcctctacgccccaagaaggctccgtgtctcaatgtcccccggagatcaggttatggagggaaaatccgccacattaacatgcgaaagcgatgctaacccgcctgtgtcacattacacctggtttgactggaacaaccagtctctgccatatcacagccagaagctacgcctcgagcctgtgaaagtgcaacacagcggagcgtactggtgccagggaaccaatagcgtggggaaggggcgctctcctctctctaccctgaccgtgtactacagccccgagacaattgggcggcgggttgcggtggggctaggaagctgcctggccattcttatcctagctatctgtggacttaaactacagcgccgctggaagaggacccagtctcagcaaggattgcaggaaaactccagcggacagtcttttttcgtacgtaataaaaaagttaggcgggctcctcttagcgaaggccctcatagcttagggtgttataaccctatgatggaagatgggatatcttataccacgctgcgatttcccgagatgaacataccccgtacaggggatgctgagagtagcgagatgcagcggccccctccggactgcgatgatactgtaacttactccgctctccacaagcgccaagtcggggactatgagaatgtcatccccgattttcccgaagacgaaggaatccactacagcgagctgatccagttcggggttggcgaacgcccacaagcacaagagaatgtggactatgtgatcttgaagcactag

SEQ ID NO: 72279 - DNA, 2280 bp, Artificial Sequence
  derived and/or modified sequence
atgcacctgctgggcccctggctgctgctgctggtgctggagtacctggccttcagtgacagcagcaagtgggtgtttgagcaccctgagaccctgtatgcctgggagggcgcctgtgtgtggatcccctgcacctaccgggccctggatggagacctggagagcttcatcctcttccacaaccctgagtacaacaagaacaccagcaagtttgatggcacccggctgtatgagagcaccaaggatggcaaggtgcccagcgagcagaagagggtgcagttcctgggggacaagaacaagaactgcaccctgagcatccaccctgtgcacctgaatgacagcggccagctgggcctgaggatggagagcaagacagagaagtggatggagcgcatccacctgaatgtgtctgagcggcccttccccccccacatccagctgcccccagagatccaggagagccaggaggtgaccctgacctgcctgctgaacttcagctgctacggctaccccatccagctgcagtggctgctggagggcgtgcccatgaggcaggccgctgtgaccagcaccagcctgaccatcaagtctgtgttcaccaggtctgagctgaagttcagcccccagtggagccaccacggcaagatcgtgacctgccagctgcaggatgctgatggcaagttcctgagcaatgacacagtgcagctgaatgtgaagcacacccccaagctggagatcaaggtgacccccagtgatgccatcgtgcgggagggggacagcgtgaccatgacctgtgaggtgagcagcagcaaccctgagtacaccaccgtgtcctggctgaaggatggcaccagcctgaagaagcagaacaccttcaccctgaacctgcgggaggtgaccaaggaccagagcggcaagtactgctgccaggtgtccaatgatgtgggccctggccgctctgaggaggtgttcctgcaggtgcagtacccacccaagaaggtgaccaccgtcatccagaaccccatgcccatccgggagggggacacagtgaccctgagctgcaactacaacagcagcaaccccagcgtgaccaggtatgagtggaagccccatggagcctgggaggagcccagcctgggcgtgctgaagatccagaatgtgggctgggacaacaccaccatcgcctgtgccgcctgcaacagctggtgctcctgggccagccctgtggccctgaatgtgcagtatgcccccagagatgtgcgggtgaggaagatcaagcccctgtctgagatccacagcggcaacagcgtgtccctgcagtgtgacttcagcagcagccaccccaaggaggtgcagttcttctgggagaagaatggccgcctgctgggcaaggagagccagctgaactttgacagcatcagcccagaagatgctggcagctacagctgctgggtgaacaacagcatcggccagacagccagcaaggcctggaccctggaggtgctgtatgccccccggcggctgcgggtgtccatgagccctggggaccaggtgatggagggcaagagcgccaccctgacctgtgagagtgatgccaacccccctgtgagccactacacctggtttgactggaacaaccagagcctgccctaccacagccagaagctgcggctggagcctgtgaaggtgcagcacagcggggcctactggtgccagggcaccaacagcgtgggcaagggccgcagccccctgagcaccctgactgtgtactacagccctgagaccatcggccggcgggtggccgtgggcctgggcagctgcctggccatcctgatcctggccatctgtggcctgaagctgcagaggcgctggaagaggacccagagccagcagggcctgcaggagaacagcagcggccagagcttctttgtgaggaacaagaaggtgcggcgggcccccctgtctgagggcccccacagcctgggctgctacaaccccatgatggaggatggcatctcctacaccaccctgcgcttccctgagatgaacatccccaggactggagatgctgagagcagcgagatgcagaggcctcctccagactgtgatgacacagtgacctacagcgccctgcacaagaggcaggtgggggactatgaaaatgtcatcccagacttcccagaagatgagggcatccactacagcgagctgatccagtttggagtgggggagcggccccaggcccaggagaatgtggactatgtgatcctgaagcactag

SEQ ID NO: 72280 - DNA, 2280 bp, Artificial Sequence
  derived and/or modified sequence
atgcacctgctgggcccctggctgctgctgctggtgctggagtacttggcgtttagcgacagctctaagtgggtgttcgagcaccctgagaccctctacgcatgggaaggggcctgtgtgtggatcccatgcacctaccgggctttggatggggacctggaatcttttatcctgttccacaatcctgagtacaataaaaatacgagcaaatttgacggtactcggttgtacgagtcaacaaaggacggaaaagtcccatccgagcaaaagcgggttcagttcctgggagacaagaacaaaaattgtaccctgtccatccaccctgttcatctgaatgactccggacagctggggctgcgcatggagagcaaaaccgagaaatggatggaacgaatccaccttaatgtgtctgagcgcccctttcccccacacatccagctgccaccagagatccaggagtcccaagaggtcacactgacttgtcttctcaatttttcctgttacgggtatccaatacagttgcaatggctgttggagggggtcccgatgagacaggccgccgtgacaagtacgagcttgactattaagtctgtgtttacaagatctgagctgaagttctctccacaatggtcacatcacggaaagatagtgacctgccaactgcaggatgccgatggtaagtttctgtctaacgatactgtccagcttaatgtcaaacacacaccgaagcttgaaataaaggtcaccccttccgatgcgatcgtgagggaaggggactccgtgacaatgacgtgtgaggtatcatcctccaaccctgagtataccaccgtgtcctggttgaaagacgggacatcactgaagaagcagaataccttcaccctcaatttgcgggaggtgactaaggaccagagcggcaagtattgctgtcaggtcagcaacgacgtgggcccagggaggagcgaggaggtgttcctgcaggttcaatatccccctaaaaaggtgacaacggtcatccagaacccgatgccaatccgagaaggagacactgtcacactttcttgtaattacaacagttccaatccatcagtaacacgctatgagtggaagccgcacggagcctgggaagagcctagtctaggggtacttaagatacagaacgtggggtgggacaacaccacaattgcctgtgccgcctgcaatagctggtgcagctgggctagtcctgtcgcactgaacgttcagtacgccccaagagacgtccgggtgagaaaaatcaagcccctgtccgaaattcatagcggaaatagcgtgtccctccagtgcgattttagcagcagccatcccaaggaggtgcaatttttctgggagaagaacggacgccttctggggaaagaatctcagttaaattttgattccataagcccagaagatgcaggctcttactcttgttgggtgaacaattccatcgggcagactgcgagcaaagcgtggaccttggaggtgctgtatgcaccgcgccgactgagggtgagcatgtctcctggagaccaggtgatggaaggtaaatcggctaccctgacgtgcgagagcgatgccaatccacctgtcagccactacacatggttcgactggaataatcagagtctgccttaccacagccaaaaactgcgcctggagccagtgaaagttcagcactctggagcatattggtgccagggaacaaatagtgtggggaagggccggtctcctctgagcaccctaacagtctactactccccggaaacaattggccggcgcgttgctgttggcctggggtcatgtcttgctatacttatactagccatttgtggcctcaagctccagcggcggtggaaacgcacacagagccaacaagggttacaggagaactccagtggccagtcctttttcgtaagaaacaagaaagtacgtagggctcccttgtccgagggacctcacagcctaggatgctacaatcctatgatggaagatggaatctcatatacaacactaaggttcccggagatgaacatcccaaggacgggagatgcagagtcctcagagatgcagagacctccccccgactgtgatgacactgtgacctatagcgctctgcacaaaagacaagtgggagactacgaaaacgtgatcccagatttcccagaggacgagggtatccactatagtgagttgatccagtttggcgtcggagaacggccccaggcacaggaaaatgtcgactatgtcatactcaaacactag

SEQ ID NO: 72281 - DNA, 2280 bp, Artificial Sequence
  derived and/or modified sequence
atgcacctcctggggccatggcttttgctactggtattagaatacttggctttctccgacagctccaaatgggttttcgagcatcccgaaacattgtacgcctgggaaggtgcatgtgtgtggattccatgcacttaccgcgctctggacggggatctggaatcatttatcctgtttcacaaccctgaatacaataagaatacaagcaagtttgatggtactcgtctctatgagagtacaaaagacggcaaggtaccaagcgagcaaaagagggtccaatttctaggggataagaataaaaactgcacattgagtatacatccagtgcatttaaacgactccggtcagctgggtctccgcatggaaagtaaaaccgagaagtggatggaacgtatacacctgaacgtttccgagcggccattcccgcctcatattcagctcccacctgagatccaggaatcacaggaggtgactctgacctgccttctgaacttcagttgctacggatatccgattcagttacaatggcttttagaaggcgtccctatgcggcaggctgccgttacctccacgtcattgactattaaaagcgtcttcactcgatccgagttaaaatttagccctcagtggagccatcatggaaagattgtcacctgccagctacaggacgccgacggtaagttcctgagtaacgatacagttcagctcaatgtgaagcacaccccaaagctggaaattaaggtcacaccatccgatgcaatcgtacgagagggagactctgtgactatgacctgcgaggtctcaagcagtaacccggagtataccaccgtatcttggctgaaggatgggacgtctcttaaaaaacagaataccttcaccttaaacctcagggaggtgactaaagatcaaagcggtaaatattgctgtcaggtgtcaaacgacgtcggacctgggcgttccgaggaagtttttctgcaggtgcaatacccaccaaagaaagttacaaccgttatccagaatccaatgcccatccgtgaaggggatactgtgaccttatcatgcaactataatagcagtaatccaagcgtgacacgctacgagtggaagccacatggggcttgggaagaaccgtcactcggggtgttgaagattcagaacgtgggatgggacaacaccacaatcgcttgtgctgcttgcaactcttggtgctcctgggcatcccctgtcgcacttaatgtacagtatgcccctcgggacgtcagggttagaaagataaagcccctgtcagaaattcactctggaaacagcgtttccctccaatgcgacttctcctctagtcatcccaaagaggtgcagttcttctgggaaaaaaatggacgtttgctagggaaggaatcacaattgaatttcgatagtatcagcccagaggatgccggttcttatagttgctgggtcaataactccatcggtcagaccgctagcaaagcctggacattagaggtactctatgctcccagacgcctccgcgttagcatgagccccggtgatcaggtcatggaaggcaagtcagccaccctcacttgcgagtctgacgccaacccaccggtcagtcactacacgtggttcgactggaacaaccagagcctgccctatcacagtcagaagctgcgtctggagcctgtaaaagtgcaacacagcggggcttactggtgtcaaggcacaaattccgtgggtaagggacgcagcccgctgagcaccctgacagtatattattcccctgagactattgggagacgcgtcgcagtagggttgggcagctgcctggccatcttaatactagccatatgtggcctgaaattgcaaagaaggtggaagcgcacccagtctcagcagggtttgcaggagaacagtagtgggcagtctttcttcgtgaggaataaaaaggttaggcgagcccctctctccgagggaccccactcactcggatgttacaatccgatgatggaggacggaatctcctataccaccctcagatttccagaaatgaacatacctcgcacgggcgatgctgagtctagcgagatgcagagacccccaccagattgtgatgataccgtcacgtattctgcgctgcacaagcggcaagtcggcgactacgaaaacgttattcccgacttccctgaagacgagggcattcattactctgagctgattcaattcggagtcggagaacgaccgcaggctcaggaaaacgttgactatgtgatacttaagcactag

SEQ ID NO: 72282 - DNA, 3022 bp, Artificial Sequence
  derived and/or modified sequence
acttctccttttgctctcagatgctgccagggtccctgaagagggaagacacgcggaaacaggcttgcacccagacacgacaccatgcatctcctcggcccctggctcctgctcctggttctagaatacttggctttctctgactcaagtaaatgggtttttgagcaccctgaaaccctctacgcctgggagggggcctgcgtctggatcccctgcacctacagagccctagatggtgacctggaaagcttcatcctgttccacaatcctgagtataacaagaacacctcgaagtttgatgggacaagactctatgaaagcacaaaggatgggaaggttccttctgagcagaaaagggtgcaattcctgggagacaagaataagaactgcacactgagtatccacccggtgcacctcaatgacagtggtcagctggggctgaggatggagtccaagactgagaaatggatggaacgaatacacctcaatgtctctgaaaggccttttccacctcatatccagctccctccagaaattcaagagtcccaggaagtcactctgacctgcttgctgaatttctcctgctatgggtatccgatccaattgcagtggctcctagagggggttccaatgaggcaggctgctgtcacctcgacctccttgaccatcaagtctgtcttcacccggagcgagctcaagttctccccacagtggagtcaccatgggaagattgtgacctgccagcttcaggatgcagatgggaagttcctctccaatgacacggtgcagctgaacgtgaagcacaccccgaagttggagatcaaggtcactcccagtgatgccatagtgagggagggggactctgtgaccatgacctgcgaggtcagcagcagcaacccggagtacacgacggtatcctggctcaaggatgggacctcgctgaagaagcagaatacattcacgctaaacctgcgcgaagtgaccaaggaccagagtgggaagtactgctgtcaggtctccaatgacgtgggcccgggaaggtcggaagaagtgttcctgcaagtgcagtatcctcccaagaaggtgaccacagtgattcaaaaccccatgccgattcgagaaggagacacagtgaccctttcctgtaactacaattccagtaaccccagtgttacccggtatgaatggaaaccccatggcgcctgggaggagccatcgcttggggtgctgaagatccaaaacgttggctgggacaacacaaccatcgcctgcgcagcttgtaatagttggtgctcgtgggcctcccctgtcgccctgaatgtccagtatgccccccgagacgtgagggtccggaaaatcaagcccctttccgagattcactctggaaactcggtcagcctccaatgtgacttctcaagcagccaccccaaagaagtccagttcttctgggagaaaaatggcaggcttctggggaaagaaagccagctgaattttgactccatctccccagaagatgctgggagttacagctgctgggtgaacaactccataggacagacagcgtccaaggcctggacacttgaagtgctgtatgcacccaggaggctgcgtgtgtccatgagcccgggggaccaagtgatggaggggaagagtgcaaccctgacctgtgagagcgacgccaaccctcccgtctcccactacacctggtttgactggaataaccaaagcctcccctaccacagccagaagctgagattggagccggtgaaggtccagcactcgggtgcctactggtgccaggggaccaacagtgtgggcaagggccgttcgcctctcagcaccctcaccgtctactatagcccggagaccatcggcaggcgagtggctgtgggactcgggtcctgcctcgccatcctcatcctggcaatctgtgggctcaagctccagcgacgttggaagaggacacagagccagcaggggcttcaggagaattccagcggccagagcttctttgtgaggaataaaaaggttagaagggcccccctctctgaaggcccccactccctgggatgctacaatccaatgatggaagatggcattagctacaccaccctgcgctttcccgagatgaacataccacgaactggagatgcagagtcctcagagatgcagagacctcccccggactgcgatgacacggtcacttattcagcattgcacaagcgccaagtgggcgactatgagaacgtcattccagattttccagaagatgaggggattcattactcagagctgatccagtttggggtcggggagcggcctcaggcacaagaaaatgtggactatgtgatcctcaaacattgacactggatgggctgcagcagaggcactgggggcagcgggggccagggaagtccccgagtttccccagacaccgccacatggcttcctcctgcgcgcatgtgcgcacacacacacacacacgcacacacacacacacacactcactgcggagaaccttgtgcctggctcagagccagtctttttggtgagggtaaccccaaacctccaaaactcctgcccctgttctcttccactctccttgctacccagaaatccatctaaatacctgccctgacatgcacacctccccctgcccccaccacggccactggccatctccacccccagctgcttgtgtccctcctgggatctgctcgtcatcatttttccttcccttctccatctctctggccctctacccctgatctgacatccccactcacgaatattatgcccagtttctgcctctgagggaaagcccagaaaaggacagaaacgaagtagaaaggggcccagtcctggcctggcttctcctttggaagtgaggcattgcacagggagacgtacgtatcagcggccccttgactctggggactccgggtttgagatggacacactggtgtggattaacctgccagggagacagagctcacaataaaaatggctcagatgccacttc

SEQ ID NO: 72283 - DNA, 2280 bp, Artificial Sequence
  derived and/or modified sequence
atgcacctgctgggcccctggctgctgctgctggtgctggagtacctggccttcagcgacagcagcaagtgggtgttcgagcaccccgagaccctgtacgcctgggagggcgcctgcgtgtggatcccctgcacctacagagccctggacggcgacctggagagcttcatcctgttccacaaccccgagtacaacaagaacaccagcaagttcgacggcaccagactgtacgagagcaccaaggacggcaaggtgcccagcgagcagaagagagtgcagttcctgggcgacaagaacaagaactgcaccctgagcatccaccccgtgcacctgaacgacagcggccagctgggcctgagaatggagagcaagaccgagaagtggatggagagaatccacctgaacgtgagcgagagacccttccccccccacatccagctgccccccgagatccaggagagccaggaggtgaccctgacctgcctgctgaacttcagctgctacggctaccccatccagctgcagtggctgctggagggcgtgcccatgagacaggccgccgtgaccagcaccagcctgaccatcaagagcgtgttcaccagaagcgagctgaagttcagcccccagtggagccaccacggcaagatcgtgacctgccagctgcaggacgccgacggcaagttcctgagcaacgacaccgtgcagctgaacgtgaagcacacccccaagctggagatcaaggtgacccccagcgacgccatcgtgagagagggcgacagcgtgaccatgacctgcgaggtgagcagcagcaaccccgagtacaccaccgtgagctggctgaaggacggcaccagcctgaagaagcagaacaccttcaccctgaacctgagagaggtgaccaaggaccagagcggcaagtactgctgccaggtgagcaacgacgtgggccccggcagaagcgaggaggtgttcctgcaggtgcagtacccccccaagaaggtgaccaccgtgatccagaaccccatgcccatcagagagggcgacaccgtgaccctgagctgcaactacaacagcagcaaccccagcgtgaccagatacgagtggaagccccacggcgcctgggaggagcccagcctgggcgtgctgaagatccagaacgtgggctgggacaacaccaccatcgcctgcgccgcctgcaacagctggtgcagctgggccagccccgtggccctgaacgtgcagtacgcccccagagacgtgagagtgagaaagatcaagcccctgagcgagatccacagcggcaacagcgtgagcctgcagtgcgacttcagcagcagccaccccaaggaggtgcagttcttctgggagaagaacggcagactgctgggcaaggagagccagctgaacttcgacagcatcagccccgaggacgccggcagctacagctgctgggtgaacaacagcatcggccagaccgccagcaaggcctggaccctggaggtgctgtacgcccccagaagactgagagtgagcatgagccccggcgaccaggtgatggagggcaagagcgccaccctgacctgcgagagcgacgccaacccccccgtgagccactacacctggttcgactggaacaaccagagcctgccctaccacagccagaagctgagactggagcccgtgaaggtgcagcacagcggcgcctactggtgccagggcaccaacagcgtgggcaagggcagaagccccctgagcaccctgaccgtgtactacagccccgagaccatcggcagaagagtggccgtgggcctgggcagctgcctggccatcctgatcctggccatctgcggcctgaagctgcagagaagatggaagagaacccagagccagcagggcctgcaggagaacagcagcggccagagcttcttcgtgagaaacaagaaggtgagaagagcccccctgagcgagggcccccacagcctgggctgctacaaccccatgatggaggacggcatcagctacaccaccctgagattccccgagatgaacatccccagaaccggcgacgccgagagcagcgagatgcagagacccccccccgactgcgacgacaccgtgacctacagcgccctgcacaagagacaggtgggcgactacgagaacgtgatccccgacttccccgaggacgagggcatccactacagcgagctgatccagttcggcgtgggcgagagaccccaggcccaggagaacgtggactacgtgatcctgaagcactag

SEQ ID NO: 72284 - protein, 751 aa, Artificial Sequence
  derived and/or modified sequence
MHLLGPWLLLLVLEYLAFSDSSKWVFEHPETLYAWEGACVWIPCTYRALDGDLESFILFHNPEYNKNTSKFDGTRLYESTKDGKVPSEQKRVQFLGDKNKNCTLSIHPVHLNDSGQLGLRMESKTEKWMERIHLNVSERPFPPHIQLPPEIQESQEVTLTCLLNFSCYGYPIQLQWLLEGVPMRQAAVTSTSLTIKSVFTRSELKFSPQWSHHGKIVTCQLQDADGKFLSNDTVQLNVKHTPKLEIKVTPSDAIVREGDSVTMTCEVSSSNPEYTTVSWLKDGTSLKKQNTFTLNLREVTKDQSGKYCCQVSNDVGPGRSEEVFLQVQYAPEPSTVQILHSPAVEGSQVEFLCMSLANPLPTNYTWYHNGKEMQGRTEEKVHIPKILPWHAGTYSCVAENILGTGQRGPGAELDVQYPPKKVTTVIQNPMPIREGDTVTLSCNYNSSNPSVTRYEWKPHGAWEEPSLGVLKIQNVGWDNTTIACAACNSWCSWASPVALNVQYAPRDVRVRKIKPLSEIHSGNSVSLQCDFSSSHPKEVQFFWEKNGRLLGKESQLNFDSISPEDAGSYSCWVNNSIGQTASKAWTLEVLYAPRRLRVSMSPGDQVMEGKSATLTCESDANPPVSHYTWFDWNNQSLPYHSQKLRLEPVKVQHSGAYWCQGTNSVGKGRSPLSTLTVYYSPETIGRRVAVGLGSCLAILILAICGLKLQRRWKRTQSQQGLQENSSGQSFFVRNKKRCRVLRDAETSPGLR

SEQ ID NO: 72285 - DNA, 2256 bp, Artificial Sequence
  derived and/or modified sequence
atgcatctcctcggcccctggcttcttctgctggttctggaatacttggctttttcagacagcagtaagtgggttttcgaacatccggaaacgctgtacgcttgggaaggagcctgcgtttggatcccctgtacttatcgtgcgctcgatggcgatctcgagtcgttcatcttgttccataatccagaatacaacaagaacacatcgaagttcgacggaacccggctttatgaaagtactaaggatgggaaggtcccaagcgagcagaaacgcgtacaatttctgggcgataagaacaagaattgtaccttgtcgatccacccggttcaccttaacgatagtggccagcttggccttcgaatggagtccaaaaccgagaaatggatggaaagaattcacttaaacgtgtcagaaagacccttcccgccccacattcagcttccccctgagatccaggaaagtcaggaagtgaccctcacctgtctcctcaatttcagttgttatgggtatcccatccagcttcagtggctgctggaaggcgttccaatgagacaagcagcagtgacaagcacctctcttacaatcaagtctgtctttacccgcagtgagcttaaattttcgcctcagtggagccatcatgggaaaattgttacctgtcagctgcaggacgctgacggcaaatttctttccaacgacactgtacagcttaacgtgaaacatacgccaaagctggaaataaaagtgaccccttccgacgccatagtccgggagggagatagtgtgacaatgacttgcgaagtgagctctagtaatccagagtacacaactgttagctggttgaaggatggaacctcacttaagaagcagaacacctttactcttaacctcagggaggtgaccaaggatcagtccgggaaatactgctgccaggtgtccaacgatgtcggtcctggaagatctgaggaggttttcctgcaggtgcagtatgcccctgaaccaagtacagtccagatcctgcatagtcctgccgttgagggatctcaggtcgaattcctctgtatgtccttagcaaatccactcccaactaactatacttggtaccacaacggtaaggagatgcagggcaggaccgaggaaaaggtacatatccccaagatcctgccttggcacgccggaacctattcctgcgtggctgagaatatcctcggtaccggacagcggggacctggagccgaactggatgtccagtacccccccaaaaaggtgacaaccgtgattcagaaccccatgcctattcgtgaaggggacacagtaacactgtcatgcaattataactcaagcaacccctctgtgacacggtacgagtggaagcctcacggggcctgggaggaaccaagtctcggcgtattaaagattcagaatgttggctgggacaacaccacaatcgcgtgcgcagcctgtaactcttggtgcagttgggcgagtccggtggccctgaacgtgcagtacgccccccgtgatgttcgtgtgcgcaaaattaaacctttgtcagagattcactctggtaactcggtctccttgcagtgcgactttagcagctctcaccctaaagaggtgcaatttttttgggagaagaatggtagactgcttggcaaggaatcacaattgaacttcgacagcatcagtcccgaggatgcgggaagttatagttgttgggtcaataattctatcggacaaactgcttctaaagcctggaccctcgaggtgctgtatgctcccagaagacttcgggtctctatgagccctggtgaccaggtgatggaagggaaaagtgcgacattgacttgcgagagcgacgcaaacccacctgtgagtcactacacctggtttgactggaataatcaaagtttgccatatcattcccaaaagctcagactggaaccagtcaaggtccaacacagcggcgcgtactggtgtcaaggcacaaatagcgtcggtaaagggcgctcaccactatctacgcttactgtctactattctcccgaaaccatcggccgtcgtgttgcagtgggcctgggttcctgcctggcaattctgattctcgctatctgtggtctgaaactgcagagaaggtggaagagaactcagagccagcagggcttgcaggaaaattcgagcggtcagtcctttttcgttcgcaataagaaacgctgcagggtcctgcgggatgctgaaactagcccagggctgcgttag

SEQ ID NO: 72286 - DNA, 2256 bp, Artificial Sequence
  derived and/or modified sequence
atgcacctgctgggcccctggctgctgctgctggtgctggagtacctggccttcagtgacagcagcaagtgggtgtttgagcaccctgagaccctgtatgcctgggagggcgcctgtgtgtggatcccctgcacctaccgggccctggatggagacctggagagcttcatcctcttccacaaccctgagtacaacaagaacaccagcaagtttgatggcacccggctgtatgagagcaccaaggatggcaaggtgcccagcgagcagaagagggtgcagttcctgggggacaagaacaagaactgcaccctgagcatccaccctgtgcacctgaatgacagcggccagctgggcctgaggatggagagcaagacagagaagtggatggagcgcatccacctgaatgtgtctgagcggcccttccccccccacatccagctgcccccagagatccaggagagccaggaggtgaccctgacctgcctgctgaacttcagctgctacggctaccccatccagctgcagtggctgctggagggcgtgcccatgaggcaggccgctgtgaccagcaccagcctgaccatcaagtctgtgttcaccaggtctgagctgaagttcagcccccagtggagccaccacggcaagatcgtgacctgccagctgcaggatgctgatggcaagttcctgagcaatgacacagtgcagctgaatgtgaagcacacccccaagctggagatcaaggtgacccccagtgatgccatcgtgcgggagggggacagcgtgaccatgacctgtgaggtgagcagcagcaaccctgagtacaccaccgtgtcctggctgaaggatggcaccagcctgaagaagcagaacaccttcaccctgaacctgcgggaggtgaccaaggaccagagcggcaagtactgctgccaggtgtccaatgatgtgggccctggccgctctgaggaggtgttcctgcaggtgcagtatgcccctgagcccagcacagtgcagatcctgcacagccctgctgtggagggcagccaggtggagttcctgtgcatgagcctggccaaccccctgcccaccaactacacctggtaccacaacgggaaggagatgcagggccgcacagaggagaaggtgcacatccccaagatcctgccctggcatgctggcacctacagctgtgtggccgagaacatcctgggcaccggccagaggggccctggagctgagctggatgtgcagtacccacccaagaaggtgaccaccgtcatccagaaccccatgcccatccgggagggggacacagtgaccctgagctgcaactacaacagcagcaaccccagcgtgaccaggtatgagtggaagccccatggagcctgggaggagcccagcctgggcgtgctgaagatccagaatgtgggctgggacaacaccaccatcgcctgtgccgcctgcaacagctggtgctcctgggccagccctgtggccctgaatgtgcagtatgcccccagagatgtgcgggtgaggaagatcaagcccctgtctgagatccacagcggcaacagcgtgtccctgcagtgtgacttcagcagcagccaccccaaggaggtgcagttcttctgggagaagaatggccgcctgctgggcaaggagagccagctgaactttgacagcatcagcccagaagatgctggcagctacagctgctgggtgaacaacagcatcggccagacagccagcaaggcctggaccctggaggtgctgtatgccccccggcggctgcgggtgtccatgagccctggggaccaggtgatggagggcaagagcgccaccctgacctgtgagagtgatgccaacccccctgtgagccactacacctggtttgactggaacaaccagagcctgccctaccacagccagaagctgcggctggagcctgtgaaggtgcagcacagcggggcctactggtgccagggcaccaacagcgtgggcaagggccgcagccccctgagcaccctgactgtgtactacagccctgagaccatcggccggcgggtggccgtgggcctgggcagctgcctggccatcctgatcctggccatctgtggcctgaagctgcagaggcgctggaagaggacccagagccagcagggcctgcaggagaacagcagcggccagagcttctttgtgaggaacaagaagcgctgccgggtgctgagagatgctgagaccagccctggcctgaggtag

SEQ ID NO: 72287 - DNA, 2256 bp, Artificial Sequence
  derived and/or modified sequence
atgcacctgctgggcccctggctgctgctgctggtgctggagtacctggcattcagtgattctagtaaatgggtcttcgagcatcctgagaccctgtatgcttgggagggcgcatgcgtgtggatcccctgcacttatagggctctcgacggtgatttagaaagttttatcttatttcacaatcccgaatataacaaaaacacatccaagttcgatggaacccggttatatgagagcaccaaagacggcaaagtgccatccgaacaaaagcgagtgcagttcctgggcgacaaaaacaaaaactgcaccttgtcaattcatcctgtgcatctaaacgactctgggcagctgggcctgaggatggagtcaaaaacagaaaagtggatggaaaggatccatctgaacgtctcagagcggcctttcccaccccacattcagctaccccccgagattcaggagtcccaggaggtcacgctgacatgcctgctaaatttttcgtgttatgggtatcctattcaactgcagtggcttctcgagggagtacctatgcggcaggccgcagtcacttctacatcactgacaataaaatctgtcttcacaagatctgagttgaagttctctcctcagtggtctcatcacgggaaaattgtcacatgccagctgcaagatgcagatggaaaattcctgtcaaacgatacagtccagctgaatgtgaaacacacccctaaactggaaatcaaggttacccctagtgatgccattgttcgtgaaggtgactcagtcacaatgacttgtgaggtttcctcttctaaccccgagtacacaaccgtttcttggctgaaggacggtacttcattaaagaagcagaacacctttactctaaatctcagggaggttactaaggatcagtccggcaagtactgctgtcaggtgtctaacgacgtgggtcctgggagatccgaggaagtattccttcaagtccagtatgcccctgaaccttcaaccgttcaaattttgcattctcctgcagtcgagggcagccaggtggagttcttatgtatgagcctcgccaatccattgcctactaactatacttggtatcataacgggaaagaaatgcagggccgtactgaagagaaagttcatattcctaaaatcctaccctggcacgctggtacgtacagctgcgtggctgagaacatcctgggtaccggacagcgcgggccgggggctgagttggacgtacagtacccacccaaaaaagttacaaccgtgattcaaaaccccatgcctatccgcgagggcgatactgtcaccctttcatgcaactataactctagtaacccttctgtcacgagatatgagtggaagccgcacggagcatgggaagaaccctctctgggggtgttaaagattcaaaacgttggttgggacaacaccactatcgcatgtgccgcttgcaattcctggtgctcatgggctagtcccgtcgcactcaacgtacagtacgccccaagggacgtgcgcgtgaggaagattaagcctctttccgagatccacagcgggaacagtgtgtccttgcagtgtgatttctccagcagtcaccccaaagaggtgcaattcttctgggagaaaaacggcaggctgctgggaaaggaatcccaactcaacttcgactctattagtccggaagacgccggctcctactcttgctgggttaacaatagcattggccagaccgcctcaaaggcatggactctggaagtcctttacgcgcctcggcgcctgcgagtctctatgtccccaggtgaccaggtgatggaggggaagtcagctacactcacgtgcgagagcgatgccaacccccccgtatcccattacacctggtttgactggaacaaccagagccttccctaccactcccagaaactccgactggagccagtcaaagttcagcactccggggcgtactggtgccaggggaccaattcagtcggcaagggacgcagtccccttagtactctcacagtatactattctccagagaccattggcaggcgtgttgctgtgggcttgggcagctgtttggccattcttattctagctatctgcggtttaaaattacagcgcagatggaaacgaacgcagtcccaacagggactgcaggaaaactcgagtgggcagtctttctttgttcggaataaaaaacgttgtcgggtgctgcgcgacgcggagacctcaccaggattgagatag

SEQ ID NO: 72288 - DNA, 2256 bp, Artificial Sequence
  derived and/or modified sequence
atgcacctcctgggcccttggctgctgctactggttttggaatacctcgcattcagtgattcttctaaatgggtgtttgaacatccagagacgctgtacgcctgggagggggcatgcgtctggattccttgtacttacagagccttagatggcgacctggagtccttcatcctgttccacaatcctgagtacaacaaaaacacatccaaattcgatggtacaaggctatatgaatccacaaaggatgggaaggtgcctagtgaacagaaaagggtgcagtttctcggtgataaaaacaagaactgcactctgagcattcatcccgtgcatctgaatgatagcggccaactgggtcttcgaatggagtccaagactgaaaaatggatggagcgcatccacctcaatgtgtctgaaaggccattcccccctcacattcagctgccccctgagatccaagaatcccaggaagtgactctcacatgccttctcaattttagttgctacggatatcctatccagctgcagtggcttctggaaggcgtccctatgagacaggcggctgtgacaagcacttccctaacaattaaatctgtatttactcggtccgaactaaagttctccccacagtggtcccaccatggaaagatagtaacgtgtcagctgcaggacgcagatggcaaatttctgtctaatgacacagtccagctgaacgtcaagcacaccccaaagctggagatcaaagtgactccgagcgacgctatcgtgcgggagggtgactcagtgaccatgacatgcgaagtgtcttcatctaacccagaatatactaccgtgtcgtggctaaaagacggaacgtccctgaagaagcagaatacctttacgctgaatcttcgtgaagttacaaaggaccagtccgggaagtattgttgccaggtgagtaacgacgtagggccaggtcgatcggaggaggtcttcctgcaggttcagtatgcacccgagccaagcaccgtgcagatactccattcaccagccgtggaaggcagccaggtcgagtttctgtgcatgtcactggcaaatcctctacctactaattacacatggtaccacaacggtaaggagatgcaaggcagaaccgaggaaaaggtccacattcccaaaatcctcccctggcacgccggtacatactcatgtgtggctgaaaacatacttgggactggccagagaggccctggtgcagaactggacgtgcagtaccctccaaaaaaagtgacgacagtgatccagaatccgatgcccataagagagggagatacagtgacgctgtcatgcaactataattcctcaaatcccagtgtgacacgctacgaatggaagcctcatggtgcctgggaagagccttccctcggcgtgctgaaaatacaaaatgtgggttgggataacactacaatcgcctgcgcggcatgtaactcttggtgctcttgggcaagcccggtggcactcaatgttcagtacgcgcctagagacgttcgggtgcgcaaaatcaagcctcttagtgaaatccactcaggaaattccgtgtcccttcaatgcgatttcagcagctctcatcctaaagaagtgcagtttttttgggagaagaatgggagactgcttggaaaagagagccagctcaactttgattcaatctcaccagaggatgctgggtcctactcttgctgggtcaacaattccatcggacagacagcatccaaagcttggacactggaggtcctgtacgctcctcggagactgcgggttagcatgtcacctggggaccaggtgatggaggggaaatcagctaccctgacctgcgagtccgatgcaaatcccccagtgagtcactatacctggttcgattggaacaatcagtccctaccttatcatagccagaagctgagactcgagccagtaaaggtgcagcactcaggcgcatactggtgccaaggcacgaatagtgtgggaaaaggcaggtcaccactttctacattaacagtctattattcacccgagaccattggtcggagagtggcagtgggcctgggaagttgcctggctatccttattttagctatctgcggcctcaaactgcagagacgatggaaacgaactcagagccaacagggactgcaggagaactcctcagggcaaagcttctttgttaggaataaaaagcgctgtcgcgtgctgcgtgacgccgaaacatctcccggattgaggtag

SEQ ID NO: 72289 - DNA, 3167 bp, Artificial Sequence
  derived and/or modified sequence
acttctccttttgctctcagatgctgccagggtccctgaagagggaagacacgcggaaacaggcttgcacccagacacgacaccatgcatctcctcggcccctggctcctgctcctggttctagaatacttggctttctctgactcaagtaaatgggtttttgagcaccctgaaaccctctacgcctgggagggggcctgcgtctggatcccctgcacctacagagccctagatggtgacctggaaagcttcatcctgttccacaatcctgagtataacaagaacacctcgaagtttgatgggacaagactctatgaaagcacaaaggatgggaaggttccttctgagcagaaaagggtgcaattcctgggagacaagaataagaactgcacactgagtatccacccggtgcacctcaatgacagtggtcagctggggctgaggatggagtccaagactgagaaatggatggaacgaatacacctcaatgtctctgaaaggccttttccacctcatatccagctccctccagaaattcaagagtcccaggaagtcactctgacctgcttgctgaatttctcctgctatgggtatccgatccaattgcagtggctcctagagggggttccaatgaggcaggctgctgtcacctcgacctccttgaccatcaagtctgtcttcacccggagcgagctcaagttctccccacagtggagtcaccatgggaagattgtgacctgccagcttcaggatgcagatgggaagttcctctccaatgacacggtgcagctgaacgtgaagcacaccccgaagttggagatcaaggtcactcccagtgatgccatagtgagggagggggactctgtgaccatgacctgcgaggtcagcagcagcaacccggagtacacgacggtatcctggctcaaggatgggacctcgctgaagaagcagaatacattcacgctaaacctgcgcgaagtgaccaaggaccagagtgggaagtactgctgtcaggtctccaatgacgtgggcccgggaaggtcggaagaagtgttcctgcaagtgcagtatgccccggaaccttccacggttcagatcctccactcaccggctgtggagggaagtcaagtcgagtttctttgcatgtcactggccaatcctcttccaacaaattacacgtggtaccacaatgggaaagaaatgcagggaaggacagaggagaaagtccacatcccaaagatcctcccctggcacgctgggacttattcctgtgtggcagaaaacattcttggtactggacagaggggcccgggagctgagctggatgtccagtatcctcccaagaaggtgaccacagtgattcaaaaccccatgccgattcgagaaggagacacagtgaccctttcctgtaactacaattccagtaaccccagtgttacccggtatgaatggaaaccccatggcgcctgggaggagccatcgcttggggtgctgaagatccaaaacgttggctgggacaacacaaccatcgcctgcgcagcttgtaatagttggtgctcgtgggcctcccctgtcgccctgaatgtccagtatgccccccgagacgtgagggtccggaaaatcaagcccctttccgagattcactctggaaactcggtcagcctccaatgtgacttctcaagcagccaccccaaagaagtccagttcttctgggagaaaaatggcaggcttctggggaaagaaagccagctgaattttgactccatctccccagaagatgctgggagttacagctgctgggtgaacaactccataggacagacagcgtccaaggcctggacacttgaagtgctgtatgcacccaggaggctgcgtgtgtccatgagcccgggggaccaagtgatggaggggaagagtgcaaccctgacctgtgagagcgacgccaaccctcccgtctcccactacacctggtttgactggaataaccaaagcctcccctaccacagccagaagctgagattggagccggtgaaggtccagcactcgggtgcctactggtgccaggggaccaacagtgtgggcaagggccgttcgcctctcagcaccctcaccgtctactatagcccggagaccatcggcaggcgagtggctgtgggactcgggtcctgcctcgccatcctcatcctggcaatctgtgggctcaagctccagcgacgttggaagaggacacagagccagcaggggcttcaggagaattccagcggccagagcttctttgtgaggaataaaaagagatgcagagtcctcagagatgcagagacctcccccggactgcgatgacacggtcacttattcagcattgcacaagcgccaagtgggcgactatgagaacgtcattccagattttccagaagatgaggggattcattactcagagctgatccagtttggggtcggggagcggcctcaggcacaagaaaatgtggactatgtgatcctcaaacattgacactggatgggctgcagcagaggcactgggggcagcgggggccagggaagtccccgagtttccccagacaccgccacatggcttcctcctgcgcgcatgtgcgcacacacacacacacacgcacacacacacacacacactcactgcggagaaccttgtgcctggctcagagccagtctttttggtgagggtaaccccaaacctccaaaactcctgcccctgttctcttccactctccttgctacccagaaatccatctaaatacctgccctgacatgcacacctccccctgcccccaccacggccactggccatctccacccccagctgcttgtgtccctcctgggatctgctcgtcatcatttttccttcccttctccatctctctggccctctacccctgatctgacatccccactcacgaatattatgcccagtttctgcctctgagggaaagcccagaaaaggacagaaacgaagtagaaaggggcccagtcctggcctggcttctcctttggaagtgaggcattgcacagggagacgtacgtatcagcggccccttgactctggggactccgggtttgagatggacacactggtgtggattaacctgccagggagacagagctcacaataaaaatggctcagatgccacttc

SEQ ID NO: 72290 - DNA, 2256 bp, Artificial Sequence
  derived and/or modified sequence
atgcacctgctgggcccctggctgctgctgctggtgctggagtacctggccttcagcgacagcagcaagtgggtgttcgagcaccccgagaccctgtacgcctgggagggcgcctgcgtgtggatcccctgcacctacagagccctggacggcgacctggagagcttcatcctgttccacaaccccgagtacaacaagaacaccagcaagttcgacggcaccagactgtacgagagcaccaaggacggcaaggtgcccagcgagcagaagagagtgcagttcctgggcgacaagaacaagaactgcaccctgagcatccaccccgtgcacctgaacgacagcggccagctgggcctgagaatggagagcaagaccgagaagtggatggagagaatccacctgaacgtgagcgagagacccttccccccccacatccagctgccccccgagatccaggagagccaggaggtgaccctgacctgcctgctgaacttcagctgctacggctaccccatccagctgcagtggctgctggagggcgtgcccatgagacaggccgccgtgaccagcaccagcctgaccatcaagagcgtgttcaccagaagcgagctgaagttcagcccccagtggagccaccacggcaagatcgtgacctgccagctgcaggacgccgacggcaagttcctgagcaacgacaccgtgcagctgaacgtgaagcacacccccaagctggagatcaaggtgacccccagcgacgccatcgtgagagagggcgacagcgtgaccatgacctgcgaggtgagcagcagcaaccccgagtacaccaccgtgagctggctgaaggacggcaccagcctgaagaagcagaacaccttcaccctgaacctgagagaggtgaccaaggaccagagcggcaagtactgctgccaggtgagcaacgacgtgggccccggcagaagcgaggaggtgttcctgcaggtgcagtacgcccccgagcccagcaccgtgcagatcctgcacagccccgccgtggagggcagccaggtggagttcctgtgcatgagcctggccaaccccctgcccaccaactacacctggtaccacaacggcaaggagatgcagggcagaaccgaggagaaggtgcacatccccaagatcctgccctggcacgccggcacctacagctgcgtggccgagaacatcctgggcaccggccagagaggccccggcgccgagctggacgtgcagtacccccccaagaaggtgaccaccgtgatccagaaccccatgcccatcagagagggcgacaccgtgaccctgagctgcaactacaacagcagcaaccccagcgtgaccagatacgagtggaagccccacggcgcctgggaggagcccagcctgggcgtgctgaagatccagaacgtgggctgggacaacaccaccatcgcctgcgccgcctgcaacagctggtgcagctgggccagccccgtggccctgaacgtgcagtacgcccccagagacgtgagagtgagaaagatcaagcccctgagcgagatccacagcggcaacagcgtgagcctgcagtgcgacttcagcagcagccaccccaaggaggtgcagttcttctgggagaagaacggcagactgctgggcaaggagagccagctgaacttcgacagcatcagccccgaggacgccggcagctacagctgctgggtgaacaacagcatcggccagaccgccagcaaggcctggaccctggaggtgctgtacgcccccagaagactgagagtgagcatgagccccggcgaccaggtgatggagggcaagagcgccaccctgacctgcgagagcgacgccaacccccccgtgagccactacacctggttcgactggaacaaccagagcctgccctaccacagccagaagctgagactggagcccgtgaaggtgcagcacagcggcgcctactggtgccagggcaccaacagcgtgggcaagggcagaagccccctgagcaccctgaccgtgtactacagccccgagaccatcggcagaagagtggccgtgggcctgggcagctgcctggccatcctgatcctggccatctgcggcctgaagctgcagagaagatggaagagaacccagagccagcagggcctgcaggagaacagcagcggccagagcttcttcgtgagaaacaagaagagatgcagagtgctgagagacgccgagaccagccccggcctgagatag

SEQ ID NO: 72291 - protein, 670 aa, Artificial Sequence
  derived and/or modified sequence
MHLLGPWLLLLVLEYLAFSDSSKWVFEHPETLYAWEGACVWIPCTYRALDGDLESFILFHNPEYNKNTSKFDGTRLYESTKDGKVPSEQKRVQFLGDKNKNCTLSIHPVHLNDSGQLGLRMESKTEKWMERIHLNVSERPFPPHIQLPPEIQESQEVTLTCLLNFSCYGYPIQLQWLLEGVPMRQAAVTSTSLTIKSVFTRSELKFSPQWSHHGKIVTCQLQDADGKFLSNDTVQLNVKHPPKKVTTVIQNPMPIREGDTVTLSCNYNSSNPSVTRYEWKPHGAWEEPSLGVLKIQNVGWDNTTIACAACNSWCSWASPVALNVQYAPRDVRVRKIKPLSEIHSGNSVSLQCDFSSSHPKEVQFFWEKNGRLLGKESQLNFDSISPEDAGSYSCWVNNSIGQTASKAWTLEVLYAPRRLRVSMSPGDQVMEGKSATLTCESDANPPVSHYTWFDWNNQSLPYHSQKLRLEPVKVQHSGAYWCQGTNSVGKGRSPLSTLTVYYSPETIGRRVAVGLGSCLAILILAICGLKLQRRWKRTQSQQGLQENSSGQSFFVRNKKVRRAPLSEGPHSLGCYNPMMEDGISYTTLRFPEMNIPRTGDAESSEMQRPPPDCDDTVTYSALHKRQVGDYENVIPDFPEDEGIHYSELIQFGVGERPQAQENVDYVILKH

SEQ ID NO: 72292 - DNA, 2013 bp, Artificial Sequence
  derived and/or modified sequence
atgcacctcctcggcccatggctgctgctgttggtgttggaatatctggccttctccgattcgtccaagtgggtgtttgagcatccagagactctctacgcatgggaaggcgcttgtgtgtggatcccgtgcacttacagagctctcgatggcgatctggagtctttcatcctcttccacaatcctgagtacaataaaaacaccagtaagttcgacggaacaagactgtacgagtccaccaaagatggcaaggtgccatcagaacagaaacgcgtgcagtttctcggcgataagaataagaattgcacactgagcatccatccagtgcacctcaatgacagcggtcagctgggcctgcgcatggaaagcaagaccgaaaagtggatggaaagaatccatctgaacgtgagcgaaagaccattccccccccacattcagcttccaccagaaatccaggagtcacaggaggtgaccctcacctgtctgttgaactttagctgttacgggtatcccatccagctgcaatggctgctagagggcgtccccatgcggcaagccgccgttacgagcacatctctgaccatcaaaagcgtgttcacccgctccgagctgaagttcagcccacagtggtcacatcatggcaaaatagttacgtgccagctccaggacgctgacgggaagttcctgagtaacgacacagttcagttgaatgtcaaacacccccctaaaaaagtgactaccgtgattcagaatcccatgcccattcgcgaaggcgacaccgtgaccctctcatgcaactataactctagtaatcccagcgtgactcggtacgaatggaaaccacatggggcgtgggaagagccctctctgggcgtattgaagatccagaacgtgggatgggacaatactactatcgcctgtgctgcctgtaactcctggtgcagctgggctagccccgtcgccctcaatgtgcaatatgcccccagggacgtcagagtgcgcaagataaaacctctgtccgagatacacagtgggaatagtgtgtcattacagtgtgacttcagctcatcccaccctaaggaagttcagtttttctgggagaaaaacggacggcttctgggaaaggaatctcaactcaatttcgattcaatttcacccgaggacgccggatcttatagctgctgggtcaacaatagtatcggacaaacggctagcaaggcctggaccctggaggttctttacgctccgcgaagactgagggtctcaatgtcacctggtgatcaggttatggaaggcaagagtgccacactgacttgtgaatccgacgcaaatccacccgtatctcactatacttggttcgattggaataatcagagcttgccctatcattcccaaaagctccgcttggaacctgtgaaagtccagcactccggcgcatattggtgtcaggggaccaatagtgttggaaagggacgaagtcccctcagcactctcaccgtgtattatagccccgagactatcggccgccgggttgcagtaggcctgggctcatgcctggccatccttattctcgccatctgtgggttgaagcttcagagacggtggaaaaggactcagtcccagcaagggctgcaggaaaatagcagcggccagagcttctttgtgcgcaataagaaagtgagacgagccccgctttcagaaggacctcactctcttgggtgttataatcctatgatggaggacggtatctcctatacgactctcaggtttcccgagatgaatattccgcgaacaggggacgctgaatcttctgagatgcagcgtcccccacccgattgcgacgacacagttacatattccgctctacataaaaggcaggtaggagattacgagaacgtcatacctgatttccccgaggacgaaggcatccactattcagagctcatccagttcggcgttggcgaacggccccaggcccaggagaacgtggactacgtaatactaaaacactag

SEQ ID NO: 72293 - DNA, 2013 bp, Artificial Sequence
  derived and/or modified sequence
atgcacctgctgggcccctggctgctgctgctggtgctggagtacctggccttcagtgacagcagcaagtgggtgtttgagcaccctgagaccctgtatgcctgggagggcgcctgtgtgtggatcccctgcacctaccgggccctggatggagacctggagagcttcatcctcttccacaaccctgagtacaacaagaacaccagcaagtttgatggcacccggctgtatgagagcaccaaggatggcaaggtgcccagcgagcagaagagggtgcagttcctgggggacaagaacaagaactgcaccctgagcatccaccctgtgcacctgaatgacagcggccagctgggcctgaggatggagagcaagacagagaagtggatggagcgcatccacctgaatgtgtctgagcggcccttccccccccacatccagctgcccccagagatccaggagagccaggaggtgaccctgacctgcctgctgaacttcagctgctacggctaccccatccagctgcagtggctgctggagggcgtgcccatgaggcaggccgctgtgaccagcaccagcctgaccatcaagtctgtgttcaccaggtctgagctgaagttcagcccccagtggagccaccacggcaagatcgtgacctgccagctgcaggatgctgatggcaagttcctgagcaatgacacagtgcagctgaatgtgaagcacccccccaagaaggtgaccaccgtcatccagaaccccatgcccatccgggagggggacacagtgaccctgagctgcaactacaacagcagcaaccccagcgtgaccaggtatgagtggaagccccacggggcctgggaggagcccagcctgggcgtgctgaagatccagaatgtgggctgggacaacaccaccatcgcctgtgccgcctgcaacagctggtgctcctgggccagccctgtggccctgaatgtgcagtatgcccccagagatgtgcgggtgaggaagatcaagcccctgtctgagatccacagcggcaacagcgtgtccctgcagtgtgacttcagcagcagccaccccaaggaggtgcagttcttctgggagaagaatggccgcctgctgggcaaggagagccagctgaactttgacagcatcagcccagaagatgctggcagctacagctgctgggtgaacaacagcatcggccagacagccagcaaggcctggaccctggaggtgctgtatgccccccggcggctgcgggtgtccatgagccctggggaccaggtgatggagggcaagagcgccaccctgacctgtgagagtgatgccaacccccctgtgagccactacacctggtttgactggaacaaccagagcctgccctaccacagccagaagctgcggctggagcctgtgaaggtgcagcacagcggggcctactggtgccagggcaccaacagcgtgggcaagggccgcagccccctgagcaccctgactgtgtactacagccctgagaccatcggcagaagagtggccgtgggcctgggcagctgcctggccatcctgatcctggccatctgtggcctgaagctgcagaggcgctggaagaggacccagagccagcagggcctgcaggagaacagcagcggccagagcttctttgtgaggaacaagaaggtgagaagagcccccctgtctgagggcccccacagcctgggctgctacaaccccatgatggaggatggcatctcctacaccaccctgcgcttccctgagatgaacatccccaggactggagatgctgagagcagcgagatgcagaggcctcctccagactgtgatgacacagtgacctacagcgccctgcacaagaggcaggtgggggactatgaaaatgtcatcccagacttcccagaagatgagggcatccactacagcgagctgatccagtttggagtgggggagcggccccaggcccaggagaatgtggactatgtgatcctgaagcactag

SEQ ID NO: 72294 - DNA, 2013 bp, Artificial Sequence
  derived and/or modified sequence
atgcacctgctgggcccctggctgctgctgctggtgctggagtacctggcattttcagactcatccaaatgggtgtttgagcatcctgaaaccctgtacgcctgggagggagcctgtgtgtggattccatgtacgtaccgggccttggacggggacctggagagcttcatcctattccataatcctgagtataacaaaaatacttctaagtttgacggcacacgtctctacgaatcaacaaaggacggcaaagtcccttccgagcagaaaagagttcagtttctaggagataagaacaagaattgtacactgtctatccaccctgtgcatctgaatgactcaggccagcttggtctgcgcatggagtccaagacggagaagtggatggagcggatccatctcaatgtctcagagcggccatttccacctcatattcagctcccccctgaaatccaggaatcgcaggaggtcaccctgacgtgtttgctcaacttctcctgctacggatatccgatccagctacagtggctcctagagggtgtgcccatgaggcaggctgcggtgaccagcactagcttgacaattaagagtgtgtttacacggagtgaactgaaattttccccacagtggagccatcatggcaagatcgttacctgtcaattgcaggatgccgacggcaagttcctgagcaacgacaccgtgcagctcaacgttaagcacccccctaagaaggtcaccactgttattcaaaacccaatgcctattagagagggtgataccgtgacacttagttgcaactataacagctccaacccctctgtgacaaggtatgaatggaagcctcatggcgcctgggaggagcccagccttggcgtcctcaagatccaaaatgtgggatgggataataccaccattgcctgcgccgcctgtaattcctggtgtagctgggccagccctgttgccctcaacgtgcaatatgctccccgggacgtacgggtcaggaagataaaaccgctcagcgagatccattcaggaaactctgtcagcttgcagtgcgacttcagctcttcccaccctaaagaggtgcagttcttttgggagaaaaacgggcggttgctcgggaaagaaagtcaactcaacttcgactctatcagccctgaggacgccgggtcctactcctgttgggtgaataactcaatcggacagaccgcctccaaagcctggaccctggaggtgctgtacgccccaaggaggttgagagtctctatgtctcctggcgatcaggttatggaaggtaaatcagccacactgacctgcgagtccgacgccaaccctcctgtgtctcactacacctggttcgactggaataaccagtcgttaccctaccatagtcagaaactacggctggaacccgtgaaggttcagcactctggcgcttactggtgccagggcacgaacagcgtgggcaaggggagatcccccttgagcaccctcacagtatattacagtcctgaaacaataggccgacgcgtggctgtcggacttgggagttgtctcgcaatcttaatccttgctatttgtggacttaaacttcagagaaggtggaagcgcacacagagccagcagggactgcaggaaaacagcagcggccagtccttttttgtgagaaacaagaaggtccgtcgcgctccactgagcgagggaccccatagtcttggctgctataatcctatgatggaagatgggattagctacacgactctgaggttccccgagatgaacattcccaggacaggagatgccgaaagcagcgagatgcaacggcctcccccagattgtgacgatacagtgacctattctgccctgcacaaacgccaggtgggcgactacgagaacgtgatcccagatttcccggaggacgagggcatacattatagtgagctcatacagttcggcgttggcgagagacctcaggcgcaggaaaatgtcgactacgttatcctcaaacattag

SEQ ID NO: 72295 - DNA, 2013 bp, Artificial Sequence
  derived and/or modified sequence
atgcacctcctcggtccatggctcctacttctggtcttagagtaccttgccttctctgacagttccaaatgggtatttgagcatcctgagaccctttacgcttgggagggcgcttgtgtttggataccgtgtacctacagagcgttggacggggaccttgagtcattcattctgtttcataacccggagtataataagaataccagtaagttcgacggtactcggctgtacgaaagcaccaaggatgggaaggtgccatccgagcaaaagcgggtgcaattcttaggcgataaaaataaaaattgtacattgtcaattcaccctgtccacctgaacgattctggacagttgggcctcaggatggagtccaaaacagaaaaatggatggaaagaatccacctgaatgtatccgagaggccttttcctcctcacatccaactgcctcctgagatccaagagagtcaggaggttaccctgacctgcctccttaacttttcatgctacggctaccccatacagttgcagtggctcctggagggagtcccaatgcggcaggcagctgtaacttcaacttcattaaccattaagtcagtttttacaagaagcgagttgaagtttagtccccagtggtcccatcatgggaagatcgtgacctgtcaactgcaggatgcagacgggaagtttttaagcaatgataccgtacagctgaatgtgaaacaccccccaaagaaggttactaccgtcattcagaaccctatgcccatcagagagggggataccgttacattgagctgtaattacaacagtagtaatccaagcgtaacccggtacgagtggaaaccccacggcgcttgggaagagccttccctaggggtgctgaaaatccagaatgtggggtgggataatacaactattgcatgcgcagcttgcaatagttggtgcagttgggcaagccccgtggcacttaatgtccagtatgccccacgggatgtccgtgttcggaaaattaagcccctatccgagatccacagcggaaatagcgtatccctccagtgcgacttctccagttctcaccctaaagaagtgcagttcttttgggaaaagaatggccgactccttggtaaggaaagtcagctgaactttgactcgatcagccccgaggacgctggctcctattcctgttgggtgaataattctattggacagacagcaagcaaggcttggacactcgaggtgttgtatgcacctagacggctcagggtctctatgtcgcctggtgatcaagtcatggagggcaaatccgccacacttacttgcgaatccgatgctaatccgcctgtctcacattacacctggtttgactggaacaaccagtcccttccatatcattcccagaagctccggctcgagcctgttaaggtgcagcattccggagcctattggtgccagggtaccaatagcgtgggaaagggacgaagccccctctccactctcacagtctactacagccccgaaactataggaagaagggtggctgttggccttggtagttgtctggctatactgatactggctatctgtggcttgaagctccagcggcgatggaagaggactcagtcccaacaggggctccaggaaaactcctccggtcaatctttttttgtgcggaacaaaaaggtgcggcgtgcgccattgtcggaggggccacactctctcggttgctataatccgatgatggaggacggaattagctatactacgctccggtttccagaaatgaatataccaagaaccggggatgctgagtcaagcgagatgcagcggccaccccctgattgcgacgacacggttacctacagcgcactgcacaaacggcaagtgggcgactacgagaatgtcatcccagactttcccgaggatgaaggaatccattacagcgaactcattcagtttggagtcggtgagaggccccaggcccaggaaaatgtagactacgtcatattaaagcactag

SEQ ID NO: 72296 - DNA, 2755 bp, Artificial Sequence
  derived and/or modified sequence
acttctccttttgctctcagatgctgccagggtccctgaagagggaagacacgcggaaacaggcttgcacccagacacgacaccatgcatctcctcggcccctggctcctgctcctggttctagaatacttggctttctctgactcaagtaaatgggtttttgagcaccctgaaaccctctacgcctgggagggggcctgcgtctggatcccctgcacctacagagccctagatggtgacctggaaagcttcatcctgttccacaatcctgagtataacaagaacacctcgaagtttgatgggacaagactctatgaaagcacaaaggatgggaaggttccttctgagcagaaaagggtgcaattcctgggagacaagaataagaactgcacactgagtatccacccggtgcacctcaatgacagtggtcagctggggctgaggatggagtccaagactgagaaatggatggaacgaatacacctcaatgtctctgaaaggccttttccacctcatatccagctccctccagaaattcaagagtcccaggaagtcactctgacctgcttgctgaatttctcctgctatgggtatccgatccaattgcagtggctcctagagggggttccaatgaggcaggctgctgtcacctcgacctccttgaccatcaagtctgtcttcacccggagcgagctcaagttctccccacagtggagtcaccatgggaagattgtgacctgccagcttcaggatgcagatgggaagttcctctccaatgacacggtgcagctgaacgtgaagcatcctcccaagaaggtgaccacagtgattcaaaaccccatgccgattcgagaaggagacacagtgaccctttcctgtaactacaattccagtaaccccagtgttacccggtatgaatggaaaccccatggcgcctgggaggagccatcgcttggggtgctgaagatccaaaacgttggctgggacaacacaaccatcgcctgcgcagcttgtaatagttggtgctcgtgggcctcccctgtcgccctgaatgtccagtatgccccccgagacgtgagggtccggaaaatcaagcccctttccgagattcactctggaaactcggtcagcctccaatgtgacttctcaagcagccaccccaaagaagtccagttcttctgggagaaaaatggcaggcttctggggaaagaaagccagctgaattttgactccatctccccagaagatgctgggagttacagctgctgggtgaacaactccataggacagacagcgtccaaggcctggacacttgaagtgctgtatgcacccaggaggctgcgtgtgtccatgagcccgggggaccaagtgatggaggggaagagtgcaaccctgacctgtgagagcgacgccaaccctcccgtctcccactacacctggtttgactggaataaccaaagcctcccctaccacagccagaagctgagattggagccggtgaaggtccagcactcgggtgcctactggtgccaggggaccaacagtgtgggcaagggccgttcgcctctcagcaccctcaccgtctactatagcccggagaccatcggcaggcgagtggctgtgggactcgggtcctgcctcgccatcctcatcctggcaatctgtgggctcaagctccagcgacgttggaagaggacacagagccagcaggggcttcaggagaattccagcggccagagcttctttgtgaggaataaaaaggttagaagggcccccctctctgaaggcccccactccctgggatgctacaatccaatgatggaagatggcattagctacaccaccctgcgctttcccgagatgaacataccacgaactggagatgcagagtcctcagagatgcagagacctcccccggactgcgatgacacggtcacttattcagcattgcacaagcgccaagtgggcgactatgagaacgtcattccagattttccagaagatgaggggattcattactcagagctgatccagtttggggtcggggagcggcctcaggcacaagaaaatgtggactatgtgatcctcaaacattgacactggatgggctgcagcagaggcactgggggcagcgggggccagggaagtccccgagtttccccagacaccgccacatggcttcctcctgcgcgcatgtgcgcacacacacacacacacgcacacacacacacacacactcactgcggagaaccttgtgcctggctcagagccagtctttttggtgagggtaaccccaaacctccaaaactcctgcccctgttctcttccactctccttgctacccagaaatccatctaaatacctgccctgacatgcacacctccccctgcccccaccacggccactggccatctccacccccagctgcttgtgtccctcctgggatctgctcgtcatcatttttccttcccttctccatctctctggccctctacccctgatctgacatccccactcacgaatattatgcccagtttctgcctctgagggaaagcccagaaaaggacagaaacgaagtagaaaggggcccagtcctggcctggcttctcctttggaagtgaggcattgcacagggagacgtacgtatcagcggccccttgactctggggactccgggtttgagatggacacactggtgtggattaacctgccagggagacagagctcacaataaaaatggctcagatgccacttc

SEQ ID NO: 72297 - DNA, 2013 bp, Artificial Sequence
  derived and/or modified sequence
atgcacctgctgggcccctggctgctgctgctggtgctggagtacctggccttcagcgacagcagcaagtgggtgttcgagcaccccgagaccctgtacgcctgggagggcgcctgcgtgtggatcccctgcacctacagagccctggacggcgacctggagagcttcatcctgttccacaaccccgagtacaacaagaacaccagcaagttcgacggcaccagactgtacgagagcaccaaggacggcaaggtgcccagcgagcagaagagagtgcagttcctgggcgacaagaacaagaactgcaccctgagcatccaccccgtgcacctgaacgacagcggccagctgggcctgagaatggagagcaagaccgagaagtggatggagagaatccacctgaacgtgagcgagagacccttccccccccacatccagctgccccccgagatccaggagagccaggaggtgaccctgacctgcctgctgaacttcagctgctacggctaccccatccagctgcagtggctgctggagggcgtgcccatgagacaggccgccgtgaccagcaccagcctgaccatcaagagcgtgttcaccagaagcgagctgaagttcagcccccagtggagccaccacggcaagatcgtgacctgccagctgcaggacgccgacggcaagttcctgagcaacgacaccgtgcagctgaacgtgaagcacccccccaagaaggtgaccaccgtgatccagaaccccatgcccatcagagagggcgacaccgtgaccctgagctgcaactacaacagcagcaaccccagcgtgaccagatacgagtggaagccccacggcgcctgggaggagcccagcctgggcgtgctgaagatccagaacgtgggctgggacaacaccaccatcgcctgcgccgcctgcaacagctggtgcagctgggccagccccgtggccctgaacgtgcagtacgcccccagagacgtgagagtgagaaagatcaagcccctgagcgagatccacagcggcaacagcgtgagcctgcagtgcgacttcagcagcagccaccccaaggaggtgcagttcttctgggagaagaacggcagactgctgggcaaggagagccagctgaacttcgacagcatcagccccgaggacgccggcagctacagctgctgggtgaacaacagcatcggccagaccgccagcaaggcctggaccctggaggtgctgtacgcccccagaagactgagagtgagcatgagccccggcgaccaggtgatggagggcaagagcgccaccctgacctgcgagagcgacgccaacccccccgtgagccactacacctggttcgactggaacaaccagagcctgccctaccacagccagaagctgagactggagcccgtgaaggtgcagcacagcggcgcctactggtgccagggcaccaacagcgtgggcaagggcagaagccccctgagcaccctgaccgtgtactacagccccgagaccatcggcagaagagtggccgtgggcctgggcagctgcctggccatcctgatcctggccatctgcggcctgaagctgcagagaagatggaagagaacccagagccagcagggcctgcaggagaacagcagcggccagagcttcttcgtgagaaacaagaaggtgagaagagcccccctgagcgagggcccccacagcctgggctgctacaaccccatgatggaggacggcatcagctacaccaccctgagattccccgagatgaacatccccagaaccggcgacgccgagagcagcgagatgcagagacccccccccgactgcgacgacaccgtgacctacagcgccctgcacaagagacaggtgggcgactacgagaacgtgatccccgacttccccgaggacgagggcatccactacagcgagctgatccagttcggcgtgggcgagagaccccaggcccaggagaacgtggactacgtgatcctgaagcactag

SEQ ID NO: 72298 - protein, 305 aa, Artificial Sequence
  derived and/or modified sequence
MLAVRKARRKLRMGTICSPNPSGTKTSSEVCNADWMASLPPHLHNLPLSNLAIPGSHDSFSYWVDEKSPVGPDQTQAIKRLARISLVKKLMKKWSVTQNLTFREQLEAGIRYFDLRVSSKPGDADQEIYFIHGLFGIKVWDGLMEIDSFLTQHPQEIIFLDFNHFYAMDETHHKCLVLRIQEAFGNKLCPACSVESLTLRTLWEKNCQVLIFYHCPFYKQYPFLWPGKKIPAPWANTTSVRKLILFLETTLSERASRGSFHVSQAILTPRVKTIARGLVGGLKNTLVHSNRWNSHGPSLLSQERS

SEQ ID NO: 72299 - DNA, 918 bp, Artificial Sequence
  derived and/or modified sequence
atgctggccgtgagaaaggccagaagaaagctgagaatgggcaccatctgcagccccaaccccagcggcaccaagaccagcagcgaggtgtgcaacgccgactggatggccagcctgcccccccacctgcacaacctgcccctgagcaacctggccatccccggcagccacgacagcttcagctactgggtggacgagaagagccccgtgggccccgaccagacccaggccatcaagagactggccagaatcagcctggtgaagaagctgatgaagaagtggagcgtgacccagaacctgaccttcagagagcagctggaggccggcatcagatacttcgacctgagagtgagcagcaagcccggcgacgccgaccaggagatctacttcatccacggcctgttcggcatcaaggtgtgggacggcctgatggagatcgacagcttcctgacccagcacccccaggagatcatcttcctggacttcaaccacttctacgccatggacgagacccaccacaagtgcctggtgctgagaatccaggaggccttcggcaacaagctgtgccccgcctgcagcgtggagagcctgaccctgagaaccctgtgggagaagaactgccaggtgctgatcttctaccactgccccttctacaagcagtaccccttcctgtggcccggcaagaagatccccgccccctgggccaacaccaccagcgtgagaaagctgatcctgttcctggagaccaccctgagcgagagagccagcagaggcagcttccacgtgagccaggccatcctgacccccagagtgaagaccatcgccagaggcctggtgggcggcctgaagaacaccctggtgcacagcaacagatggaacagccacggccccagcctgctgagccaggagagaagctag

SEQ ID NO: 72300 - DNA, 918 bp, Artificial Sequence
  derived and/or modified sequence
atgctggcagtgcgtaaagcaaggaggaagctgcgcatgggaaccatctgcagccctaatccgtcaggaaccaagacgtcgtccgaagtgtgtaacgccgactggatggcttctcttcccccacatttacataatctgcctttgagcaacctggctatccccggaagtcatgactccttctcttactgggtggacgaaaaatcccccgtcgggccggaccagactcaagctattaaaaggctggccaggatttccctggtgaagaaactcatgaagaaatggagcgtcacgcagaacctcacattccgcgagcagctggaggctggaattcgttattttgatttgcgcgtatcctccaagcctggcgacgcagatcaagagatttatttcattcatggcctttttggcatcaaagtgtgggacggcctgatggaaatcgactcttttctgactcaacatccgcaggagatcatcttcctcgacttcaatcatttttacgccatggatgagacacaccacaaatgtcttgtgctgcgaatccaggaggcgtttggtaataaattatgccccgcatgttcagttgagagcctgacccttcgtacgttgtgggaaaaaaattgccaagtcttgattttttaccattgccccttctataagcaatatccattcctctggccgggcaagaagataccggctccctgggctaatacaacctccgtaagaaaactgattctctttcttgagaccactctgagcgaaagggccagcaggggtagctttcacgtgtctcaggccatcctgaccccaagggtgaagaccatcgcacgcggattagtaggcggactcaagaacaccctcgtccacagcaatcgctggaacagccatggcccatctctactcagccaagaacgttcttag

SEQ ID NO: 72301 - DNA, 918 bp, Artificial Sequence
  derived and/or modified sequence
atgctggccgtgaggaaggcccggaggaagctgaggatgggcaccatctgcagccccaaccccagcggcaccaagaccagcagcgaggtgtgcaatgctgactggatggccagcctgcccccccacctgcacaacctgcccctgagcaacctggccatccctggcagccatgacagcttctcctactgggtggatgagaagagccctgtgggccctgaccagacccaggccatcaagaggctggcccgcatcagcctggtgaagaagctgatgaagaagtggagcgtgacccagaacctgaccttccgggagcagctggaggccggcatccgctactttgacctgcgggtgagcagcaagccaggagatgctgaccaggagatctacttcatccacggcctgtttggcatcaaggtgtgggatggcctgatggagattgacagcttcctgacccagcacccccaggagatcatcttcctggacttcaaccacttctacgccatggatgagacccaccacaagtgcctggtgctgcgcatccaggaggccttcggcaacaagctgtgcccagcctgcagcgtggagagcctgaccctgcggaccctgtgggagaagaactgccaggtgctgatcttctaccactgccccttctacaagcagtaccccttcctgtggccaggcaagaagatcccagccccctgggccaacaccacctctgtgaggaagctgatcctcttcctggagaccaccctgtctgagcgggccagccggggcagcttccacgtgtcccaggccatcctgaccccccgggtgaagaccatcgcccggggcctggtgggcggcctgaagaacaccctggtgcacagcaaccgctggaacagccacggccccagcctgctgagccaggagaggagctag

SEQ ID NO: 72302 - DNA, 918 bp, Artificial Sequence
  derived and/or modified sequence
atgctggccgtgcggaaggcccggcggaagctgcggatgggcaccatctgcagccccaacccttctggaaccaagaccagtagcgaggtttgtaacgccgattggatggcttcgttaccgccgcacctgcataacctgccgctgtcaaatctggcaatcccaggaagccatgattccttcagctattgggtagacgaaaagtcacccgtcggaccggatcagactcaggcgatcaagcgactggcccggattagcctagtgaagaagctgatgaaaaaatggagcgtgacccagaatcttaccttcagagagcagctcgaggccggcattcgttattttgatcttcgcgtgtcctcaaaacctggggacgcagatcaagagatctattttattcatggtctgttcggaatcaaggtgtgggatggtcttatggagatcgacagcttcttgacacagcatcctcaggagataatattcctggattttaatcatttctacgcgatggatgaaactcaccataagtgcctggttcttagaatccaagaggcgttcggaaataaattgtgccccgcgtgctccgtcgagtcgctgacattgaggaccttatgggaaaaaaactgccaggtgttgatcttttaccactgccctttttacaagcagtaccccttcctgtggcctggtaaaaagattcctgcaccctgggccaacactacctcagttcgaaagctcatccttttccttgagacaaccttatctgagcgggctagccgtggctcatttcatgtttcacaggcaatcctgacaccgcgcgtgaaaactatcgccagaggtttggtgggagggttaaagaatacattagtccatagcaatcggtggaatagccacggacctagtttactgagccaggagaggtcatag

SEQ ID NO: 72303 - DNA, 1721 bp, Artificial Sequence
  derived and/or modified sequence
tggctgctcctcggactttcagtttatgtaagatttatctctaggggcctaccttcccccatctccagaggggaacataagaagtttaacggagctgggactgagcagattaagggagtggagcggaggctgggccggagagagtggggactgtgagtgctagtgggtaaggatccatctgtttgccccgtcccccagccagaaaggcattttggaaagactggcgtggcaagcgtcgccctgaaacgtccacagagcccaagaagtgatgatcactgagtgagtggcactgggctgagactggccagtttgttaacaacagggatgctagcagttaggaaggccaggaggaaactcaggatggggaccatctgctcccccaaccccagcgggacaaagacatcatcggaggtctgcaatgccgactggatggcctcgctcccccctcacctccacaacctccccctttccaatctggcaatcccaggctcacatgattcattcagctactgggtggatgaaaagtccccagtggggcctgaccaaacccaagctatcaaacgcctcgccaggatctccttggtgaagaagctaatgaagaagtggtctgtgactcagaacctgacatttcgagaacagctggaagctgggatccgctactttgacctgcgtgtgtcttccaaaccaggggatgccgaccaggagatctacttcatccatgggctttttggcatcaaggtctgggatgggctgatggaaattgactcgtttcttacacagcacccccaggagattatcttcctggatttcaaccacttctatgccatggatgagacccatcacaaatgcctggttctgcggatccaggaggcctttggaaacaagctgtgcccagcctgcagtgtggaaagtttgacgctgcgaactctgtgggagaagaactgccaggttcttattttctaccactgtcccttctacaagcagtaccccttcctgtggccaggaaagaagattccagcgccctgggcaaacaccacaagtgtgcgcaaactaatcctcttcttggagaccactctgagtgagcgggcctcacggggctccttccatgtctcccaagcgatcctcacccccagagtgaagaccattgcccggggcttggttgggggcctcaagaacacgctggttcatagcaatcgctggaacagccatgggccatccctgctgagtcaggaaagaagctgagggaagagtcgggattgaaaagcagcagacaaggctggcactgatcccagtttatcctttgagattcagcagaagatcctgatggaggaggaggataccaagagagaggtgcccaaggaagatggagttggtgatgtgcaacatttcggtgagaactttattgtcagaggttttcagtacatatttacaagttcttactccatcatacatattgggaatgagctggcattttcaagcatatacccaggagtccagcaatcattggggaagagagcctgaggctggcaatccttgcccagaactttggtcacctgcttgttcacaggccaccatatcttacttcactgaagtcatatgctgaggttttatttagtccagatgctgaaggatgggaagacccaagcagctggtgtggaggtctttcccagtgactcatcagtcattcagaaatcaaagcctgcacaagaaagggtgggatg

SEQ ID NO: 72304 - DNA, 918 bp, Artificial Sequence
  derived and/or modified sequence
atgttggctgtgcggaaagctagaaggaaacttagaatgggcacaatatgctcgcccaacccaagcggtacaaagacatcatccgaggtgtgcaatgctgattggatggcatctcttcctccccatctgcacaacctgcccctgagcaaccttgctattccaggctcacacgacagcttttcctattgggtagatgaaaagtctcccgttgggcctgaccagacacaggccattaagagactcgctcgcatttcactcgtaaagaagctgatgaaaaagtggtcggtgacccaaaacttaacattccgcgaacaactagaagccggaatccgctacttcgatctccgcgtttcatcgaagcctggcgacgccgatcaggagatctacttcattcatggcttatttggcataaaagtgtgggatggcttgatggaaattgatagtttcttgacccagcatccccaggagatcatctttctagacttcaaccacttttacgccatggacgagacccaccacaagtgcttagtgctgcgcattcaagaggccttcggcaataaactgtgtcctgcctgcagcgtagaaagcctgaccctccggaccctgtgggaaaaaaactgtcaagtgctgatcttttatcattgccccttctacaagcagtacccctttctctggcccggaaaaaagatacccgcaccctgggccaacaccacaagtgtgcgaaagcttatactgttcctggagacgacattgtctgagcgggcttctcgtggatcgttccacgtatcccaggccattctcacacctcgagtaaaaacaatcgcgagaggcctggttggtggattgaagaataccctggtacatagcaatcgatggaatagccacggaccttctctcctgtcacaggaacgcagctag

SEQ ID NO: 72305 - protein, 298 aa, Artificial Sequence
  derived and/or modified sequence
MLLLFLLFEGLCCPGENTAAPQALQSYHLAAEEQLSFRMLQTSSFANHSWAHSEGSGWLGDLQTHGWDTVLGTIRFLKPWSHGNFSKQELKNLQSLFQLYFHSFIQIVQASAGQFQLELKPEAWLSCGPSPGPGRLQLVCHVSGFYPKPVWVMWMRGEQEQRGTQRGDVLPNADETWYLRATLDVAAGEAAGLSCRVKHSSLGGHDLIIHWGGYSIFLILICLTVIVTLVILVVVDSRLKKQSSNKNILSPHTPSPVFLMGANTQDTKNSRHQFCLAQVSWIKNRVLKKWKTRLNQLW

SEQ ID NO: 72306 - DNA, 897 bp, Artificial Sequence
  derived and/or modified sequence
atgctcctcctgttcctcctctttgaagggctctgctgccctggcgaaaacactgcggcaccacaggcgctccaaagctaccacctggctgccgaggaacagctgtcttttcgcatgctacagacttcaagtttcgcaaatcactcctgggcacacagcgagggatcaggatggttgggcgatctacaaacacatgggtgggacaccgtcctggggacgattcggttcttgaagccgtggagccacggcaacttctcaaagcaagagctcaaaaaccttcagagcctgttccagctgtatttccactccttcatacagatcgtgcaggcttccgccggacagtttcaactggaactaaaacctgaagcctggctgtcctgtggaccttcacccggcccaggcagacttcagttagtctgccacgtctctgggttctaccctaaaccggtgtgggtgatgtggatgaggggcgagcaggagcagcgaggaactcagaggggagatgttcttccaaacgccgacgaaacctggtatctgagagcgaccttagatgtcgccgctggtgaggcagctgggctttcatgccgcgtgaagcattcttcactcggaggacatgacctcatcattcattgggggggatattccatcttcctcattctgatctgtctgacagtgatcgttaccctcgtgatcctggtggttgtcgattctcggctgaaaaagcagtctagcaacaagaatatcctgagtcctcacacgccctcccctgtgttcttaatgggagccaacacccaggatacgaagaactcacggcaccagttctgtttagctcaagtgtcatggataaaaaaccgagtgcttaagaagtggaagactcggctcaatcaactgtggtag

SEQ ID NO: 72307 - DNA, 897 bp, Artificial Sequence
  derived and/or modified sequence
atgctgctgctcttcctgctgtttgagggcctgtgctgccctggagagaacacagctgccccccaggccctgcagagctaccacctggccgctgaggagcagctgtccttcaggatgctgcagaccagcagctttgccaaccacagctgggcccacagcgagggcagcggctggctgggggacctgcagacccacggctgggacacagtgctgggcaccatccgcttcctgaagccctggagccacggcaacttcagcaagcaggagctgaagaacctgcagagcctcttccagctgtacttccacagcttcatccagatcgtgcaggccagcgctggccagttccagctggagctgaagccagaggcctggctgagctgtggccccagccctggccctggccgcctgcagctggtgtgccacgtgtctggcttctaccccaagcctgtgtgggtgatgtggatgagaggagagcaggagcagaggggcacccagagaggagatgtgctgcccaatgctgatgagacctggtacctgcgggccaccctggatgtggccgccggggaggccgccggcctgagctgccgggtgaagcacagcagcctgggcggccatgacctgatcatccactggggcggctacagcatcttcctgatcctgatctgcctgaccgtcatcgtgaccctggtgatcctggtggtggtggacagccggctgaagaagcagagcagcaacaagaacatcctgagcccccacacccccagccctgtgttcctgatgggcgccaacacccaggacaccaagaacagccgccaccagttctgcctggcccaggtgtcctggatcaagaacagagtgctgaagaagtggaagacccggctgaaccagctgtggtag

SEQ ID NO: 72308 - DNA, 897 bp, Artificial Sequence
  derived and/or modified sequence
atgctgctgctgttcctgctgttcgagggcctgtgctgccccggcgagaacactgcggctccacaggccctgcagagttaccatctggcagcggaggagcaattgtcttttaggatgctgcaaacgtctagctttgcaaaccactcgtgggctcattcggaagggtcaggatggctgggtgacctgcaaactcacggctgggataccgtcctgggaaccatccggtttctgaaaccttggagccatgggaatttctctaagcaggagctgaaaaaccttcagtccctctttcagctgtatttccactcctttatccagatcgtccaggctagcgccggacagtttcagttggaactaaaaccggaggcctggctgtcctgtggtcccagccctggccctgggcgtcttcaattggtctgccatgtgagcggcttctacccgaagccagtgtgggttatgtggatgcgaggagagcaggagcagagaggtacacaaagaggagacgtcttaccgaacgctgatgaaacctggtatctcagggccacgcttgatgttgctgctggcgaggctgctggactgtcttgccgcgtgaagcacagctctctcgggggccatgacttgataatccactggggagggtacagtatctttctgatcttaatatgtctcacagttatcgtcactctcgtcattctcgttgttgtcgacagccgcttaaagaaacagtcctcaaacaagaacattttatcaccgcacacacccagtcccgttttcttgatgggagcgaacactcaagacacaaaaaattcacgacatcagttttgtttggctcaagtgagctggataaagaacagagtactgaagaaatggaagactcggctgaaccagctgtggtag

SEQ ID NO: 72309 - DNA, 897 bp, Artificial Sequence
  derived and/or modified sequence
atgcttctcctcttcctgctgttcgaaggcctttgttgcccgggtgagaacactgccgctcctcaggctctgcaatcttatcatctcgcagccgaggagcagctgagcttcaggatgttgcagactagtagtttcgcgaaccatagctgggcccacagcgagggatcagggtggctcggcgacctgcagactcacgggtgggatacagtcctgggtaccattagattcctcaagccctggtcccatggaaatttcagcaagcaggagcttaaaaacctgcagtcactgtttcaattgtatttccacagtttcatacagattgtccaggccagcgctggacaattccagctggaattgaagcctgaggcctggctgtcgtgtggtccttcccccggaccaggaagattgcagcttgtctgtcatgtttccggattctaccctaaacccgtgtgggtaatgtggatgagaggtgagcaggaacagaggggaacacagcgaggcgacgtcctgcctaacgccgatgaaacctggtatcttagggccacgttagatgtcgctgctggtgaggccgcaggcctgtcttgccgtgtcaagcatagttcgctcggtggccacgatctcataatccactggggtggctactctatctttttaatccttatctgcctcacggttattgtaacacttgtgattctggttgttgttgactccagactcaagaaacaatcctccaacaagaatatcctgtcgccacacacaccttctcccgtgtttctgatgggggcaaatacgcaggacactaagaactccagacaccagttttgcttggcacaggtcagctggataaaaaatcgagtgctgaagaagtggaagaccaggttaaaccagctgtggtag

SEQ ID NO: 72310 - DNA, 1003 bp, Artificial Sequence
  derived and/or modified sequence
caagggaagtcagacgagagtgcaagagggtgtggagaggggtactgatatctgaattattagggcaggtgtcctgccaaggaatccctcctttaacagagcttcaatgctgctcctgttcctcctcttcgagggtctctgctgtcctggggaaaatacagcagctccccaggctctacaatcctatcatctagcagcagaggagcagctgtccttccgcatgctccaaacttcctcctttgccaaccacagctgggcacacagtgagggctcaggatggctgggtgacctgcagactcatggctgggacactgtcttgggcaccatccgctttctgaagccctggtcccatggaaacttcagcaagcaggagctgaaaaacttacagtcactgttccagttatacttccatagttttatccagatagtgcaagcttctgctggtcaatttcagcttgaattgaagccagaggcctggctgtcctgtggccccagtcctggccctggccgtctgcagcttgtgtgccatgtctcaggattctacccaaagcccgtgtgggtgatgtggatgcggggtgagcaggagcagcggggcactcagcgaggggacgtcctgcctaatgctgacgagacatggtatctccgagcaaccctggatgtggcggctggggaggcagctggcctgtcctgtcgggtgaaacacagcagtctagggggccatgatctaatcatccattggggtggatattccatctttctcatcctgatctgtttgactgtgatagttaccctggtcatattggttgtagttgactcacggttaaaaaaacagagttcaaataagaacattctttctccccacacacccagccctgtctttctcatgggagccaacactcaggacaccaagaattcaagacatcagttctgcttggcacaagtatcgtggatcaaaaacagagtattgaagaagtggaagacacgcctaaaccaactctggtga

SEQ ID NO: 72311 - DNA, 897 bp, Artificial Sequence
  derived and/or modified sequence
atgctgctgctgttcctgctgttcgagggcctgtgctgccccggcgagaacaccgccgccccccaggccctgcagagctaccacctggccgccgaggagcagctgagcttcagaatgctgcagaccagcagcttcgccaaccacagctgggcccacagcgagggcagcggctggctgggcgacctgcagacccacggctgggacaccgtgctgggcaccatcagattcctgaagccctggagccacggcaacttcagcaagcaggagctgaagaacctgcagagcctgttccagctgtacttccacagcttcatccagatcgtgcaggccagcgccggccagttccagctggagctgaagcccgaggcctggctgagctgcggccccagccccggccccggcagactgcagctggtgtgccacgtgagcggcttctaccccaagcccgtgtgggtgatgtggatgagaggcgagcaggagcagagaggcacccagagaggcgacgtgctgcccaacgccgacgagacctggtacctgagagccaccctggacgtggccgccggcgaggccgccggcctgagctgcagagtgaagcacagcagcctgggcggccacgacctgatcatccactggggcggctacagcatcttcctgatcctgatctgcctgaccgtgatcgtgaccctggtgatcctggtggtggtggacagcagactgaagaagcagagcagcaacaagaacatcctgagcccccacacccccagccccgtgttcctgatgggcgccaacacccaggacaccaagaacagcagacaccagttctgcctggcccaggtgagctggatcaagaacagagtgctgaagaagtggaagaccagactgaaccagctgtggtag

SEQ ID NO: 72312 - protein, 231 aa, Artificial Sequence
  derived and/or modified sequence
MLLLFLLFEGLCCPGENTAAPQALQSYHLAAEEQLSFRMLQTSSFANHSWAHSEGSGWLGDLQTHGWDTVLGTIRFLKPWSHGNFSKQELKNLQSLFQLYFHSFIQIVQASAGQFQLELKPEAWLSCGPSPGPGRLQLVCHVSGFYPKPVWVMWMRGGYSIFLILICLTVIVTLVILVVVDSRLKKQSPVFLMGANTQDTKNSRHQFCLAQVSWIKNRVLKKWKTRLNQLW

SEQ ID NO: 72313 - DNA, 696 bp, Artificial Sequence
  derived and/or modified sequence
atgttattgctttttctgttgttcgaaggactgtgctgtcccggggagaacaccgccgcccctcaagccttgcagagctaccatcttgccgctgaggaacaactatcttttagaatgttgcagacatcctctttcgctaaccattcctgggcccacagtgaggggtccggctggctaggggatcttcagacccacgggtgggataccgttttgggaaccattcgattcctaaaaccttggtcccatggaaatttctcaaagcaagagctgaaaaatctgcagagcctgtttcaactttactttcatagctttatacaaattgtgcaggcgtctgctggccaatttcaactggagctgaagccagaggcttggctgagctgtgggccttccccaggacctggaaggcttcagctggtgtgtcacgtgagcgggttctacccaaaaccagtctgggtcatgtggatgcgggggggatactcaatctttctgatactcatctgtttgacagtcatcgttacattagtgatcttggtcgtggttgactctcggcttaaaaaacagtctcccgtcttccttatgggggccaatactcaggacactaaaaactcccgccatcagttctgtctggcccaggtttcttggatcaagaatagggtcttaaaaaaatggaagaccagactaaaccagttgtggtag

SEQ ID NO: 72314 - DNA, 696 bp, Artificial Sequence
  derived and/or modified sequence
atgctgctgctcttcctgctgtttgagggcctgtgctgccctggagagaacacagctgccccccaggccctgcagagctaccacctggccgctgaggagcagctgtccttcaggatgctgcagaccagcagctttgccaaccacagctgggcccacagcgagggcagcggctggctgggggacctgcagacccacggctgggacacagtgctgggcaccatccgcttcctgaagccctggagccacggcaacttcagcaagcaggagctgaagaacctgcagagcctcttccagctgtacttccacagcttcatccagatcgtgcaggccagcgctggccagttccagctggagctgaagccagaggcctggctgagctgtggccccagccctggccctggccgcctgcagctggtgtgccacgtgtctggcttctaccccaagcctgtgtgggtgatgtggatgagaggaggctacagcatcttcctgatcctgatctgcctgactgtgattgtgaccctggtgatcctggtggtggtggacagccggctgaagaagcagagccctgtgttcctgatgggcgccaacacccaggacaccaagaacagccgccaccagttctgcctggcccaggtgtcctggatcaagaacagagtgctgaagaagtggaagacccggctgaaccagctgtggtag

SEQ ID NO: 72315 - DNA, 696 bp, Artificial Sequence
  derived and/or modified sequence
atgctgctgctgttcctgctgttcgagggcctgtgctgccccggcgaaaacactgctgctccccaagctctgcaatcataccatctcgctgctgaggaacagctgagttttaggatgctgcagacgagtagctttgccaatcactcatgggcccactcagaagggagtggatggcttggcgacctacaaacccacggatgggacaccgtcctcggaaccataaggttcctgaagccttggtcccacggtaacttttctaagcaggaattaaaaaatctgcagagccttttccaactttactttcattcgttcatccagattgtccaagctagcgcaggccagttccaactcgaacttaagcctgaagcctggctctcttgtggaccaagtcccggccccggcaggcttcagctggtctgccacgtgtcaggcttttaccctaagcctgtttgggtgatgtggatgcggggtggttactctatcttcctgattctaatatgcttaactgtgattgtaaccctggtgatcttggtcgtggtcgatagtagactgaaaaaacagagcccggtatttttaatgggcgctaatacgcaagacaccaaaaatagccggcaccagttttgcctggcccaggttagctggatcaaaaacagagttctaaagaaatggaaaactcgcctcaaccagctatggtag

SEQ ID NO: 72316 - DNA, 696 bp, Artificial Sequence
  derived and/or modified sequence
atgctgctcctgttcctgctcttcgaaggactgtgctgccccggagaaaacacggccgcaccccaagcattacaatcttaccacttagctgccgaagagcaactttcgtttcgcatgttacagacatcaagcttcgccaaccacagttgggcccacagtgagggctcaggctggttgggtgatctgcagacccacggctgggacactgtgttgggaaccattaggtttctcaagccgtggtctcatgggaatttcagcaagcaagagctgaagaacctccagagtctgtttcagctatattttcactctttcatacagatcgttcaggccagtgccggacaatttcagctcgaacttaaacccgaggcgtggctgagttgtggccctagtccaggtcccggacggctgcaactggtctgccacgtgtccggattttatccaaaacctgtgtgggtaatgtggatgagaggagggtatagcatcttcttgattctcatctgcctgactgtaatcgttactctggtgatcctggtggttgtggactctagactgaaaaagcagtcccccgttttccttatgggggcaaacacacaagatacaaaaaatagccggcaccagttctgccttgcacaggtcagctggatcaaaaaccgggtgctgaagaagtggaaaacgcggctcaaccagctctggtag

SEQ ID NO: 72317 - DNA, 696 bp, Artificial Sequence
  derived and/or modified sequence
atgctgctcctgttcctcctcttcgagggtctctgctgtcctggggaaaatacagcagctccccaggctctacaatcctatcatctagcagcagaggagcagctgtccttccgcatgctccaaacttcctcctttgccaaccacagctgggcacacagtgagggctcaggatggctgggtgacctgcagactcatggctgggacactgtcttgggcaccatccgctttctgaagccctggtcccatggaaacttcagcaagcaggagctgaaaaacttacagtcactgttccagttatacttccatagttttatccagatagtgcaagcttctgctggtcaatttcagcttgaattgaagccagaggcctggctgtcctgtggccccagtcctggccctggccgtctgcagcttgtgtgccatgtctcaggattctacccaaagcccgtgtgggtgatgtggatgcggggtggatattccatctttctcatcctgatctgtttgactgtgatagttaccctggtcatattggttgtagttgactcacggttaaaaaaacagagccctgtctttctcatgggagccaacactcaggacaccaagaattcaagacatcagttctgcttggcacaagtatcgtggatcaaaaacagagtattgaagaagtggaagacacgcctaaaccaactctggtga

SEQ ID NO: 72318 - DNA, 696 bp, Artificial Sequence
  derived and/or modified sequence
atgctgctgctgttcctgctgttcgagggcctgtgctgccccggcgagaacaccgccgccccccaggccctgcagagctaccacctggccgccgaggagcagctgagcttcagaatgctgcagaccagcagcttcgccaaccacagctgggcccacagcgagggcagcggctggctgggcgacctgcagacccacggctgggacaccgtgctgggcaccatcagattcctgaagccctggagccacggcaacttcagcaagcaggagctgaagaacctgcagagcctgttccagctgtacttccacagcttcatccagatcgtgcaggccagcgccggccagttccagctggagctgaagcccgaggcctggctgagctgcggccccagccccggccccggcagactgcagctggtgtgccacgtgagcggcttctaccccaagcccgtgtgggtgatgtggatgagaggcggctacagcatcttcctgatcctgatctgcctgaccgtgatcgtgaccctggtgatcctggtggtggtggacagcagactgaagaagcagagccccgtgttcctgatgggcgccaacacccaggacaccaagaacagcagacaccagttctgcctggcccaggtgagctggatcaagaacagagtgctgaagaagtggaagaccagactgaaccagctgtggtag

SEQ ID NO: 72319 - protein, 132 aa, Artificial Sequence
  derived and/or modified sequence
MLLLFLLFEGLCCPGENTAVKPEAWLSCGPSPGPGRLQLVCHVSGFYPKPVWVMWMRGGYSIFLILICLTVIVTLVILVVVDSRLKKQSPVFLMGANTQDTKNSRHQFCLAQVSWIKNRVLKKWKTRLNQLW

SEQ ID NO: 72320 - DNA, 399 bp, Artificial Sequence
  derived and/or modified sequence
atgcttttactgtttttgctttttgagggactgtgctgtccaggtgagaataccgctgtgaagccagaggcgtggctgagttgtggacccagccccgggcccggtaggcttcaactggtctgccatgtgtccggcttctatcctaaaccagtctgggtgatgtggatgcgaggaggctacagcatttttctcatactaatttgccttaccgttatcgtgactctggtgattttagtcgtggtggactcacgtctcaagaaacagtcccctgtgttcctgatgggcgccaatacgcaggatactaagaattccaggcatcaattctgtctggcacaggtctcctggataaagaatcgggtgcttaaaaaatggaaaacacgcctgaaccagctgtggtag

SEQ ID NO: 72321 - DNA, 399 bp, Artificial Sequence
  derived and/or modified sequence
atgctgctgctcttcctgctgtttgagggcctgtgctgccctggagagaacacagctgtgaagccagaggcctggctgagctgtggccccagccctggccctggccgcctgcagctggtgtgccacgtgtctggcttctaccccaagcctgtgtgggtgatgtggatgaggggcggctacagcatcttcctgatcctgatctgcctgaccgtcatcgtgaccctggtgatcctggtggtggtggacagccggctgaagaagcagagccctgtgttcctgatgggcgccaacacccaggacaccaagaacagccgccaccagttctgcctggcccaggtgtcctggatcaagaacagagtgctgaagaagtggaagacccggctgaaccagctgtggtag

SEQ ID NO: 72322 - DNA, 399 bp, Artificial Sequence
  derived and/or modified sequence
atgctgctgctgttcctgctgttcgagggcctgtgctgccccggcgagaatactgctgtcaagccagaggcatggttgtcatgtggtccatcaccagggccaggcaggctgcaactggtttgtcacgtgtccggattttatccaaaacctgtgtgggtaatgtggatgcgaggagggtatagtatttttctgatcttaatttgcttgacggtgatagtcacactggtgatcctggtagtggtcgatagccgactcaagaaacagagtccggtatttctgatgggggcgaatacgcaggacaccaaaaactctagacaccagttttgtctggcacaggtatcatggattaagaacagggttctgaagaagtggaagactcgcctcaatcaactatggtag

SEQ ID NO: 72323 - DNA, 399 bp, Artificial Sequence
  derived and/or modified sequence
atgttactgctgttcctgttattcgagggattatgttgtcccggtgaaaatacagccgtgaagcctgaagcctggctctcatgtgggcctagcccaggacccggtcgactgcagctggtatgccatgtctcagggttctatcctaagccagtgtgggtaatgtggatgcggggtgggtacagcatctttctgattctaatctgtctcacagtgatcgtcacgttggtaatcctcgtggttgtggattcccggcttaagaaacaatccccagtgttcctgatgggggctaacacccaggataccaagaacagcagacatcaattttgtctggcccaagtgagctggattaagaacagagtgttgaagaagtggaagacacggctcaatcagctctggtag

SEQ ID NO: 72324 - DNA, 399 bp, Artificial Sequence
  derived and/or modified sequence
atgctgctcctgttcctcctcttcgagggtctctgctgtcctggggaaaatacagcagtgaagccagaggcctggctgtcctgtggccccagtcctggccctggccgtctgcagcttgtgtgccatgtctcaggattctacccaaagcccgtgtgggtgatgtggatgcggggtggatattccatctttctcatcctgatctgtttgactgtgatagttaccctggtcatattggttgtagttgactcacggttaaaaaaacagagccctgtctttctcatgggagccaacactcaggacaccaagaattcaagacatcagttctgcttggcacaagtatcgtggatcaaaaacagagtattgaagaagtggaagacacgcctaaaccaactctggtga

SEQ ID NO: 72325 - DNA, 399 bp, Artificial Sequence
  derived and/or modified sequence
atgctgctgctgttcctgctgttcgagggcctgtgctgccccggcgagaacaccgccgtgaagcccgaggcctggctgagctgcggccccagccccggccccggcagactgcagctggtgtgccacgtgagcggcttctaccccaagcccgtgtgggtgatgtggatgagaggcggctacagcatcttcctgatcctgatctgcctgaccgtgatcgtgaccctggtgatcctggtggtggtggacagcagactgaagaagcagagccccgtgttcctgatgggcgccaacacccaggacaccaagaacagcagacaccagttctgcctggcccaggtgagctggatcaagaacagagtgctgaagaagtggaagaccagactgaaccagctgtggtag

SEQ ID NO: 72326 - protein, 199 aa, Artificial Sequence
  derived and/or modified sequence
MLLLFLLFEGLCCPGENTAVKPEAWLSCGPSPGPGRLQLVCHVSGFYPKPVWVMWMRGEQEQRGTQRGDVLPNADETWYLRATLDVAAGEAAGLSCRVKHSSLGGHDLIIHWGGYSIFLILICLTVIVTLVILVVVDSRLKKQSSNKNILSPHTPSPVFLMGANTQDTKNSRHQFCLAQVSWIKNRVLKKWKTRLNQLW

SEQ ID NO: 72327 - DNA, 600 bp, Artificial Sequence
  derived and/or modified sequence
atgctcttgctgttcctgctttttgaggggctttgttgccctggtgagaatacagctgttaagccagaagcctggctgagctgcgggcctagccctggaccgggtagactccagctcgtgtgccacgtatcaggcttttatccaaaacctgtctgggtaatgtggatgcggggggagcaggagcagcgtgggacccaacgaggcgatgtcctgcctaacgcggacgagacatggtatctgagggccacccttgacgttgctgctggcgaggctgctggactgtcatgcagagttaagcactctagcttggggggtcacgatctgattatccactggggcggttattctatctttttaattctcatttgccttaccgttattgtgaccttagttatcctggtggtggttgactcaaggctcaagaagcagtcttccaacaagaacatactgtccccccacacaccatcaccagtgttcttgatgggagccaatactcaggataccaagaacagtagacatcaattttgcctggcccaggtgagttggataaagaatcgcgtcttgaagaagtggaaaaccaggctcaaccaactgtggtag

SEQ ID NO: 72328 - DNA, 600 bp, Artificial Sequence
  derived and/or modified sequence
atgctgctgctcttcctgctgtttgagggcctgtgctgccctggagagaacacagctgtgaagccagaggcctggctgagctgtggccccagccctggccctggccgcctgcagctggtgtgccacgtgtctggcttctaccccaagcctgtgtgggtgatgtggatgagaggagagcaggagcagaggggcacccagagaggagatgtgctgcccaatgctgatgagacctggtacctgcgggccaccctggatgtggccgccggggaggccgccggcctgagctgccgggtgaagcacagcagcctgggcggccatgacctgatcatccactggggcggctacagcatcttcctgatcctgatctgcctgactgtgattgtgaccctggtgatcctggtggtggtggacagccggctgaagaagcagagcagcaacaagaacatcctgagcccccacacccccagccctgtgttcctgatgggcgccaacacccaggacaccaagaacagccgccaccagttctgcctggcccaggtgtcctggatcaagaacagagtgctgaagaagtggaagacccggctgaaccagctgtggtag

SEQ ID NO: 72329 - DNA, 600 bp, Artificial Sequence
  derived and/or modified sequence
atgctgctgctgttcctgctgttcgagggcctgtgctgccccggcgagaatacggcagtcaagccagaggcatggctctcgtgtggtcctagccccggacccgggagactccagctggtatgccacgtgtcaggattctaccctaaacccgtatgggtcatgtggatgcgtggcgaacaggagcagcgcggtacccagcggggcgacgtcttgccgaatgccgatgaaacgtggtatctgcgggccacactggatgtggccgctggggaggctgctggtctcagttgccgtgtgaagcattcatccctcggcggccacgacctgataatccattggggaggctactcaatcttcttaattctcatttgtctgactgtcattgttacacttgtgattcttgttgtcgtggattccaggcttaagaaacaatccagtaataagaacatcctgtctccccatactccttcccccgtattcctcatgggagccaatacccaggatacgaagaacagcaggcaccaattctgcttagcgcaggtgtcctggattaagaatagagttctaaaaaagtggaagacccgccttaaccaactctggtag

SEQ ID NO: 72330 - DNA, 600 bp, Artificial Sequence
  derived and/or modified sequence
atgttactcctgtttctgctgtttgagggcctctgctgtccaggcgagaacacagcagttaagcccgaggcctggctgtcctgtggccctagccccggtccaggccgtctccaattggtatgccacgtgtcaggattctacccgaagcccgtttgggtgatgtggatgcgaggggagcaagagcagcgcggtactcagcgcggagatgtattgccgaatgccgacgagacttggtatctccgtgccaccctggatgtggcggcaggggaggcagcaggactgtcgtgtagagtaaagcactccagccttggtggccacgacctcataattcattggggcggatatagtatcttcctgatcctgatctgcctgaccgtgattgtgactcttgtgattttggtggtggtggactcacgcctaaagaagcagagttccaataagaatatcctgagccctcatactccctctccagttttcttgatgggggcaaacacgcaggatacgaaaaacagcagacaccagttctgcctggctcaggtgtcatggatcaaaaacagggtgctcaaaaagtggaaaacccgactgaaccagttgtggtag

SEQ ID NO: 72331 - DNA, 869 bp, Artificial Sequence
  derived and/or modified sequence
ggagaggggtactgatatctgaattattagggcaggtgtcctgccaaggaatccctcctttaacagagcttcaatgctgctcctgttcctcctcttcgagggtctctgctgtcctggggaaaatacagcagtgaagccagaggcctggctgtcctgtggccccagtcctggccctggccgtctgcagcttgtgtgccatgtctcaggattctacccaaagcccgtgtgggtgatgtggatgcggggtgagcaggagcagcggggcactcagcgaggggacgtcctgcctaatgctgacgagacatggtggatattccatctttctcatcctgatctgtttgactgtgatagttaccctggtcatattggttgtagttgactcacggttaaaaaaacagagttcaaataagaacattctttctccccacacacccagccctgtctttctcatgggagccaacactcaggacaccaagaattcaagacatcagttctgcttggcacaagtatcgtggatcaaaaacagagtattgaagaagtggaagacacgcctaaaccaactctggtgacatttgctttaccttatacataaaatccttgtctgcatcttcttaaacaccgtccatgtcccataagggaagcatgcttttatttaaacagtttatactagcaaagatactgacccctttaggaatactttttccccatcttccagagattttttttttcctgctttggctacatatccatcattgtttatttttgaaactataatccagatacttctttttcatggattcccgagatcacccaattgatagctcttctgtactccccaaattgaactgatcttcacaagcacattcatc

SEQ ID NO: 72332 - DNA, 745 bp, Artificial Sequence
  derived and/or modified sequence
gggaagtcagcagagggagaggtttgtctgtctgtacagcaagggaagtcagacgagagtgcaagagggtgtggagaggggtactgatatctgaattattagggcaggtgtcctgccaaggaatccctcctttaacagagcttcaatgctgctcctgttcctcctcttcgagggtctctgctgtcctggggaaaatacagcagtgaagccagaggcctggctgtcctgtggccccagtcctggccctggccgtctgcagcttgtgtgccatgtctcaggattctacccaaagcccgtgtgggtgatgtggatgcggggtgagcaggagcagcggggcactcagcgaggggacgtcctgcctaatgctgacgagacatggtatctccgagcaaccctggatgtggcggctggggaggcagctggcctgtcctgtcgggtgaaacacagcagtctagggggccatgatctaatcatccattggggtggatattccatctttctcatcctgatctgtttgactgtgatagttaccctggtcatattggttgtagttgactcacggttaaaaaaacagagttcaaataagaacattctttctccccacacacccagccctgtctttctcatgggagccaacactcaggacaccaagaattcaagacatcagttctgcttggcacaagtatcgtggatcaaaaacagagtattgaagaagtggaagacacgcctaaaccaactctggtga

SEQ ID NO: 72333 - DNA, 600 bp, Artificial Sequence
  derived and/or modified sequence
atgctgctgctgttcctgctgttcgagggcctgtgctgccccggcgagaacaccgccgtgaagcccgaggcctggctgagctgcggccccagccccggccccggcagactgcagctggtgtgccacgtgagcggcttctaccccaagcccgtgtgggtgatgtggatgagaggcgagcaggagcagagaggcacccagagaggcgacgtgctgcccaacgccgacgagacctggtacctgagagccaccctggacgtggccgccggcgaggccgccggcctgagctgcagagtgaagcacagcagcctgggcggccacgacctgatcatccactggggcggctacagcatcttcctgatcctgatctgcctgaccgtgatcgtgaccctggtgatcctggtggtggtggacagcagactgaagaagcagagcagcaacaagaacatcctgagcccccacacccccagccccgtgttcctgatgggcgccaacacccaggacaccaagaacagcagacaccagttctgcctggcccaggtgagctggatcaagaacagagtgctgaagaagtggaagaccagactgaaccagctgtggtag

SEQ ID NO: 72334 - protein, 144 aa, Artificial Sequence
  derived and/or modified sequence
MLLLFLLFEGLCCPGENTAVKPEAWLSCGPSPGPGRLQLVCHVSGFYPKPVWVMWMRGGYSIFLILICLTVIVTLVILVVVDSRLKKQSSNKNILSPHTPSPVFLMGANTQDTKNSRHQFCLAQVSWIKNRVLKKWKTRLNQLW

SEQ ID NO: 72335 - DNA, 435 bp, Artificial Sequence
  derived and/or modified sequence
atgctgttgctctttctccttttcgagggcttatgttgtcccggcgagaacaccgccgtaaaaccggaagcgtggctctcatgtggccccagtcccggtcctggccgacttcagttggtctgccacgtgagcggcttttatccaaaacctgtttgggtaatgtggatgcggggcggctattcaatcttcctcatcctgatatgcctcacagtcatcgtcacattggtgatcctggtagtagtggactcacgcctcaagaagcagtccagcaacaagaacattctgagccctcacaccccaagcccagtgttcttgatgggggccaatacacaggataccaaaaactccaggcaccagttttgtctggctcaggtgagctggataaagaatcgcgtattgaaaaaatggaagaccagactcaaccagctctggtag

SEQ ID NO: 72336 - DNA, 435 bp, Artificial Sequence
  derived and/or modified sequence
atgctgctgctcttcctgctgtttgagggcctgtgctgccctggagagaacacagctgtgaagccagaggcctggctgagctgtggccccagccctggccctggccgcctgcagctggtgtgccacgtgtctggcttctaccccaagcctgtgtgggtgatgtggatgaggggcggctacagcatcttcctgatcctgatctgcctgaccgtcatcgtgaccctggtgatcctggtggtggtggacagccggctgaagaagcagagcagcaacaagaacatcctgagcccccacacccccagccctgtgttcctgatgggcgccaacacccaggacaccaagaacagccgccaccagttctgcctggcccaggtgtcctggatcaagaacagagtgctgaagaagtggaagacccggctgaaccagctgtggtag

SEQ ID NO: 72337 - DNA, 435 bp, Artificial Sequence
  derived and/or modified sequence
atgctgctgctgttcctgctgttcgagggcctgtgctgccccggcgagaacaccgcggtcaaaccagaggcatggctgtcctgtggcccatcaccaggtcctggcagactgcagttggtctgtcatgtgtcgggattctatccaaaacccgtttgggtcatgtggatgcggggagggtactccatcttccttattctcatctgtctgaccgttatcgtgacattagtgattttggtggttgtcgacagccgtctgaaaaagcagtcttccaataagaatatcctgagcccacatacaccaagtcctgtgttcttgatgggagcaaacacacaggacacgaagaactcccggcaccagttttgcctcgcgcaggtatcatggatcaaaaaccgggtactgaaaaagtggaagactcgcctgaatcagctgtggtag

SEQ ID NO: 72338 - DNA, 435 bp, Artificial Sequence
  derived and/or modified sequence
atgctgctgctgtttctgttatttgagggtctctgctgtccaggagagaacaccgccgtgaaaccggaggcttggctgagttgtgggccatctccgggtccgggaagattgcagttagtgtgtcatgtgtccggtttttatccgaagcctgtgtgggtaatgtggatgcggggaggttactcaatcttccttatactgatatgtctcaccgtgatagtgacgctcgtcatcctcgtggtcgtggattctcgcctcaagaagcagagttccaacaaaaacatcctttccccccacacacctagtccagtgtttctcatgggagccaacactcaggacactaaaaactcacggcaccagttttgtcttgcacaggtcagttggatcaagaacagagtgttaaaaaagtggaagacaagattaaaccagctctggtag

SEQ ID NO: 72339 - DNA, 435 bp, Artificial Sequence
  derived and/or modified sequence
atgctgctcctgttcctcctcttcgagggtctctgctgtcctggggaaaatacagcagtgaagccagaggcctggctgtcctgtggccccagtcctggccctggccgtctgcagcttgtgtgccatgtctcaggattctacccaaagcccgtgtgggtgatgtggatgcggggtggatattccatctttctcatcctgatctgtttgactgtgatagttaccctggtcatattggttgtagttgactcacggttaaaaaaacagagttcaaataagaacattctttctccccacacacccagccctgtctttctcatgggagccaacactcaggacaccaagaattcaagacatcagttctgcttggcacaagtatcgtggatcaaaaacagagtattgaagaagtggaagacacgcctaaaccaactctggtga

SEQ ID NO: 72340 - DNA, 435 bp, Artificial Sequence
  derived and/or modified sequence
atgctgctgctgttcctgctgttcgagggcctgtgctgccccggcgagaacaccgccgtgaagcccgaggcctggctgagctgcggccccagccccggccccggcagactgcagctggtgtgccacgtgagcggcttctaccccaagcccgtgtgggtgatgtggatgagaggcggctacagcatcttcctgatcctgatctgcctgaccgtgatcgtgaccctggtgatcctggtggtggtggacagcagactgaagaagcagagcagcaacaagaacatcctgagcccccacacccccagccccgtgttcctgatgggcgccaacacccaggacaccaagaacagcagacaccagttctgcctggcccaggtgagctggatcaagaacagagtgctgaagaagtggaagaccagactgaaccagctgtggtag

SEQ ID NO: 72341 - protein, 289 aa, Artificial Sequence
  derived and/or modified sequence
MLLLFLLFEGLCCPGENTADPFEIQILAGCRMNAPQIFLNMAYQGSDFLSFQGISWEPSPGAGIRAQNICKVLNRYLDIKEILQSLLGHTCPRFLAGLMEAGESELKRKVKPEAWLSCGPSPGPGRLQLVCHVSGFYPKPVWVMWMRGEQEQRGTQRGDVLPNADETWYLRATLDVAAGEAAGLSCRVKHSSLGGHDLIIHWGGYSIFLILICLTVIVTLVILVVVDSRLKKQSSNKNILSPHTPSPVFLMGANTQDTKNSRHQFCLAQVSWIKNRVLKKWKTRLNQLW

SEQ ID NO: 72342 - DNA, 870 bp, Artificial Sequence
  derived and/or modified sequence
atgctcctactgttcttgttattcgagggcctctgctgtcccggggaaaacacagcagacccattcgagatccagatactggcagggtgccggatgaatgccccccaaatattcctgaacatggcctaccagggctccgactttcttagctttcagggaatctcctgggaaccttcacctggagccggtattcgagctcagaacatctgtaaagtactgaacaggtatctggatatcaaagagattcttcaaagtttgttgggtcatacttgtccacgatttcttgcaggcctgatggaggccggagagtcggaattgaagcggaaggtgaagcctgaggcctggctgtcatgcggacccagccctggccctggccgactgcagctcgtgtgccatgtgagtggcttttatccaaagcccgtatgggtgatgtggatgcgtggcgaacaggagcagcgagggactcagcgtggagacgtgctgccgaatgccgatgagacgtggtacctgagagcaactctggacgtagcggctggtgaggctgccgggctatcctgccgagtgaagcactcgtctctgggcggacacgatctgattattcactgggggggatattccatatttttgatcctgatctgccttacggtaatcgtgaccctggtaatcttagttgtggtggattctaggctcaagaaacaatcctccaataaaaatattctctctccacacaccccttctccagtatttctcatgggtgcgaacacccaggataccaagaacagccgacaccagttttgtctggcccaggtgtcttggatcaaaaaccgagtgctgaagaagtggaaaaccaggcttaaccagctgtggtag

SEQ ID NO: 72343 - DNA, 870 bp, Artificial Sequence
  derived and/or modified sequence
atgctgctgctcttcctgctgtttgagggcctgtgctgccctggagagaacacagctgacccctttgagatccagatcctggccggctgcaggatgaatgccccccagatcttcctgaacatggcctaccagggcagtgacttcctgtccttccagggcatctcctgggagcccagccctggggccggcatccgggcccagaacatctgcaaggtgctgaaccgctacctggacatcaaggagatcctgcagagcctgctgggccacacctgcccccgcttcctggccggcctgatggaggccggggagagcgagctgaagaggaaggtgaagccagaggcctggctgagctgtggccccagccctggccctggccgcctgcagctggtgtgccacgtgtctggcttctaccccaagcctgtgtgggtgatgtggatgagaggagagcaggagcagaggggcacccagagaggagatgtgctgcccaatgctgatgagacctggtacctgcgggccaccctggatgtggccgccggggaggccgccggcctgagctgccgggtgaagcacagcagcctgggcggccatgacctgatcatccactggggcggctacagcatcttcctgatcctgatctgcctgactgtgattgtgaccctggtgatcctggtggtggtggacagccggctgaagaagcagagcagcaacaagaacatcctgagcccccacacccccagccctgtgttcctgatgggcgccaacacccaggacaccaagaacagccgccaccagttctgcctggcccaggtgtcctggatcaagaacagagtgctgaagaagtggaagacccggctgaaccagctgtggtag

SEQ ID NO: 72344 - DNA, 870 bp, Artificial Sequence
  derived and/or modified sequence
atgctgctgctgttcctgctgttcgagggcctgtgctgccccggcgagaataccgcagatcccttcgagattcagatcctggccgggtgcagaatgaatgcaccccagatctttctgaatatggcctatcagggctctgattttctcagctttcaggggatcagctgggaaccttcccccggagcaggcatccgcgcccaaaatatctgcaaagtgctcaaccgctacctggatattaaggagatcctccagagcctgctcggtcatacgtgccctcggttccttgcaggccttatggaagccggcgagagcgaactcaaacggaaggtgaaacccgaggcttggctgagctgcggtccttcacctggcccaggccggctgcagcttgtttgccatgtgagcggattctacccaaagccagtttgggtgatgtggatgaggggcgagcaggagcagcgaggtacacagcggggcgatgttctcccgaacgctgatgaaacatggtacctacgggcaactctcgacgtggctgccggcgaggctgccggactttcttgcagagtgaaacactcttctttgggcggtcacgacctgatcattcactggggcggatattccattttcctgatcctgatttgccttacagtgattgtgacccttgtcatactggtcgtagttgacagccgcctgaagaagcagagctccaacaaaaatattctgtccccccacacgccatctccagtattcttaatgggagcaaacactcaggatacgaagaactccaggcaccagttttgtctggcacaagtgtcttggattaaaaacagggttctcaaaaaatggaagacgaggcttaatcagctgtggtag

SEQ ID NO: 72345 - DNA, 870 bp, Artificial Sequence
  derived and/or modified sequence
atgctcctgttattcctgctgtttgaaggattgtgctgcccgggtgagaacacagctgatccatttgagatccaaattctcgcaggctgccgcatgaatgcacctcaaatatttcttaatatggcctaccaggggtctgatttcctgtccttccagggcataagttgggagcctagccccggtgcagggatcagagcgcagaacatctgtaaggttctgaatagatacctggatatcaaggagatcttgcagtctcttttaggccacacttgccccaggttcctggcgggactcatggaagccggtgagagcgagctaaaaaggaaagtcaagcctgaagcgtggctgtcttgtgggccaagtcctgggccaggcaggctgcagctggtgtgccacgtcagcggattttatcctaagcccgtgtgggttatgtggatgcgaggagaacaggaacaacgcggtactcagcggggtgatgtccttcctaatgcggatgaaacctggtatctgcgagcaaccctggatgttgctgctggtgaggccgctggattgtcctgcagggtgaaacattcctccttgggtggacatgacctcataattcactggggaggatattccatttttctgatactgatttgtctgactgttatcgttactcttgtgattctagtggtcgtggactctcgcctgaaaaagcagtcgagcaacaagaacatactgagccctcataccccatcacccgtctttctcatgggtgccaacacacaggacactaagaactctagacatcagttttgtcttgcacaggtgtcttggatcaagaatagggtactgaaaaaatggaagacaagacttaaccagctttggtag

SEQ ID NO: 72346 - DNA, 1820 bp, Artificial Sequence
  derived and/or modified sequence
ttccagcagttagtgcaattagggaggttgggaggatgtacacaagagcagggagaaaatctggagccagacagtgagagaggcagaggggaaatgaaaaaccccgtgggaggctgcagcaaagcgaggcagtgtggcttctctgacagggaagtcagcagagggagaggtttgtctgtctgtacagcaagggaagtcagacgagagtgcaagagggtgtggagaggggtactgatatctgaattattagggcaggtgtcctgccaaggaatccctcctttaacagagcttcaatgctgctcctgttcctcctcttcgagggtctctgctgtcctggggaaaatacagcagaccccttcgagatccagatattagctggctgtagaatgaatgccccacaaatcttcttaaatatggcatatcaagggtcagatttcctgagtttccaaggaatttcctgggagccatctccaggagcagggatccgggcccagaacatctgtaaagtgctcaatcgctacctagatattaaggaaatactgcaaagccttcttggtcacacctgccctcgatttctagcggggctcatggaagcaggggagtcagaactgaaacggaaagtgaagccagaggcctggctgtcctgtggccccagtcctggccctggccgtctgcagcttgtgtgccatgtctcaggattctacccaaagcccgtgtgggtgatgtggatgcggggtgagcaggagcagcggggcactcagcgaggggacgtcctgcctaatgctgacgagacatggtatctccgagcaaccctggatgtggcggctggggaggcagctggcctgtcctgtcgggtgaaacacagcagtctagggggccatgatctaatcatccattggggtggatattccatctttctcatcctgatctgtttgactgtgatagttaccctggtcatattggttgtagttgactcacggttaaaaaaacagagttcaaataagaacattctttctccccacacacccagccctgtctttctcatgggagccaacactcaggacaccaagaattcaagacatcagttctgcttggcacaagtatcgtggatcaaaaacagagtattgaagaagtggaagacacgcctaaaccaactctggtgacatttgctttaccttatacataaaatccttgtctgcatcttcttaaacaccgtccatgtcccataagggaagcatgcttttatttaaacagtttatactagcaaagatactgacccctttaggaatactttttccccatcttccagagattttttttttcctgctttggctacatatccatcattgtttatttttgaaactataatccagatacttctttttcatggattcccgagatcacccaattgatagctcttctgtactccccaaattgaactgatcttcacaagcacattcatctcttcctactctgaacagtagttatttaggtttttgctctttttttttttttaatctcagttgcttgaaagtaggatttaggtatttgtgtctgtattcatgaccaaaaatcttatctgaattcagggccagcttcataagcatgtgacctgtgcagacacatggaatcgtatgctctgcaagaacccatgctagatttaatgctctgctgttgtcatcttggaatccttagtcattttcaaacaagagatattgtattttcatttttcactgaccccacaaattatatagctgattcagtgtgaatgtaatatttctcaataaatgctgactgaaataaatttgttgttagatcaa

SEQ ID NO: 72347 - DNA, 870 bp, Artificial Sequence
  derived and/or modified sequence
atgctgctgctgttcctgctgttcgagggcctgtgctgccccggcgagaacaccgccgaccccttcgagatccagatcctggccggctgcagaatgaacgccccccagatcttcctgaacatggcctaccagggcagcgacttcctgagcttccagggcatcagctgggagcccagccccggcgccggcatcagagcccagaacatctgcaaggtgctgaacagatacctggacatcaaggagatcctgcagagcctgctgggccacacctgccccagattcctggccggcctgatggaggccggcgagagcgagctgaagagaaaggtgaagcccgaggcctggctgagctgcggccccagccccggccccggcagactgcagctggtgtgccacgtgagcggcttctaccccaagcccgtgtgggtgatgtggatgagaggcgagcaggagcagagaggcacccagagaggcgacgtgctgcccaacgccgacgagacctggtacctgagagccaccctggacgtggccgccggcgaggccgccggcctgagctgcagagtgaagcacagcagcctgggcggccacgacctgatcatccactggggcggctacagcatcttcctgatcctgatctgcctgaccgtgatcgtgaccctggtgatcctggtggtggtggacagcagactgaagaagcagagcagcaacaagaacatcctgagcccccacacccccagccccgtgttcctgatgggcgccaacacccaggacaccaagaacagcagacaccagttctgcctggcccaggtgagctggatcaagaacagagtgctgaagaagtggaagaccagactgaaccagctgtggtag

SEQ ID NO: 72348 - protein, 286 aa, Artificial Sequence
  derived and/or modified sequence
MLLLFLLFEGLCCPGENTAAPQALQSYHLAAEEQLSFRMLQTSSFANHSWAHSEGSGWLGDLQTHGWDTVLGTIRFLKPWSHGNFSKQELKNLQSLFQLYFHSFIQIVQASAGQFQLELKPEAWLSCGPSPGPGRLQLVCHVSGFYPKPVWVMWMRGEQEQRGTQRGDVLPNADETWYLRATLDVAAGEAAGLSCRVKHSSLGGHDLIIHWGGYSIFLILICLTVIVTLVILVVVDSRLKKQSPVFLMGANTQDTKNSRHQFCLAQVSWIKNRVLKKWKTRLNQLW

SEQ ID NO: 72349 - DNA, 861 bp, Artificial Sequence
  derived and/or modified sequence
atgttgcttttgttcctcctgttcgagggactttgttgtcccggggaaaatactgctgctccccaagctttgcagtcttatcaccttgcagccgaggagcaattgtccttcagaatgttgcaaacttcgtctttcgccaaccactcctgggcccactctgaggggtcgggatggctcggagacctgcaaacacacggatgggacactgtacttggaacaattcggtttcttaaaccctggagccatggcaacttttcaaaacaagagttgaagaacctccagtccctctttcagttatattttcattcattcatacagatcgtccaagcgtcagccggacaatttcagctggaactgaagcccgaagcttggttgtcttgtggaccttctcccgggcccggtcggcttcaattggtttgccacgtgtctgggttttatcctaaacccgtgtgggtcatgtggatgagaggagaacaggagcaaagagggacacaacggggagatgtactcccaaatgcagatgagacatggtacttgcgagctactcttgacgtggcagcgggcgaggccgcgggcctaagttgccgcgtcaagcatagcagtctggggggtcatgatctgattatccattggggcggctactccattttcttgatcttaatatgcttgactgtgatcgtgactctggttattctcgtggtggttgattccagactgaaaaagcagtcccccgtgttcctaatgggcgcaaatacgcaagacaccaagaatagccgccatcagttctgtcttgcccaagtgagctggatcaaaaaccgggttcttaagaaatggaagacccggctgaatcagctgtggtag

SEQ ID NO: 72350 - DNA, 861 bp, Artificial Sequence
  derived and/or modified sequence
atgctgctgctcttcctgctgtttgagggcctgtgctgccctggagagaacacagctgccccccaggccctgcagagctaccacctggccgctgaggagcagctgtccttcaggatgctgcagaccagcagctttgccaaccacagctgggcccacagcgagggcagcggctggctgggggacctgcagacccacggctgggacacagtgctgggcaccatccgcttcctgaagccctggagccacggcaacttcagcaagcaggagctgaagaacctgcagagcctcttccagctgtacttccacagcttcatccagatcgtgcaggccagcgctggccagttccagctggagctgaagccagaggcctggctgagctgtggccccagccctggccctggccgcctgcagctggtgtgccacgtgtctggcttctaccccaagcctgtgtgggtgatgtggatgagaggagagcaggagcagaggggcacccagagaggagatgtgctgcccaatgctgatgagacctggtacctgcgggccaccctggatgtggccgccggggaggccgccggcctgagctgccgggtgaagcacagcagcctgggcggccatgacctgatcatccactggggcggctacagcatcttcctgatcctgatctgcctgaccgtcatcgtgaccctggtgatcctggtggtggtggacagccggctgaagaagcagagccctgtgttcctgatgggcgccaacacccaggacaccaagaacagccgccaccagttctgcctggcccaggtgtcctggatcaagaacagagtgctgaagaagtggaagacccggctgaaccagctgtggtag

SEQ ID NO: 72351 - DNA, 861 bp, Artificial Sequence
  derived and/or modified sequence
atgctgctgctgttcctgctgttcgagggcctgtgctgccccggcgaaaatacagcagcccctcaggccctacagtcttatcacttggctgccgaggagcagctgtcatttagaatgctgcagactagcagttttgccaatcatagttgggctcattctgaaggatcaggctggctcggagacctgcagacgcacggctgggatactgtcctcgggactattcggttcctcaagccttggtcacatggcaatttcagcaaacaggaactgaagaacctgcagagccttttccaactgtactttcatagcttcatccaaatcgtccaggcctccgctgggcagtttcaactcgagctgaaaccggaggcctggctttcatgcggaccgagccccggtcctgggcgactgcagctcgtgtgtcatgtgtctggattttaccccaagcccgtttgggtgatgtggatgagaggtgagcaggaacagagggggacccagcgtggcgacgtgctgcctaatgctgacgaaacctggtacctgagagccaccttggacgtcgccgcgggggaggccgccgggctctcatgtcgggtaaaacacagtagcctgggcggtcacgacttaattattcactggggcgggtactctatcttccttatcctaatctgtctgactgtgattgttacactcgtgatactggttgttgtggactctcggctcaaaaaacagagtcccgtgtttctcatgggtgctaatacccaggacaccaaaaatagtaggcatcagttctgccttgcgcaggtttcttggatcaaaaaccgggtcctgaagaaatggaagaccaggctgaaccaattgtggtag

SEQ ID NO: 72352 - DNA, 861 bp, Artificial Sequence
  derived and/or modified sequence
atgttactcctgttcctcctttttgaaggactgtgctgccccggagagaatactgccgcaccccaggcgctgcagagctatcatctagcagctgaggagcagctgtcttttcgaatgctgcagacatcaagtttcgcaaaccactcatgggcccattcggaagggagcgggtggttgggcgacctgcagacacatgggtgggatacagtcctagggaccatccggtttctgaaaccgtggagtcatggaaatttcagtaaacaggagctgaagaacctacagtccctcttccagctgtatttccattccttcatccaaatcgttcaagctagcgcgggtcagtttcagctggagttgaagcctgaggcttggctgagctgcggtccaagccccggacccggtcgcctacagcttgtgtgccacgtgtctggtttttacccaaaacctgtgtgggttatgtggatgcgaggcgagcaggaacaacgaggcacccagcggggtgatgtgctccctaacgcagacgagacctggtatctccgcgcaactctcgacgtcgctgcgggagaggctgcagggctctcgtgccgcgttaagcacagctccctgggagggcatgacttaattatacactggggaggttattcaatttttcttatactcatctgcctgaccgtcatcgttaccttggtgattctagtggtggtcgactcaaggcttaaaaaacagtcgcccgtgtttctgatgggcgctaacacccaggacactaaaaacagcagacaccagttctgtctcgcccaggtgtcctggattaaaaatagagtgttgaagaagtggaagacgaggcttaaccagctatggtag

SEQ ID NO: 72353 - DNA, 861 bp, Artificial Sequence
  derived and/or modified sequence
atgctgctcctgttcctcctcttcgagggtctctgctgtcctggggaaaatacagcagctccccaggctctacaatcctatcatctagcagcagaggagcagctgtccttccgcatgctccaaacttcctcctttgccaaccacagctgggcacacagtgagggctcaggatggctgggtgacctgcagactcatggctgggacactgtcttgggcaccatccgctttctgaagccctggtcccatggaaacttcagcaagcaggagctgaaaaacttacagtcactgttccagttatacttccatagttttatccagatagtgcaagcttctgctggtcaatttcagcttgaattgaagccagaggcctggctgtcctgtggccccagtcctggccctggccgtctgcagcttgtgtgccatgtctcaggattctacccaaagcccgtgtgggtgatgtggatgcggggtgagcaggagcagcggggcactcagcgaggggacgtcctgcctaatgctgacgagacatggtatctccgagcaaccctggatgtggcggctggggaggcagctggcctgtcctgtcgggtgaaacacagcagtctagggggccatgatctaatcatccattggggtggatattccatctttctcatcctgatctgtttgactgtgatagttaccctggtcatattggttgtagttgactcacggttaaaaaaacagagccctgtctttctcatgggagccaacactcaggacaccaagaattcaagacatcagttctgcttggcacaagtatcgtggatcaaaaacagagtattgaagaagtggaagacacgcctaaaccaactctggtga

SEQ ID NO: 72354 - DNA, 861 bp, Artificial Sequence
  derived and/or modified sequence
atgctgctgctgttcctgctgttcgagggcctgtgctgccccggcgagaacaccgccgccccccaggccctgcagagctaccacctggccgccgaggagcagctgagcttcagaatgctgcagaccagcagcttcgccaaccacagctgggcccacagcgagggcagcggctggctgggcgacctgcagacccacggctgggacaccgtgctgggcaccatcagattcctgaagccctggagccacggcaacttcagcaagcaggagctgaagaacctgcagagcctgttccagctgtacttccacagcttcatccagatcgtgcaggccagcgccggccagttccagctggagctgaagcccgaggcctggctgagctgcggccccagccccggccccggcagactgcagctggtgtgccacgtgagcggcttctaccccaagcccgtgtgggtgatgtggatgagaggcgagcaggagcagagaggcacccagagaggcgacgtgctgcccaacgccgacgagacctggtacctgagagccaccctggacgtggccgccggcgaggccgccggcctgagctgcagagtgaagcacagcagcctgggcggccacgacctgatcatccactggggcggctacagcatcttcctgatcctgatctgcctgaccgtgatcgtgaccctggtgatcctggtggtggtggacagcagactgaagaagcagagccccgtgttcctgatgggcgccaacacccaggacaccaagaacagcagacaccagttctgcctggcccaggtgagctggatcaagaacagagtgctgaagaagtggaagaccagactgaaccagctgtggtag

SEQ ID NO: 72355 - protein, 581 aa, Artificial Sequence
  derived and/or modified sequence
MQYSHHCEHLLERLNKQREAGFLCDCTIVIGEFQFKAHRNVLASFSEYFGAIYRSTSENNVFLDQSQVKADGFQKLLEFIYTGTLNLDSWNVKEIHQAADYLKVEEVVTKCKIKMEDFAFIANPSSTEISSITGNIELNQQTCLLTLRDYNNREKSEVSTDLIQANPKQGALAKKSSQTKKKKKAFNSPKTGQNKTVQYPSDILENASVELFLDANKLPTPVVEQVAQINDNSELELTSVVENTFPAQDIVHTVTVKRKRGKSQPNCALKEHSMSNIASVKSPYEAENSGEELDQRYSKAKPMCNTCGKVFSEASSLRRHMRIHKGVKPYVCHLCGKAFTQCNQLKTHVRTHTGEKPYKCELCDKGFAQKCQLVFHSRMHHGEEKPYKCDVCNLQFATSSNLKIHARKHSGEKPYVCDRCGQRFAQASTLTYHVRRHTGEKPYVCDTCGKAFAVSSSLITHSRKHTGEKPYICGICGKSFISSGELNKHFRSHTGADKTLDSSAEDHTLSEQDSIQKSPLSETMDVKPSDMTLPLALPLGTEDHHMLLPVTDTQSPTSDTLLRSTVNGYSEPQLIFLQQLY

SEQ ID NO: 72356 - DNA, 1842 bp, Artificial Sequence
  derived and/or modified sequence
gctatcgatcaagggtaaaattccattctgatatcaaaatgcagtattcgcaccactgtgagcaccttttagagagactgaacaaacagcgggaagcaggttttctctgtgactgtaccatagtgattggggaattccagtttaaagctcataggaatgtgctggcctcctttagtgagtattttggtgcgatctacagaagcacttctgagaacaatgtctttcttgatcagagtcaggtgaaggctgatggatttcagaaactgttggagtttatatacacaggaactttaaatcttgacagttggaatgttaaagaaattcatcaggctgctgactatctcaaagtggaagaggtggtcactaaatgcaaaataaagatggaagattttgcttttattgctaatccttcttctacagagatatctagtattactggaaacattgaattgaatcaacagacttgtcttcttactctgcgagattataataatcgagagaaatcagaagtatctacagatttgattcaggcaaatcctaaacaaggcgcgttagcgaaaaagtcatctcaaacgaaaaagaagaagaaggctttcaactccccgaaaacagggcagaataaaacagtgcgatatcccagtgacatcttagagaatgcatctgttgaattattcctagatgcaaataaactgcccacaccagtagtagaacaagttgcacaaataaatgataattcagaactcgagttgacatcagttgtggaaaatacttttccagcacaagatattgtgcacactgttacagtgaaacggaaacgtggaaaatcacagccaaactgtgctctgaaagaacactctatgtctaatatagccagcgtcaagagtccttatgaggcggagaactccggggaagagctggatcagaggtattccaaggccaagccaatgtgtaacacatgtgggaaagtgttttcagaagccagcagtttgagaaggcacatgagaatacataaaggagtcaaaccttacgtctgccacttatgtggaaaggcatttacccaatgtaaccagctgaaaacgcatgtaagaactcatacaggtgagaagccatacaaatgtgaattgtgtgataaaggatttgctcagaaatgtcagctagtcttccatagtcgcatgcatcatggtgaagaaaaaccctataaatgtgatgtatgcaacttacagtttgcaacttctagcaatctcaagattcatgcaaggaagcatagtggagagaagccatatgtctgtgataggtgtggacagagatttgctcaagccagcacactgacctatcatgtccgtaggcatactggagaaaagccttatgtatgtgatacctgtgggaaggcatttgctgtctctagttctcttatcactcattctcgaaaacatacaggtgaaaaaccatacatatgtggtatttgtgggaaaagttttatttcctcaggagagctcaacaaacactttcggtcccatacaggtgcagataaaactctagactccagtgcagaggatcatactttgagtgaacaggattccatacaaaaaagtcctttatcagaaactatggatgtgaagccttctgatatgactttaccattagctcttccacttgggactgaggaccatcacatgcttctgcctgtcacggatactcagtctcctacatcagatacattgttgaggtcaactgtgaatgggtattcagaaccacagttgatttttttacaacaattatactgactttgtaaggaatatggaattgctaagatatcattggtagcaaacatctctggtaagg

SEQ ID NO: 72357 - DNA, 1746 bp, Artificial Sequence
  derived and/or modified sequence
atgcaatactcgcaccactgcgagcatctcctggaacggctgaacaaacagagggaggccggtttcctctgcgactgtaccatagtcatcggggagttccagttcaaggcccacaggaacgtgcttgcgagcttctctgagtattttggcgcaatctatagatcaacatcagaaaacaatgtcttcctggaccagtcccaggtgaaagccgatggtttccagaagctactggagttcatttacacaggaactctcaacttagattcctggaacgttaaggaaattcaccaagctgcagactatctcaaggtcgaggaggtagtgacaaagtgcaagatcaaaatggaagatttcgcctttatcgctaatccatcatccaccgagatctccagtatcacaggaaacattgagctgaatcagcaaacatgcttgctgacactccgagactacaacaaccgggagaagtccgaggtgagtactgatttaatacaggccaacccgaaacaaggcgctctcgcaaaaaaatcttctcagaccaagaagaagaaaaaggccttcaatagtcccaagacaggtcagaataaaaccgtgcagtatccaagcgacatcctggaaaatgcaagtgttgaactgttcctggacgcgaataaattaccgacacccgtggtggagcaagttgctcagatcaatgataactctgaactcgaactcacaagcgtcgtagaaaatacttttcccgcccaggatatcgttcacaccgtaacagtcaagcgcaaacgtgggaagagccaaccaaattgtgccctgaaagagcactcaatgtcaaatatagcttcagtgaaaagtccctatgaggcggaaaactcaggtgaagaattggaccaacggtacagtaaggcaaagccaatgtgcaatacctgcggaaaggtgttcagcgaagcgtcgagtctccgcaggcatatgaggatacataagggagtcaaaccgtacgtgtgtcacctctgtgggaaagcctttacccagtgcaatcagctaaagacccacgttaggactcatactggcgagaagccctataagtgtgagctttgcgacaaggggtttgcccagaagtgccagcttgtgttccattctcgcatgcaccacggggaggagaaaccctataaatgcgacgtttgcaatctgcagttcgcgacttcatcaaacttgaagatccatgctcggaaacattcaggggagaaaccatatgtgtgcgaccggtgtggtcagaggttcgctcaggcgagtaccctcacataccacgtgaggcggcacacaggcgagaagccatatgtgtgtgatacctgcgggaaagctttcgctgtcagctccagcttgatcactcattcccgcaagcataccggcgagaagccgtacatctgcggcatatgcggcaagtcattcatttcatctggcgagctcaataagcatttcagaagtcatactggcgctgacaagacattagattcttccgccgaggaccacacactgtctgaacaggattccattcagaaatccccactgtctgagactatggatgtcaagcccagtgacatgactctgccgcttgcactgcctctggggaccgaagatcaccatatgctgttacctgtgaccgatactcagtctcctactagtgataccttgcttcgctcaaccgtgaacggttacagcgaaccacagcttatttttctgcagcagctgtactag

SEQ ID NO: 72358 - DNA, 4815 bp, Artificial Sequence
  derived and/or modified sequence
atcaagggtaaaattccattctgatatcaaaatgcagtattcgcaccactgtgagcaccttttagagagactgaacaaacagcgggaagcaggttttctctgtgactgtaccatagtgattggggaattccagtttaaagctcataggaatgtgctggcctcctttagtgagtattttggtgcgatctacagaagcacttctgagaacaatgtctttcttgatcagagtcaggtgaaggctgatggatttcagaaactgttggagtttatatacacaggaactttaaatcttgacagttggaatgttaaagaaattcatcaggctgctgactatctcaaagtggaagaggtggtcactaaatgcaaaataaagatggaagattttgcttttattgctaatccttcttctacagagatatctagtattactggaaacattgaattgaatcaacagacttgtcttcttactctgcgagattataataatcgagagaaatcagaagtatctacagatttgattcaggcaaatcctaaacaaggcgcgttagcgaaaaagtcatctcaaacgaaaaagaagaagaaggctttcaactccccgaaaacagggcagaataaaacagtgcaatatcccagtgacatcttagagaatgcatctgttgaattattcctagatgcaaataaactgcccacacctgtagtagaacaagttgcacaaataaatgataattcagaactcgagttgacatcagttgtggaaaatacttttccagcacaagatattgtgcacactgttacagtgaaacggaaacgtggaaaatcacagccaaactgtgctctgaaagaacactctatgtctaatatagccagcgtcaagagtccttatgaggcggagaactccggggaagagctggatcagaggtattccaaggccaagccaatgtgtaacacatgtgggaaagtgttttcagaagccagcagtttgagaaggcacatgagaatacataaaggagtcaaaccttacgtctgccacttatgtggaaaggcatttacccaatgtaaccagctgaaaacgcatgtaagaactcatacaggtgagaagccatacaaatgtgaattgtgtgataaaggatttgctcagaaatgtcagctagtcttccatagtcgcatgcatcatggtgaagaaaaaccctataaatgtgatgtatgcaacttacagtttgcaacttctagcaatctcaagattcatgcaaggaagcatagtggagagaagccatatgtctgtgataggtgtggacagagatttgctcaagccagcacactgacctatcatgtccgtaggcatactggagaaaagccttatgtatgtgatacctgtgggaaggcatttgctgtctctagttctcttatcactcattctcgaaaacatacaggtgaaaaaccatacatatgtggtatttgtgggaaaagttttatttcctcaggagagctcaacaaacactttcggtcccatacaggtgcagataaaactctagactccagtgcagaggatcatactttgagtgaacaggattccatacaaaaaagtcctttatcagaaactatggatgtgaagccttctgatatgactttaccattagctcttccacttgggactgaggaccatcacatgcttctgcctgtcacggatactcagtctcctacatcagatacattgttgaggtcaactgtgaatgggtattcagaaccacagttgatttttttacaacaattatactgactttgtaaggaatatggaattgctaagatatcattggtagcaaacatctctggtaaggtgcatatattcatattaaattcccattcatttgagttgtgaccattatttttcattcactgaagtaaaagcacctgatgctgcatcacaactgcaatgtttgtttttatttttggctttatgtctatactccacagagagctttttaagtaatgaattatgtagcactattttgggtggatgagttttattttcttttaaagctgccttaattccatttttattttgcattttagaattgcccttcatttactaaatcagccagttaatgtgattcagttgtgacctgtgggattttaaaattttcctgccctcataatttaagcaaaatccacgatagtatcagcccaagagtgtgttgctatttgtaagccccatggatcaatacataaactatgcataaaaataaaatttcatattttcgctcgtaaaaatttaggcgctgaataagaattgtgctatttctctattaatatattgttagaaataacttttctaatgaaacaaaaatgtttctcaaaatctagaaaagtgcatataaatttttgttcatttagaactgagtattctggagaaaaccaatggtcagcacttttggtttgagttatctgagattgtattttcaaaatgaattttaagtagatatttggtgtttttatcttgtcaaagacagtttcaaaatttgattcagtttatgttttattccgttctaaaatattggagatgaggaaaatgtacttgagttttgaaatattttggtaagcctctcttactcctgttatgcactttttaaaataaatactgaattccagaaagaattttctagatataaacttaatgcatactagaaatcacttggcttctaaatttggtacattatattgcataaagagttaagaaattaacctcaattataagtaaacattttgagttaccagaaagccaactatagttaaatattttatatctgagttttctataagtttggggtttgttaattttataaattaaaccacaacttttggtggtggttgtagtttcacaatggtccttttccttccaaatgaatgtagaaaattcgttattatcctgatatttgcaccactcatccccatgccacttttcccacatattaatttatttcactgcctgatctttggatatgaaattatgagttccacaaagtcaatttttatagtgccaatcaaacagcatggtgatattctttttctttttttttccccccacaaggctgttgttcagtgtgagatgacatcatttcttatttctgccatgctgtggcttttttgtgttctgcttttaaactacacctgtagtacagttaatatgttttttattggtattgatttctttaattcattaattttctctatttgggacccaagtcataagaaccaattagaggacataataaaaacacttaatgcttgtagtctgtagagatcttcaccatttcacagcacacacattattttcataataaattgccactggtgggacatgggactgacttatttgaatagagtttgaaataccacctttgtatgatgcaaacaatatttgattattttatctaagaaatctatgcatgtgtatcaagttaaaatagtgggtttaaatacaatttacaaagcattagaatgttacctaatctcttctgggttaaatgtgataggaatgtattggaatgtgaagaaattatagaaaattaaaagactcagcctctttaggaagtttgctaaaatggagaggttatgtttaatttatttatatcttcgttaatccaagcatctaatgaacaaaaaactgctacagtgacgtcataattctataagggcaatagttgccaaatttcctctggtattattagcattctgcctttgcatagattagccttcaaatttattatttttagtattatttgatacgattgaagtggctaagattgattgagcttttcttgatcacattttctgcttcttagctaaagtaattttatttaaattgacatggcttgagttgtcatcattttctgctcttctagaatgatgtgtagagaaaacttgaagatactatcccttctttggcattcttctcttaatgctatgctattatttatcataatatgcatatatttagttgtatctggtatcattctaacactcataactaccattttagttaagtccaactttatatttgttacaatgcagtgttttgggaaaggtctattagtaattatttaagtattacatatttttatggaagtctttagaaggtgaagatcttactgagaaactattttctaaataaatttaattttcttttgtatttgtatcagatcatgcctactgtatgttagattttagactattttaaaagaaaccgtagattatataaaaatttttttgctgtttttaaatggcatttgtcttatgtttaatttcacaggatgattttgatagacaaattttagaaaaccttttttcaaaggtaatggttctatcagtttcattccaacagtagctaatttctgtgtttcagtcctacagaaattgtgtgagtagttgaaataatgtacatgtactagtttttttaagtattctaaatagttctaacatttaatgcatatcagaaacatgcttaagaaataacaatatccaggcccaccccacctattgaatcagacagttcccagggcatatatatgctggggaagccccataggtgattttaatgtataccaaacatgtagagtctcactctgttgcccaggctggagtgcaatgacgtgatctcagctaactgcaacctctgcctcctggattcaagcaattctccggcctcagcctcctgagtagctggtactacaggtgcgcgccaccacacctgactaatttttgttagagatggggtttcattctgttggccaggctggtctcgaactcctgacctcaggt

SEQ ID NO: 72359 - DNA, 1746 bp, Artificial Sequence
  derived and/or modified sequence
atgcagtacagccaccactgtgagcacctgctggagcggctgaacaagcagcgggaggccggcttcctgtgtgactgcaccatcgtcatcggggagttccagttcaaggcccacagaaatgtgctggccagcttcagcgagtactttggagccatctaccgcagcaccagcgagaacaacgtgttcctggaccagagccaggtgaaggcagatggcttccagaagctgctggagttcatctacacaggcaccctgaacctggacagctggaatgtgaaggagatccaccaggccgctgactacctgaaggtggaggaggtggtgaccaagtgcaagatcaagatggaggactttgccttcatcgccaaccccagcagcacagagatcagcagcatcactggaaacatcgagctgaaccagcagacctgcctgctgaccctgcgggactacaacaaccgggagaagtctgaggtgtccacagacctgatccaggccaaccccaagcagggcgccctggccaagaagagcagccagaccaagaagaagaagaaggccttcaacagccccaagacaggccagaacaagacagtgcagtaccccagcgacatcctggagaatgcctctgtggagctgttcctggatgccaacaagctgcccacccctgtggtggagcaggtggcccagatcaatgacaacagcgagctggagctgacctctgtggtggagaacaccttccctgcccaggacatcgtgcacacagtgacagtgaagaggaagaggggcaagagccagcccaactgtgccctgaaggagcacagcatgagcaacatcgcctctgtgaagagcccctatgaagcagaaaattctggagaggagctggaccagcgctacagcaaggccaagcccatgtgcaacacctgtgggaaggtgttcagcgaggccagcagcctgcggcggcacatgaggatccacaagggcgtgaagccctacgtgtgccacctgtgtgggaaggccttcacccagtgcaaccagctgaagacccacgtgaggacccacactggagagaagccctacaagtgtgagctgtgtgacaagggctttgcccagaagtgccagctggtgttccacagcaggatgcaccacggggaggagaagccctacaagtgtgatgtgtgcaacctgcagtttgccaccagcagcaacctgaagatccacgccaggaagcacagcggggagaagccctacgtgtgtgacagatgtggccagagatttgcccaggccagcaccctgacctaccacgtgagaagacacactggagagaagccctacgtgtgtgacacctgtgggaaggcctttgctgtgagcagcagcctcatcacccacagcaggaagcacactggagagaagccctacatctgtggcatctgtgggaagagcttcatcagcagtggagagctgaacaagcacttccgcagccacactggagctgacaagaccctggacagcagcgctgaggaccacaccctgtctgagcaggacagcatccagaagagccccctgtctgagaccatggatgtgaagcccagcgacatgaccctgcccctggccctgcccctgggcacagaggaccaccacatgctgctgcctgtgacagacacccagagccccaccagtgacaccctgctgcggagcacagtgaatggctacagcgagccccagctgatcttcctgcagcagctgtactag

SEQ ID NO: 72360 - DNA, 1746 bp, Artificial Sequence
  derived and/or modified sequence
atgcagtacagccaccactgcgagcacctgctggagcggctgaacaagcagagggaggcagggtttctgtgcgattgcactattgtaataggagagttccaattcaaagctcataggaacgtcctggcttctttttccgagtacttcggtgcaatatatagaagtacgtccgaaaacaacgtttttctagaccagtctcaggtgaaggccgacggtttccagaagctgctggaatttatttatacaggcacccttaatctcgattcttggaatgtgaaagagatccatcaggccgccgactatctcaaggtagaggaggtagtcactaagtgtaagatcaaaatggaagactttgccttcattgctaatcccagtagcacagaaatctctagcattacaggcaacattgagcttaatcagcagacatgtttgcttaccctgagagactataacaatagagagaagagcgaggtgagcaccgatctgattcaggctaaccccaagcagggtgctttggccaaaaaaagcagccagacaaagaagaaaaaaaaagctttcaacagtcccaagacagggcagaacaagacagttcagtacccctctgacatcctcgaaaacgccagtgtggagctttttttggatgctaacaaactgcccactccagtagttgaacaggtggcccaaatcaacgataattccgagctggagcttacaagcgttgtcgaaaacaccttccccgcacaggacatcgtccacacagtgacggtcaaacgaaagcgtggcaagtcccaacctaattgtgctctaaaggagcattccatgagcaacatcgcgagcgtcaagtccccctatgaggcggaaaactccggggaagagctggaccagaggtactccaaagctaagcctatgtgcaatacctgtggtaaggtgtttagcgaagccagctcgctgcggcgtcacatgagaatccacaaaggcgtgaaaccttacgtgtgtcatctgtgtgggaaggcctttacacagtgtaaccagctgaaaacccacgtgaggacccacacaggggaaaagccatataaatgcgaactttgcgataaaggcttcgcgcagaagtgccagctcgtttttcactcacggatgcatcacggtgaggagaaaccatacaagtgtgatgtctgtaacttgcagtttgctacctcctccaatctgaaaatacatgcaaggaagcactccggggagaagccttacgtttgtgacaggtgtggtcaaaggttcgcccaagcttcaacactgacttaccacgttcgacgccacaccggcgagaagccttacgtatgtgatacatgcggaaaggcattcgctgtgtcctcatccctgatcacccactcccgcaagcacaccggcgagaagccctacatttgtggtatttgcgggaagtcattcatttctagtggggagctgaataagcatttccgctctcacacaggggccgataaaacactcgattcaagcgctgaagaccacacgctctctgagcaggactccattcagaaaagccctctatccgagacaatggatgtgaaaccaagtgatatgacactaccattagccctgccattagggacggaagaccaccatatgctcctgcctgtgaccgatacacaatcgcccactagtgacaccctgctccggagtacagtcaacgggtactctgagccacagttgatttttcttcagcaactgtattag

SEQ ID NO: 72361 - DNA, 1746 bp, Artificial Sequence
  derived and/or modified sequence
atgcagtattctcaccattgcgaacaccttctggaacgactgaacaagcagagggaggcgggttttctctgtgactgcaccattgtgataggagagttccaattcaaagcacacaggaatgtattggcaagctttagtgagtactttggggcaatataccgctccacttctgagaacaacgtattcctggaccagtcccaagtgaaagcagacggattccagaagctgttagaatttatctacaccggaacacttaatttagattcctggaatgtcaaggagatacatcaggcagcagattacctgaaagttgaggaggtcgtcacaaagtgtaaaattaagatggaggattttgcattcatcgccaatcccagctccaccgagattagctccatcaccggcaacattgagctgaatcagcagacctgtcttttgactctccgggactacaataaccgtgaaaaaagcgaggtctccactgacctcatacaggcgaacccgaaacagggagccctcgcaaaaaaatcctcgcaaactaaaaaaaaaaaaaaggcgttcaattccccgaagactggacaaaacaagaccgtgcagtacccatccgatattctcgagaatgcttctgtggagctattcctcgacgcaaacaaattaccaacgcccgtcgtagagcaggtcgcccaaattaacgataatagcgagctagagctgacgtctgttgtggagaataccttccccgcacaagacatcgtgcatactgtgacggtcaaaagaaagcgaggtaagtcccaacctaactgcgccctaaaggaacactctatgtcaaatatcgcctcggtgaaaagcccttacgaagccgagaatagcggcgaagagctggaccagcggtacagtaaggcaaagcctatgtgtaatacatgcggaaaagttttttccgaagcatcatccctcaggaggcacatgaggatccataaaggcgttaaaccgtatgtgtgccatctctgtggcaaagccttcacccagtgcaatcagctgaagactcatgtgcgaactcacaccggggagaagccctacaagtgtgagctgtgtgacaagggcttcgcccaaaagtgtcagctggtgttccactctaggatgcatcacggcgaagaaaagccgtataagtgtgatgtgtgcaacctgcagtttgctacaagctccaacctgaaaattcatgcccgaaaacacagcggggagaagccctatgtttgcgatagatgtggtcagagatttgctcaggcttccaccctgacatatcacgtacggaggcatacgggcgagaagccttatgtgtgcgatacctgtggcaaggctttcgcggtcagctcatctctcataactcactccaggaaacacacaggggaaaagccttacatatgcggaatttgtggcaagtcgttcatcagcagcggtgagctcaacaaacacttcagaagccacactggtgccgataagacgctcgactcctccgctgaagaccacaccctttccgagcaggacagtattcagaagtcgccactgagcgaaacgatggatgtgaagccaagcgatatgaccttacccctggcacttcccttaggtactgaagaccatcatatgcttctccccgtcacagacactcagtcacctacatctgatactctgctacggagcacggttaacggttattccgaaccccagcttatattccttcagcagctgtattag

SEQ ID NO: 72362 - DNA, 1746 bp, Artificial Sequence
  derived and/or modified sequence
atgcagtacagccaccactgcgagcacctgctggagagactgaacaagcagagagaggccggcttcctgtgcgactgcaccatcgtgatcggcgagttccagttcaaggcccacagaaacgtgctggccagcttcagcgagtacttcggcgccatctacagaagcaccagcgagaacaacgtgttcctggaccagagccaggtgaaggccgacggcttccagaagctgctggagttcatctacaccggcaccctgaacctggacagctggaacgtgaaggagatccaccaggccgccgactacctgaaggtggaggaggtggtgaccaagtgcaagatcaagatggaggacttcgccttcatcgccaaccccagcagcaccgagatcagcagcatcaccggcaacatcgagctgaaccagcagacctgcctgctgaccctgagagactacaacaacagagagaagagcgaggtgagcaccgacctgatccaggccaaccccaagcagggcgccctggccaagaagagcagccagaccaagaagaagaagaaggccttcaacagccccaagaccggccagaacaagaccgtgcagtaccccagcgacatcctggagaacgccagcgtggagctgttcctggacgccaacaagctgcccacccccgtggtggagcaggtggcccagatcaacgacaacagcgagctggagctgaccagcgtggtggagaacaccttccccgcccaggacatcgtgcacaccgtgaccgtgaagagaaagagaggcaagagccagcccaactgcgccctgaaggagcacagcatgagcaacatcgccagcgtgaagagcccctacgaggccgagaacagcggcgaggagctggaccagagatacagcaaggccaagcccatgtgcaacacctgcggcaaggtgttcagcgaggccagcagcctgagaagacacatgagaatccacaagggcgtgaagccctacgtgtgccacctgtgcggcaaggccttcacccagtgcaaccagctgaagacccacgtgagaacccacaccggcgagaagccctacaagtgcgagctgtgcgacaagggcttcgcccagaagtgccagctggtgttccacagcagaatgcaccacggcgaggagaagccctacaagtgcgacgtgtgcaacctgcagttcgccaccagcagcaacctgaagatccacgccagaaagcacagcggcgagaagccctacgtgtgcgacagatgcggccagagattcgcccaggccagcaccctgacctaccacgtgagaagacacaccggcgagaagccctacgtgtgcgacacctgcggcaaggccttcgccgtgagcagcagcctgatcacccacagcagaaagcacaccggcgagaagccctacatctgcggcatctgcggcaagagcttcatcagcagcggcgagctgaacaagcacttcagaagccacaccggcgccgacaagaccctggacagcagcgccgaggaccacaccctgagcgagcaggacagcatccagaagagccccctgagcgagaccatggacgtgaagcccagcgacatgaccctgcccctggccctgcccctgggcaccgaggaccaccacatgctgctgcccgtgaccgacacccagagccccaccagcgacaccctgctgagaagcaccgtgaacggctacagcgagccccagctgatcttcctgcagcagctgtactag

SEQ ID NO: 72363 - protein, 140 aa, Artificial Sequence
  derived and/or modified sequence
MPPKFKRHLNDDDVTGSVKSERRNLLEDDSDEEEDFFLGPSGPRFGPRNDKIKHVQNQVDEVIDVMQENITKVIERGERLDELQDKSESLSDNATAFSNRSKQLRRQMWWRGCKIKAIMALVAAILLLVIIILIVMKYRT

SEQ ID NO: 72364 - DNA, 423 bp, Artificial Sequence
  derived and/or modified sequence
atgccccccaagttcaagagacacctgaacgacgacgacgtgaccggcagcgtgaagagcgagagaagaaacctgctggaggacgacagcgacgaggaggaggacttcttcctgggccccagcggccccagattcggccccagaaacgacaagatcaagcacgtgcagaaccaggtggacgaggtgatcgacgtgatgcaggagaacatcaccaaggtgatcgagagaggcgagagactggacgagctgcaggacaagagcgagagcctgagcgacaacgccaccgccttcagcaacagaagcaagcagctgagaagacagatgtggtggagaggctgcaagatcaaggccatcatggccctggtggccgccatcctgctgctggtgatcatcatcctgatcgtgatgaagtacagaacctag

SEQ ID NO: 72365 - DNA, 423 bp, Artificial Sequence
  derived and/or modified sequence
atgccacctaagtttaaaaggcatctgaacgacgacgatgtgacaggcagcgtgaaatcagagaggcggaacctgctcgaagacgattccgacgaggaagaagacttcttcttgggaccaagcggtccacgctttggcccccgcaatgacaaaatcaagcacgttcagaaccaggtagacgaggtgattgacgtcatgcaggaaaacatcacaaaagtcattgaacggggcgaaaggctagatgaactccaggacaaatccgagagcctctccgataatgccacggcttttagcaacagaagtaagcagctgagacgccagatgtggtggcgtggttgcaaaatcaaggcaatcatggctctcgttgctgccatcttacttctggtcatcataatcctgatcgtcatgaaatacagaacttag

SEQ ID NO: 72366 - DNA, 423 bp, Artificial Sequence
  derived and/or modified sequence
atgccccctaagtttaagagacatcttaatgacgacgacgtgacaggctcagtgaaaagtgaacgaagaaatctgctggaagatgacagtgatgaggaggaagatttcttcctcgggcctagtggtcctagatttgggcctcgcaatgataagattaagcacgttcagaatcaagtggacgaagtgatcgatgtgatgcaggaaaatatcactaaggtgatagagcgcggcgaacggctcgatgaacttcaagataagtctgaatccctgagcgacaacgccaccgccttttccaaccggtccaagcaactaaggcgccagatgtggtggcggggatgtaagatcaaggccataatggccctagtcgctgcgattttgctactcgtgatcattattctgatcgtgatgaagtaccggacgtag

SEQ ID NO: 72367 - DNA, 423 bp, Artificial Sequence
  derived and/or modified sequence
atgccacccaagttcaagaggcacctgaatgatgatgatgtgactggatctgtgaagtctgagaggaggaacctgctggaggatgacagtgatgaggaggaggacttcttcctgggccccagcggccccaggtttggccccagaaatgacaagatcaagcacgtgcagaaccaggtggatgaggtgattgatgtgatgcaggagaacatcaccaaggtgattgaaagaggagagcggctggatgagctgcaggacaagtctgagagcctgagtgacaatgccacagccttcagcaacagaagcaagcagctgcggcggcagatgtggtggaggggctgcaagatcaaggccatcatggccctggtggccgccatcctgctgctggtgatcatcatcctgattgtgatgaagtaccgcacctag

SEQ ID NO: 72368 - DNA, 423 bp, Artificial Sequence
  derived and/or modified sequence
atgccccccaagttcaagcggcacctgaacgacgacgacgtgaccgggtcagtcaagtcagaacggagaaaccttctggaggatgattccgatgaggaggaagactttttcctggggcccagcggccctagattcggcccccgcaatgacaaaattaagcacgtacaaaaccaggtggacgaggtgatcgacgtcatgcaggagaacataacaaaggtgatagaaagaggggagcgcctggatgaactgcaggacaagagcgagagcctgtctgacaacgccacagctttttcaaaccgcagtaaacagctgagaaggcagatgtggtggcgtggttgcaagataaaagccattatggcgctggtcgccgcgatattgctgttggtgatcatcattttgatagtgatgaagtacaggacatag

SEQ ID NO: 72369 - DNA, 423 bp, Artificial Sequence
  derived and/or modified sequence
atgccccccaagttcaagcggcacctgaacgacgacgacgtgaccggatccgtcaaatcagagcgcaggaacctgttggaagacgatagcgacgaagaggaggatttttttttggggccttccggacctcgctttggaccaaggaacgataagataaagcatgtgcagaatcaggtggatgaagtgatcgacgtaatgcaggagaacatcactaaagtcatagagcgcggcgagagactggatgagctccaggacaagagtgagtccctaagcgataatgcgactgcgttctctaatcgcagcaaacagctgcgcaggcagatgtggtggaggggctgcaagattaaggccattatggccttggtcgccgccatcctgctgctcgtcataataatcctgattgtaatgaagtatcggacttag

SEQ ID NO: 72370 - DNA, 423 bp, Artificial Sequence
  derived and/or modified sequence
atgcctccaaagtttaaaaggcacctgaacgacgacgacgtgaccggttctgtgaagagcgaaaggcggaatctactggaggatgacagtgatgaggaagaggatttctttctgggaccaagtgggccaaggttcggtccacggaacgataagattaaacacgtacagaatcaggtcgatgaggtgatcgatgtaatgcaggagaacataacaaaggtgatcgagcggggagagcgactggacgagctgcaggataagtctgaatcgttgagcgacaatgctactgcttttagtaatcgatcaaagcagcttcgtcggcagatgtggtggcgcggttgcaagattaaggccatcatggctctcgttgcggcaatcctccttctggtgatcataattctgattgtaatgaagtaccgcacttag

SEQ ID NO: 72371 - DNA, 423 bp, Artificial Sequence
  derived and/or modified sequence
atgccccctaagtttaaacgccacctgaacgatgatgacgttaccggctcggtcaaaagcgaacgccgtaatttactggaagatgacagcgatgaggaagaagacttcttcctcggccctagtggccctcgcttcggacctagaaatgacaaaatcaagcatgtgcagaatcaggtagacgaagtgattgatgtgatgcaagaaaacatcactaaggtcattgaacggggtgagcgccttgatgagttgcaggacaaatccgagagtctgtccgacaatgccacagcttttagcaacaggtctaaacaactccggaggcaaatgtggtggcgtgggtgcaagatcaaggccatcatggccctcgtggcggcaattctgctgcttgttattatcattcttattgtaatgaagtacagaacctag

SEQ ID NO: 72372 - DNA, 1193 bp, Artificial Sequence
  derived and/or modified sequence
gatcggctcgatgagcggaggcgctgctgcggcgctgcggccgacgccgggtccgcaccaactgtctccccctcccagcttcttacctcggcttcctactccttcccccgcccgcccagcaccgccagcccgggagagctgccgggagttccccgggagcctcaggtggtgactatcctgttgagaagcaaaagatactttgcaagtaaaaaatatgcctcccaagtttaagcgccacctcaatgatgatgatgtcacaggttctgtgaaaagtgaaaggagaaatcttttggaagatgattcagatgaagaagaggacttttttctgggaccatctggaccaagatttggacctagaaatgataaaattaagcatgttcagaatcaagtggatgaagttattgatgtcatgcaagaaaatattacaaaggtaattgagagaggggagagactagatgaactacaggacaaatcagaaagcttatcggataatgcaacagcttttagcaacagatccaaacaacttcgaaggcaaatgtggtggcgtggatgcaaaataaaagccatcatggctttggttgctgctatccttttgctagtgattatcattcttatagtcatgaaataccgtacttgatttgatgacagagatcttcattaaacaagatctgggacagtaataaaagattgctgcataatttaaatgaaacctatgtgtatataactttcaaaacttctttttcaagaaactaagaggcaagtatcacttcaaattggaacgttgagaatgtccaattatcttctccctttctaacaaaatgttcttttaataattatgtttaaggcaaagagaactagcctctatttttccatatttcaaggatctaatttgaaactagatacttgccagttcattatttgtgtatataaacactgattataatatttcatattaatattttaatggcataaggacttgcattattgcattagggagcgggtcatgctgggggtcaggaagcctgtgtagagtaccaaattatatgctgaaagagatgcataaccattctgtcaatatttgcagaaatatagttcctttcatattacagttgttttgcaagcaatttccacatttataggtgtaacaaaagctaaatgttgtaaatgttgttgccctcaggtataactaaaaa

SEQ ID NO: 72373 - DNA, 2657 bp, Artificial Sequence
  derived and/or modified sequence
gagcggaggcgctgctgcggcgctgcggccgacgccgggtccgcaccaactgtctccccctcccagcttcttacctcggcttcctactccttcccccgcccgcccagcaccgccagcccgggagagctgccgggagttccccgggagcctcaggtggtgactatcctgttgagaagcaaaagatactttgcaagtaaaaaatatgcctcccaagtttaagcgccacctcaatgatgatgatgtcacaggttctgtgaaaagtgaaaggagaaatcttttggaagatgattcagatgaagaagaggacttttttctgggaccatctggaccaagatttggacctagaaatgataaaattaagcatgttcagaatcaagtggatgaagttattgatgtcatgcaagaaaatattacaaaggtaattgagagaggggagagactagatgaactacaggacaaatcagaaagcttatcggataatgcaacagcttttagcaacagatccaaacaacttcgaaggcaaatgtggtggcgtggatgcaaaataaaagccatcatggctttggttgctgctatccttttgctagtgattatcattcttatagtcatgaaataccgtacttgatttgatgacagagatcttcattaaacaagatctgggacagtaataaaagattgctgcataatttaaatgaaacctatgtgtatataactttcaaaacttctttttcaagaaactaagagctcagatcatcctgcacttgaaaaatgaagttttaccaccatcaaaactatcattatttaacaacaagtgaagatcaacagaaaaattcaagtagctttgcaaatactagttgatactcagtgaaatcacgtcactattttgatgcctgaatccatacctttgtgatttatgtttaattacagaagcctattgccttgcagcaattttgttgttataatactgattaattggttactccttcttattataactcagtaatacctgtggtcatttggttcctctatcctgacaaagttcactggaaattgccctcagattttataaactgggggatttcttaattagataaaagttcattactgaagatggaatattatataagatggaggaagggtaattaatagacatgagatatagaaatactttgttagccctgctatagattgcctattgtagtctttctgtgcatttcaatagtctgtattaggaaattataacttcagcacttttgatagcaaaaattggcatctttcaattctgtatagtatgtgactatcctgtaaatgataatatgtgtacagactgagaaggcaggaatataaagtaattgaaatctctcattgccggtatactctaaaacatgcttgatgccttgtcagcatcattgcacacattgactctgtatttacatctgtatatacactatgattagaaaatatgcaagaaattgtttttccatgttaagaacaaatgccattagaagatgtccccttaattgtattgtcagagtattactatgtcaaggatgactgttctgttaacctaattttgtgttttcacatggaaatgtgattggactccatttttctgtgagttgagagtaagagcataagtcagtttgaaagcatttacaagtttgttttagaatgtagtaagggctgaaaggtgctctacttcttaacttgttttttccatgttgtagacaaatgaaatttgtctaaatgcttttgtctaaaaatgcatttgtctaaatgctttagattgatgtagggtttagatcctctttaatactttgagatagtcttattctgattttttttttcttctggaaaccaagtagaattagggatgggaatacaaatgcatttattctggcttctgttttattccaagaagcttcttggaacaaatcagtaggaattgaaaagaaagcatgaccaacccaattacaggggataaatgtaagcttgttaaagtaagcaccacaccatgtttctgtctccccagcacccagcacagtgctgtgaaccttggcagatgctagataaatgtgtgttgaatgaatgtgcctatgaagccacaaagatgccacatgttagtatatcagtgagaggtgactccacagtgctctctggagaagcaatatgagtgactgaagagtggggccttttgcttttgcctggatataggggtgctcttctactgtaattgggtgtggaaaaactctggctttatggtattccattaggttcttttcatttaaagtagtcttaaaatcaaagtatccaatattttaaagccacaaagtagattacataattagcagagattttagtcagtaaaatgttagaaatcaaactataagaaaattcaagtcctttattttgtgtcttgggtatatgtcattattttaaattccacactcccttatttaatcactttggtaagtgcctttgatgttttgaaatgtatagtgggagatgagcaaatgtaaatgtcatgtgccctgttccctagcttctcaattcctcataaccatttttaccagtgttgcaaagtttagacctttgtgttaatatcagaagtgtatttgtagcccctccatagtgaacaatgaaataaactatttcat

SEQ ID NO: 72374 - protein, 207 aa, Artificial Sequence
  derived and/or modified sequence
MNFQQRLQSLWTLASRPFCPPLLATASQMQMVVLPCLGFTLLLWSQVSGAQGQEFHFGPCQVKGVVPQKLWEAFWAVKDTMQAQDNITSARLLQQEVLQNVSDAESCYLVHTLLEFYLKTVFKNYHNRTVEVRTLKSFSTLANNFVLIVSQLQPSQENEMFSIRDSAHRRFLLFRRAFKQLDVEAALTKALGEVDILLTWMQKFYKL

SEQ ID NO: 72375 - DNA, 624 bp, Artificial Sequence
  derived and/or modified sequence
atgaacttccagcagagactgcagagcctgtggaccctggccagcagacccttctgcccccccctgctggccaccgccagccagatgcagatggtggtgctgccctgcctgggcttcaccctgctgctgtggagccaggtgagcggcgcccagggccaggagttccacttcggcccctgccaggtgaagggcgtggtgccccagaagctgtgggaggccttctgggccgtgaaggacaccatgcaggcccaggacaacatcaccagcgccagactgctgcagcaggaggtgctgcagaacgtgagcgacgccgagagctgctacctggtgcacaccctgctggagttctacctgaagaccgtgttcaagaactaccacaacagaaccgtggaggtgagaaccctgaagagcttcagcaccctggccaacaacttcgtgctgatcgtgagccagctgcagcccagccaggagaacgagatgttcagcatcagagacagcgcccacagaagattcctgctgttcagaagagccttcaagcagctggacgtggaggccgccctgaccaaggccctgggcgaggtggacatcctgctgacctggatgcagaagttctacaagctgtag

SEQ ID NO: 72376 - DNA, 624 bp, Artificial Sequence
  derived and/or modified sequence
atgaattttcagcagcgcctgcagagcctgtggaccctggcctcccggcctttctgtcctccactactggctacggcgtctcagatgcagatggttgtgttaccttgcctgggctttacacttttgctctggagccaggtgtctggcgcccaggggcaggaattccattttggaccctgccaagtcaaaggtgtcgtgccccagaagctttgggaagccttctgggctgtgaaggacacaatgcaggcgcaggacaacattaccagcgctagactgcttcagcaagaagttctgcagaacgtgtcagatgctgaatcctgctatctggtgcacacgctattggaattttatctcaagacagtcttcaagaattatcacaatcgcaccgtggaggtgcgaacactgaaatcgttcagtacgctagcaaataatttcgtcctgatcgtgtcccagctgcagccctctcaggaaaacgaaatgttttccattcgagattctgctcatcgccgctttcttctgttccgacgcgcattcaaacagctggatgtggaggccgcactgacgaaagctcttggggaagtagacattttgctgacatggatgcagaaattttataaattgtag

SEQ ID NO: 72377 - DNA, 624 bp, Artificial Sequence
  derived and/or modified sequence
atgaacttccagcagaggctgcagagcctgtggaccctggccagccggcccttctgcccccccctgctggccacagccagccagatgcagatggtggtgctgccctgcctgggcttcaccctgctgctgtggagccaggtgtctggggcccagggccaggagttccacttcggcccctgccaggtgaagggcgtggtgccccagaagctgtgggaggccttctgggccgtgaaggacaccatgcaggcccaggacaacatcaccagcgcccggctgctgcagcaggaggtgctgcagaatgtgtctgatgctgagagctgctacctggtgcacaccctgctggagttctacctgaagacagtgttcaagaactaccacaacagaacagtggaggtgaggaccctgaagagcttcagcaccctggccaacaactttgtgctgattgtgtcccagctgcagcccagccaggagaatgagatgttcagcatccgggacagcgcccaccggcgcttcctgctcttcagaagagccttcaagcagctggatgtggaggccgccctgaccaaggccctgggggaggtggacatcctgctgacctggatgcagaagttctacaagctgtag

SEQ ID NO: 72378 - DNA, 624 bp, Artificial Sequence
  derived and/or modified sequence
atgaacttccagcagcggctgcagagcctgtggaccctggccagcagaccattctgtcccccactcctcgccacagcaagccaaatgcagatggtcgtgttgccatgcctcgggttcaccctgctgctttggtcccaggtatccggcgcacagggccaagagtttcatttcggtccatgccaagtaaaaggtgtggtcccgcagaaactctgggaagccttttgggcagtcaaagataccatgcaagctcaggacaatatcaccagcgcccggttgttgcagcaggaggtgctgcaaaacgtgagtgatgccgagagctgttatcttgtccacacacttctggagttttacctcaaaaccgtgtttaagaattaccataatcggaccgtggaggtacggaccctgaagagcttttccacattggccaacaacttcgtcctgatcgtcagccagctccagcctagccaagagaacgagatgtttagcatcagagatagcgctcacagacgattcctgctgttccgccgggccttcaagcaacttgacgtggaggcggccctaaccaaggcgttaggggaggtcgacatcctactcacttggatgcaaaaattttataagttgtag

SEQ ID NO: 72379 - DNA, 624 bp, Artificial Sequence
  derived and/or modified sequence
atgaactttcagcagcgtttacaatctctctggaccctggcctcgcgcccattttgccccccactgctggctactgcgtctcaaatgcaaatggttgtgctgccatgtctggggttcacgcttctgctctggagtcaggtttctggcgcacagggacaggaattccacttcggtccatgtcaggtgaagggcgtggtgccacagaagctgtgggaggccttctgggccgttaaggacaccatgcaagcccaggacaatattacgagtgcgagattactgcagcaggaagtgctgcagaacgtctccgatgcagaatcatgttacctggtgcacacgctgctggaattctatctgaaaacagtttttaagaattaccacaaccgcaccgtggaagtccggacactgaaatccttcagtacactcgcaaataacttcgtgttgatcgtgagccagctacagcctagccaggagaatgagatgtttagtattcgtgacagcgcccatcggcgtttcctcttgttccgcagggcatttaaacagcttgatgtagaggcagcactgaccaaagctctcggagaagtggacatcttgctcacatggatgcaaaagttctataagctctag

SEQ ID NO: 72380 - DNA, 624 bp, Artificial Sequence
  derived and/or modified sequence
atgaacttccagcaacgcctgcaatccctttggacattagcttctcgccccttctgccctcctctgttagcaaccgcatcccagatgcaaatggtggtgctgccctgtctaggcttcacattgctgctgtggtcacaggtgagcggcgcgcagggccaagaattccacttcggcccctgtcaagttaaaggagtcgtgccacagaaactgtgggaggccttttgggctgtcaaggacaccatgcaggcacaggataatattacgtccgctcgattattgcagcaagaagtactacagaatgttagtgacgctgagtcgtgctacctcgttcacacccttctggaattttatcttaaaactgtctttaaaaattatcacaaccgaacggtagaggttaggacgctcaagagctttagtacgctggccaacaactttgtcctaatcgtatcacagctgcagccatcgcaggagaatgagatgttctctatcagggattcagcacaccgtaggtttctccttttccgacgcgcctttaagcagctggacgtggaagccgcactgaccaaggctctaggcgaggtggatatcctgctgacatggatgcagaaattctataaactgtag

SEQ ID NO: 72381 - DNA, 624 bp, Artificial Sequence
  derived and/or modified sequence
atgaatttccagcagcggctacagtccctctggaccctggctagtaggccattctgccctcctctattagcaaccgcttcgcagatgcagatggtggtgttgccatgtctgggatttaccctgttactgtggtcccaagtgagtggagcacagggacaagagtttcactttgggccatgccaggttaaaggggtggtaccacaaaaactgtgggaggcattctgggcagttaaggatacaatgcaggctcaagataatattacatcggctagattgcttcaacaggaagtgcttcagaacgttagcgacgcagagtcatgttatttggtgcatacactcctagaattctaccttaagaccgtcttcaaaaattatcataatcggaccgtcgaggtgagaaccctgaagtccttttctaccctcgccaacaatttcgtgctgatcgtctcccagctgcagccttcacaagagaatgaaatgttttccattagagactctgcccacaggagatttttattattccggcgagccttcaagcagctggacgttgaggccgccctgacaaaagctctcggagaagtcgacatactccttacttggatgcagaagttttataaattgtag

SEQ ID NO: 72382 - DNA, 1320 bp, Artificial Sequence
  derived and/or modified sequence
gcttgcctgcaaacctttacttctgaaatgacttccacggctgggacgggaaccttccacccacagctatgcctctgattggtgaatggtgaaggtgcctgtctaacttttctgtaaaaagaaccagctgcctccaggcagccagccctcaagcatcacttacaggaccagagggacaagacatgactgtgatgaggagctgctttcgccaatttaacaccaagaagaattgaggctgcttgggaggaaggccaggaggaacacgagactgagagatgaattttcaacagaggctgcaaagcctgtggactttagccagcagacccttctgccctcctttgctggcgacagcctctcaaatgcagatggttgtgctcccttgcctgggttttaccctgcttctctggagccaggtatcaggggcccagggccaagaattccactttgggccctgccaagtgaagggggttgttccccagaaactgtgggaagccttctgggctgtgaaagacactatgcaagctcaggataacatcacgagtgcccggctgctgcagcaggaggttctgcagaacgtctcggatgctgagagctgttaccttgtccacaccctgctggagttctacttgaaaactgttttcaaaaactaccacaatagaacagttgaagtcaggactctgaagtcattctctactctggccaacaactttgttctcatcgtgtcacaactgcaacccagtcaagaaaatgagatgttttccatcagagacagtgcacacaggcggtttctgctattccggagagcattcaaacagttggacgtagaagcagctctgaccaaagcccttggggaagtggacattcttctgacctggatgcagaaattctacaagctctgaatgtctagaccaggacctccctccccctggcactggtttgttccctgtgtcatttcaaacagtctcccttcctatgctgttcactggacacttcacgcccttggccatgggtcccattcttggcccaggattattgtcaaagaagtcattctttaagcagcgccagtgacagtcagggaaggtgcctctggatgctgtgaagagtctacagagaagattcttgtatttattacaactctatttaattaatgtcagtatttcaactgaagttctatttatttgtgagactgtaagttacatgaaggcagcagaatattgtgccccatgcttctttacccctcacaatccttgccacagtgtggggcagtggatgggtgcttagtaagtacttaataaactgtggtgctttttttggcctgtc

SEQ ID NO: 72383 - RNA, 624 nt, Artificial Sequence
  derived and/or modified sequence
augaacuuccagcaacgccugcaaucccuuuggacauuagcuucucgccccuucugcccuccucuguuagcaaccgcaucccagaugcaaaugguggugcugcccugucuaggcuucacauugcugcuguggucacaggugagcggcgcgcagggccaagaauuccacuucggccccugucaaguuaaaggagucgugccacagaaacugugggaggccuuuugggcugucaaggacaccaugcaggcacaggauaauauuacguccgcucgauuauugcagcaagaaguacuacagaauguuagugacgcugagucgugcuaccucguucacacccuucuggaauuuuaucuuaaaacugucuuuaaaaauuaucacaaccgaacgguagagguuaggacgcucaagagcuuuaguacgcuggccaacaacuuuguccuaaucguaucacagcugcagccaucgcaggagaaugagauguucucuaucagggauucagcacaccguagguuucuccuuuuccgacgcgccuuuaagcagcuggacguggaagccgcacugaccaaggcucuaggcgagguggauauccugcugacauggaugcagaaauucuauaaacuguag

SEQ ID NO: 72384 - RNA, 624 nt, Artificial Sequence
  derived and/or modified sequence
augaauuuccagcagcggcuacagucccucuggacccuggcuaguaggccauucugcccuccucuauuagcaaccgcuucgcagaugcagauggugguguugccaugucugggauuuacccuguuacuguggucccaagugaguggagcacagggacaagaguuucacuuugggccaugccagguuaaaggggugguaccacaaaaacugugggaggcauucugggcaguuaaggauacaaugcaggcucaagauaauauuacaucggcuagauugcuucaacaggaagugcuucagaacguuagcgacgcagagucauguuauuuggugcauacacuccuagaauucuaccuuaagaccgucuucaaaaauuaucauaaucggaccgucgaggugagaacccugaaguccuuuucuacccucgccaacaauuucgugcugaucgucucccagcugcagccuucacaagagaaugaaauguuuuccauuagagacucugcccacaggagauuuuuauuauuccggcgagccuucaagcagcuggacguugaggccgcccugacaaaagcucucggagaagucgacauacuccuuacuuggaugcagaaguuuuauaaauuguag

SEQ ID NO: 72385 - protein, 154 aa, Artificial Sequence
  derived and/or modified sequence
MNFQQRLQSLWTLASRPFCPPLLATASQMQMVVLPCLGFTLLLWSQVSGAQGQEFHFGPCQVKGVVPQKLWEAFWAVKDTMQAQDNITSARLLQQEVLQNVSQENEMFSIRDSAHRRFLLFRRAFKQLDVEAALTKALGEVDILLTWMQKFYKL

SEQ ID NO: 72386 - DNA, 465 bp, Artificial Sequence
  derived and/or modified sequence
atgaacttccagcagagactgcagagcctgtggaccctggccagcagacccttctgcccccccctgctggccaccgccagccagatgcagatggtggtgctgccctgcctgggcttcaccctgctgctgtggagccaggtgagcggcgcccagggccaggagttccacttcggcccctgccaggtgaagggcgtggtgccccagaagctgtgggaggccttctgggccgtgaaggacaccatgcaggcccaggacaacatcaccagcgccagactgctgcagcaggaggtgctgcagaacgtgagccaggagaacgagatgttcagcatcagagacagcgcccacagaagattcctgctgttcagaagagccttcaagcagctggacgtggaggccgccctgaccaaggccctgggcgaggtggacatcctgctgacctggatgcagaagttctacaagctgtag

SEQ ID NO: 72387 - DNA, 465 bp, Artificial Sequence
  derived and/or modified sequence
atgaactttcagcagagactccaatccttatggacattggcatcgaggccattctgtccccctttgctggccactgcgtctcaaatgcagatggtggtgttgccctgcctcggctttaccctcctcctgtggtcacaggtctccggcgcacaggggcaggaatttcattttggaccatgccaggtgaagggggtggtgccacagaagctttgggaagctttttgggccgtcaaggacacaatgcaggcccaggacaacattacttctgcccgcttactgcagcaggaggttttgcagaatgtgagtcaggagaacgagatgttctctattagagacagcgctcatcgtcggtttctgttgttccgaagggcgtttaagcagctcgacgtggaagcagccctgaccaaggcacttggagaagttgacattctcttgacatggatgcagaagttttacaagctgtag

SEQ ID NO: 72388 - DNA, 465 bp, Artificial Sequence
  derived and/or modified sequence
atgaacttccagcagaggctgcagagcctgtggaccctggccagccggcccttctgcccccccctgctggccacagccagccagatgcagatggtggtgctgccctgcctgggcttcaccctgctgctgtggagccaggtgtctggggcccagggccaggagttccacttcggcccctgccaggtgaagggcgtggtgccccagaagctgtgggaggccttctgggccgtgaaggacaccatgcaggcccaggacaacatcaccagcgcccggctgctgcagcaggaggtgctgcagaatgtgtcccaggagaatgagatgttcagcatccgggacagcgcccaccggcgcttcctgctcttccggcgggccttcaagcagctggatgtggaggccgccctgaccaaggccctgggggaggtggacatcctgctgacctggatgcagaagttctacaagctgtag

SEQ ID NO: 72389 - DNA, 465 bp, Artificial Sequence
  derived and/or modified sequence
atgaacttccagcagcggctgcagagcctgtggaccctggccagcaggcccttctgccccccactgctggccacagcttctcagatgcagatggttgtgcttccctgcctggggttcaccctgttgctgtggtcacaggtgtccggagcccaggggcaggagttccacttcggaccttgtcaggtcaaaggggtggtaccgcaaaaattatgggaagcattctgggctgtgaaagacactatgcaagcacaggataacattacctcagcgcggctgctgcagcaggaagttctgcagaatgtgtctcaagaaaatgagatgttctccatccgggatagtgcccaccgcaggtttctgctgtttcgtagggcattcaaacagctagatgtggaggctgcacttaccaaagctcttggtgaggtagatattttactgacctggatgcaaaagttttataaactgtag

SEQ ID NO: 72390 - DNA, 465 bp, Artificial Sequence
  derived and/or modified sequence
atgaatttccagcagcgtctgcaatccctgtggacactggcctcaagacccttctgtcctccactgctggcgactgcgtctcagatgcagatggtggttctgccatgcttggggtttacattgcttctttggagccaagtctccggtgctcagggacaagagtttcacttcgggccatgccaggtgaagggggtcgtcccccaaaagctttgggaagccttctgggccgtaaaggatactatgcaggctcaagacaacataaccagcgctagactgctacaacaggaagtgctgcagaatgtctcacaggagaatgagatgttcagcattagggactccgcacaccggaggttcctactctttcgacgcgcatttaaacaactagatgtggaggcggcactgacaaaagccctgggggaagtggatattctactaacttggatgcagaagttttacaagctttag

SEQ ID NO: 72391 - DNA, 465 bp, Artificial Sequence
  derived and/or modified sequence
atgaacttccagcaacggttgcaaagcctgtggacccttgcttcccgacccttttgtccccctctactggcaacagcatcacagatgcagatggtagtgctgccatgcctgggatttacgctgctactctggtcacaagtctctggggcgcaaggacaagaattccatttcgggccatgccaggttaagggggtcgtgccgcaaaagctgtgggaagctttctgggcagtcaaggatactatgcaggcccaggacaacataacaagcgcccgattgctgcaacaggaagtgctgcagaacgtgagtcaggaaaacgaaatgttcagtatcagagattctgcccaccgtcgcttcctactttttaggagagctttcaaacagttggacgtggaggctgcgttgacaaaagcactaggcgaggttgacatcttactaacttggatgcagaaattctacaaactgtag

SEQ ID NO: 72392 - DNA, 465 bp, Artificial Sequence
  derived and/or modified sequence
atgaattttcagcaacggctccaatccctctggactctggctagccggcccttttgcccccccctgctcgccacagccagtcagatgcagatggtggtcctgccatgcttgggctttactcttctcctgtggtcccaagttagcggcgcccaaggacaggagtttcactttgggccctgccaagtgaaaggcgtagtcccacagaaactgtgggaggcgttctgggcagtaaaagacacaatgcaggcccaggataatatcacctccgctagactgcttcaacaagaagtcctacagaatgtgagtcaggaaaacgaaatgttcagtatcagagattctgcccaccgtcgcttcctactttttaggagagctttcaaacagttggacgtggaggctgcgttgacaaaagcactaggcgaggttgacatcttactaacttggatgcagaaattctacaaactgtag

SEQ ID NO: 72393 - DNA, 1819 bp, Artificial Sequence
  derived and/or modified sequence
cttgcctgcaaacctttacttctgaaatgacttccacggctgggacgggaaccttccacccacagctatgcctctgattggtgaatggtgaaggtgcctgtctaacttttctgtaaaaagaaccagctgcctccaggcagccagccctcaagcatcacttacaggaccagagggacaagacatgactgtgatgaggagctgctttcgccaatttaacaccaagaagaattgaggctgcttgggaggaaggccaggaggaacacgagactgagagatgaattttcaacagaggctgcaaagcctgtggactttagccagcagacccttctgccctcctttgctggcgacagcctctcaaatgcagatggttgtgctcccttgcctgggttttaccctgcttctctggagccaggtatcaggggcccagggccaagaattccactttgggccctgccaagtgaagggggttgttccccagaaactgtgggaagccttctgggctgtgaaagacactatgcaagctcaggataacatcacgagtgcccggctgctgcagcaggaggttctgcagaacgtctcgcaagaaaatgagatgttttccatcagagacagtgcacacaggcggtttctgctattccggagagcattcaaacagttggacgtagaagcagctctgaccaaagcccttggggaagtggacattcttctgacctggatgcagaaattctacaagctctgaatgtctagaccaggacctccctccccctggcactggtttgttccctgtgtcatttcaaacagtctcccttcctatgctgttcactggacacttcacgcccttggccatgggtcccattcttggcccaggattattgtcaaagaagtcattctttaagcagcgccagtgacagtcagggaaggtgcctctggatgctgtgaagagtctacagagaagattcttgtatttattacaactctatttaattaatgtcagtatttcaactgaagttctatttatttgtgagactgtaagttacatgaaggcagcagaatattgtgccccatgcttctttacccctcacaatccttgccacagtgtggggcagtggatgggtgcttagtaagtacttaataaactgtggtgctttttttggcctgtctttggattgttaaaaaacagagagggatgcttggatgtaaaactgaacttcagagcatgaaaatcacactgtcttctgatatctgcagggacagagcattggggtgggggtaaggtgcatctgtttgaaaagtaaacgataaaatgtggattaaagtgcccagcacaaagcagatcctcaataaacatttcatttcccacccacactcgccagctcaccccatcatccctttcccttggtgccctccttttttttttatcctagtcattcttccctaatcttccacttgagtgtcaagctgaccttgctgatggtgacattgcacctggatgtactatccaatctgtgatgacattccctgctaataaaagacaacataactcaagtctggcagactttcttctctatttctggatgaatgcccagtgagactgtgttgtacagctagaaaaggccttcttcccaatagcaaggctgtgcatctagcctcaagctctggctgaactttgtggtcgacatcaatctaaagatacagtgtctgactataaccttgttccaaaaacctaggcaaagagtatatgtaggaggtgggatatcacttccatgacataagtgctattgcagagccgtggccacccaggaactcctgactgctttcc

SEQ ID NO: 72394 - RNA, 465 nt, Artificial Sequence
  derived and/or modified sequence
augaacuuccagcaacgguugcaaagccuguggacccuugcuucccgacccuuuugucccccucuacuggcaacagcaucacagaugcagaugguagugcugccaugccugggauuuacgcugcuacucuggucacaagucucuggggcgcaaggacaagaauuccauuucgggccaugccagguuaagggggucgugccgcaaaagcugugggaagcuuucugggcagucaaggauacuaugcaggcccaggacaacauaacaagcgcccgauugcugcaacaggaagugcugcagaacgugagucaggaaaacgaaauguucaguaucagagauucugcccaccgucgcuuccuacuuuuuaggagagcuuucaaacaguuggacguggaggcugcguugacaaaagcacuaggcgagguugacaucuuacuaacuuggaugcagaaauucuacaaacuguag

SEQ ID NO: 72395 - RNA, 465 nt, Artificial Sequence
  derived and/or modified sequence
augaauuuucagcaacggcuccaaucccucuggacucuggcuagccggcccuuuugccccccccugcucgccacagccagucagaugcagauggugguccugccaugcuugggcuuuacucuucuccuguggucccaaguuagcggcgcccaaggacaggaguuucacuuugggcccugccaagugaaaggcguagucccacagaaacugugggaggcguucugggcaguaaaagacacaaugcaggcccaggauaauaucaccuccgcuagacugcuucaacaagaaguccuacagaaugugagucaggaaaacgaaauguucaguaucagagauucugcccaccgucgcuuccuacuuuuuaggagagcuuucaaacaguuggacguggaggcugcguugacaaaagcacuaggcgagguugacaucuuacuaacuuggaugcagaaauucuacaaacuguag

SEQ ID NO: 72396 - DNA, 633 bp, Artificial Sequence
  derived and/or modified sequence
atggagcagatgtctagggaagatatgctggccataagcacacctgtgttaactagcctggatgtacctcctgaaatgatgcctacggttatcgacgagtatttggggagcaattcagacgcccaagcgaagtgccaggcgtttcaagagtttatgggagatgtgttcattaacgtgccaaccgtgtcattttcccggtatctccgcgatagtggaagccctgtcttcttttacgaatttcaacaccgcccgagttccttcgccaaaataaagccagcatgggtgaaggcagaccacggcgccgaaggtgcctttgtattcggtggaccgtttctaatggacgaatcttccaggctggctttccccgaagcgacggaggaagagaaacagctgagcctaactatgatggcacagtggacgcatttcgcccgcactggggatcccaacagcaaagctctacctccatggcctcagtttaatcaggccgagcaatacctcgagatcaatcctgtgccacgcgccggtcagaaatttagggaggcctggatgcagttttggagtgagaccttacctagcaaaattcagcagtggcaccagaagcagaaaaatcgtaaagcacaagaggatttgtag

SEQ ID NO: 72397 - DNA, 633 bp, Artificial Sequence
  derived and/or modified sequence
atggagcagatgagccgggaggacatgctggccatcagcacccctgtgctgaccagcctggatgtgcccccagagatgatgcccaccgtgattgatgagtacctgggcagcaacagtgatgcccaggccaagtgccaggccttccaggagttcatgggagatgtgttcatcaacgtgcccaccgtgtccttcagccgctacctgcgggacagcggcagccctgtgttcttctatgagttccagcaccggcccagcagctttgccaagatcaagccagcctgggtgaaggctgaccatggagctgagggcgcctttgtgtttggaggccccttcctgatggatgagagcagccggctggccttccctgaggccacagaggaggagaagcagctgagcctgaccatgatggcccagtggacccactttgccaggactggagaccccaacagcaaggccctgcccccctggccccagttcaaccaggccgagcagtacctggagatcaaccctgtgccccgggccggccagaagttccgggaggcctggatgcagttctggagcgagaccctgcccagcaagatccagcagtggcaccagaagcagaagaacaggaaggcccaggaggacctgtag

SEQ ID NO: 72398 - DNA, 633 bp, Artificial Sequence
  derived and/or modified sequence
atggagcagatgagccgggaggacatgctggccatcagcacccccgtcctgacgagcttagacgtgccacccgagatgatgcctacagtcatcgatgagtacctgggcagcaatagtgacgcacaggcaaaatgtcaagcttttcaagagtttatgggagatgtcttcattaacgtgcccaccgttagcttttctcggtatctcagggattcagggtcaccagtgtttttctacgagtttcaacatcggccaagtagtttcgctaagataaagccagcatgggtcaaggctgatcacggcgcagaaggggcgttcgtctttggcgggcctttcttaatggacgagagcagcagactcgcttttcccgaggcgacagaagaagagaaacagttatcactcacgatgatggcgcaatggacccacttcgcgcggacaggagatcccaactctaaggccctacccccatggccacaatttaaccaggccgaacagtatctggaaatcaaccccgtaccacgggccggccagaaatttcgggaggcctggatgcagttttggtcggaaaccctcccctccaagatccaacaatggcaccagaagcagaaaaatcggaaagcccaggaggacctgtag

SEQ ID NO: 72399 - DNA, 633 bp, Artificial Sequence
  derived and/or modified sequence
atggaacagatgagcagggaagatatgctagccatctcaacgcctgtgctgacatcgctggacgtgccccctgagatgatgccaacagtgattgatgaatatctgggctcgaactctgatgcccaagccaaatgtcaagccttccaggagtttatgggggacgtgttcattaacgtcccaactgtgtccttctctaggtacctgcgggacagtgggtcgcccgttttcttttacgagtttcaacatcgaccatcatccttcgccaagattaagcccgcatgggtgaaggccgaccatggagctgagggggctttcgtgttcggtggcccttttctaatggatgagtcttcccgccttgctttccccgaggccactgaggaggagaagcagttgtcactgactatgatggcacagtggactcactttgcccgtacaggtgacccaaactcaaaggcccttccaccgtggccccagttcaaccaggccgaacagtatctggagataaatccagtgcctagggctgggcagaaattccgggaggcttggatgcaattctggtctgagaccctcccctcaaagatacagcaatggcaccagaagcaaaagaaccggaaggcccaggaggatctctag

SEQ ID NO: 72400 - DNA, 633 bp, Artificial Sequence
  derived and/or modified sequence
atggagcagatgagcagagaggacatgctggccatcagcacccccgtgctgaccagcctggacgtgccccccgagatgatgcccaccgtgatcgacgagtacctgggcagcaacagcgacgcccaggccaagtgccaggccttccaggagttcatgggcgacgtgttcatcaacgtgcccaccgtgagcttcagcagatacctgagagacagcggcagccccgtgttcttctacgagttccagcacagacccagcagcttcgccaagatcaagcccgcctgggtgaaggccgaccacggcgccgagggcgccttcgtgttcggcggccccttcctgatggacgagagcagcagactggccttccccgaggccaccgaggaggagaagcagctgagcctgaccatgatggcccagtggacccacttcgccagaaccggcgaccccaacagcaaggccctgcccccctggccccagttcaaccaggccgagcagtacctggagatcaaccccgtgcccagagccggccagaagttcagagaggcctggatgcagttctggagcgagaccctgcccagcaagatccagcagtggcaccagaagcagaagaacagaaaggcccaggaggacctgtag

SEQ ID NO: 72401 - protein, 568 aa, Artificial Sequence
  derived and/or modified sequence
MERAVRVESGVLVGVVCLLLACPATATGPEVAQPEVDTTLGRVRGRQVGVKGTDRLVNVFLGIPFAQPPLGPDRFSAPHPAQPWEGVRDASTAPPMCLQDVESMNSSRFVLNGKQQIFSVSEDCLVLNVYSPAEVPAGSGRPVMVWVHGGALITGAATSYDGSALAAYGDVVVVTVQYRLGVLGFFSTGDEHAPGNQGFLDVVAALRWVQENIAPFGGDLNCVTVFGGSAGGSIISGLVLSPVAAGLFHRAITQSGVITTPGIIDSHPWPLAQKIANTLACSSSSPAEMVQCLQQKEGEELVLSKKLKNTIYPLTVDGTVFPKSPKELLKEKPFHSVPFLMGVNNHEFSWLIPRGWGLLDTMEQMSREDMLAISTPVLTSLDVPPEMMPTVIDEYLGSNSDAQAKCQAFQEFMGDVFINVPTVSFSRYLRDSGSPVFFYEFQHRPSSFAKIKPAWVKADHGAEGAFVFGGPFLMDESSRLEATEEEKQLSLTMMAQWTHFARTGDPNSKALPPWPQFNQAEQYLEINPVPRAGQKFREAWMQFWSETLPSKIQQWHQKQKNRKAQEDL

SEQ ID NO: 72402 - DNA, 1707 bp, Artificial Sequence
  derived and/or modified sequence
atggagagagctgtgagagtcgagtctggggtactcgtcggggtggtatgccttctgctcgcttgccctgctactgccaccggcccagaggttgctcaacccgaagttgatactacgctcggccgtgtgcgagggcggcaagtgggcgtgaagggtaccgatcgcctggtgaatgtgttccttggcattccctttgcccagccccccctcggcccggacaggttttcagcaccgcacccggcccagccatgggaaggagtcagggatgcgtcaacagctcctccgatgtgccttcaggatgtggaatccatgaattcctccaggttcgtcctgaacggcaaacagcagatttttagcgtcagcgaagactgtttggttctgaatgtctattcccccgccgaagtgcccgctggttcagggcggccagtgatggtgtgggtgcacgggggtgcccttataacgggagccgccacttcctacgatggtagcgccttagcagcctatggggacgttgtcgtggtgaccgtccagtatagattgggcgtgctgggattcttttctacaggcgatgagcacgcaccaggcaatcaaggattcttagatgtcgtagctgcattgcgttgggttcaggaaaatattgccccatttggcggggacttgaactgcgtcaccgtgttcggcggcagcgcaggcggttccattattagcggactcgtgttaagcccggtcgcagcaggcctgttccatagagctatcacccagagcggggttatcactaccccagggattattgatagtcacccctggccactcgcccagaagatcgcgaacacactggcttgcagctcctcttcacccgccgaaatggtacagtgccttcagcagaaagaaggggaggagctcgtgctatccaaaaagctcaagaacactatctatcctcttactgtagacggaactgtattcccgaagtcaccaaaggagctgctgaaagaaaaaccctttcacagcgttccttttctgatgggagttaacaatcacgaattcagctggttgattcctagagggtggggactcttggacaccatggaacaaatgtctagagaagacatgctggccattagcacacccgtactgacatcactcgacgtaccgcctgaaatgatgccaactgtgatcgacgagtatctcggctccaactcagacgcccaggcaaaatgtcaggcgtttcaggagtttatgggggatgtgtttatcaatgtgcctactgtaagctttagcaggtacctgagggattcaggatccccagtcttcttttacgagttccagcaccgtccatctagctttgctaagataaagcccgcatgggtcaaagccgaccacggagccgaaggcgctttcgtgttcggagggccgttcctgatggacgaatcatcaagactcgaagcaaccgaggaggagaagcaactgagtctcacaatgatggcccagtggacccactttgcccgcacaggcgaccctaactcaaaggcactacctccttggccccagtttaaccaagcagagcaatatctagagatcaatcctgtgcccagggctgggcagaagtttcgagaggcgtggatgcagttctggtccgagaccctgccatctaagattcagcagtggcatcaaaaacagaaaaaccgtaaggcgcaggaagatctctag

SEQ ID NO: 72403 - DNA, 1707 bp, Artificial Sequence
  derived and/or modified sequence
atggagagagctgtgcgggtggagagcggcgtgctggtgggcgtggtgtgcctgctgctggcctgcccagccacagccactggacctgaggtggcccagcctgaggtggacaccaccctgggccgggtgcggggccggcaggtgggcgtgaagggcacagaccggctggtgaatgtgttcctgggcatcccctttgcccagccccccctgggccctgaccgcttcagcgccccccacccagcccagccctgggagggcgtgagagatgccagcacagccccacccatgtgcctgcaggatgtggagagcatgaacagcagcagatttgtgctgaatggcaagcagcagatcttctctgtgtctgaggactgcctggtgctgaatgtgtacagccctgctgaggtgcctgctggcagcggccggcctgtgatggtgtgggtgcacggcggggccctgatcaccggggccgccaccagctatgatggcagcgccctggccgcctatggagatgtggtggtggtgacagtgcagtaccgcctgggcgtgctgggcttcttcagcactggagatgagcacgcccctggcaaccagggcttcctggatgtggtggccgccctgcgctgggtgcaggagaacatcgccccctttggaggagacctgaactgtgtgacagtgtttggaggcagcgctgggggcagcatcatcagcggcctggtgctgagccctgtggccgccggcctcttccaccgggccatcacccagagcggggtcatcaccaccccaggcatcatcgacagccacccctggcccctggcccagaagatcgccaacaccctggcctgcagcagcagcagccctgctgagatggtgcagtgcctgcagcagaaggagggggaggagctggtgctgagcaagaagctgaagaacaccatctaccccctgactgtggatggcaccgtcttccccaagagccccaaggagctgctgaaggagaagcccttccacagcgtgcccttcctgatgggcgtgaacaaccacgagttctcctggctgatcccccggggctggggcctgctggacaccatggagcagatgagccgggaggacatgctggccatcagcacccctgtgctgaccagcctggatgtgcccccagagatgatgcccaccgtgattgatgagtacctgggcagcaacagtgatgcccaggccaagtgccaggccttccaggagttcatgggagatgtgttcatcaacgtgcccaccgtgtccttcagccgctacctgcgggacagcggcagccctgtgttcttctatgagttccagcaccggcccagcagctttgccaagatcaagccagcctgggtgaaggctgaccacggggctgagggcgcctttgtgtttggaggccccttcctgatggatgagagcagccggctggaggccacagaggaggagaagcagctgagcctgaccatgatggcccagtggacccactttgccaggactggagaccccaacagcaaggccctgcccccctggccccagttcaaccaggccgagcagtacctggagatcaaccctgtgccccgggccggccagaagttccgggaggcctggatgcagttctggagcgagaccctgcccagcaagatccagcagtggcaccagaagcagaagaacaggaaggcccaggaggacctgtag

SEQ ID NO: 72404 - DNA, 1707 bp, Artificial Sequence
  derived and/or modified sequence
atggagcgggccgtgcgggtggagagcggcgtgctggtgggcgtggtttgtttattactggcatgccccgcgaccgcaaccggtcccgaagtggcacagcccgaagttgacactacgctgggcagagttcgtggtagacaggtcggggttaaggggacagaccgcctggtgaatgtttttctcgggatccctttcgctcagcccccactgggacctgatagattctctgctccacaccccgcgcaaccctgggaaggggtaagagatgccagcacagcccctcccatgtgtctacaggatgtagagtcaatgaattccagtcggtttgtactcaacgggaaacaacagatcttctctgtgagcgaggactgtcttgtgctgaatgtgtatagcccagctgaggtgcctgccggtagcggccgtcccgtaatggtctgggtgcacggaggtgcacttatcacaggagccgcaacttcatacgatggcagcgcccttgccgcttatggggatgttgtagtggtgacagtgcagtaccgactcggggtgttgggatttttttctaccggagatgagcatgcgccaggcaaccaaggctttctcgatgtcgtggccgccttgagatgggtgcaggaaaatattgcgcctttcggcggggacttgaactgcgtgacagtatttgggggcagcgctgggggcagcatcatttctggcctggtgttgagccctgttgccgctggcctcttccacagagcaatcactcagtcaggcgtgattacgactcccggtatcatcgattcacacccctggcctctggctcagaagattgcgaacacattggcttgttcctccagtagtccagccgaaatggttcaatgcctccagcagaaggaaggtgaagagctggtcctcagcaaaaagctgaagaataccatatacccactgacagtggacgggacagtatttccgaagagccctaaggagctcctaaaggagaagccctttcatagtgtgcctttcctcatgggcgttaacaatcacgaattctcctggctgatccccaggggttggggactgttagatactatggaacaaatgtctagggaggatatgctggctatctctacccctgttctgacctccctcgatgtgccacccgaaatgatgcctacagtgatcgacgaataccttggctcgaacagcgacgcgcaggccaaatgccaagcttttcaggagtttatgggggatgttttcattaatgtgcctacagtctcattttctaggtacctcagggactccggttctccagttttcttttacgagtttcagcaccggccatcttccttcgcaaagataaagccagcttgggtcaaggcagatcacggggcagagggtgcctttgtgttcggcggtccctttcttatggatgagtcctcccgcctggaagccaccgaggaggaaaaacagctgtccttaacaatgatggcccaatggacccattttgctcgcactggagatccaaacagcaaggccctgccaccatggccacagttcaaccaggctgagcagtatcttgaaattaatcctgtccccagggccggccagaagttcagagaagcctggatgcaattttggtccgaaacccttccgagtaagatccagcagtggcaccaaaagcagaaaaacagaaaagcacaagaggacctctag

SEQ ID NO: 72405 - DNA, 1707 bp, Artificial Sequence
  derived and/or modified sequence
atggaacgcgcagttagagtggagtcgggggtgctggtcggagtcgtctgtctcctgctcgcctgtcccgctactgccacgggcccagaagtcgcccagccggaagtagacactacccttgggcgagtgcgcggtcgccaagtgggagttaagggaaccgatcgactggtcaacgtatttttggggatcccctttgctcagccccctctgggcccagatcgcttcagcgccccacaccccgcacaaccgtgggagggcgtccgcgacgcgtcaactgctccgccaatgtgtcttcaggacgtagagtcaatgaatagctccagattcgtccttaacggcaagcagcagatcttctcggtcagcgaggattgccttgtgttaaatgtgtacagtcccgctgaagtcccggctgggagcggcagacccgtgatggtctgggtccacgggggagctttgatcaccggcgctgctacatcctatgacggctctgccctggcggcatacggcgatgtggtggtagtcactgttcagtatcggctgggtgtgctgggatttttctccacgggggacgagcacgcccctggcaatcagggatttctcgacgttgtcgccgcattgaggtgggtccaggagaatattgctccgttcggaggcgatttgaattgtgtcacagtgtttggaggctctgccggaggttcaattatttcaggcctcgttcttagccccgtagctgccggtctcttccaccgagccatcacgcagtcaggggtgattaccacccccggtatcatagactctcacccatggcctctcgcacagaagatcgctaacactttagcatgcagttcttcttcccccgcagagatggtccagtgtcttcaacagaaggaaggcgaagaactcgtgttgtccaagaagctgaagaacacaatataccccctcactgtcgacggaaccgtgttccccaaaagcccaaaagaattacttaaagaaaagccctttcattccgtgccctttctgatgggcgttaacaatcacgaattttcttggcttatccctagaggctgggggctgctagatacaatggagcagatgagccgagaggacatgctggccatcagcacgcccgtcctcaccagtctggatgtgcctccggagatgatgccaaccgtgatcgacgagtacctgggctcgaattctgatgcgcaggccaagtgtcaggcatttcaggagtttatgggagacgttttcattaacgttccaactgtctccttctcacgctatctacgcgatagcgggagtcccgtgttcttttacgaatttcagcacaggccttctagttttgctaagattaaacccgcttgggtgaaggccgatcacggagctgagggggcttttgtctttgggggtccatttctaatggacgaaagctccaggctcgaggccacagaagaagagaagcaactcagcctgactatgatggcccagtggacccattttgccagaaccggggacccaaattccaaagccttgcccccatggccacagtttaaccaggctgaacaatacttagaaatcaaccccgtgccaagagcagggcagaaattccgagaggcatggatgcaattctggagcgagaccctgccttccaagatccagcagtggcaccagaagcagaagaacagaaaggcacaggaggacctttag

SEQ ID NO: 72406 - DNA, 3817 bp, Artificial Sequence
  derived and/or modified sequence
gtgctgaagggcagggatcttattccaccttctgaagcttctgtcgaaccagttgtaaggagaatggagagagcagtgagagtggagtccggggtcctggtcggggtggtctgtctgctcctggcatgccctgccacagccactgggcccgaagttgctcagcctgaagtagacaccaccctgggtcgtgtgcgaggccggcaggtgggcgtgaagggcacagaccgccttgtgaatgtctttctgggcattccatttgcccagccgccactgggccctgaccggttctcagccccacacccagcacagccctgggagggtgtgcgggatgccagcactgcgcccccaatgtgcctacaagacgtggagagcatgaacagcagcagatttgtcctcaacggaaaacagcagatcttctccgtttcagaggactgcctggtcctcaacgtctatagcccagctgaggtccccgcagggtccggtaggccggtcatggtatgggtccatggaggcgctctgataactggcgctgccacctcctacgatggatcagctctggctgcctatggggatgtggtcgtggttacagtccagtaccgccttggggtccttggcttcttcagcactggagatgagcatgcacctggcaaccagggcttcctagatgtggtagctgctttgcgctgggtgcaagaaaacatcgcccccttcgggggtgacctcaactgtgtcactgtctttggtggatctgccggtgggagcatcatctctggcctggtcctgtccccagtggctgcagggctgttccacagagccatcacacagagtggggtcatcaccaccccagggatcatcgactctcacccttggcccctagctcagaaaatcgcaaacaccttggcctgcagctccagctccccggctgagatggtgcagtgccttcagcagaaagaaggagaagagctggtccttagcaagaagctgaaaaatactatctatcctctcaccgttgatggcactgtcttccccaaaagccccaaggaactcctgaaggagaagcccttccactctgtgcccttcctcatgggtgtcaacaaccatgagttcagctggctcatccccaggggctggggtctcctggatacaatggagcagatgagccgggaggacatgctggccatctcaacacccgtcttgaccagtctggatgtgccccctgagatgatgcccaccgtcatagatgaatacctaggaagcaactcggacgcacaagccaaatgccaggcgttccaggaattcatgggtgacgtattcatcaatgttcccaccgtcagtttttcaagataccttcgagattctggaagccctgtctttttctatgagttccagcatcgacccagttcttttgcgaagatcaaacctgcctgggtgaaggctgatcatggggccgagggtgcttttgtgttcggaggtcccttcctcatggacgagagctcccgcctggaggccacagaggaggagaagcagctaagcctcaccatgatggcccagtggacccactttgcccggacaggggaccccaatagcaaggctctgcctccttggccccaattcaaccaggcggaacaatatctggagatcaacccagtgccacgggccggacagaagttcagggaggcctggatgcagttctggtcagagacgctccccagcaagatacaacagtggcaccagaagcagaagaacaggaaggcccaggaggacctctgaggccaggcctgaaccttcttggctggggcaaaccactcttcaagtggtggcagagtcccagcacggcagcccgcctctccccctgctgagactttaatctccaccagcccttaaagtgtcggccgctctgtgactggagttatgctcttttgaaatgtcacaaggccgcctcccacctctggggcattgtacaagttcttccctctccctgaagtgcctttcctgctttcttcgtggtaggttctagcacattcctctagcttcctggaggactcactcccccaggaagccttccctgccttctctgggctgtgcggccccgagtctgcgtccattagagcacagtccacccgaggctagcaccgtgtctgtgtctgtctccccctcagaggagctctctcaaaatggggattagcctaaccccactctgtcacccacaccaggatcgggtgggacctggagctagggggtgtttgctgagtgagtgagtgaaacacagaatatgggaatggcagctgctgaacttgaacccagagccttcaggtgccaaagccatactcaggcccccaccgacattgtccaccctggccagaagggtgcatgccaatggcagagacctgggatgggagaagtcctggggcgccaggggatccagcctagagcagaccttagcccctgactaaggcctcagactagggcgggaggggtctcctcctctctgctgcccagtcctggcccctgcacaagacaacagaatccatcagggccatgagtgtcacccagacctgaccctcaccaattccagccctgaccctcaggacgctggatgccagctcccagccccagtgccgggtcctccctcccttcctggcttggggagaccagtttctggggagcttccaagagcacccaccaagacacagcaggacaggccaggggagggcatctggaccagggcatccgtcgggctattgtcacagagaaaagaagagacccacccactcgggctgcaaaaggtgaaaagcaccaagaggttttcagatggaagtgagaggtgacagtgtgctggcagccctcacagccctcgcttgctctccctgccgcctctgcctgggctcccactttggcagcacttgaggagcccttcaacccgccgctgcactgtaggagcccctttctgggctggccaaggccggagccagctccctcagcttgcggggaggtgcggagggagaggggcgggcaggaaccggggctgcgcgcagcgcttgcgggccagagtgagttccgggtgggcgtgggctcggcggggccccactcagagcagctggccggccccaggcagtgagggccttagcacctgggccagcagctgctgtgctcgatttctcgctgggccttagctgcctccccgcggggcagggctcgggacctgcagccctccatgcctgaccctccccccaccccccgtgggctcctgtgcggccggagcctccccaaggagcgccgccccctgctccacagcgcccagtcccatcgaccacccaagggctgaggagtgcgggtgcacagcgcgggactggcaggcagctccacctgctgccccagtgctggatccactgggtgaagccagctgggctcctgagtctggtggggacttggagaacctttatgtctagctaagggattgtaaatacaccgatgggcactctgtatctagctcaaggtttgtaaacacaccaatcagcaccctgtgtctagctcagtgtttgtgaatgcaccaatccacactctgtatctggctactctggtggggacttggagaacctttgtgtccacactctgtatctagctaatctagtggggatgtggagaacctttgtgtctagctcagggatcgtaaacgcaccaatcagcaccctgtcaaaacagaccacttgactctctgtaaaatggaccaatcagcaggatgtgggtggggcgagacaagagaataaaagcaggctgcctgagccagcagtgacaacccccctcgggtcccctccca

SEQ ID NO: 72407 - DNA, 1707 bp, Artificial Sequence
  derived and/or modified sequence
atggagagagccgtgagagtggagagcggcgtgctggtgggcgtggtgtgcctgctgctggcctgccccgccaccgccaccggccccgaggtggcccagcccgaggtggacaccaccctgggcagagtgagaggcagacaggtgggcgtgaagggcaccgacagactggtgaacgtgttcctgggcatccccttcgcccagccccccctgggccccgacagattcagcgccccccaccccgcccagccctgggagggcgtgagagacgccagcaccgccccccccatgtgcctgcaggacgtggagagcatgaacagcagcagattcgtgctgaacggcaagcagcagatcttcagcgtgagcgaggactgcctggtgctgaacgtgtacagccccgccgaggtgcccgccggcagcggcagacccgtgatggtgtgggtgcacggcggcgccctgatcaccggcgccgccaccagctacgacggcagcgccctggccgcctacggcgacgtggtggtggtgaccgtgcagtacagactgggcgtgctgggcttcttcagcaccggcgacgagcacgcccccggcaaccagggcttcctggacgtggtggccgccctgagatgggtgcaggagaacatcgcccccttcggcggcgacctgaactgcgtgaccgtgttcggcggcagcgccggcggcagcatcatcagcggcctggtgctgagccccgtggccgccggcctgttccacagagccatcacccagagcggcgtgatcaccacccccggcatcatcgacagccacccctggcccctggcccagaagatcgccaacaccctggcctgcagcagcagcagccccgccgagatggtgcagtgcctgcagcagaaggagggcgaggagctggtgctgagcaagaagctgaagaacaccatctaccccctgaccgtggacggcaccgtgttccccaagagccccaaggagctgctgaaggagaagcccttccacagcgtgcccttcctgatgggcgtgaacaaccacgagttcagctggctgatccccagaggctggggcctgctggacaccatggagcagatgagcagagaggacatgctggccatcagcacccccgtgctgaccagcctggacgtgccccccgagatgatgcccaccgtgatcgacgagtacctgggcagcaacagcgacgcccaggccaagtgccaggccttccaggagttcatgggcgacgtgttcatcaacgtgcccaccgtgagcttcagcagatacctgagagacagcggcagccccgtgttcttctacgagttccagcacagacccagcagcttcgccaagatcaagcccgcctgggtgaaggccgaccacggcgccgagggcgccttcgtgttcggcggccccttcctgatggacgagagcagcagactggaggccaccgaggaggagaagcagctgagcctgaccatgatggcccagtggacccacttcgccagaaccggcgaccccaacagcaaggccctgcccccctggccccagttcaaccaggccgagcagtacctggagatcaaccccgtgcccagagccggccagaagttcagagaggcctggatgcagttctggagcgagaccctgcccagcaagatccagcagtggcaccagaagcagaagaacagaaaggcccaggaggacctgtag

SEQ ID NO: 72408 - protein, 260 aa, Artificial Sequence
  derived and/or modified sequence
MAILFAVVARGTTILAKHAWCGGNFLEVTEQILAKIPSENNKLTYSHGNYLFHYICQDRIVYLCITDDDFERSRAFNFLNEIKKRFQTTYGSRAQTALPYAMNSEFSSVLAAQLKHHSENKGLDKVMETQAQVDELKGIMVRNIVCHLQNYQQKSCSSHVYEEPQAHYYHHHRINCVHLYHCFTSLWWIYMAKLCEEIGKKKLPLTKDMREQGVKSNPCDSSLSHTDRWYLPVSSTLFSLFKILFHASRFIFVLSTSLFL

SEQ ID NO: 72409 - DNA, 783 bp, Artificial Sequence
  derived and/or modified sequence
atggccatcctgttcgccgtggtggccagaggcaccaccatcctggccaagcacgcctggtgcggcggcaacttcctggaggtgaccgagcagatcctggccaagatccccagcgagaacaacaagctgacctacagccacggcaactacctgttccactacatctgccaggacagaatcgtgtacctgtgcatcaccgacgacgacttcgagagaagcagagccttcaacttcctgaacgagatcaagaagagattccagaccacctacggcagcagagcccagaccgccctgccctacgccatgaacagcgagttcagcagcgtgctggccgcccagctgaagcaccacagcgagaacaagggcctggacaaggtgatggagacccaggcccaggtggacgagctgaagggcatcatggtgagaaacatcgtgtgccacctgcagaactaccagcagaagagctgcagcagccacgtgtacgaggagccccaggcccactactaccaccaccacagaatcaactgcgtgcacctgtaccactgcttcaccagcctgtggtggatctacatggccaagctgtgcgaggagatcggcaagaagaagctgcccctgaccaaggacatgagagagcagggcgtgaagagcaacccctgcgacagcagcctgagccacaccgacagatggtacctgcccgtgagcagcaccctgttcagcctgttcaagatcctgttccacgccagcagattcatcttcgtgctgagcaccagcctgttcctgtag

SEQ ID NO: 72410 - DNA, 783 bp, Artificial Sequence
  derived and/or modified sequence
atggccattttatttgccgtcgtcgcccgggggacgactatcttagctaagcacgcgtggtgcggcgggaatttccttgaggtgaccgagcagattctcgccaagataccctccgagaacaataagttaacttattcgcacggcaactatctcttccattacatatgtcaggacaggattgtgtatctatgcataaccgatgatgactttgagaggtcccgcgcgttcaactttttaaatgaaataaaaaaacgctttcagactacttacgggagccgggcacagactgctttaccatacgctatgaacagcgagttttcatctgttttagcagcacaactgaagcatcatagcgagaacaaaggcctggataaggtgatggagacacaggcgcaggtagatgagctgaagggaattatggtgagaaacattgtgtgtcacctccagaactatcagcaaaagtcctgcagtagtcatgtgtatgaagaaccccaggcacattattatcaccatcatcgcatcaactgtgtccatctttatcattgcttcacatctctgtggtggatttatatggccaagctgtgtgaggaaattggtaagaaaaagctgcccttgacgaaagatatgcgagaacagggtgtcaagagcaacccgtgtgactcaagcctatcgcacaccgacagatggtatcttcccgtgagctccaccctgttctctttatttaagatcctttttcacgcatcaaggtttattttcgtgctcagcaccagcctctttctatag

SEQ ID NO: 72411 - DNA, 783 bp, Artificial Sequence
  derived and/or modified sequence
atggccatcctgtttgctgtggtggcccggggcaccaccatcctggccaagcacgcctggtgtggcggcaacttcctggaggtgacagagcagatcctggccaagatccccagcgagaacaacaagctgacctacagccacggcaactacctgttccactacatctgccaggaccgcatcgtgtacctgtgcatcacagatgatgactttgagaggagccgggccttcaacttcctgaatgagatcaagaagcgcttccagaccacctacggcagccgggcccagacagccctgccctatgccatgaacagcgagttcagctctgtgctggccgcccagctgaagcaccacagtgaaaataaaggcctggacaaggtgatggagacccaggcccaggtggatgagctgaagggcatcatggtgaggaacatcgtgtgccacctgcagaactaccagcagaagagctgcagcagccacgtgtatgaggagccccaggcccactactaccaccaccaccgcatcaactgtgtgcacctgtaccactgcttcaccagcctgtggtggatctacatggccaagctgtgtgaggagatcggcaagaagaagctgcccctgaccaaggacatgagggagcagggcgtgaagagcaacccctgtgacagcagcctgagccacacagaccgctggtacctgcctgtgagcagcaccctcttcagcctcttcaagatcctcttccacgccagccgcttcatctttgtgctgagcaccagcctcttcctgtag

SEQ ID NO: 72412 - DNA, 783 bp, Artificial Sequence
  derived and/or modified sequence
atggccatcctgttcgccgtggtggcccggggcaccaccatcctggcaaaacacgcatggtgtgggggaaatttcctagaagtgaccgagcaaatactggctaaaattccatccgagaataacaagctcacttattcgcatggcaactatttgttccattacatctgtcaggataggatagtgtatttgtgtattactgatgatgatttcgaacggagtcgggcattcaatttcttgaatgaaatcaaaaaacgctttcaaacgacatatgggtcccgtgctcagacagcgctgccatatgcaatgaattccgagttctcgtctgtgctggcggcacagttgaagcatcatagcgaaaacaagggactagataaggtcatggagacacaggcccaggttgatgagttaaaggggatcatggtacgcaatattgtatgccacttacagaactatcaacagaaatcatgcagctcacacgtctacgaggaacctcaagctcattattaccaccaccacagaataaactgtgtgcatctctaccactgcttcacgagcctatggtggatttatatggccaagctgtgcgaggaaatcgggaagaagaagctgccacttacgaaagatatgagagagcagggcgtgaagagtaacccctgtgattcctcactgtcccatacagaccgatggtatctccctgtaagcagcacactcttctccctctttaaaatcctttttcatgccagcagattcatcttcgtattaagcacgagtctctttctgtag

SEQ ID NO: 72413 - DNA, 783 bp, Artificial Sequence
  derived and/or modified sequence
atggccatcctgtttgccgtcgtggctagaggtactacgattctggcaaagcatgcctggtgcggtggcaatttcttagaagtgacagaacagatcctagccaagattccctccgaaaataataagttaacttatagtcatggaaattacctgtttcattacatctgtcaggataggatcgtgtacctgtgtatcactgacgacgacttcgagagaagcagggcattcaattttttgaacgagatcaaaaagaggtttcagacaacttacggatcccgagcgcagaccgcactgccatatgcaatgaacagtgagttttcctcagtgttagctgcccagctgaagcaccacagtgaaaataaaggactggacaaggtcatggagacccaagcacaggtcgatgagctcaaaggaattatggttcgcaatatagtttgccatctccagaactatcaacaaaagtcctgcagcagtcacgtgtacgaagagccacaggcccactattatcaccaccacagaattaactgcgtgcatctttatcattgctttacctctctctggtggatatacatggcgaaactgtgtgaggagatcggcaagaaaaagctccccctgaccaaggacatgagggagcagggggtaaagtctaacccttgtgattcgtcgctgtctcacacagaccggtggtacttacccgtttcctctaccttgtttagcctgtttaagatactctttcatgccagtaggtttatcttcgtgctgagtacatcactgttcctatag

SEQ ID NO: 72414 - DNA, 2496 bp, Artificial Sequence
  derived and/or modified sequence
ggcagttggcgaccctgcactgacccgcgtccctccgtcccgagcccgcgcgccctcagagggtgcccggacagactgaagccatggcgattctttttgctgttgttgccagggggaccactatccttgccaaacatgcttggtgtggaggaaacttcctggaggtgacagagcagattctggctaagataccttctgaaaataacaaactaacgtactcacatggcaattatttgtttcattacatctgccaagacaggattgtatatctttgtatcactgatgatgattttgaacgttcccgagcctttaattttctgaatgagataaagaagaggttccagactacttacggttcaagagcacagacagcacttccatatgccatgaatagcgagttctcaagtgtcttagctgcacagctgaagcatcactctgagaataagggcctagacaaagtgatggagactcaagcccaagtggatgaactgaaaggaatcatggtcagaaacatagtctgtcaccttcaaaactaccagcagaaatcttgctcgagccatgtgtatgaagaacctcaagctcactattatcatcatcatcgtatcaattgtgttcatctatatcattgtttcacctctctgtggtggatttacatggccaagctgtgtgaagaaataggaaagaagaagttaccattaaccaaggatatgagagaacaaggagttaaaagcaatccatgtgactcaagcctttcacatactgacagatggtatctgccagtctcttcaaccctcttctcactttttaaaatcttgttccatgcctccaggtttatctttgtcttatctaccagtttattcctgtgaacttcagattgaaccattcattgcagcagtagccttaaaaaggcttttgtttatttctttggtttgttaactagtgtcatctatttagagaaacatttttgtttttaattgctcaaagctgtcgccgctagtcttatgagctatctactaaaactatggagaaactttgtatgtgcacacaaaagtattcaagagacagtattgctaacatctcatcttaatgtcttttgttattgagaagttttaggtgcttcaaaacaatataaatggataatagttgttatttggggaattgtaatgatgttggtgctgcttccttctaagagctcagacaagtaaagtatgaaacattcttatttcagttagatggggaacattttgctagcccattagaagcacacagaattatccttgtcctcctaatattgactttcaggaataaagttcagtgtgctgatcattcacaatacagtggatagcttgatatcttctgttttcccattgcagttgatttgagaagatgaaggtttaaatattgttgaaagttgcagttttttaaatgtgttcctttttcttctgtgaatatttagggcaatcgtgtcgctaatagaatatgtagtagagggggtggggaggtaaattcctctgacttgccaaagaaaaagaagggaaccacagtggatatgctagcattttagctgtgcaaagggaggtagtgtgggaaaagtgtttccattctgggaaaagcccaaaccgaatacggtcagcagtcaactccagggtttgggcttgattcctgttgaataatagttttgagcattctttgtggttaaataaattcttaaatctgcctagttttgatgaattcttttgtgaaacttgaaagagaatagacagtatgacatatagaattaatacaaaacagtttaacaaccatttaactgcagtgtaagaaaattggactgtaatcatatcgctactggcatctgttatctagtatgcatttctggtgtgtatctgaaaggaagacattttctaccctagatccaattgcatttatttatcaataagtgccattaaattgaaattatattacattttacactttctcaatgaatgaacaaattagtctgtagaatctagccacctgtttagcctagtcatgtgccttgaacatatatgtgtcccataatctggctcatggtacctgttcttctatccaaacctttcaattcatgctacctgattcatttatttgacatagatcttaggcccacttgaactcttttcttgtttatctagcatagcacaaacgtttttccagtcttctttatcaacactaatgcctcttaattgcatcagtatttcctattggaaaatacatctgttccagaaaaacatttggcattcctgaataatttccaaatgtttttaatccaaagaaaaaggtttaaagcttatttccctttcttatacacacctgaataaaattgatgtgcatgttttagggatcaattacctaactgttccttggtctatttatgtataagaatgctttttaaagcacatgtctcattttaaatgacgcacaaactgaagatgttaataaaatttaagagtaatacaatga

SEQ ID NO: 72415 - DNA, 2646 bp, Artificial Sequence
  derived and/or modified sequence
tcccactcccaagaggccacgcgtagacggggcgcttcatgcggaagtcagcggcgtccggtcccagcctcctctgggagcgggcagttggcgaccctgcactgacccgcgtccctccgtcccgagcccgcgcgccctcagagggtgcccggacagactgaagccatggcgattctttttgctgttgttgccagggggaccactatccttgccaaacatgcttggtgtggaggaaacttcctggaggtgacagagcagattctggctaagataccttctgaaaataacaaactaacgtactcacatggcaattatttgtttcattacatctgccaagacaggattgtatatctttgtatcactgatgatgattttgaacgttcccgagcctttaattttctgaatgagataaagaagaggttccagactacttacggttcaagagcacagacagcacttccatatgccatgaatagcgagttctcaagtgtcttagctgcacagctgaagcatcactctgagaataagggcctagacaaagtgatggagactcaagcccaagtggatgaactgaaaggaatcatggtcagaaacatagatctggtagctcagcgaggagaaagattggaattattgattgacaaaacagaaaatcttgtggattcttctgtcaccttcaaaactaccagcagaaatcttgctcgagccatgtgtatgaagaacctcaagctcactattatcatcatcatcgtatcaattgtgttcatctatatcattgtttcacctctctgtggtggatttacatggccaagctgtgtgaagaaataggaaagaagaagttaccattaaccaaggatatgagagaacaaggagttaaaagcaatccatgtgactcaagcctttcacatactgacagatggtatctgccagtctcttcaaccctcttctcactttttaaaatcttgttccatgcctccaggtttatctttgtcttatctaccagtttattcctgtgaacttcagattgaaccattcattgcagcagtagccttaaaaaggcttttgtttatttctttggtttgttaactagtgtcatctatttagagaaacatttttgtttttaattgctcaaagctgtcgccgctagtcttatgagctatctactaaaactatggagaaactttgtatgtgcacacaaaagtattcaagagacagtattgctaacatctcatcttaatgtcttttgttattgagaagttttaggtgcttcaaaacaatataaatggataatagttgttatttggggaattgtaatgatgttggtgctgcttccttctaagagctcagacaagtaaagtatgaaacattcttatttcagttagatggggaacattttgctagcccattagaagcacacagaattatccttgtcctcctaatattgactttcaggaataaagttcagtgtgctgatcattcacaatacagtggatagcttgatatcttctgttttcccattgcagttgatttgagaagatgaaggtttaaatattgttgaaagttgcagttttttaaatgtgttcctttttcttctgtgaatatttagggcaatcgtgtcgctaatagaatatgtagtagagggggtggggaggtaaattcctctgacttgccaaagaaaaagaagggaaccacagtggatatgctagcattttagctgtgcaaagggaggtagtgtgggaaaagtgtttccattctgggaaaagcccaaaccgaatacggtcagcagtcaactccagggtttgggcttgattcctgttgaataatagttttgagcattctttgtggttaaataaattcttaaatctgcctagttttgatgaattcttttgtgaaacttgaaagagaatagacagtatgacatatagaattaatacaaaacagtttaacaaccatttaactgcagtgtaagaaaattggactgtaatcatatcgctactggcatctgttatctagtatgcatttctggtgtgtatctgaaaggaagacattttctaccctagatccaattgcatttatttatcaataagtgccattaaattgaaattatattacattttacactttctcaatgaatgaacaaattagtctgtagaatctagccacctgtttagcctagtcatgtgccttgaacatatatgtgtcccataatctggctcatggtacctgttcttctatccaaacctttcaattcatgctacctgattcatttatttgacatagatcttaggcccacttgaactcttttcttgtttatctagcatagcacaaacgtttttccagtcttctttatcaacactaatgcctcttaattgcatcagtatttcctattggaaaatacatctgttccagaaaaacatttggcattcctgaataatttccaaatgtttttaatccaaagaaaaaggtttaaagcttatttccctttcttatacacacctgaataaaattgatgtgcatgttttagggatcaattacctaactgttccttggtctatttatgtataagaatgctttttaaagcacatgtctcattttaaatgacgcacaaactgaagatgttaataaaatttaagagtaatacaatga

SEQ ID NO: 72416 - protein, 539 aa, Artificial Sequence
  derived and/or modified sequence
MWRLPRALCVHAAKTSKLSGPWSRPAAFMSTLLINQPQYAWLKELGLREENEGVYNGSWGGRGEVITTYCPANNEPIARVRQASVADYEETVKKAREAWKIWADIPAPKRGEIVRQIGDALREKIQVLGSLVSLEMGKILVEGVGEVQEYVDICDYAVGLSRMIGGPILPSERSGHALIEQWNPVGLVGIITAFNFPVAVYGWNNAIAMICGNVCLWKGAPTTSLISVAVTKIIAKVLEDNKLPGAICSLTCGGADIGTAMAKDERVNLLSFTGSTQVGKQVGLMVQERFGRSLLELGGNNAIIAFEDADLSLVVPSALFAAVGTAGQRCTTARRLFIHESIHDEVVNRLKKAYAQIRVGNPWDPNVLYGPLHTKQAVSMFLGAVEEAKKEGGTVVYGGKVMDRPGNYVEPTIVTGLGHDASIAHTETFAPILYVFKFKNEEEVFAWNNEVKQGLSSSIFTKDLGRIFRWLGPKGSDCGIVNVNIPTSGAEIGGAFGGEKHTGGGRESGSDAWKQYMRRSTCTINYSKDLPLAQGIKFQ

SEQ ID NO: 72417 - DNA, 1620 bp, Artificial Sequence
  derived and/or modified sequence
atgtggcgattgcctcgtgccttgtgcgtccacgctgcaaaaaccagcaagctgtctggcccctggtccaggccagccgcgttcatgagcactctgctgattaatcagccgcagtatgcctggctgaaagagctggggctgagggaagaaaatgaaggcgtgtataatggaagctggggcggccgaggcgaagtaatcaccacctactgcccagcaaacaacgagcccatcgcccgggttaggcaggcctctgttgcagactacgaggaaactgtcaagaaggctcgcgaagcctggaagatctgggccgatattccagcgccgaagaggggcgagattgttcgccagatcggcgatgctctgagggagaagattcaagtgctcggatcactggtcagcctggagatggggaagatcctggtagagggagtcggcgaggtgcaggaatacgtggacatctgcgattacgccgttggactgtctcgtatgattggcgggcccatcctccccagcgagcgcagcggccatgcccttatcgagcagtggaaccctgtgggcctcgtcggcatcataaccgctttcaactttccagttgcggtctatgggtggaacaacgctatcgcaatgatttgcggtaatgtgtgtctatggaagggcgcccccaccacctcactgattagcgtggccgtaacgaaaatcatcgcgaaagtactcgaggataataagcttcccggagcaatttgtagtctaacctgtggtggggctgacataggcaccgctatggccaaggacgagcgtgtgaatctcttgtctttcacaggatctactcaggtggggaagcaggttgggttgatggtacaggagagattcggtaggtccctcctggaactcggtggaaataatgccatcatagcctttgaggacgctgatcttagcctggtcgtgccatcagcactgttcgccgccgtgggtactgctggacagcggtgtaccaccgcccgccgcctctttatacacgagtcgatccacgatgaagttgtgaacaggttgaaaaaagcttacgctcagattagagtggggaacccgtgggaccctaatgtgctgtacggacccctgcacactaagcaggctgtcagtatgtttttgggtgcagtcgaggaggctaaaaaggagggagggacagtggtgtacggaggtaaggtcatggatcgacccggcaattacgtggagccgactattgtgactgggcttggtcacgatgcgtcaatcgctcatactgagacttttgccccgattctctatgttttcaagttcaagaatgaagaggaggtctttgcgtggaataacgaagtgaaacaagggctttctagttccattttcacaaaagacttgggtagaatctttaggtggctcggtccaaagggaagcgattgcggaattgtaaacgtcaacattcccacctctggcgcggaaatcggcggagccttcggcggggaaaagcataccggagggggaagagaaagcggaagtgacgcctggaaacagtacatgaggcgctccacatgcactataaattattctaaagatctccctctcgcacagggcataaagtttcagtag

SEQ ID NO: 72418 - DNA, 1620 bp, Artificial Sequence
  derived and/or modified sequence
atgtggaggctgccccgggccctgtgtgtgcacgccgccaagaccagcaagctgagcggcccctggagcaggcctgctgccttcatgagcaccctgctgatcaaccagccccagtatgcctggctgaaggagctgggcctgcgggaggagaatgaaggagtgtacaacggctcctggggcggccgcggggaggtgatcaccacctactgcccagccaacaatgagcccatcgcccgggtgcggcaggcctctgtggccgactatgaggagaccgtgaagaaggcccgggaggcctggaagatctgggccgacatcccagcccccaagagaggagaaattgtgcggcagattggagatgccctgcgggagaagatccaggtgctgggcagcctggtgtccctggagatgggcaagatcctggtggagggcgtgggggaggtgcaggagtatgtggacatctgtgactatgctgtgggcctgagcaggatgattggaggccccatcctgcccagcgagaggagcggccacgccctgattgagcagtggaaccctgtgggcctggtgggcatcatcacagccttcaacttccctgtggccgtgtatggctggaacaatgccatcgccatgatctgtggaaatgtgtgcctgtggaagggggcccccaccaccagcctcatctctgtggccgtgaccaagatcatcgccaaggtgctggaggacaacaagctgcccggggccatctgcagcctgacctgtggcggcgctgacattggaacagccatggccaaggatgagcgggtgaacctgctgtccttcaccggcagcacccaggtgggcaagcaggtgggcctgatggtgcaggagcgcttcggccgcagcctgctggagctgggcggcaacaatgccatcatcgcctttgaagatgctgacctgagcctggtggtgcccagcgccctgtttgctgctgtgggcacagctggccagcgctgcaccacagcccggcggctcttcatccacgagagcatccatgatgaggtggtgaaccggctgaagaaggcctatgcccagatccgggtgggcaacccctgggaccccaacgtgctgtatggccccctgcacaccaagcaggccgtgtccatgttcctgggcgctgtggaggaggccaagaaggagggcggcaccgtggtgtatggaggcaaggtgatggacaggcctggcaactacgtggagcccaccatcgtgacaggcctgggccatgatgccagcatcgcccacacagagacctttgcccccatcctgtatgtgttcaagttcaagaatgaggaggaggtgtttgcctggaacaatgaggtgaagcagggcctgagcagcagcatcttcaccaaggacctgggccgcatcttccgctggctgggccccaagggcagtgactgtggcatcgtgaatgtgaacatccccaccagcggggctgagatcggcggggccttcggcggggagaagcacactggaggcggccgggagagcggcagtgatgcctggaagcagtacatgaggaggagcacctgcaccatcaactacagcaaggacctgcccctggcccagggcatcaagttccagtag

SEQ ID NO: 72419 - DNA, 4964 bp, Artificial Sequence
  derived and/or modified sequence
accagatggcagcagcccactcctccctgtagcactcccattgttccaggcaggattcagccgcaggctcctccggaagaccaggggcagacggggcggtggcggggtcgtgcccagtgggaggggtcgggtctgcccaatgggttctcccgggcggggggcggggctctatttcagcagctctcagggccttgggctcatcccgagtcccgggctcagtatgtggcgccttcctcgcgcgctgtgtgtgcacgctgcaaagaccagcaagctctctggaccttggagcaggcctgccgccttcatgtccactctcctcatcaatcagccccagtatgcgtggctgaaagagctggggctccgcgaggaaaacgagggcgtgtataatggaagctggggaggccggggagaggttattacgacctattgccctgctaacaacgagccaatagcaagagtccgacaggccagtgtggcagactatgaagaaactgtaaagaaagcaagagaagcatggaaaatctgggcagatattcctgctccaaaacgaggagaaatagtaagacagattggcgatgccttgcgggagaagatccaagtactaggaagcttggtgtctttggagatggggaaaatcttagtggaaggtgtgggtgaagttcaggagtatgtggatatctgtgactatgctgttggtttatcaaggatgattggaggacctatcttgccttctgaaagatctggccatgcactgattgagcagtggaatcccgtaggcctggttggaatcatcacggcattcaatttccctgtggcagtgtatggttggaacaacgccatcgccatgatctgtggaaatgtctgcctctggaaaggagctccaaccacttccctcattagtgtggctgtcacaaagataatagccaaggttctggaggacaacaagctgcctggtgcaatttgttccttgacttgtggtggagcagatattggcacagcaatggccaaagatgaacgagtgaacctgctgtccttcactgggagcactcaggtgggaaaacaggtgggcctgatggtgcaggagaggtttgggagaagtctgttggaacttggaggaaacaatgccattattgcctttgaagatgcagacctcagcttagttgttccatcagctctcttcgctgctgtgggaacagctggccagaggtgtaccactgcgaggcgactgtttatacatgaaagcatccatgatgaggttgtaaacagacttaaaaaggcctatgcacagatccgagttgggaacccatgggaccctaatgttctctatgggccactccacaccaagcaggcagtgagcatgtttcttggagcagtggaagaagcaaagaaagaaggtggcacagtggtctatgggggcaaggttatggatcgccctggaaattatgtagaaccgacaattgtgacaggtcttggccacgatgcgtccattgcacacacagagacttttgctccgattctctatgtctttaaattcaagaatgaagaagaggtctttgcatggaataatgaagtaaaacagggactttcaagtagcatctttaccaaagatctgggcagaatctttcgctggcttggacctaaaggatcagactgtggcattgtaaatgtcaacattccaacaagtggggctgagattggaggtgcctttggaggagaaaagcacactggtggtggcagggagtctggcagtgatgcctggaaacagtacatgagaaggtctacttgtactatcaactacagtaaagaccttcctctggcccaaggaatcaagtttcagtaaaggtgttttagatgaacatcccttaatttgaggtgttccagcagctgtttttggagaagacaaagaaaattaaagttttccctgaataaatgcattattatgactgtgacagtgactaatccccctatgaccccaaagccctgattaaatcaagagattccttttttaaaaatcaaaataaaattgttacaacatagccatagttactaaaagatgagttaggtggatttttattatgtcaactagttgtacatggctttttaaaagttaatgattattttgtaattagaaaaaaatagtacgtaccagggtaggaatttgggaaaatacagaaccgaggagaaaacagaagtctttgcagtagatacagggtgtctcctgaccaagtgaaggattcaggggcggggggtgaatattgcttgacattacccacctatggcatgtgttggatgtcgtgtgattgaaagggggatgcattcccctgtatgcttggaccacagttcagtattcatgtggaataacttgcagtgcttaaaatgacaacaggcattcatcacagttatggctcttgcttatgaaggctgtgtcaacttggaagagatttctggggtagacagattttgttcctgtgctggagtctgccacctgctggaggactctgaggccaaaattgcccgtgcagagttgtatagaaaatgcgtctggaggctgggcaaggtggcttacgcctataatcccagcactttgagaggccgaggcgggtggatcagtagaggctaggagtttgagaccagcctggccgatatcgtgaaaccccgtctttaccaaaaaatacaaaaattagcccagtgtggtggcaggcacctgtaatcccagctattagggaggctgaggcaggagaattgtgtgaacccaggaggcagaggttgcagtgagcctagattgtgccactgcctgggcaacagtgagatcctgtctacaaaaaaaaaaaaaaaaaaaagtgcatctggatttttttatacaaccttagaccaccttctttagctttaggcgtctgcggttgcccttggatctgttctcaatcctcagtgtgtgtggcagcatgtggtcatagagagctgggcaaagttcactttctctttgctgacagtctcaccttttctcactgggaagctgcacaggagcctttgggctggttcagcccagaggcccctgttctcctgccttcctggcattctctgctccccttctgcatggcacccctctactcctgccaggttagaatggagcagaggcctttgaacaagatgacatttgtagacaacctgatccatcaggatgtggagagatctggacaaatggcaaataatttggggttgaattatggcccagagaagtaagcaaatgaaaaactaaacaattataaatgtatctgggaagcaaaggtattcataatatgtcccatggccagctgcgagcagtatttaactagacatgctgttgtcaatattgaacatgaatcaagccaaatactgatatagctattgagagaaggttggcaggaagaaatcatgggtgagggtatgtgggagtgataatcttagctatagattttaggtaaaactgattctgaaagctttctttgaaacaaatttataatttttcttctacatgtttctagcacaaggactcaattttttttggttataatgttcattaaaacatatgccttcaatttgttcctctttgttcttttttgctgatttagcagatataaatcacttgttagtatttttaactatccaagttaaaatgtacatttgtaagtgttattactggtcttatatttgaaggtgcaaggggtcttgtgctgctcattactggttatcttgagcatttcataactgctgcctcctcctaaatcctgtgttccaaccgctactgctggcaatgcccagcctccattgtggatgcggggaattgtgttcagcatgcttgcttctgccacggcactaaagcctaacttgcttaggatcttgctgtacttggagagagcatccattcgctgagcctagcagccaggctcttgtgactccctgggaagtgggtgaagacctggctcctggctgcagcagtgaggaggcaggccctccaggtgaagacttctcacaatggagggaaggcagttttctcaaaggaaattgagtgctattatgtactctgcttcctactttctctttcagggtgggaatctgttaagcctcctctctctcttgctctgcaaccacagaacacttctttttttttggtgtctcagttttgcccacactggagtgcagtggtgcaatagtggctcactgcagcctccaactcctgggctcaatctatccttccacctcatgctccccagtagctgggactacaggtgcatgccactgtgcccagctgattattatttttttttgtaaagattgggtcatactacattgctcatgctcgtcttgaacttgtggcctcaagcgatcctcctgcctcagcctcttgagttgttgggattacaggagtgtgccaccatgcccagctctgtggaaaattctctgtggcattctgtctcctgaaaatgctgaagggaccaagagggctctgtgtccttcctcttctcttccctggcactttcagaccattttcttgttgccttcattctaacaaaggttgcagattggaaagctgatttggaatgctttttaagtgttttcagtttcaatatttttatgaaattcctatggtctccaacaaacttttttttttttttttttttctacacctggagcttatcctgcagaagcttcctgccaatgattgttttggaggaaattaaaagaaaaccaaacgaaacctctcctatccaaggggaagaactttatccccatattgattgaatataggattctagatttaaaatgttgtaggcagttagagtttgctctttttttttttctattggaaaggtccacaaatgttttattgacatttttgtctttaatccatttggatttggggtacatgttacgatttgtctacgttaatttcccttttaaaaataaaaataattcctcaactccaa

SEQ ID NO: 72420 - DNA, 1620 bp, Artificial Sequence
  derived and/or modified sequence
atgtggcggctgccccgggccctgtgcgtgcacgccgccaagaccagtaaactgagcggtccatggagtagacctgcagcatttatgtccactttattgatcaatcaaccccagtacgcctggttaaaggaactcgggctgcgcgaggaaaatgagggggtgtacaatggaagctggggtggacgcggggaagtgataaccacctactgcccagccaataatgagcctatagcacgtgtgagacaggcttctgtggccgactacgaggagactgtgaaaaaagctagggaggcttggaagatatgggcagacattccagccccaaagcggggtgagatcgtgaggcagataggcgacgctttgagagaaaaaatccaagtcctggggtctttggtgagccttgaaatgggcaaaattctggtagaaggagtcggtgaagttcaagagtatgtggacatctgcgactatgcagtaggtctcagcagaatgatcggcgggccaatcctgccttctgagcgatccggtcatgctcttatcgagcaatggaatcctgtcggcctggttggcattattacagcattcaacttccccgtggctgtgtatggatggaataatgccatagctatgatttgcggaaatgtttgcctttggaagggggcgcctacaacgagcctaatctcggtggcagttactaaaataatcgctaaagttctagaggacaacaagctgcctggggcaatctgctcacttacgtgtgggggggccgatatcggtaccgccatggctaaggacgagcgcgtgaacctgttaagttttacaggttccacccaggtggggaagcaggtcggactgatggtgcaggaaaggttcggaaggtccctgctggaactgggaggcaataacgccatcatcgcatttgaagatgcagatctctctctggtcgtcccgagcgctctgttcgctgccgtcggcaccgcgggacagaggtgtacaactgcccgtagactgtttatacatgaaagcatccatgacgaagtggtcaaccgactcaagaaagcgtatgcccagatccgggtgggtaacccctgggacccaaacgtgttatatggcccactccatactaagcaggctgtatccatgttccttggagctgttgaagaggccaagaaagaaggcggtactgtagtctacgggggaaaagttatggatcggccgggcaattacgttgagccaaccattgtcacggggctcggacatgacgccagcatcgcacacactgaaaccttcgcaccaatcttatatgttttcaaatttaaaaacgaggaagaagtcttcgcctggaataacgaggtcaagcaaggcctgagctcctcgatcttcacaaaagacctcggacggatctttaggtggctcggacctaaggggtctgattgtgggatagtgaatgtgaatataccaaccagcggcgcggaaattggaggagccttcggcggcgaaaaacacacaggtggcgggagagagtccggcagtgacgcctggaaacagtacatgcgccgctctacttgtaccatcaattacagcaaggatttaccattagcccaaggcattaagttccaatag

SEQ ID NO: 72421 - DNA, 1620 bp, Artificial Sequence
  derived and/or modified sequence
atgtggcgactgcctagggcactgtgcgtgcacgcagcaaaaacatctaaactaagtggaccatggtcccgcccagcggcattcatgtctacccttctaatcaatcaaccccagtacgcctggttaaaagaattaggcctaagagaagaaaatgagggcgtgtacaatggcagttgggggggacgaggggaggtgatcaccacatactgccctgctaataacgagcccatcgctcgcgtgcgccaggcttccgttgccgactacgaggaaactgtgaaaaaagctagggaggcgtggaaaatctgggcagacattccggctcccaagcgaggtgagatcgttagacagattggcgatgccctgcgcgagaaaatccaggtgctcggctcactcgtctccctggagatgggaaagattttagtggagggtgtgggggaggtgcaagagtatgtggacatttgtgattacgcagtaggtctgtctagaatgatcggcggacctatcttaccttctgagcgctcagggcacgcactgatcgagcaatggaaccctgtgggcctggttgggataattactgcattcaatttccctgtggccgtgtatggatggaataatgctattgccatgatctgtggcaacgtatgtctctggaaaggggctccgacgaccagtctcatctctgtggcagtcacaaagattattgccaaagtgctcgaggataacaaactgccaggcgctatttgcagccttacatgtgggggtgctgacatcggtaccgccatggccaaagatgaacgggtgaaccttttgtccttcaccggaagcacacaggtggggaaacaggtcggactgatggttcaagaaagattcggaaggtccctgcttgagctcggaggaaacaacgctattatagcattcgaggatgccgatctgtcattggtcgtgccctccgccctgtttgccgctgtcggaaccgcgggacagagatgcacgacggctaggcgcctgttcatccatgagtcaatacacgatgaagtggtgaatagactgaaaaaagcctatgctcagatacgcgtgggtaacccatgggacccgaacgtactttatggcccactgcacactaagcaggccgtgtcaatgttcctcggcgcagtagaggaagcaaaaaaggagggcggaactgtggtctacggaggcaaagtcatggaccgaccagggaactacgtggagccaacaatcgtgacgggactgggccacgatgcgagcatagcccatactgagacatttgccccaattctatatgtgtttaagttcaagaatgaagaagaggtcttcgcttggaacaacgaggtaaagcagggcctctcttctagtattttcactaaagatttgggacgcatttttcggtggctaggccctaaaggatcagactgcggcatagtcaacgtgaacatcccaaccagcggggcagagatcgggggagctttcggaggagaaaagcacaccggcggaggcagagagtcaggttccgacgcctggaagcaatatatgcgcaggagcacttgtactattaattactctaaggacttgcccctggctcagggtatcaaatttcagtag

SEQ ID NO: 72422 - DNA, 1620 bp, Artificial Sequence
  derived and/or modified sequence
atgtggagactgcccagagccctgtgcgtgcacgccgccaagaccagcaagctgagcggcccctggagcagacccgccgccttcatgagcaccctgctgatcaaccagccccagtacgcctggctgaaggagctgggcctgagagaggagaacgagggcgtgtacaacggcagctggggcggcagaggcgaggtgatcaccacctactgccccgccaacaacgagcccatcgccagagtgagacaggccagcgtggccgactacgaggagaccgtgaagaaggccagagaggcctggaagatctgggccgacatccccgcccccaagagaggcgagatcgtgagacagatcggcgacgccctgagagagaagatccaggtgctgggcagcctggtgagcctggagatgggcaagatcctggtggagggcgtgggcgaggtgcaggagtacgtggacatctgcgactacgccgtgggcctgagcagaatgatcggcggccccatcctgcccagcgagagaagcggccacgccctgatcgagcagtggaaccccgtgggcctggtgggcatcatcaccgccttcaacttccccgtggccgtgtacggctggaacaacgccatcgccatgatctgcggcaacgtgtgcctgtggaagggcgcccccaccaccagcctgatcagcgtggccgtgaccaagatcatcgccaaggtgctggaggacaacaagctgcccggcgccatctgcagcctgacctgcggcggcgccgacatcggcaccgccatggccaaggacgagagagtgaacctgctgagcttcaccggcagcacccaggtgggcaagcaggtgggcctgatggtgcaggagagattcggcagaagcctgctggagctgggcggcaacaacgccatcatcgccttcgaggacgccgacctgagcctggtggtgcccagcgccctgttcgccgccgtgggcaccgccggccagagatgcaccaccgccagaagactgttcatccacgagagcatccacgacgaggtggtgaacagactgaagaaggcctacgcccagatcagagtgggcaacccctgggaccccaacgtgctgtacggccccctgcacaccaagcaggccgtgagcatgttcctgggcgccgtggaggaggccaagaaggagggcggcaccgtggtgtacggcggcaaggtgatggacagacccggcaactacgtggagcccaccatcgtgaccggcctgggccacgacgccagcatcgcccacaccgagaccttcgcccccatcctgtacgtgttcaagttcaagaacgaggaggaggtgttcgcctggaacaacgaggtgaagcagggcctgagcagcagcatcttcaccaaggacctgggcagaatcttcagatggctgggccccaagggcagcgactgcggcatcgtgaacgtgaacatccccaccagcggcgccgagatcggcggcgccttcggcggcgagaagcacaccggcggcggcagagagagcggcagcgacgcctggaagcagtacatgagaagaagcacctgcaccatcaactacagcaaggacctgcccctggcccagggcatcaagttccagtag

SEQ ID NO: 72423 - protein, 470 aa, Artificial Sequence
  derived and/or modified sequence
MMAAMATARVRMGPRCAQALWRMPWLPVFLSLAAAAAAAAAEQQVPLVLWSSDRDLWAPAADTHEGHITSDLQLSTYLDPALELGPRNVLLFLQDKLSIEDFTAYGGVFGNKQDSAFSNLENALDLAPSSLVLPAVDWYAVSTLTTYLQEKLGASPLHVDLATLRELKLNASLPALLLIRLPYTASSGLMAPREVLTGNDEVIGQVLSTLKSEDVPYTAALTAVRPSRVARDVAVVAGGLGRQLLQKQPVSPVIHPPVSYNDTAPRILFWAQNFSVAYKDQWEDLTPLTFGVQELNLTGSFWNDSFARLSLTYERLFGTTVTFKFILANRLYPVSARHWFTMERLEVHSNGSVAYFNASQVTGPSIYSFHCEYVSSLSKKGSLLVARTQPSPWQMMLQDFQIQAFNVMGEQFSYASDCASFFSPGIWMGLLTSLFMLFIFTYGLHMILSLKTMDRFDDHKGPTISLTQIV

SEQ ID NO: 72424 - protein, 273 aa, Artificial Sequence
  derived and/or modified sequence
MMAAMATARVRMGPRCAQALWRMPWLPVFLSLAAAAAAAAAEQQVPLVLWSSDRDLWAPAADTHEGHITSDLQLSTYLDPALELGPRNVLLFLQDKLSIEDFTAYGGVFGNKQDSAFSNLENALDLAPSSLVLPAVDWYAVSTLTTYLQEKLGASPLHVARDVAVVAGGLGRQLLQKQPVSPVIHPPVSYNDTAPRILFWAQNFSVAYKDQWEDLTPLTFGVQELNLTGSFWNDSFARFILANRLYPVSARHWFTMERLEVHSNGSVAYFNAS

SEQ ID NO: 72425 - protein, 294 aa, Artificial Sequence
  derived and/or modified sequence
MKATSPATCSSGLMAPREVLTGNDEVIGQVLSTLKSEDVPYTAALTAVRPSRVARDVAVVAGGLGRQLLQKQPVSPVIHPPVSYNDTAPRILFWAQNFSVAYKDQWEDLTPLTFGVQELNLTGSFWNDSFARLSLTYERLFGTTVTFKFILANRLYPVSARHWFTMERLEVHSNGSVAYFNASQVTGPSIYSFHCEYVSSLSKKGSLLVARTQPSPWQMMLQDFQIQAFNVMGEQFSYASDCASFFSPGIWMGLLTSLFMLFIFTYGLHMILSLKTMDRFDDHKGPTISLTQIV

SEQ ID NO: 72426 - protein, 230 aa, Artificial Sequence
  derived and/or modified sequence
MMAAMATARVRMGPRCAQALWRMPWLPVFLSLAAAAAAAAAEQQVPLVLWSSDRDLWAPAADTHEGHITSDLQLSTYLDPALELGPRNVLLFLQDKLSIEDFTAYGGVFGNKQDSAFSNLENALDLAPSSLVLPAVDWYAVSTLTTYLQEKLGASPLHVDLATLRELKLNASLPALLLIRLPYTASSGLMAPREVLTDEVIGQVLSTLKSEDVPYTAALTAVRPSRVARD

SEQ ID NO: 72427 - DNA, 1413 bp, Artificial Sequence
  derived and/or modified sequence
atgatggccgccatggccaccgccagagtgagaatgggccccagatgcgcccaggccctgtggagaatgccctggctgcccgtgttcctgagcctggccgccgccgccgccgccgccgccgccgagcagcaggtgcccctggtgctgtggagcagcgacagagacctgtgggcccccgccgccgacacccacgagggccacatcaccagcgacctgcagctgagcacctacctggaccccgccctggagctgggccccagaaacgtgctgctgttcctgcaggacaagctgagcatcgaggacttcaccgcctacggcggcgtgttcggcaacaagcaggacagcgccttcagcaacctggagaacgccctggacctggcccccagcagcctggtgctgcccgccgtggactggtacgccgtgagcaccctgaccacctacctgcaggagaagctgggcgccagccccctgcacgtggacctggccaccctgagagagctgaagctgaacgccagcctgcccgccctgctgctgatcagactgccctacaccgccagcagcggcctgatggcccccagagaggtgctgaccggcaacgacgaggtgatcggccaggtgctgagcaccctgaagagcgaggacgtgccctacaccgccgccctgaccgccgtgagacccagcagagtggccagagacgtggccgtggtggccggcggcctgggcagacagctgctgcagaagcagcccgtgagccccgtgatccacccccccgtgagctacaacgacaccgcccccagaatcctgttctgggcccagaacttcagcgtggcctacaaggaccagtgggaggacctgacccccctgaccttcggcgtgcaggagctgaacctgaccggcagcttctggaacgacagcttcgccagactgagcctgacctacgagagactgttcggcaccaccgtgaccttcaagttcatcctggccaacagactgtaccccgtgagcgccagacactggttcaccatggagagactggaggtgcacagcaacggcagcgtggcctacttcaacgccagccaggtgaccggccccagcatctacagcttccactgcgagtacgtgagcagcctgagcaagaagggcagcctgctggtggccagaacccagcccagcccctggcagatgatgctgcaggacttccagatccaggccttcaacgtgatgggcgagcagttcagctacgccagcgactgcgccagcttcttcagccccggcatctggatgggcctgctgaccagcctgttcatgctgttcatcttcacctacggcctgcacatgatcctgagcctgaagaccatggacagattcgacgaccacaagggccccaccatcagcctgacccagatcgtgtag

SEQ ID NO: 72428 - DNA, 822 bp, Artificial Sequence
  derived and/or modified sequence
atgatggccgccatggccaccgccagagtgagaatgggccccagatgcgcccaggccctgtggagaatgccctggctgcccgtgttcctgagcctggccgccgccgccgccgccgccgccgccgagcagcaggtgcccctggtgctgtggagcagcgacagagacctgtgggcccccgccgccgacacccacgagggccacatcaccagcgacctgcagctgagcacctacctggaccccgccctggagctgggccccagaaacgtgctgctgttcctgcaggacaagctgagcatcgaggacttcaccgcctacggcggcgtgttcggcaacaagcaggacagcgccttcagcaacctggagaacgccctggacctggcccccagcagcctggtgctgcccgccgtggactggtacgccgtgagcaccctgaccacctacctgcaggagaagctgggcgccagccccctgcacgtggccagagacgtggccgtggtggccggcggcctgggcagacagctgctgcagaagcagcccgtgagccccgtgatccacccccccgtgagctacaacgacaccgcccccagaatcctgttctgggcccagaacttcagcgtggcctacaaggaccagtgggaggacctgacccccctgaccttcggcgtgcaggagctgaacctgaccggcagcttctggaacgacagcttcgccagattcatcctggccaacagactgtaccccgtgagcgccagacactggttcaccatggagagactggaggtgcacagcaacggcagcgtggcctacttcaacgccagctag

SEQ ID NO: 72429 - DNA, 885 bp, Artificial Sequence
  derived and/or modified sequence
atgaaggccaccagccccgccacctgcagcagcggcctgatggcccccagagaggtgctgaccggcaacgacgaggtgatcggccaggtgctgagcaccctgaagagcgaggacgtgccctacaccgccgccctgaccgccgtgagacccagcagagtggccagagacgtggccgtggtggccggcggcctgggcagacagctgctgcagaagcagcccgtgagccccgtgatccacccccccgtgagctacaacgacaccgcccccagaatcctgttctgggcccagaacttcagcgtggcctacaaggaccagtgggaggacctgacccccctgaccttcggcgtgcaggagctgaacctgaccggcagcttctggaacgacagcttcgccagactgagcctgacctacgagagactgttcggcaccaccgtgaccttcaagttcatcctggccaacagactgtaccccgtgagcgccagacactggttcaccatggagagactggaggtgcacagcaacggcagcgtggcctacttcaacgccagccaggtgaccggccccagcatctacagcttccactgcgagtacgtgagcagcctgagcaagaagggcagcctgctggtggccagaacccagcccagcccctggcagatgatgctgcaggacttccagatccaggccttcaacgtgatgggcgagcagttcagctacgccagcgactgcgccagcttcttcagccccggcatctggatgggcctgctgaccagcctgttcatgctgttcatcttcacctacggcctgcacatgatcctgagcctgaagaccatggacagattcgacgaccacaagggccccaccatcagcctgacccagatcgtgtag

SEQ ID NO: 72430 - DNA, 693 bp, Artificial Sequence
  derived and/or modified sequence
atgatggccgccatggccaccgccagagtgagaatgggccccagatgcgcccaggccctgtggagaatgccctggctgcccgtgttcctgagcctggccgccgccgccgccgccgccgccgccgagcagcaggtgcccctggtgctgtggagcagcgacagagacctgtgggcccccgccgccgacacccacgagggccacatcaccagcgacctgcagctgagcacctacctggaccccgccctggagctgggccccagaaacgtgctgctgttcctgcaggacaagctgagcatcgaggacttcaccgcctacggcggcgtgttcggcaacaagcaggacagcgccttcagcaacctggagaacgccctggacctggcccccagcagcctggtgctgcccgccgtggactggtacgccgtgagcaccctgaccacctacctgcaggagaagctgggcgccagccccctgcacgtggacctggccaccctgagagagctgaagctgaacgccagcctgcccgccctgctgctgatcagactgccctacaccgccagcagcggcctgatggcccccagagaggtgctgaccgacgaggtgatcggccaggtgctgagcaccctgaagagcgaggacgtgccctacaccgccgccctgaccgccgtgagacccagcagagtggccagagactag

SEQ ID NO: 72431 - DNA, 1413 bp, Artificial Sequence
  derived and/or modified sequence
atgatggccgccatggcaaccgcacgtgtgcggatgggacctcgatgcgcccaggctctgtggcgaatgccatggctgcccgtctttttaagcttagctgccgccgcagctgctgcagccgcagagcagcaagtgccactcgtcctgtggtcctcggaccgcgacctctgggctcctgccgccgatacccatgagggacacatcacctctgatttgcagctgtccacttatctggaccccgccctggagctgggaccgcgaaacgtcctgttgttcctccaggataagctctccattgaggacttcacggcctacggaggagtctttgggaacaagcaggatagcgcattctctaaccttgagaacgcgctggatttggctccctcctctctcgtcctcccagctgtggattggtatgccgtcagtaccctgaccacttatctgcaggaaaagctaggcgcatcccccctgcacgtggacctggctaccctacgtgagctgaagctcaatgcgtctcttccggcactcttgcttataagacttccctacactgcaagcagcggactgatggcgccacgggaggtgctgacaggaaacgacgaagttatcggacaagtcctgagcacactgaagtctgaggatgttccctacacagctgccctgacagctgtacgcccttcccgtgtcgctcgagatgttgcggtcgtcgctggcgggctgggtaggcagctgctgcagaagcagccagtcagccccgtcatccaccctcctgtgtcgtacaatgataccgcccccagaatactgttctgggcccagaatttcagcgtagcttacaaagaccagtgggaagacctcaccccgctcacgtttggcgtgcaagagctcaatttgaccggatctttctggaatgatagttttgcccgcctctccctcacatacgagcgactcttcggcaccaccgtgacttttaaatttattctcgcaaaccgactctacccagtgtcagcccgacactggttcactatggaacgcctggaagtgcacagcaatggatccgtggcctactttaacgcaagccaagtgaccggacctagtatctactcctttcactgtgagtatgtgtcatcgttaagcaaaaaaggcagtctgctggtggcgagaacacaaccctctccttggcaaatgatgctacaagatttccaaattcaggctttcaatgtcatgggtgagcaattctcttatgcatctgactgcgcaagcttcttcagccccgggatatggatggggctgctgacctccttatttatgttatttatattcacgtatggcttgcacatgatcctttccctgaagacgatggaccgcttcgacgaccataaagggcctactatttctcttacacagatcgtatag

SEQ ID NO: 72432 - DNA, 822 bp, Artificial Sequence
  derived and/or modified sequence
atgatggccgctatggctacggccagggtacgtatgggtccaaggtgtgcccaggctctctggagaatgccttggttgcccgtcttcctctccctcgctgccgcagccgcagccgccgctgcagaacagcaagttccactggtgctgtggagctcagacagagatctatgggcacctgccgctgacactcacgagggccatattaccagcgaccttcagttgtctacatatttggaccctgccttggaactgggtccacggaacgttctactatttctccaagacaagcttagcatagaagactttaccgcatatggcggcgtgtttgggaataagcaggattcggccttttcgaacttggaaaacgccctggaccttgctccgtcaagtctggttctgccggcggttgattggtatgcagtgagcaccctgaccacatatttgcaggagaagttgggcgccagtcctctgcatgttgctagagatgtagccgtcgtggcaggtgggcttgggaggcagctcctccagaaacaacctgtgagtcctgtaattcacccccccgtgtcttacaacgacacggcaccgcgaattttattttgggcacagaatttctccgtcgcctacaaggatcaatgggaggacctgacccctcttacatttggggttcaggaactgaaccttaccggtagcttttggaacgattcattcgccagattcatattggccaacaggttgtaccctgtctcagctaggcattggttcacaatggaacgcctggaagttcactccaatggatccgtggcttactttaacgctagttag

SEQ ID NO: 72433 - DNA, 885 bp, Artificial Sequence
  derived and/or modified sequence
atgaaagccacatcacccgcaacctgttcgagcggactcatggcgcctagagaggtcctgacaggaaacgatgaggttattggacaagtgctctccacattaaagagcgaggacgttccatacacagccgccctgaccgctgttcggccttctcgcgttgcaagggacgttgctgttgtggctggaggtctggggaggcagctgttgcagaaacaaccagtgagcccagttattcacccacccgtcagctataacgatactgccccgagaatattattttgggcccagaatttttctgtggcgtacaaagatcagtgggaggacttgactccactcacattcggagtgcaagagctaaatttgaccggctccttctggaatgactccttcgcccgtctctcactgacctatgagcgcttgttcggcacaacagtaacatttaaattcatacttgccaaccggctttaccccgtctccgcccgccattggtttacaatggaaagactcgaggtgcattccaacgggtcagttgcatacttcaatgcaagccaggtgaccggcccctccatctactcttttcactgcgagtacgtatcgagcctttccaagaaaggatcactcttagttgccaggactcaaccatccccatggcagatgatgttacaggatttccagatccaggccttcaacgtcatgggagagcagttcagctacgcatccgactgcgcctctttcttctctcctgggatctggatgggcttgctgacaagcctatttatgctgttcatcttcacatacggccttcacatgatactgtccctcaaaacaatggatcggtttgacgatcataagggcccgactatatcactgacccagattgtctag

SEQ ID NO: 72434 - DNA, 693 bp, Artificial Sequence
  derived and/or modified sequence
atgatggcagcaatggcaacagcgagggtgcgcatgggccccaggtgcgcacaggccttgtggagaatgccttggctgccggtcttcctgtcccttgccgccgcagctgctgctgcagcggcagagcagcaggtgcctctggtcttgtggtcgtccgatcgcgacctctgggctcctgcagccgacacacacgaggggcacattacctcagatctgcaattgagtacctacctcgaccctgcccttgaacttggcccccgcaatgtcttgctgtttctgcaggacaaactttccattgaggactttactgcctacggcggcgttttcggcaataaacaggatagcgcattctcgaatcttgagaatgcgttagaccttgcaccatcctccctcgtgctgcccgcagtcgattggtacgccgtatcaaccctgaccacctatctacaggaaaaactgggagccagtccgctgcacgtggacctggcaaccctaagagagttgaagcttaacgccagcctgcctgcacttctgcttatccggctcccttacactgcgagcagcggtcttatggcaccacgagaggtgctcactgacgaagttatcggacaggttctgagtacactcaaaagcgaagacgttccctacaccgccgcactcacggccgtacgaccttctcgggttgctcgcgactag

SEQ ID NO: 72435 - DNA, 1413 bp, Artificial Sequence
  derived and/or modified sequence
atgatggccgccatggccacagcccgggtgaggatgggcccccgctgtgcccaggccctgtggaggatgccctggctgcctgtgttcctgagcctggccgctgctgctgctgctgctgctgctgagcagcaggtgcccctggtgctgtggagcagtgaccgggacctgtgggccccagctgctgacacccatgagggccacatcaccagtgacctgcagctgagcacctacctggaccctgccctggagctgggccccagaaatgtgctgctcttcctgcaggacaagctgagcattgaggacttcaccgcctatggaggagtgtttggaaacaagcaggacagcgccttcagcaacctggagaatgccctggacctggcccccagcagcctggtgctgcctgctgtggactggtatgctgtgtccaccctgaccacctacctgcaggagaagctgggcgccagccccctgcacgtggacctggccaccctgcgggagctgaagctgaatgccagcctgcctgccctgctgctgatccggctgccctacacagccagcagcggcctgatggccccccgggaggtgctgactggaaatgatgaggtgattggccaggtgctgagcaccctgaagtcagaagatgtgccctacacagctgccctgacagctgtgcggcccagccgggtggccagagatgtggccgtggtggccggcggcctgggccggcagctgctgcagaagcagcctgtgtcccctgtgatccacccccctgtgtcctacaatgacacagccccccgcatcctcttctgggcccagaacttctctgtggcctacaaggaccagtgggaggacctgacccccctgaccttcggcgtgcaggagctgaacctgaccggcagcttctggaatgacagctttgcccggctgagcctgacctatgagcggctgtttggcaccaccgtgaccttcaagttcatcctggccaacagactctaccctgtgtctgcccggcactggttcaccatggagcggctggaggtgcacagcaatggatctgtggcctacttcaatgccagccaggtgacaggccccagcatctacagcttccactgtgaatatgtgagcagcctgagcaagaagggcagcctgctggtggcccggacccagcccagcccctggcagatgatgctgcaggacttccagatccaggccttcaacgtgatgggagagcagttctcctatgccagtgactgtgccagcttcttcagccctggcatctggatgggcctgctgaccagcctcttcatgctgttcatcttcacctacggcctgcacatgatcctgagcctgaagaccatggacagatttgatgaccacaagggccccaccatcagcctgacccagatcgtgtag

SEQ ID NO: 72436 - DNA, 822 bp, Artificial Sequence
  derived and/or modified sequence
atgatggccgccatggccacagcccgggtgaggatgggcccccgctgtgcccaggccctgtggaggatgccctggctgcctgtgttcctgagcctggccgctgctgctgctgctgctgctgctgagcagcaggtgcccctggtgctgtggagcagtgaccgggacctgtgggccccagctgctgacacccatgagggccacatcaccagtgacctgcagctgagcacctacctggaccctgccctggagctgggccccagaaatgtgctgctcttcctgcaggacaagctgagcattgaggacttcaccgcctatggaggagtgtttggaaacaagcaggacagcgccttcagcaacctggagaatgccctggacctggcccccagcagcctggtgctgcctgctgtggactggtatgctgtgtccaccctgaccacctacctgcaggagaagctgggcgccagccccctgcacgtggccagagatgtggccgtggtggccggcggcctgggccggcagctgctgcagaagcagcctgtgtcccctgtgatccacccccctgtgtcctacaatgacacagccccccgcatcctcttctgggcccagaacttctctgtggcctacaaggaccagtgggaggacctgacccccctgaccttcggcgtgcaggagctgaacctgaccggcagcttctggaatgacagctttgcccgcttcatcctggccaacagactctaccctgtgtctgcccggcactggttcaccatggagcggctggaggtgcacagcaatggatctgtggcctacttcaatgccagctag

SEQ ID NO: 72437 - DNA, 885 bp, Artificial Sequence
  derived and/or modified sequence
atgaaggccaccagccctgccacctgcagcagcggcctgatggccccccgggaggtgctgactggaaatgatgaggtgattggccaggtgctgagcaccctgaagtcagaagatgtgccctacacagctgccctgacagctgtgcggcccagccgggtggccagagatgtggccgtggtggccggcggcctgggccggcagctgctgcagaagcagcctgtgtcccctgtgatccacccccctgtgtcctacaatgacacagccccccgcatcctcttctgggcccagaacttctctgtggcctacaaggaccagtgggaggacctgacccccctgaccttcggcgtgcaggagctgaacctgaccggcagcttctggaatgacagctttgcccggctgagcctgacctatgagcggctgtttggcaccaccgtgaccttcaagttcatcctggccaacagactctaccctgtgtctgcccggcactggttcaccatggagcggctggaggtgcacagcaatggatctgtggcctacttcaatgccagccaggtgacaggccccagcatctacagcttccactgtgaatatgtgagcagcctgagcaagaagggcagcctgctggtggcccggacccagcccagcccctggcagatgatgctgcaggacttccagatccaggccttcaacgtgatgggagagcagttctcctatgccagtgactgtgccagcttcttcagccctggcatctggatgggcctgctgaccagcctcttcatgctgttcatcttcacctacggcctgcacatgatcctgagcctgaagaccatggacagatttgatgaccacaagggccccaccatcagcctgacccagatcgtgtag

SEQ ID NO: 72438 - DNA, 693 bp, Artificial Sequence
  derived and/or modified sequence
atgatggccgccatggccacagcccgggtgaggatgggcccccgctgtgcccaggccctgtggaggatgccctggctgcctgtgttcctgagcctggccgctgctgctgctgctgctgctgctgagcagcaggtgcccctggtgctgtggagcagtgaccgggacctgtgggccccagctgctgacacccatgagggccacatcaccagtgacctgcagctgagcacctacctggaccctgccctggagctgggccccagaaatgtgctgctcttcctgcaggacaagctgagcattgaggacttcaccgcctatggaggagtgtttggaaacaagcaggacagcgccttcagcaacctggagaatgccctggacctggcccccagcagcctggtgctgcctgctgtggactggtatgctgtgtccaccctgaccacctacctgcaggagaagctgggcgccagccccctgcacgtggacctggccaccctgcgggagctgaagctgaatgccagcctgcctgccctgctgctgatccggctgccctacacagccagcagcggcctgatggccccccgggaggtgctgacagatgaggtgattggccaggtgctgagcaccctgaagtcagaagatgtgccctacacagctgccctgacagctgtgcggcccagccgggtggcccgggactag

SEQ ID NO: 72439 - DNA, 1413 bp, Artificial Sequence
  derived and/or modified sequence
atgatggccgccatggccaccgcccgggtgcggatgggcccccggtgtgctcaggccctctggcggatgccttggctgcctgtcttcttgtcactcgccgccgcggccgctgctgccgccgccgaacagcaggtccccctcgtgctatggtcctctgatcgagatttgtgggcacctgccgcagacactcatgagggccatatcacctccgatttacaactaagtacatacctagaccctgcgttagaactggggccccgaaatgttcttctgttcctgcaagacaagctgagtattgaggattttacggcctacggcggcgtattcggcaataagcaggacagcgctttctctaacctggagaacgccctcgatctggctccctccagtctggtgctgcccgccgtcgactggtacgccgttagcactctgaccacttacttacaggaaaagctcggggcttcccctttgcacgtcgacttagccacactgagagagctcaaattgaacgcttctcttcccgccctgttactcatccgtctaccctatacagcaagctctggtctcatggccccccgcgaagtgctgactggaaatgatgaagtgataggccaggtcctctccactctgaagtctgaggatgtgccctatacagcggcactgactgcagtgcgcccctcccgagtggcccgcgatgtggctgtggtggccgggggcctcggaaggcagctgttacagaaacagccagtctcccccgtgatccatccacccgttagttacaatgatactgcgcccaggatcctgttttgggcacagaatttcagcgtggcctacaaagaccaatgggaggatctcactccactgacattcggagtgcaggaactcaatctgactggtagcttttggaacgactcatttgcccgcctttctcttacctacgagaggctgtttgggactaccgtgacctttaagtttatacttgccaaccggctgtatccagtgtcagcccgccattggtttacgatggagagactggaggtgcatagtaacggaagtgtggcatattttaatgcctcccaggtaaccggtccatcaatatacagctttcactgcgagtacgtgagcagtctctcaaaaaaaggatctttgttggtggcaagaactcagcccagcccctggcagatgatgcttcaggatttccagattcaggcttttaatgtgatgggtgagcaattcagttatgcaagcgactgcgcgtcctttttttctcctggcatttggatgggactgctcacttccctcttcatgctgtttatcttcacttacggccttcatatgattctgtccttgaagacaatggaccggtttgacgaccacaagggacccaccatatcattgacccagatagtttag

SEQ ID NO: 72440 - DNA, 822 bp, Artificial Sequence
  derived and/or modified sequence
atgatggccgccatggccaccgcccgggtgcggatgggcccccggtgcgctcaggccctctggcgcatgccctggttacctgtctttctatccttggccgcagctgctgccgccgcggccgcagaacaacaagtgcctcttgttctgtggagctcagacagggacctatgggcgcctgccgctgatacccatgaaggacacatcacctcagacttgcaattgagcacttaccttgatcctgcactcgagcttggtccaaggaatgtcctgctgttcctgcaggataaactttctatagaagacttcacggcatatggcggggtgtttggaaacaagcaggatagcgcctttagcaaccttgaaaatgccctggatcttgcgccaagttcacttgtgttgcctgccgttgattggtacgcagttagcaccctcacaacttaccttcaggagaagctgggcgcatctccgctgcatgtggcccgcgatgtcgcagtggttgctggcggactgggtcgacaactactgcagaaacagcctgtctctcccgtcattcaccccccagtctcctacaatgacacagcgccccgcattcttttttgggctcagaacttctctgtggcctataaggatcaatgggaagacttgacaccgctgacgtttggggtccaggagctcaatttgacaggcagcttctggaatgactcctttgctcggttcatcctcgcgaatcgtctctatcctgtctccgcgaggcactggttcactatggagcgcctggaggtccacagcaatgggtcggtggcctactttaatgcgtcatag

SEQ ID NO: 72441 - DNA, 885 bp, Artificial Sequence
  derived and/or modified sequence
atgaaggccaccagccccgccacctgcagcagcggcctgatggccccaagggaggtgctgacaggcaatgatgaggtgattggacaggtgctttctactctaaaatcagaggacgtgccatataccgccgcactgaccgccgtgcgaccgagtagggttgcaagagatgtggctgtcgtggctggcggtctgggtcgccagcttctgcagaagcaaccagtgtcccctgtgatccacccccccgtcagctacaatgacactgcaccccggatactgttttgggctcagaacttttccgtcgcttacaaagaccagtgggaggatctgacacctctgacctttggcgtccaagaactgaatctgaccgggagcttctggaatgatagcttcgcgaggttaagtctcacatacgagcgcctgtttggcactaccgtgacatttaagtttatcctggccaaccgtctttacccggtgagcgccagacactggttcacgatggagagactagaagtgcattcaaacggatcggtcgcctactttaatgcttctcaggtgaccggccctagtatctacagcttccactgcgagtacgtttctagtcttagcaaaaaaggcagtctactggtcgcccggacccagccgagcccatggcaaatgatgctgcaggattttcaaatacaagcatttaacgtcatgggggagcaattttcctacgctagtgactgcgcctcgttcttctcacctggaatctggatggggctgcttacatctttgtttatgctatttatatttacgtacggcttacacatgatcctgtccctgaagaccatggacagatttgacgaccataagggtccgaccatcagtctaacacagatcgtctag

SEQ ID NO: 72442 - DNA, 693 bp, Artificial Sequence
  derived and/or modified sequence
atgatggccgccatggccaccgcccgggtgcggatgggcccccggtgcgcacaggctttgtggcgcatgccatggctccctgtgtttctctcattggctgctgcagccgcggccgctgctgctgagcagcaagtcccactggtgctgtggagttcagaccgggatctgtgggcacccgccgctgacactcacgagggtcacatcacaagtgatctacaactgtcaacctaccttgaccccgctctcgagttgggtcccaggaatgtcctcttgttccttcaggataagctcagcatcgaggattttactgcatatggtggggtgtttgggaataagcaggacagcgccttctctaatcttgagaacgcactggacctggcacccagcagcctagttctgccggctgttgactggtatgcagtgtcaaccctgactacatacttgcaagagaaactgggggcttcacccctccatgtggatctcgcgactctcagagaactcaagcttaacgcctctctgcctgccttattactaatcaggctcccatacactgcgtcatcaggactgatggccccacgtgaggtgctgactgacgaggtcatcgggcaagtgctaagtaccctgaaaagcgaggacgtcccgtacactgcagcactgactgccgtgagaccaagtcgggtggctcgggattag

SEQ ID NO: 72443 - DNA, 1413 bp, Artificial Sequence
  derived and/or modified sequence
atgatggcggctatggccaccgccagagtcaggatgggccctagatgtgcccaagccctgtggcgaatgccatggctaccagttttcctctccctggcggctgccgctgctgccgcagccgctgagcagcaggtgcctctggtcctgtggtcaagcgaccgtgacctttgggccccagctgccgacacccacgaaggtcacatcacctcagatctgcagctgtctacgtacctggatccggcattggaactcggaccgaggaatgtactcctcttcttgcaggataagctcagcatcgaagactttaccgcttacggcggagtctttggtaacaagcaggattctgccttctcgaacctggaaaacgcattagaccttgctccgtcctctctcgtgctgcccgctgtcgattggtatgctgtcagcacgcttacgacttacctccaggagaaattgggggcttcacccttacacgttgacctggctaccctgcgagagctcaaactcaatgcatcactgcccgcactgctgttgatcagactgccatataccgctagttcggggctcatggcgcctcgggaagtcctgaccggaaacgacgaagtaatcgggcaggtactgagcaccctcaaatccgaagacgtaccctacaccgccgcactgacagccgtcagaccttctcgtgtagctagagacgtggctgtggtggccggaggcttgggaagacaacttttacaaaaacagccagtctctcccgttattcacccccctgtatcttacaatgataccgccccaagaattctgttctgggcacagaatttttccgtggcatataaagatcagtgggaggatctgacacctctgacgttcggcgtacaagaattgaacctcacagggagcttctggaatgatagcttcgctaggctctctctaacctatgagcgcctgttcggaaccacggtgaccttcaagttcatcctggcaaacaggctctaccccgtttctgcccgacactggtttacaatggagcggctggaggtgcattcaaatggtagcgtggcttattttaatgcttcacaggtcacaggaccgagcatctactcgttccactgcgagtacgtatccagtttgtcgaaaaagggatctctgctggtcgcccgaactcaaccttctccctggcagatgatgctccaggatttccaaatccaggcctttaacgtaatgggtgagcaattcagttatgctagcgactgtgcctctttcttttcccccggtatatggatggggttgctgaccagcctgttcatgctttttatcttcacgtacgggctgcacatgatactttcattaaagactatggatagatttgacgatcacaaaggtcctaccatttctttgacgcaaattgtttag

SEQ ID NO: 72444 - DNA, 822 bp, Artificial Sequence
  derived and/or modified sequence
atgatggccgctatggccacggcgagggtcaggatggggcctcgttgcgcacaggctctgtggcgaatgccatggttaccagtctttctctctctggccgctgccgctgctgccgcagcagccgaacagcaggtccccttagttctctggagctccgacagggacctatgggctccagcagcagatacccatgagggacacattactagcgatctgcagctgagtacctatctggatcctgccctcgagttaggaccacgcaacgtcctgctatttctccaagacaagctctcgattgaagactttacagcatacgggggagtgtttgggaataaacaggactccgccttctctaacctcgaaaatgctttagacctggccccatcctctctcgtgctgccggcagtcgactggtacgccgtgtccacactgacaacatacttacaggagaagctgggcgcttcaccacttcacgtggccagggacgtcgctgttgtagcgggagggctcggcagacagctacttcagaagcaacccgtttcaccagtgattcaccccccagtgtcttataatgacacagcccctaggatcctcttctgggcccagaacttttcagtggcatacaaagatcagtgggaggacctgaccccactcacattcggcgtacaagagctcaacctcacgggctcgttctggaacgacagcttcgccaggttcatcttggctaatcgcttgtaccctgtaagcgcccgtcactggtttaccatggagcgacttgaggtccattctaatgggagcgtggcatacttcaatgcctcttag

SEQ ID NO: 72445 - DNA, 885 bp, Artificial Sequence
  derived and/or modified sequence
atgaaagcaacttcacctgcgacctgctcctccggcctgatggcaccgagagaggtgctgacaggaaacgacgaagtaataggtcaagtcctgagcactctgaaaagcgaagacgtgccttacaccgcggcactgactgccgtccgtcctagtagggtcgcgcgtgatgtggccgtagtggctggagggttaggcagacagctgctgcagaaacaacccgtctcacccgtgatccatcccccagtgtcgtataacgacactgcccctagaatcctgttttgggctcaaaacttcagcgtcgcctataaagaccagtgggaggacctgacacccctgactttcggcgtccaagagttgaatctcaccgggagcttctggaatgacagcttcgcaagattgtccctcacatatgagagattattcgggaccactgtgacttttaagttcatcttggccaaccgcctgtacccagtgtctgcacgccattggttcaccatggaaaggctggaagtgcatagcaacgggagtgtggcctatttcaatgcttctcaggtgacgggcccatctatatacagtttccactgtgaatacgtgtctagtctgtcaaagaaaggcagcctgctggtggccaggactcagccgtctccatggcagatgatgctccaagattttcagattcaggcctttaacgtgatgggggaacagttcagttacgcttcagactgtgcctcctttttctcccccggaatctggatggggttgctgacttctttgttcatgttgttcattttcacctatggcctgcatatgatcctgagtctgaaaacgatggaccgattcgatgatcataaaggcccaaccatctcccttacacagatcgtttag

SEQ ID NO: 72446 - DNA, 693 bp, Artificial Sequence
  derived and/or modified sequence
atgatggcagcgatggctacagcaagggttagaatgggcccacgttgtgcccaggcgctctggagaatgccttggctgccagttttcctgtccctcgccgctgctgctgcagccgcagctgcagaacagcaagttcccttggttctctggtcaagcgaccgagacctgtgggcacccgcagccgacacacatgagggacacatcacaagcgatctccagctgagtacctatctcgacccagcgctggaactcggcccacgaaacgtgctgctgttcctgcaggacaagctgtcaatcgaagacttcactgcttatggtggggtgttcgggaacaagcaggactctgcattcagcaatctggagaatgctctcgacttggcccctagcagtctggttctgcctgccgtcgattggtatgccgtgtctactctaacaacatatctgcaagaaaagttgggggcatcacctctgcacgtcgacctcgccaccttgcgtgagctgaaactaaacgctagcctgcctgccctattattaatccgactgccctacactgcgtctagtgggctgatggcacctcgcgaagtccttaccgacgaggtgatcggacaggtgctgtctacactcaagtcggaggatgtgccatatactgccgcactaactgccgttcggccaagccgcgtggccagggattag

SEQ ID NO: 72447 - DNA, 2099 bp, Artificial Sequence
  derived and/or modified sequence
gggggcaacggtcacctgatctgcggctgtcgaggccgctgaggcagtggaggctgaggctatgatggcggccatggcgacggctcgagtgcggatggggccgcgatgcgcccaggcgctctggcgcatgccgtggctgccggtgtttttgtcgttggcggcggcggcggcggcggcagcggcggagcagcaggtcccgctggtgctgtggtcgagtgaccgggacttgtgggctcctgcggccgacactcatgaaggccacatcaccagcgacttgcagctctctacctacttagatcccgccctggagctgggtcccaggaatgtgctgctgttcctgcaggacaagctgagcattgaggatttcacagcatatggcggtgtgtttggaaacaagcaggacagcgccttttctaacctagagaatgccctggacctggccccctcctcactggtgcttcctgccgtcgactggtatgcagtcagcactctgaccacttacctgcaggagaagctcggggccagccccttgcatgtggacctggccaccctgcgggagctgaagctcaatgccagcctccctgctctgctgctcattcgcctgccctacacagccagctctggtctgatggcacccagggaagtcctcacaggcaacgatgaggtcatcgggcaggtcctgagcacactcaagtccgaagatgtcccatacacagcggccctcacagcggtccgcccttccagggtggcccgtgatgtagccgtggtggccggagggctaggtcgccagctgctacaaaaacagccagtatcacctgtgatccatcctcctgtgagttacaatgacaccgctccccggatcctgttctgggcccaaaacttctctgtggcgtacaaggaccagtgggaggacctgactcccctcacctttggggtgcaggaactcaacctgactggctccttctggaatgactcctttgccaggctctcactgacctatgaacgactctttggtaccacagtgacattcaagttcattctggccaaccgcctctacccagtgtctgcccggcactggtttaccatggagcgcctcgaagtccacagcaatggctccgtcgcctacttcaatgcttcccaggtcacagggcccagcatctactccttccactgcgagtatgtcagcagcctgagcaagaagggtagtctcctcgtggcccgcacgcagccctctccctggcagatgatgcttcaggacttccagatccaggctttcaacgtaatgggggagcagttctcctacgccagcgactgtgccagcttcttctcccccggcatctggatggggctgctcacctccctgttcatgctcttcatcttcacctatggcctgcacatgatcctcagcctcaagaccatggatcgctttgatgaccacaagggccccactatttctttgacccagattgtgtgaccctgtgccagtgggggggttgagggtgggacggtgtccgtgttgttgctttcccaccctgcagcgcactggactgaagagcttccctcttcctactgcagcatgaactgcaagctcccctcagcccatcttgctccctcttcagcccgctgaggagctttcttgggctgcccccatctctcccaacaaggtgtacatattctgcgtagatgctagaccaaccagcttcccagggttcgtcgctgtgaggcgtaagggacatgaattctagggtctcctttctccttatttattcttgtggctacatcatccctggctgtggatagtgcttttgtgtagcaaatgctccctccttaaggttatagggctccctgagtttgggagtgtggaagtactacttaactgtctgtcctgcttggctgtcgttatcgttttctggtgatgttgtgctaacaataagaagtacacgggtttatttctgtggcctgagaaggaagggacctccacgacaggtgggctgggtgcgatcgccggctgtttggcatgttcccaccgggagtgccgggcaggagcatggggtgcttggttgtttccttcctaataaaataaacgcgggtcgccatgc

SEQ ID NO: 72448 - DNA, 867 bp, Artificial Sequence
  derived and/or modified sequence
acctgatctgcggctgtcgaggccgctgaggcagtggaggctgaggctatgatggcggccatggcgacggctcgagtgcggatggggccgcgatgcgcccaggcgctctggcgcatgccgtggctgccggtgtttttgtcgttggcggcggcggcggcggcggcagcggcggagcagcaggtcccgctggtgctgtggtcgagtgaccgggacttgtgggctcctgcggccgacactcatgaaggccacatcaccagcgacttgcagctctctacctacttagatcccgccctggagctgggtcccaggaatgtgctgctgttcctgcaggacaagctgagcattgaggatttcacagcatatggcggtgtgtttggaaacaagcaggacagcgccttttctaacctagagaatgccctggacctggccccctcctcactggtgcttcctgccgtcgactggtatgcagtcagcactctgaccacttacctgcaggagaagctcggggccagccccttgcatgtggcccgtgatgtagccgtggtggccggagggctaggtcgccagctgctacaaaaacagccagtatcacctgtgatccatcctcctgtgagttacaatgacaccgctccccggatcctgttctgggcccaaaacttctctgtggcgtacaaggaccagtgggaggacctgactcccctcacctttggggtgcaggaactcaacctgactggctccttctggaatgactcctttgccaggttcattctggccaaccgcctctacccagtgtctgcccggcactggtttaccatggagcgcctcgaagtccacagcaatggctccgtcgcctacttcaatgcttcc

SEQ ID NO: 72449 - DNA, 1478 bp, Artificial Sequence
  derived and/or modified sequence
gctgaggcagtggaggctgaggctatgatggcggccatggcgacggctcgagtgcggatggggccgcgatgcgcccaggcgctctggcgcatgccgtggctgccggtgtttttgtcgttggcggcggcggcggcggcggcagcggcggagcagcaggtcccgctggtgctgtggtcgagtgaccgggacttgtgggctcctgcggccgacactcatgaaggccacatcaccagcgacttgcagctctggtctgatggcacccagggaagtcctcacaggcaacgatgaggtcatcgggcaggtcctgagcacactcaagtccgaagatgtcccatacacagcggccctcacagcggtccgcccttccagggtggcccgtgatgtagccgtggtggccggagggctaggtcgccagctgctacaaaaacagccagtatcacctgtgatccatcctcctgtgagttacaatgacaccgctccccggatcctgttctgggcccaaaacttctctgtggcgtacaaggaccagtgggaggacctgactcccctcacctttggggtgcaggaactcaacctgactggctccttctggaatgactcctttgccaggctctcactgacctatgaacgactctttggtaccacagtgacattcaagttcattctggccaaccgcctctacccagtgtctgcccggcactggtttaccatggagcgcctcgaagtccacagcaatggctccgtcgcctacttcaatgcttcccaggtcacagggcccagcatctactccttccactgcgagtatgtcagcagcctgagcaagaagggtagtctcctcgtggcccgcacgcagccctctccctggcagatgatgcttcaggacttccagatccaggctttcaacgtaatgggggagcagttctcctacgccagcgactgtgccagcttcttctcccccggcatctggatggggctgctcacctccctgttcatgctcttcatcttcacctatggcctgcacatgatcctcagcctcaagaccatggatcgctttgatgaccacaagggccccactatttctttgacccagattgtgtgaccctgtgccagtgggggggttgagggtgggacggtgtccgtgttgttgctttcccaccctgcagcgcactggactgaagagcttccctcttcctactgcagcatgaactgcaagctcccctcagcccatcttgctccctcttcagcccgctgaggagctttcttgggctgcccccatctctcccaacaaggtgtacatattctgcgtagatgctagaccaaccagcttcccagggttcgtcgctgtgaggcgtaagggacatgaattctagggtctcctttctccttatttattcttgtggctacatcatccctggctgtggatagtgcttttgtgtagcaaatgctccctccttaaggttatagggctccctgagttt

SEQ ID NO: 72450 - DNA, 720 bp, Artificial Sequence
  derived and/or modified sequence
gaggccgctgaggcagtggaggctgaggctatgatggcggccatggcgacggctcgagtgcggatggggccgcgatgcgcccaggcgctctggcgcatgccgtggctgccggtgtttttgtcgttggcggcggcggcggcggcggcagcggcggagcagcaggtcccgctggtgctgtggtcgagtgaccgggacttgtgggctcctgcggccgacactcatgaaggccacatcaccagcgacttgcagctctctacctacttagatcccgccctggagctgggtcccaggaatgtgctgctgttcctgcaggacaagctgagcattgaggatttcacagcatatggcggtgtgtttggaaacaagcaggacagcgccttttctaacctagagaatgccctggacctggccccctcctcactggtgcttcctgccgtcgactggtatgcagtcagcactctgaccacttacctgcaggagaagctcggggccagccccttgcatgtggacctggccaccctgcgggagctgaagctcaatgccagcctccctgctctgctgctcattcgcctgccctacacagccagctctggtctgatggcacccagggaagtcctcacagatgaggtcatcgggcaggtcctgagcacactcaagtccgaagatgtcccatacacagcggccctcacagcggtccgcccttccagggtggcccgtgat

SEQ ID NO: 72451 - protein, 2644 aa, Artificial Sequence
  derived and/or modified sequence
MGEHGLELASMIPALRELGSATPEEYNTVVQKPRQILCQFIDRILTDVNVVAVELVKKTDSQPTSVMLLDFIQHIMKSSPLMFVNVSGSHEAKGSCIEFSNWIITRLLRIAATPSCHLLHKKICEVICSLLFLFKSKSPAIFGVLTKELLQLFEDLVYLHRRNVMGHAVEWPVVMSRFLSQLDEHMGYLQSAPLQLMSMQNLEFIEVTLLMVLTRIIAIVFFRRQELLLWQIGCVLLEYGSPKIKSLAISFLTELFQLGGLPAQPASTFFSSFLELLKHLVEMDTDQLKLYEEPLSKLIKTLFPFEAEAYRNIEPVYLNMLLEKLCVMFEDGVLMRLKSDLLKAALCHLLQYFLKFVPAGYESALQVRKVYVRNICKALLDVLGIEVDAEYLLGPLYAALKMESMEIIEEIQCQTQQENLSSNSDGISPKRRRLSSSLNPSKRAPKQTEEIKHVDMNQKSILWSALKQKAESLQISLEYSGLKNPVIEMLEGIAVVLQLTALCTVHCSHQNMNCRTFKDCQHKSKKKPSVVITWMSLDFYTKVLKSCRSLLESVQKLDLEATIDKVVKIYDALIYMQVNSSFEDHILEDLCGMLSLPWIYSHSDDGCLKLTTFAANLLTLSCRISDSYSPQAQSRCVFLLTLFPRRIFLEWRTAVYNWALQSSHEVIRASCVSGFFILLQQQNSCNRVPKILIDKVKDDSDIVKKEFASILGQLVCTLHGMFYLTSSLTEPFSEHGHVDLFCRNLKATSQHECSSSQLKASVCKPFLFLLKKKIPSPVKLAFIDNLHHLCKHLDFREDETDVKAVLGTLLNLMEDPDKDVRVAFSGNIKHILESLDSEDGFIKELFVLRMKEAYTHAQISRNNELKDTLILTTGDIGRAAKGDLVPFALLHLLHCLLSKSASVSGAAYTEIRALVAAKSVKLQSFFSQYKKPICQFLVESLHSSQMTALPNTPCQNADVRKQDVAHQREMALNTLSEIANVFDFPDLNRFLTRTLQVLLPDLAAKASPAASALIRTLGKQLNVNRREILINNFKYIFSHLVCSCSKDELERALHYLKNETEIELGSLLRQDFQGLHNELLLRIGEHYQQVFNGLSILASFASSDDPYQGPRDIISPELMADYLQPKLLGILAFFNMQLLSSSVGIEDKKMALNSLMSLMKLMGPKHVSSVRVKMMTTLRTGLRFKDDFPELCCRAWDCFVRCLDHACLGSLLSHVIVALLPLIHIQPKETAAIFHYLIIENRDAVQDFLHEIYFLPDHPELKKIKAVLQEYRKETSESTDLQTTLQLSMKAIQHENVDVRIHALTSLKETLYKNQEKLIKYATDSETVEPIISQLVTVLLKGCQDANSQARLLCGECLGELGAIDPGRLDFSTTETQGKDFTFVTGVEDSSFAYGLLMELTRAYLAYADNSRAQDSAAYAIQELLSIYDCREMETNGPGHQLWRRFPEHVREILEPHLNTRYKSSQKSTDWSGVKKPIYLSKLGSNFAEWSASWAGYLITKVRHDLASKIFTCCSIMMKHDFKVTIYLLPHILVYVLLGCNQEDQQEVYAEIMAVLKHDDQHTINTQDIASDLCQLSTQTVFSMLDHLTQWARHKFQALKAEKCPHSKSNRNKVDSMVSTVDYEDYQSVTRFLDLIPQDTLAVASFRSKAYTRAVMHFESFITEKKQNIQEHLGFLQKLYAAMHEPDGVAGVSAIRKAEPSLKEQILEHESLGLLRDATACYDRAIQLEPDQIIHYHGVVKSMLGLGQLSTVITQVNGVHANRSEWTDELNTYRVEAAWKLSQWDLVENYLAADGKSTTWSVRLGQLLLSAKKRDITAFYDSLKLVRAEQIVPLSAASFERGSYQRGYEYIVRLHMLCELEHSIKPLFQHSPGDSSQEDSLNWVARLEMTQNSYRAKEPILALRRALLSLNKRPDYNEMVGECWLQSARVARKAGHHQTAYNALLNAGESRLAELYVERAKWLWSKGDVHQALIVLQKGVELCFPENETPPEGKNMLIHGRAMLLVGRFMEETANFESNAIMKKYKDVTACLPEWEDGHFYLAKYYDKLMPMVTDNKMEKQGDLIRYIVLHFGRSLQYGNQFIYQSMPRMLTLWLDYGTKAYEWEKAGRSDRVQMRNDLGKINKVITEHTNYLAPYQFLTAFSQLISRICHSHDEVFVVLMEIIAKVFLAYPQQAMWMMTAVSKSSYPMRVNRCKEILNKAIHMKKSLEKFVGDATRLTDKLLELCNKPVDGSSSTLSMSTHFKMLKKLVEEATFSEILIPLQSVMIPTLPSILGTHANHASHEPFPGHWAYIAGFDDMVEILASLQKPKKISLKGSDGKFYIMMCKPKDDLRKDCRLMEFNSLINKCLRKDAESRRRELHIRTYAVIPLNDECGIIEWVNNTAGLRPILTKLYKEKGVYMTGKELRQCMLPKSAALSEKLKVFREFLLPRHPPIFHEWFLRTFPDPTSWYSSRSAYCRSTAVMSMVGYILGLGDRHGENILFDSLTGECVHVDFNCLFNKGETFEVPEIVPFRLTHNMVNGMGPMGTEGLFRRACEVTMRLMRDQREPLMSVLKTFLHDPLVEWSKPVKGHSKAPLNETGEVVNEKAKTHVLDIEQRLQGVIKTRNRVTGLPLSIEGHVHYLIQEATDENLLCQMYLGWTPYM

SEQ ID NO: 72452 - DNA, 7935 bp, Artificial Sequence
  derived and/or modified sequence
atgggtgagcacgggctcgagctggctagtatgattcccgccttgcgtgagctggggtcagccaccccagaagagtacaacaccgtcgtgcagaaaccccggcagattctctgccaattcattgaccggatactcactgatgtgaacgtggtcgctgtcgagttagtgaagaaaacagattctcaacccacatcagtcatgctgctggactttattcagcacatcatgaagagctcccccttgatgtttgtgaatgtcagtgggtctcatgaggccaaagggtcctgtatcgaattcagtaactggatcattacaaggctgctgcgcatcgccgcaacaccttcttgtcacctgttacacaagaagatatgtgaagtgatctgtagcctcctcttcctgtttaaaagcaagtctccggcaatttttggcgtgctcaccaaagaactgcttcagctctttgaggaccttgtctatctccacagacggaacgttatggggcacgcagtggagtggccagtggttatgagtcggttcctctctcagctagatgagcacatgggctacttgcaatccgcaccattacagctcatgtctatgcaaaacttggaattcatcgaggtcaccctcttaatggttctcacacgcataatcgcgattgtgtttttccggcgccaggaattgctgttgtggcagatagggtgtgtgcttttggaatacggaagccccaagatcaagtccctggctatttctttccttacagagttattccagctgggcggtttgccggctcagcccgctagcacctttttctcctccttcctggaattactgaagcaccttgtggagatggacaccgaccaattgaaactctacgaggagccactgagcaaactcattaagaccctatttccattcgaagcggaagcatatcgtaatatcgaaccggtgtacctaaacatgttactcgaaaaattgtgtgttatgtttgaagatggcgtcctgatgcgcttgaagagcgatctgctgaaggccgctttgtgtcacctgctgcaatacttcctaaaattcgtacccgccgggtatgagtctgctctgcaggttcgaaaggtgtatgtgcgcaacatttgcaaggctctgctagatgtccttggcatcgaggtggacgcagagtacctgttgggacccctatacgccgccctcaaaatggagtcaatggaaattatagaagagatccaatgtcagacacagcaagaaaatctgagcagcaactcagacggtatatcccctaaaaggcgtaggctttccagctccctgaatccaagtaagcgcgccccaaagcagaccgaagagatcaagcatgtggacatgaaccagaaaagcatactttggtccgccctgaagcagaaggctgagagcctgcagatctctctcgaatactccgggctgaaaaatcccgtgattgagatgttagaaggtattgccgtagtactgcaactcaccgctctttgcaccgtacattgttcccatcagaacatgaattgccgcacctttaaagactgtcaacacaaatctaaaaaaaagccctcagtggtaatcacctggatgtcacttgatttttataccaaagttctcaagtcctgtaggtccctgctggaatctgttcagaagctggatctggaggccaccatcgataaggtggttaagatctatgacgctctgatctatatgcaggtgaatagctcattcgaggaccacatcctcgaagatctctgtggtatgctgtctttgccttggatttactctcactctgacgacggctgccttaagctgaccactttcgccgctaacctgctaacactcagctgcaggattagcgacagctattcgccccaggctcagtcacggtgcgtcttcctgctcactctgttccctcgaaggatttttctggagtggagaactgcagtctacaattgggctctccagagttcacacgaagttatccgagctagctgtgtatccggattctttattctgctgcagcagcagaattcctgtaaccgggtgcccaagatcctgatcgataaggtcaaggacgatagtgatatagtgaagaaagaatttgcatctatcctgggacaattagtgtgcaccttacacggaatgttctatctaacgtctagccttacagagccgttttccgagcatggacatgtggatttattctgtagaaacctgaaggcaaccagccaacatgaatgctcttcaagccagctgaaagcctccgtatgcaagccgtttctgtttttgctgaaaaagaagatcccttcccccgtgaagcttgcgttcatcgataacctacatcatttgtgtaaacacctagattttcgggaggacgagaccgacgtgaaagccgtgctggggacactcctgaatctaatggaagacccggataaagacgtgagagtcgctttctccggtaacatcaagcacattttggagagcctggactccgaagatgggtttatcaaagaactttttgtgcttaggatgaaggaggcctacacacatgcccagatttctaggaacaatgagctgaaagacacactaattttgactacgggcgacatcggccgggccgctaaaggtgaccttgtaccattcgcgctccttcacctgctgcactgcctactttctaaaagtgcctccgtcagtggcgcagcctacactgagatcagagcgttagtggccgcgaaaagtgtaaagctccagtcgttttttagtcagtacaagaagcccatatgccagtttttggtggagagcctgcattcatcccagatgacagctctgcccaataccccctgtcaaaatgcagatgtaaggaaacaggacgtggctcatcagcgagaaatggctctgaacactctatctgaaattgccaatgtgtttgactttcctgacctcaatagattcctaaccaggacgttgcaggtgctcctgcccgaccttgctgccaaagcctctcctgctgcatcagcattaataagaacacttggtaaacagttgaacgtgaatcgcagagagatcctaattaataattttaagtacatctttagtcacctggtgtgttcctgctccaaggacgagcttgagcgcgccctgcattatctgaagaacgaaactgaaatcgagctggggagcctcttgcggcaggacttccaaggtctacacaacgagctcctgctcagaattggcgagcattaccagcaggtgttcaatgggctgagcatactggccagcttcgccagttctgatgacccataccaggggccaagagacattataagccccgagctgatggccgactatctccaacccaagctcttgggaatcttagctttctttaatatgcagctgctaagttcttccgtgggcattgaggataagaaaatggctctaaacagcctcatgtccttaatgaagttgatggggcccaagcacgtgagctctgttcgagtgaagatgatgacaacccttagaacagggttgagatttaaggatgacttccccgaattgtgttgtagggcctgggactgctttgtcagatgtttagaccatgcgtgcctcggttctcttcttagtcatgtcatcgtggcattgttgcctctgattcacattcagcctaaggagaccgcggctatcttccattacttaattattgagaatagggatgccgttcaggactttctacatgaaatatattttctccctgatcacccagagttgaaaaagattaaagcagtactgcaggagtatcgcaaggagacttccgagagtacggacctgcagactaccctccaactgtcaatgaaggccattcaacatgagaatgttgacgtcagaatacacgcactgacttcacttaaagagacattgtacaaaaatcaggagaaactgataaagtatgcgacggactcagaaacggtcgaacctattattagccaattagtgactgtactcctgaagggctgccaggacgcaaattctcaggccagactcctttgcggcgaatgtttgggagagcttggggccatcgatccaggtagattggatttcagtactacagagacccaggggaaggatttcaccttcgtaacgggcgtggaggactccagctttgcctacggcttattgatggagcttactcgggcatacttggcctacgccgacaattcacgcgctcaggattcagcagcatacgctattcaggagctgctgagcatttatgattgtagggaaatggagactaacggcccaggccaccagctttggaggcggtttccagagcatgtgcgcgaaatcctggaacctcacctgaacacccgctacaaatcctcccagaagagcacagattggtctggtgtgaaaaagccaatttacctgtccaagctgggaagcaactttgcagagtggtcagccagctgggcaggctatctcatcaccaaggtcaggcacgatctcgcgtccaaaatctttacttgctgttccattatgatgaaacacgatttcaaagtgacgatttacctgttgccccatattctcgtctatgtactcctcggctgtaatcaagaagatcagcaagaagtttacgctgaaatcatggcagtgcttaaacatgacgatcagcacacgatcaatacacaggatattgcgtccgatctttgtcagttatccacccagacagttttctccatgctcgatcacttgacacagtgggctcgccataagttccaggccctcaaggctgaaaagtgccctcacagcaaatcgaaccggaataaagtggactcaatggtttccactgtggactatgaggactatcaatctgtaacacggtttcttgacctgatccctcaggataccctggcagtggcctcgtttcgtagtaaagcatacactagggcagtaatgcacttcgagagctttattacagaaaagaaacagaacatacaggaacatctcggcttcctccagaagctgtacgctgctatgcacgagccggacggagtggcaggggtctctgctatccgcaaagcagagccatcactgaaggaacagatattagaacacgagtcattgggattattaagagatgccacggcgtgttacgacagagcgattcagttggaacctgatcagatcattcattaccacggcgtggtgaagtcaatgttgggcttgggtcagctttctactgtgatcacacaagttaacggcgttcatgctaaccgcagcgagtggacagacgagttaaatacataccgcgtcgaagctgcttggaagctctcacagtgggatctcgttgagaattatctagccgcagatgggaagagcacaacttggtccgtcagattagggcagttgctactctctgccaagaagcgcgatataaccgctttctatgacagcctgaagctggtgcgagccgagcagattgtgcccctctcagccgcgtcgttcgaacggggaagctaccagaggggttatgagtacatcgtaaggctacacatgctgtgtgaactcgaacacagtataaaacccctatttcagcacagccccggggatagctcccaggaggactcactcaactgggttgcgcgcttagagatgactcagaattcataccgcgctaaagagcctattctcgccctgcgcagggctcttctgtctttaaataaaagacctgattataatgagatggtgggggagtgttggctgcaatcagccagggtcgcacggaaggctgggcatcaccaaacggcatacaatgctttgcttaatgctggggagtcacgtctggcggagctgtatgtcgaacgggctaagtggttatggagtaagggcgacgtgcatcaggctctcatcgtgctccagaaaggcgtggagctctgtttccctgagaacgaaacacccccggaagggaagaacatgttgatccacgggagggccatgctgctggtggggcggtttatggaggagacggccaatttcgaatctaacgcaattatgaagaagtacaaagatgtgacagcgtgcctccctgaatgggaggacggccatttttatcttgccaaatactatgataagctgatgcctatggtcacagacaataagatggaaaagcagggggatctcatcagatatatcgtgcttcacttcggaaggtcccttcagtatgggaaccagttcatctaccagtcaatgcctcgcatgctcactctttggctcgattatggtacaaaggcctatgagtgggaaaaggccgggaggtctgaccgcgtccagatgcggaatgacttagggaagattaacaaagtgataaccgagcatactaactacctcgcaccttatcagtttctgaccgccttctcgcaactgatttcacgaatctgtcactcacacgacgaggtatttgtggttctgatggaaatcatcgccaaggtcttcctggcttatcctcagcaggccatgtggatgatgaccgcagtgagcaaaagctcttaccccatgcgcgtgaacaggtgtaaggagatcctgaataaagctatacacatgaagaaatctctggagaaatttgtaggtgatgctactcgcctgaccgacaaactcctcgagttatgcaataagcctgtggatggctccagcagtacccttagtatgtcaacccatttcaagatgctgaaaaaacttgtagaagaggctacctttagcgaaattcttatccctttacaaagcgtaatgatacctacactgccttccatcctgggtacccatgcaaaccatgcttcacatgaacctttcccaggacactgggcatatatcgcagggtttgacgatatggtcgagatactcgctagtcttcagaagccaaaaaagatttccctcaaaggctctgacggaaagttctatatcatgatgtgcaagcctaaagacgatctgcgcaaagattgcagactgatggaatttaattcactgatcaacaagtgcctgcgcaaggacgccgagagccgtcgtagagaactgcacatccggacttacgccgtcatcccccttaacgatgagtgcggcatcatcgaatgggtcaacaatacggccgggttaagacctattttgactaagctctataaagagaaaggagtgtacatgacaggcaaagagctgcgacagtgtatgctccccaagagtgctgccctgagtgaaaaacttaaggtttttagggagtttctactgccaaggcacccaccgatattccacgagtggtttttgcgcaccttccccgaccccacttcttggtactcatctcggtctgcatactgccggagcaccgcggtgatgtccatggttggttatatcttgggattaggggaccggcatggcgagaatattctattcgactcactgacaggcgagtgcgttcacgtggactttaattgtttattcaataagggcgagacatttgaggtacctgagatcgtcccatttaggctcactcataacatggtaaacggtatgggacctatggggaccgagggcctctttcggagggcttgcgaggttactatgcgcctgatgcgtgaccagagggaacccctgatgagtgtgctcaagaccttcctgcacgaccccctggtggagtggtcaaaacctgtgaagggacactccaaagctcccctgaacgaaacgggagaggtcgttaacgagaaggccaagacgcacgtcctcgacattgaacaaagactgcagggtgtcattaagacacgcaatcgggttactggacttcctctgtccatagagggacatgtgcactacctcatccaggaagctacagacgaaaatctgttgtgccagatgtacctcggttggactccctacatgtag

SEQ ID NO: 72453 - DNA, 7935 bp, Artificial Sequence
  derived and/or modified sequence
atgggagagcacggcctggagctggcctccatgatcccagccctgcgggagctgggcagcgccaccccagaggagtacaacacagtggtgcagaagccccggcagatcctgtgccagttcatcgaccgcatcctgacagatgtgaatgtggtggccgtggagctggtgaagaagacagacagccagcccacctctgtgatgctgctggacttcatccagcacatcatgaagagcagccccctgatgtttgtgaatgtgtctggcagccatgaggccaagggcagctgcatcgagttcagcaactggatcatcacccggctgctgagaattgctgccacccccagctgccacctgctgcacaagaagatctgtgaggtgatctgcagcctgctcttcctgttcaagagcaagagccctgccatcttcggcgtgctgaccaaggagctgctgcagctgtttgaggacctggtgtacctgcacagaagaaatgtgatgggccatgctgtggagtggcctgtggtgatgagccgcttcctgagccagctggatgagcacatgggctacctgcagagcgcccccctgcagctgatgtccatgcagaacctggagttcatcgaggtgaccctgctgatggtgctgacccgcatcatcgccatcgtgttcttccggcggcaggagctgctgctgtggcagatcggctgtgtgctgctggagtatggcagccccaagatcaagagcctggccatctccttcctgacagagctgttccagctgggcggcctgcctgcccagcctgccagcaccttcttcagcagcttcctggagctgctgaagcacctggtggagatggacacagaccagctgaagctgtatgaggagcccctgagcaagctgatcaagaccctcttcccctttgaagctgaggcctacagaaatattgagcctgtgtacctgaacatgctgctggagaagctgtgtgtgatgtttgaagatggagtgctgatgaggctgaagagtgacctgctgaaggccgccctgtgccacctgctgcagtacttcctgaagtttgtgcctgctggctatgaaagtgccctgcaggtgaggaaggtgtatgtgaggaacatctgcaaggccctgctggatgtgctgggcatcgaggtggatgctgagtacctgctgggccccctgtatgctgccctgaagatggagagcatggagatcatcgaggagatccagtgccagacccagcaggagaacctgagcagcaacagtgatggcatcagccccaagagaagaaggctgagcagcagcctgaaccccagcaagagggcccccaagcagacagaggagatcaagcacgtggacatgaaccagaagagcatcctgtggagcgccctgaagcagaaggccgagagcctgcagatcagcctggagtacagcggcctgaagaaccctgtgattgagatgctggagggcattgctgtggtgctgcagctgacagccctgtgcaccgtgcactgcagccaccagaacatgaactgcaggaccttcaaggactgccagcacaagagcaagaagaagcccagcgtggtgatcacctggatgagcctggacttctacaccaaggtgctgaagagctgccgcagcctgctggagagcgtgcagaagctggacctggaggccaccatcgacaaggtggtgaagatctatgatgccctgatctacatgcaggtgaacagcagctttgaggaccacatcctggaggacctgtgtggcatgctgagcctgccctggatctacagccacagtgatgatggctgcctgaagctgaccacctttgctgccaacctgctgaccctgagctgccgcatcagtgacagctacagcccccaggcccagagccgctgtgtgttcctgctgaccctcttcccccggcgcatcttcctggagtggaggacagctgtgtacaactgggccctgcagagcagccatgaggtgatccgggccagctgtgtgtctggcttcttcatcctgctgcagcagcagaacagctgcaacagagtgcccaagatcctgattgacaaggtgaaggatgacagcgacatcgtgaagaaggagtttgccagcatcctgggccagctggtgtgcaccctgcacggcatgttctacctgaccagcagcctgacagagcccttcagcgagcacggccacgtggacctcttctgcaggaacctgaaggccaccagccagcacgagtgcagcagcagccagctgaaggcctctgtgtgcaagcccttcctgttcctgctgaagaagaagatccccagccctgtgaagctggccttcatcgacaacctgcaccacctgtgcaagcacctggacttcagagaagatgaaacagatgtgaaggctgtgctgggcaccctgctgaacctgatggaggaccctgacaaggatgtgcgggtggccttcagcggcaacatcaagcacatcctggagagcctggacagtgaagatggcttcatcaaggagctgtttgtgctgaggatgaaggaggcctacacccacgcccagatcagcagaaataatgagctgaaggacaccctcatcctgaccactggagacatcggccgggccgccaagggggacctggtgccctttgccctgctgcacctgctgcactgcctgctgagcaagagcgcctctgtgtctggggccgcctacacagagatccgggccctggtggccgccaagtctgtgaagctgcagagcttcttcagccagtacaagaagcccatctgccagttcctggtggagagcctgcacagcagccagatgacagccctgcccaacaccccctgccagaatgctgatgtgaggaagcaggatgtggcccaccagcgggagatggccctgaacaccctgtctgagatcgccaacgtgtttgacttcccagacctgaaccgcttcctgaccaggaccctgcaggtgctgctgcctgacctggccgccaaggccagccctgctgccagcgccctgatccgcaccctgggcaagcagctgaatgtgaacagaagagagatcctgatcaacaacttcaagtacatcttcagccacctggtgtgcagctgcagcaaggatgagctggagcgggccctgcactacctgaagaatgaaacagaaattgagctgggcagcctgctgcggcaggacttccagggcctgcacaatgagctgctgctgagaattggagagcactaccagcaggtgttcaacggcctgagcatcctggccagctttgccagcagtgatgacccctaccagggcccccgggacatcatcagccctgagctgatggctgactacctgcagcccaagctgctgggcatcctggccttcttcaacatgcagctgctgagcagctctgtgggcatcgaggacaagaagatggccctgaacagcctgatgagcctgatgaagctgatgggccccaagcacgtgtcctctgtgcgggtgaagatgatgaccaccctgaggacaggcctgcgcttcaaggatgacttccctgagctgtgctgccgggcctgggactgctttgtgcgctgcctggaccacgcctgcctgggcagcctgctgagccacgtgattgtggccctgctgcccctcatccacatccagcccaaggagacagctgccatcttccactacctgatcatcgagaacagagatgctgtgcaggacttcctgcacgagatctacttcctgcctgaccaccctgagctgaagaagatcaaggctgtgctgcaggagtacaggaaggagaccagcgagagcacagacctgcagaccaccctgcagctgtccatgaaggccatccagcatgaaaatgtggatgtgcgcatccacgccctgaccagcctgaaggagaccctgtacaagaaccaggagaagctgatcaagtatgccacagattctgaaacagtggagcccatcatcagccagctggtgacagtgctgctgaagggctgccaggatgccaacagccaggcccggctgctgtgtggggagtgcctgggggagctgggcgccatcgaccccggccgcctggacttcagcaccacagagacccagggcaaggacttcacctttgtgactggagtggaggacagcagctttgcctacggcctgctgatggagctgacccgggcctacctggcctatgctgacaacagccgggcccaggacagcgctgcctatgccatccaggagctgctgagcatctatgactgccgggagatggagaccaacggccctggccaccagctgtggaggcgcttccctgagcacgtgcgggagatcctggagccccacctgaacacccgctacaagagcagccagaagagcacagactggagcggcgtgaagaagcccatctacctgagcaagctgggcagcaactttgctgagtggagcgcctcctgggccggctacctgatcaccaaggtgagacatgacctggccagcaagatcttcacctgctgcagcatcatgatgaagcatgacttcaaggtgaccatctacctgctgccccacatcctggtgtatgtgctgctgggctgcaaccaggaggaccagcaggaggtgtatgcagagatcatggctgtgctgaagcatgatgaccagcacaccatcaacacccaggacatcgccagtgacctgtgccagctgagcacccagaccgtcttctccatgctggaccacctgacccagtgggcccggcacaagttccaggccctgaaggccgagaagtgcccccacagcaagagcaacagaaacaaggtggacagcatggtgtccacagtggactatgaggactaccagagcgtgacccgcttcctggacctgatcccccaggacaccctggccgtggccagcttccgcagcaaggcctacaccagggctgtgatgcactttgagagcttcatcacagagaagaagcagaacatccaggagcacctgggcttcctgcagaagctgtatgctgccatgcatgagccagatggagtggccggcgtgtctgccatcaggaaggccgagcccagcctgaaggagcagatcctggagcacgagagcctgggcctgctgagagatgccacagcctgctatgaccgggccatccagctggagccagaccagatcatccactaccatggagtggtgaagtccatgctgggcctgggccagctgagcaccgtcatcacccaggtgaatggagtgcacgccaacagaagtgagtggacagatgagctgaacacctacagagtggaggccgcctggaagctgagccagtgggacctggtggagaactacctggccgcagatggcaagagcaccacctggagcgtgcggctgggccagctgctgctgagcgccaagaagagggacatcacagccttctatgacagcctgaagctggtgcgggcagagcagatcgtgcccctgtctgctgccagctttgagcggggcagctaccagaggggctatgagtacatcgtgcggctgcacatgctgtgtgagctggagcacagcatcaagcccctcttccagcacagccctggggacagcagccaggaggacagcctgaactgggtggcccggctggagatgacccagaacagctaccgggccaaggagcccatcctggccctgcggcgggccctgctgagcctgaacaagaggccagactacaatgagatggtgggggagtgctggctgcagagcgcccgggtggccaggaaggccggccaccaccagacagcctacaatgccctgctgaatgctggggagagccggctggccgagctgtatgtggagcgggccaagtggctgtggagcaaaggagatgtgcaccaggccctgattgtgctgcagaagggcgtggagctgtgcttcccagaaaatgagaccccacctgagggcaagaacatgctgattcatggccgggccatgctgctggtgggccgcttcatggaggagacagccaactttgagagcaatgccatcatgaagaagtacaaggatgtgacagcctgcctgcctgagtgggaggatggccacttctacctggccaagtactatgacaagctgatgcccatggtgacagacaacaagatggagaagcagggcgacctgatccgctacatcgtgctgcacttcggccgcagcctgcagtatggcaaccagttcatctaccagagcatgcccaggatgctgaccctgtggctggactatggcaccaaggcctatgagtgggagaaggccggccgcagtgacagagtgcagatgagaaatgacctgggcaagatcaacaaggtgatcacagagcacaccaactacctggccccctaccagttcctgacagccttcagccagctgatcagccgcatctgccacagccatgatgaggtgtttgtggtgctgatggagatcatcgccaaggtgttcctggcctacccccagcaggccatgtggatgatgacagctgtgtccaagagcagctaccccatgagggtgaaccgctgcaaggagatcctgaacaaggccatccacatgaagaagagcctggagaagtttgtgggagatgccacccggctgacagacaagctgctggagctgtgcaacaagcctgtggatggcagcagcagcaccctgtccatgagcacccacttcaagatgctgaagaagctggtggaggaggccaccttcagcgagatcctgatccccctgcagagcgtgatgatccccaccctgcccagcatcctgggcacccacgccaaccacgccagccatgagcccttccctggccactgggcctacatcgccggctttgatgacatggtggagatcctggccagcctgcagaagcccaagaagatcagcctgaagggcagtgatggcaagttctacatcatgatgtgcaagcccaaggatgacctgaggaaggactgccgcctgatggagttcaacagcctcatcaacaagtgcctgaggaaggatgctgagagcagaagaagagagctgcacatccgcacctacgccgtcatccccctgaatgatgaatgtggcatcatcgagtgggtgaacaacacagctggcctgcggcccatcctgaccaagctgtacaaggagaagggcgtgtacatgaccgggaaggagctgcggcagtgcatgctgcccaagtctgctgccctgtctgagaagctgaaggtgttccgggagttcctgctgcccaggcacccccccatcttccacgagtggttcctgcggaccttcccagaccccacctcctggtacagcagccgcagcgcctactgccgcagcacagctgtgatgtccatggtgggctacatcctgggcctgggggacagacatggagagaacatcctgtttgacagcctgactggagaatgtgtgcacgtggacttcaactgcctcttcaacaagggggagacctttgaggtgcctgagatcgtgcccttccggctgacccacaacatggtgaatggcatgggccccatgggcacagagggcctcttcagaagagcctgtgaggtgaccatgaggctgatgagggaccagcgggagcccctgatgtctgtgctgaagaccttcctgcatgaccccctggtggagtggagcaagcctgtgaagggccacagcaaggcccccctgaatgagaccggggaggtggtgaatgagaaggccaagacccacgtgctggacatcgagcagaggctgcagggcgtcatcaagaccaggaacagagtgacaggcctgcccctgagcattgagggccacgtgcactacctgatccaggaggccacagatgagaacctgctgtgccagatgtacctgggctggaccccctacatgtag

SEQ ID NO: 72454 - DNA, 7935 bp, Artificial Sequence
  derived and/or modified sequence
atgggcgagcacggcctggagctggccagcatgatccccgccctgcgggagttaggctccgcaacaccagaggagtacaatacggtggtccagaaacccaggcagatcctttgtcagttcatcgaccgcattctgaccgatgtgaatgtcgtcgctgtggagctggtgaagaagacagattctcagccgacgtccgtcatgctgctggatttcattcagcacattatgaaatcctcaccgttaatgttcgtgaacgtcagcggatcacacgaggctaagggctcttgcattgagtttagcaattggatcataactcgcttgctcaggatagctgccaccccctcctgccatctgctgcataagaagatctgcgaggtcatttgcagcttgctgtttctgttcaagtcaaagtctcctgcaattttcggcgtgttaaccaaagagcttttgcaactgtttgaggacctggtgtacttgcatcgcagaaacgttatgggtcacgccgtcgaatggccagtagtgatgagccgatttctgtcccagctagatgagcatatggggtatctgcagtcagcccctctgcagctgatgagcatgcagaacttggaatttatcgaagtgaccctgctaatggtgctcacgcggattatcgccatagttttctttagaaggcaggagttgctattgtggcaaattggatgcgtactgttagagtatggctcgccgaagatcaaaagcctcgccatcagttttcttacagaactgttccaactcggcgggctcccagcacagcccgcttctacattcttcagctcgtttctagagctcttaaagcatttagtggaaatggacaccgaccagctcaagctgtacgaggagccactctccaaactgataaagactttatttccttttgaggctgaagcctatcgaaacatcgagcccgtgtatctgaacatgcttctagagaaactttgtgtaatgtttgaggacggagtgttaatgagactaaaatctgacttacttaaggcagccctctgccacctcctccagtattttctcaagttcgtacccgccggctatgaaagtgctctccaggtacgtaaagtctatgtgcggaatatctgcaaggccctcctggatgtgttggggatcgaggttgacgccgaatatctcctggggccactgtacgctgctctgaagatggagtccatggaaattattgaagaaatacaatgccagacccaacaggaaaacctctcatcaaattccgacggcatctcaccaaagaggcggcgcctttcttcctccctaaacccaagtaagcgtgcacctaaacaaacagaagagataaagcacgtagacatgaatcagaagtccatcctgtggagcgctcttaaacaaaaggcagagagcctgcaaatatcactggaatactccgggctcaagaaccctgtgatcgaaatgctggaaggaatagcggtcgtccttcaactgacagctctgtgtacagtgcactgctctcatcagaatatgaactgtaggaccttcaaggactgtcagcacaaaagtaaaaagaaaccctctgtggtgatcacatggatgtccctcgacttctacacgaaggtactcaaatcctgcagatccctcctagaatctgttcagaagctggacctggaggccactatcgacaaagtagttaaaatctatgatgctctcatctacatgcaggttaactcaagcttcgaagatcacatactcgaggatctgtgtggaatgcttagcctgccctggatttactctcactctgatgacggctgcttgaaactcacaacctttgctgctaacctgctgacattaagctgtagaatctctgattcatattctcctcaggcccaaagcaggtgcgtcttccttttgactctttttccgcggcggatcttccttgagtggaggaccgccgtgtataactgggcactccagagctcacacgaagtgatcagggcctcttgtgtatctgggttttttatactgttacagcagcagaactcctgcaacagggttcccaagatactgattgataaggtcaaggatgactctgatattgtcaagaaagaattcgcctcaattcttggtcagttagtctgcacgttgcatgggatgttttacctcacaagctcccttaccgagccttttagcgagcacgggcatgtggacttgttctgtcgcaacctcaaagccacaagccagcatgaatgtagttctagccagctgaaagcctctgtctgtaaacccttcctgttcttgctgaagaagaagatcccctcgccagttaaactggcctttattgataacctgcaccacttgtgcaagcatctggactttagagaggacgagactgatgtgaaagccgtgcttgggaccctgctgaacctgatggaggaccctgataaggatgtgagagtggctttctccggaaacattaagcacatcctggagtccttagactctgaagatggattcattaaggagcttttcgtcctgcggatgaaggaagcttacactcatgctcaaatcagtagaaataatgaactaaaagacactctgatcttgactactggcgatatagggagagccgcaaaaggagacttggtcccctttgcgctcctgcaccttctgcattgtctcttgtccaaaagtgcctccgtgtctggcgctgcctacactgaaattagggcactagtggctgccaagtcagtcaaactgcagagctttttctcccagtacaaaaagcctatctgccagtttctcgttgaatctctccactcaagtcagatgacggcactcccgaacaccccctgccagaatgccgacgtacgaaaacaggacgtggctcatcagagagagatggcactcaataccctctctgagattgcgaacgtattcgacttcccggatcttaaccgttttttgaccagaactctgcaggtcctgctgcctgacttggctgcaaaagccagcccagctgctagcgcactcatccgcactttgggaaagcaactcaacgtcaatcgtcgcgagatactcattaacaattttaaatatattttctctcatttagtttgttcatgcagcaaagacgagctagaaagagctctgcactacctaaagaacgagacggagatcgaattggggtcacttcttcggcaagatttccaaggcctgcataatgaattactgctgcgcatcggcgaacactaccagcaggttttcaacggtctgtccattctggcctccttcgccagttcggacgatccataccagggccctcgcgacattatttcccctgagctgatggctgactacctgcagcccaaactcctggggatattggctttctttaatatgcagctcctgtcatccagcgtgggtattgaggataaaaaaatggcattgaattcactcatgtccctcatgaagctcatggggccgaaacacgtctccagtgtgcgtgtgaaaatgatgactactttgcgtacgggcctgcggtttaaagacgattttcccgaactttgctgcagagcttgggattgcttcgtgaggtgcttagaccatgcttgcctgggatcccttctctctcacgtcatcgtggcattgctgccactgatccatatccagccaaaggaaacagcagctatctttcattacctaatcatagagaatcgcgacgctgtccaggactttctgcatgagatttactttctgcccgaccacccggagttgaagaagattaaagctgtcctccaggagtatcgaaaggagacctcggaatcaactgacctgcaaactacactgcagctaagcatgaaagccattcagcatgaaaatgtggatgttcgcatccatgcattaacctctctgaaagagactttgtataaaaaccaagaaaaactgattaaatacgcaacagattcggaaacagtggaacccatcatcagccagctggtgaccgttttactcaaaggatgccaggacgccaactcacaggcgcgtttgttgtgcggagagtgtctgggagaactgggcgccattgatcccgggcgtttggactttagcacaaccgaaacacagggaaaggacttcacttttgtgacaggcgtagaagattccagtttcgcgtatgggttgcttatggagctcacgcgagcatatctcgcctatgcagataatagccgtgcccaggatagcgccgcctacgccatccaagaactgctgtctatatacgattgccgtgagatggaaaccaatggcccaggccatcagctgtggaggcgtttcccagagcacgtgcgcgagatacttgagccgcacttgaatacccggtacaaatccagtcaaaagagtactgactggagcggggtgaagaaacctatttacctctctaaattaggaagcaattttgccgagtggtctgctagctgggcaggctatttaattactaaagtcagacacgatctcgccagtaagatctttacctgctgttctatcatgatgaagcacgacttcaaagtcactatatacctactgccgcatatcctggtgtatgtactgctcggttgcaaccaggaggaccagcaggaagtctacgcagaaattatggcagtgctgaaacatgacgaccagcataccatcaatacccaggatattgccagtgatctgtgtcaactctccactcaaaccgtcttttccatgctggaccacttgacacaatgggctagacacaaattccaagctctgaaagcagagaagtgccctcatagtaagtctaatcgtaacaaagttgactccatggtctccaccgtggattatgaggactatcaatctgtgactagatttctggacctgattccacaggatactttagcagtggcttcttttcgctcaaaagcatataccagggcggtcatgcactttgagtctttcatcactgagaagaagcagaacatccaagagcatctggggttcctgcagaagctttacgctgccatgcatgaacccgacggagtggcaggggtatcagccattcgaaaagctgagccatcactcaaggaacagattctcgagcacgagtcattgggcctgttgagggatgccaccgcctgctacgaccgggcaatccagctagaaccagatcaaatcatccactatcacggggtggtcaagtctatgcttggtttgggtcagctgagcaccgtcatcacgcaggtaaatggtgtacatgccaataggagcgagtggaccgatgaactgaacacgtatagagtggaggcagcctggaagttgagtcagtgggatctggtggagaattacctcgccgctgacgggaaatcgacaacatggtcagtcagactcggacagctgctgttaagcgcaaagaagcgcgatataacagcattctacgatagtttgaagcttgttcgcgccgagcagattgttccgctgtctgcggcaagtttcgagaggggaagttatcaacgcggctatgagtacatcgtgaggctccacatgctgtgcgagctggagcactcgattaagccactcttccaacattcccctggggacagttcccaagaggattccctgaactgggtggcacggctcgagatgactcagaactcttatagggctaaagaacccatcctagctctcaggcgtgcattgttgtccctgaataagaggcccgattataacgagatggtgggtgaatgttggctgcagtctgcccgggtggcaaggaaggctggacatcaccagactgcgtataatgccctgttaaatgcgggagaatcaaggcttgccgaactgtatgtagagcgcgccaagtggctgtggtcaaaaggagatgtccaccaggctttgattgtgctccagaagggcgtcgagttatgttttcccgaaaacgagactcctcctgaagggaagaacatgctgatccatgggagagccatgctccttgtggggaggttcatggaggaaaccgccaacttcgaatccaacgccatcatgaaaaagtacaaagacgtgaccgcctgtctgcccgagtgggaggacgggcacttttacctggcaaagtattacgataagcttatgccaatggtgaccgacaacaagatggaaaaacaaggcgatctcatcaggtacatagttctgcattttggacgctcactccagtacgggaatcaatttatttaccaatcgatgccacggatgttaactttgtggctcgattatggcacaaaggcctacgaatgggaaaaagctggccggtccgatcgagtacagatgcggaacgaccttggcaaaattaataaggtcattaccgaacacaccaattacctggctccttatcagttcctcacagcattctcacaactcatcagtcgcatttgtcattcccacgatgaggtgttcgtggtgctaatggaaatcatagctaaagtgttcctagcctacccacagcaagccatgtggatgatgacggcagtgagtaaaagctcctaccccatgagggttaaccgatgcaaggagatcttgaacaaggctattcatatgaaaaagtccctggagaagttcgtgggtgacgctactcgcctgaccgataaacttttggaactgtgtaacaaacccgtggatgggagcagctcaactttgagcatgagtacacattttaaaatgctgaagaaactggtagaagaagcaaccttttccgagattctgatcccgctccagtccgtaatgatccccactttgccaagcatcctgggcactcacgcaaatcacgccagccatgaaccttttccaggtcactgggcctacattgcaggctttgatgacatggtggagatcctcgcttctctgcaaaaacctaagaaaataagcttgaagggcagtgacggaaagttctacattatgatgtgtaagccaaaggatgatctccggaaggattgtagactcatggaatttaattctctaatcaacaaatgcctgagaaaggacgccgagagccgcaggagagaactacatatccgaacttatgcagtcattccgttaaacgatgagtgcggcattattgaatgggtgaataataccgccggcctccggcccatactgaccaaattatataaagaaaagggggtgtatatgacaggaaaggaattgcgtcagtgcatgctgccaaaaagtgctgctctgtccgagaaacttaaggtttttcgagaattcctgttgccacgtcacccacccatatttcacgaatggttcctgcgaacattcccagatcccacatcctggtatagctctcgcagcgcatactgtaggtccacagccgtgatgtctatggttggttacatcctcggactcggggacagacacggggagaacatcctgtttgattctttaaccggagagtgtgtgcatgtggattttaactgcctgtttaataaaggagagacgtttgaggtgcccgaaatcgtgccatttcgcctaacccacaatatggtgaacggaatggggcccatgggcacagaggggttgtttcggcgagcatgtgaagttacaatgcggttaatgagggaccaaagggaaccactgatgtccgtcctgaaaacctttctccatgacccattggtggaatggtccaaacccgtgaagggacacagcaaggccccattgaacgagaccggagaggtggtcaacgagaaggcaaagacccatgtgttagacattgagcagcgactgcagggtgttataaagaccagaaacagagtgaccggactccctctttctattgagggacacgttcattacctaatccaggaggcaactgacgagaatctgttatgtcagatgtacctcggatggacaccttacatgtag

SEQ ID NO: 72455 - DNA, 7934 bp, Artificial Sequence
  derived and/or modified sequence
atgggcgaacacgggttggagctagccagcatgatacccgctctgcgagagctggggagtgccactccagaagaatacaatacggtggtgcagaaaccacgccaaatactatgtcagtttatagaccggatactgaccgacgttaatgtggttgccgtggaattggtgaagaagacagattctcagccaacatctgttatgttattggattttatccagcacataatgaaatcctctccacttatgtttgtgaatgtgtccggctctcacgaagcgaaaggctcttgtatcgaattctccaactggattattacacgcctgctaagaattgcggctacacccagctgccatctactgcacaagaagatctgcgaagtgatatgctcactgcttttcttatttaaatcaaagtcacccgctatctttggagtgttaaccaaagagcttctacagctcttcgaggatctggtctacctgcaccgacgcaacgtgatgggacacgcagtggagtggcctgtcgtgatgtccagattcctcagccagctcgatgaacacatgggttatcttcagagcgcgccactacagctgatgagcatgcagaacctggagttcatcgaagtgacgctcctcatggtgctgacccggatcattgcgattgtattctttcggagacaagaactgctgctgtggcagatcgggtgtgtacttctggagtatgggagtccaaagattaaaagcctggcaatctctttccttaccgaactctttcagctaggaggtctcccggcacaaccagcgtcaactttcttttccagtttcttggagctgctgaaacatcttgtggagatggacaccgatcagctaaagttgtacgaagagcctctgagcaaactgataaaaacccttttcccctttgaggctgaagcttaccgcaacatcgagccagtctacctgaatatgctcctcgagaagctttgcgtgatgttcgaagatggggtccttatgcgcctgaagtccgacctgttgaaagccgcactgtgccacctgctccagtattttctcaagttcgtgcctgcaggctacgagtctgctctccaagttcggaaagtgtatgtacgaaacatctgcaaagcccttctggacgtgcttgggatcgaggtggacgccgaataccttttaggccctttatacgccgcattgaaaatggagtccatggaaattatcgaagaaatccaatgccagacccagcaagagaacctgagcagcaactccgatgggatctctcctaagagacggagactgtcctcatcgttaaacccaagtaagagggcaccaaaacaaactgaggaaatcaagcacgtggacatgaatcagaaaagcatactgtggtcagcactgaaacagaaagcagagtcactccagatcagcttagagtattccggcctcaagaatccagtaatcgaaatgctcgaggggattgccgtggtgctgcagctgacggccctttgcacagtgcactgtagccaccagaacatgaactgccgcacattcaaggactgtcagcacaagtccaagaaaaagccatccgtggttatcacatggatgagtcttgatttctataccaaggttcttaaatcctgccgttcgctgcttgagtcagtgcagaagctggacctggaggccacgatagacaaagtggtgaagatttatgacgcgttgatctacatgcaggttaacagctccttcgaggaccatatactcgaagacctgtgtgggatgctgtctctcccttggatttactcacactcagatgacggctgtctgaaactgacgacgtttgctgctaatctgctgacactttcttgccgtatttccgatagctactctccccaagcccaatctaggtgtgtgtttctgctaactcttttcccgcgtaggatctttctggaatggcggacagcagtatataattgggcactgcagtcatcacatgaagtgatcagagcttcttgtgtgtctggctttttcatactgcttcagcagcagaattcatgcaatagagtgccaaagatcctcatcgacaaagtaaaggacgacagcgatattgtcaagaaggagtttgcctccatcctggggcagcttgtgtgtaccctgcacggaatgttttatctcacttcgtccctcacagaacctttttcagagcatgggcacgtggacctgttttgtcgcaacttaaaggcaactagtcagcacgagtgttctagcagccaactgaaagccagtgtttgcaagcccttcttgttcctgctgaaaaagaaaatcccttcacctgtcaagctcgcttttatagacaacttgcatcatctctgtaagcatcttgacttcagggaagacgagaccgacgtgaaagctgtgctcggcacattgcttaatctgatggaagacccggacaaagatgtacgcgtggccttttcgggaaacattaaacacatcctggagagcctcgattccgaagatgggtttatcaaagaactgttcgtgctgcggatgaaggaggcttacactcacgctcaaattagccgtaataacgagctcaaagacacacttattctgacgactggtgatattggacgagcggctaagggcgatcttgttccatttgctttactgcacctcctccattgcttgctcagcaaatccgcatcagtctctggcgcagcatacaccgaaattcgcgctctggtggccgctaaatctgttaaattgcagagttttttttcccagtacaaaaagccaatctgccaatttctggtcgagtccctacattcttcccagatgaccgcactgccaaacaccccatgccagaatgccgacgtccgcaagcaagacgttgctcatcaacgcgagatggcgctgaatactttgagcgagattgccaatgtcttcgacttccccgatttgaaccgcttccttacaaggacactccaggtactgctgcctgatttagccgctaaggccagtcctgctgctagcgcgctcattagaactctaggaaagcagttgaacgtgaataggcgcgagatccttatcaacaactttaagtatattttctctcatcttgtgtgctcatgctccaaggatgagctggagagagcacttcattacctgaagaacgagacagaaatcgaactcggatccttactgagacaggacttccaagggctccacaacgaacttctgttgcgcatcggagaacactaccaacaagtttttaatggtctgtccattctcgcctcgttcgcatcatcagatgacccgtatcaaggcccaagagacataatatctccagagctgatggccgattatttgcagcctaaattgctcggaatcttagcattcttcaatatgcaacttttatccagttcagtagggatagaggacaagaagatggcgctgaacagtttgatgtccctcatgaaactaatgggaccaaaacacgtttctagcgttagggtcaagatgatgacgactctgcggaccggactaaggtttaaagacgattttccagaactgtgctgccgcgcatgggattgctttgtgcgttgcctggaccatgcatgcctgggtagtttgttatcgcacgtgattgtcgccctgctaccgctaattcatatccaacctaaggagaccgccgctatttttcactacctgattatcgaaaatcgcgacgcagtacaggattttctccacgagatttattttctacctgatcaccccgaactcaaaaagatcaaggcagtccttcaggaatatagaaaggaaacctctgagagcacagacctgcaaacaactttgcagttatcaatgaaggctattcagcatgaaaacgtggatgtgaggatccatgccctgacaagtttaaaagaaaccctgtacaaaaatcaagaaaagttaatcaaatacgctactgacagcgaaacagtggagccgatcatctcccagctcgtgacagtgttactcaaaggatgccaggatgccaactcccaggccaggctcctttgcggagagtgcttgggggaactgggggctatcgatcctgggagactagactttagcaccacggagacccagggcaaggattttaccttcgtgacgggagtcgaggatagttcattcgcgtatggcctgttaatggagctcacgagggcttacctcgcgtatgccgataattctagggcccaggactctgcagcctacgccattcaagagctcttgagtatctacgactgtagagagatggagaccaatgggccaggccaccagctctggcggaggtttcctgagcacgtgcgtgagatccttgagccacacttgaacacaagatacaagtcatcacaaaaaagcacagactggtctggagtgaagaagcctatctatctgagtaagctaggttcaaattttgcagagtggtcggcatcttgggccggttacttgatcactaaggttcgccacgacctggcgtctaaaatctttacatgctgcagcattatgatgaagcacgacttcaaagtgacgatatacctgttgccgcatattctggtgtatgtcttgctggggtgcaatcaggaagatcagcaggaggtttacgcagaaattatggcagttctgaaacatgatgatcagcacaccattaatacccaggatatagcgtcagatctctgccaattatccacgcagaccgtgttttcaatgttggaccatctgacacagtgggctcgtcacaagtttcaagccttaaaggccgaaaaatgcccccattctaaaagcaatcgaaacaaagtggacagcatggtgagcacagtggattacgaggattatcaaagcgtcacccgattcctggacctgattcctcaggacaccctggctgttgcgtctttccgctcaaaggcttacacacgggcagtgatgcattttgaatctttcataacggagaagaagcagaatatacaggaacatctcggattcctgcagaagctgtacgccgcaatgcatgaacctgacggagtggccggtgtgagtgcaattagaaaggccgaaccgtccctcaaggaacagattttggagcatgaatccctgggattgctacgggacgctacggcctgctatgatcgggctatacaactagagccggatcaaatcattcattaccacggggttgtgaagtctatgcttggcctgggacagttgagtactgtaattactcaggtcaatggagtacatgccaaccggtcggaatggacagatgagttgaacacctaccgggtggaggcagcctggaagctgagccagtgggacttggtggaaaattacctggctgccgatggcaagagcacaacatggagcgtgcggctgggtcagctcctgctttcagccaaaaagagggatatcaccgccttttacgactcattgaaactggtgcgcgctgagcagatcgttccactttccgctgcaagcttcgagcgaggctcataccagcgaggatacgaatacattgttagacttcacatgttatgtgagctggagcacagtatcaaacctttgtttcagcattcccccggtgacagttcccaggaggatagcctgaactgggtagccaggttagagatgacccagaattcatacagggcaaaagaacccatcttagcactgaggcgggctctgctgtccttaaataagaggcctgattacaacgagatggttggcgaatgctggctgcagtccgctagagtagccagaaaggcaggccaccaccaaactgcttataatgccctgctcaacgcaggtgagagtcgcctcgcagagttgtatgttgaacgggcaaaatggctctggagcaaaggtgatgtgcaccaggccttgatcgtgctgcaaaagggggtggagctgtgcttccctgagaacgaaaccccccctgaggggaagaacatgctgatccacggacgggcaatgctcctagtgggaaggttcatggaagagaccgcaaacttcgaatctaacgccattatgaaaaaatataaagacgttacggcctgcctgccggagtgggaagacggtcacttctacctggccaagtactacgataaactgatgcctatggttacagacaataagatggagaagcagggcgatctcatccgctacattgtgctccattttggtcggtcactgcaatacgggaaccagtttatctatcagtcaatgccccgaatgctcaccctctggctagattatggaaccaaggcttatgagtgggagaaagcaggaaggtccgacagggttcagatgaggaacgacctcgggaaaatcaataaggtgatcacagaacatactaactacctggccccttaccaatttttgaccgctttctcccagctgatctcacggatttgccacagccacgatgaagtttttgttgtcttgatggaaatcatcgccaaagtgtttctggcctatccacagcaggcaatgtggatgatgactgccgttagcaagtcaagctaccccatgcgggttaaccgatgcaaagaaattctgaataaagctatacatatgaaaaagtccctggaaaagttcgtcggggatgcgacgaggcttacggataagcttctagaactgtgtaacaagcctgtggacggctctagttccaccctttccatgtctacccacttcaaaatgttaaagaaattggtggaagaagcgacgtttagcgaaatccttattccgctccagtccgtgatgataccgaccctccccagtattttgggcacccacgcaaaccacgctagccatgagcctttccccggtcactgggcatatatcgcaggatttgacgatatggtcgaaattctggctagcttacaaaagcctaagaaaatcagcttaaaggggtccgatggcaaattctacatcatgatgtgcaaaccaaaggacgatctgcggaaggactgtaggctgatggaattcaatagcctgattaataagtgtctacgaaaggacgcggaaagtcgcagacgcgaactgcacatccgcacatacgccgtgatcccccttaatgatgagtgcggtatcatagagtgggtgaataacacagccggtctgagaccaattttgaccaaactgtataaagagaaaggtgtgtatatgactggcaaagagttgagacagtgcatgcttcccaagagcgccgcactctctgagaaactgaaggtgttccgcgagttcctgttgcctagacaccctcctatatttcatgagtggttcctcaggaccttcccagaccctacgtcttggtatagcagcaggtcagcctattgcaggagtaccgcagtgatgagcatggtgggttacattctcggcctcggcgacagacatggagagaatatcctgtttgacagcttgaccggcgaatgtgtgcacgttgattttaattgtctgtttaataaaggtgagacctttgaagtgcccgagatcgttccgttcaggctgactcacaacatggtcaacgggatgggtcctatgggcactgaaggccttttcaggagggcatgtgaggtcactatgcgcttaatgagggatcagagggagcccctgatgtccgttctgaaaacgttccttcacgaccccttagttgaatggagcaagccagtaaagggacatagcaaagccccacttaacgagacaggagaggtggtgaacgagaaagcaaaaacacatgttctagatatcgaacagcggctgcaaggtgttattaaaactagaaatagggtcaccggtctgcccctcagtatcgaaggtcacgtgcattacctcattcaagaggccacggacgagaacctcttgtgccagatgtacctaggatggacaccatatatgta

SEQ ID NO: 72456 - DNA, 8249 bp, Artificial Sequence
  derived and/or modified sequence
ttccgggaggagttttggcctccacacggctccgtcgggcgccgcgctcttccggcagcggtagctttggagacgccgggaacccgcgttggcgtggttgactagtgcctcgcagcctcagcatgggggaacatggcctggagctggcttccatgatccccgccctgcgggagctgggcagtgccacaccagaggaatataatacagttgtacagaagccaagacaaattctgtgtcaattcattgaccggatacttacagatgtaaatgttgttgctgtagaacttgtaaagaaaactgactctcagccaacctccgtgatgttgcttgatttcatccagcatatcatgaaatcctccccacttatgtttgtaaatgtgagtggaagccatgaggccaaaggcagttgtattgaattcagtaattggatcataacgagacttctgcggattgcagcaactccctcctgtcatttgttacacaagaaaatctgtgaagtcatctgttcattattatttctttttaaaagcaagagtcctgctatttttggggtactcacaaaagaattattacaactttttgaagacttggtttacctccatagaagaaatgtgatgggtcatgctgtggaatggccagtggtcatgagccgatttttaagtcaattagatgaacacatgggatatttacaatcagctcctttgcagttgatgagtatgcaaaatttagaatttattgaagtcactttattaatggttcttactcgtattattgcaattgtgttttttagaaggcaagaactcttactttggcagataggttgtgttctgctagagtatggtagtccaaaaattaaatccctagcaattagctttttaacagaactttttcagcttggaggactaccagcacaaccagctagcacttttttcagctcatttttggaattattaaaacaccttgtagaaatggatactgaccaattgaaactctatgaagagccattatcaaagctgataaagacactatttccctttgaagcagaagcttatagaaatattgaacctgtctatttaaatatgctgctggaaaaactctgtgtcatgtttgaagacggtgtgctcatgcggcttaagtctgatttgctaaaagcagctttgtgccatttactgcagtatttccttaaatttgtgccagctgggtatgaatctgctttacaagtcaggaaggtctatgtgagaaatatttgtaaagctcttttggatgtgcttggaattgaggtagatgcagagtacttgttgggcccactttatgcagctttgaaaatggaaagtatggaaatcattgaggagattcaatgccaaactcaacaggaaaacctcagcagtaatagtgatggaatatcacccaaaaggcgtcgtctcagctcgtctctaaacccttctaaaagagcaccaaaacagactgaggaaattaaacatgtggacatgaaccaaaagagcatattatggagtgcactgaaacagaaagctgaatcccttcagatttcccttgaatacagtggcctaaagaatcctgttattgagatgttagaaggaattgctgttgtcttacaactgactgctctgtgtactgttcattgttctcatcaaaacatgaactgccgtactttcaaggactgtcaacataaatccaagaagaaaccttctgtagtgataacttggatgtcattggatttttacacaaaagtgcttaagagctgtagaagtttgttagaatctgttcagaaactggacctggaggcaaccattgataaggtggtgaaaatttatgatgctttgatttatatgcaagtaaacagttcatttgaagatcatatcctggaagatttatgtggtatgctctcacttccatggatttattcccattctgatgatggctgtttaaagttgaccacatttgccgctaatcttctaacattaagctgtaggatttcagatagctattcaccacaggcacaatcacgatgtgtgtttcttctgactctgtttccaagaagaatattccttgagtggagaacagcagtttacaactgggccctgcagagctcccatgaagtaatccgggctagttgtgttagtggattttttatcttattgcagcagcagaattcttgtaacagagttcccaagattcttatagataaagtcaaagatgattctgacattgtcaagaaagaatttgcttctatacttggtcaacttgtctgtactcttcacggcatgttttatctgacaagttctttaacagaacctttctctgaacacggacatgtggacctcttctgtaggaacttgaaagccacttctcaacatgaatgttcatcttctcaactaaaagcttctgtctgcaagccattccttttcctactgaaaaaaaaaatacctagtccagtaaaacttgctttcatagataatctacatcatctttgtaagcatcttgattttagagaagatgaaacagatgtaaaagcagttcttggaactttattaaatttaatggaagatccagacaaagatgttagagtggcttttagtggaaatatcaagcacatattggaatccttggactctgaagatggatttataaaggagctttttgtcttaagaatgaaggaagcatatacacatgcccaaatatcaagaaataatgagctgaaggataccttgattcttacaacaggggatattggaagggccgcaaaaggagatttggtaccatttgcactcttacacttattgcattgtttgttatccaagtcagcatctgtctctggagcagcatacacagaaattagagctctggttgcagctaaaagtgttaaactgcaaagttttttcagccagtataagaaacccatctgtcagtttttggtagaatcccttcactctagtcagatgacagcacttccgaatactccatgccagaatgctgacgtgcgaaaacaagatgtggctcaccagagagaaatggctttaaatacgttgtctgaaattgccaacgttttcgactttcctgatcttaatcgttttcttactaggacattacaagttctactacctgatcttgctgccaaagcaagccctgcagcttctgctctcattcgaactttaggaaaacaattaaatgtcaatcgtagagagattttaataaacaacttcaaatatattttttctcatttggtctgttcttgttccaaagatgaattagaacgtgcccttcattatctgaagaatgaaacagaaattgaactggggagcctgttgagacaagatttccaaggattgcataatgaattattgctgcgtattggagaacactatcaacaggtttttaatggtttgtcaatacttgcctcatttgcatccagtgatgatccatatcagggcccgagagatatcatatcacctgaactgatggctgattatttacaacccaaattgttgggcattttggctttttttaacatgcagttactgagctctagtgttggcattgaagataagaaaatggccttgaacagtttgatgtctttgatgaagttaatgggacccaaacatgtcagttctgtgagggtgaagatgatgaccacactgagaactggccttcgattcaaggatgattttcctgaattgtgttgcagagcttgggactgctttgttcgctgcctggatcatgcttgtctgggctcccttctcagtcatgtaatagtagctttgttacctcttatacacatccagcctaaagaaactgcagctatcttccactacctcataattgaaaacagggatgctgtgcaagattttcttcatgaaatatattttttacctgatcatccagaattaaaaaagataaaagccgttctccaggaatacagaaaggagacctctgagagcactgatcttcagacaactcttcagctctctatgaaggccattcaacatgaaaatgtcgatgttcgtattcatgctcttacaagcttgaaggaaaccttgtataaaaatcaggaaaaactgataaagtatgcaacagacagtgaaacagtagaacctattatctcacagttggtgacagtgcttttgaaaggttgccaagatgcaaactctcaagctcggttgctctgtggggaatgtttaggggaattgggggcgatagatccaggtcgattagatttctcaacaactgaaactcaaggaaaagattttacatttgtgactggagtagaagattcaagctttgcctatggattattgatggagctaacaagagcttaccttgcgtatgctgataatagccgagctcaagattcagctgcctatgccattcaggagttgctttctatttatgactgtagagagatggagaccaacggcccaggtcaccaattgtggaggagatttcctgagcatgttcgggaaatactagaacctcatctaaataccagatacaagagttctcagaagtcaaccgattggtctggagtaaagaagccaatttacttaagtaaattgggtagtaactttgcagaatggtcagcatcttgggcaggttatcttattacaaaggttcgacatgatcttgccagtaaaattttcacctgctgtagcattatgatgaagcatgatttcaaagtgaccatctatcttcttccacatattctggtgtatgtcttactgggttgtaatcaagaagatcagcaggaggtttatgcagaaattatggcagttctaaagcatgacgatcagcataccataaatacccaagacattgcatctgatctgtgtcaactcagtacacagactgtgttctccatgcttgaccatctcacacagtgggcaaggcacaaatttcaggcactgaaagctgagaaatgtccacacagcaaatcaaacagaaataaggtagactcaatggtatctactgtggattatgaagactatcagagtgtaacccgttttctagacctcataccccaggatactctggcagtagcttcctttcgctccaaagcatacacacgagctgtaatgcactttgaatcatttattacagaaaagaagcaaaatattcaggaacatcttggatttttacagaaattgtatgctgctatgcatgaacctgatggagtggccggagtcagtgcaattagaaaggcagaaccatctctaaaagaacagatccttgaacatgaaagccttggcttgctgagggatgccactgcttgttatgacagggctattcagctagaaccagaccagatcattcattatcatggtgtagtaaagtccatgttaggtcttggtcagctgtctactgttatcactcaggtgaatggagtgcatgctaacaggtccgagtggacagatgaattaaacacgtacagagtggaagcagcttggaaattgtcacagtgggatttggtggaaaactatttggcagcagatggaaaatctacaacatggagtgtcagactgggacagctattattatcagccaaaaaaagagatatcacagctttttatgactcactgaaactagtgagagcagaacaaattgtacctctttcagctgcaagctttgaaagaggctcctaccaacgaggatatgaatatattgtgagattgcacatgttatgtgagttggagcatagcatcaaaccacttttccagcattctccaggtgacagttctcaagaagattctctaaactgggtagctcgactagaaatgacccagaattcctacagagccaaggagcctatcctggctctccggagggctttactaagcctcaacaaaagaccagattacaatgaaatggttggagaatgctggctgcagagtgccagggtagctagaaaggctggtcaccaccagacagcctacaatgctctccttaatgcaggggaatcacgactcgctgaactgtacgtggaaagggcaaagtggctctggtccaagggtgatgttcaccaggcactaattgttcttcaaaaaggtgttgaattatgttttcctgaaaatgaaaccccacctgagggtaagaacatgttaatccatggtcgagctatgctactagtgggccgatttatggaagaaacagctaactttgaaagcaatgcaattatgaaaaaatataaggatgtgaccgcgtgcctgccagaatgggaggatgggcatttttaccttgccaagtactatgacaaattgatgcccatggtcacagacaacaaaatggaaaagcaaggtgatctcatccggtatatagttcttcattttggcagatctctacaatatggaaatcagttcatatatcagtcaatgccacgaatgttaactctatggcttgattatggtacaaaggcatatgaatgggaaaaagctggccgctccgatcgtgtacaaatgaggaatgatttgggtaaaataaacaaggttatcacagagcatacaaactatttagctccatatcaatttttgactgctttttcacaattgatctctcgaatttgtcattctcacgatgaagtttttgttgtcttgatggaaataatagccaaagtatttctagcctatcctcaacaagcaatgtggatgatgacagctgtgtcaaagtcatcttatcccatgcgtgtgaacagatgcaaggaaatcctcaataaagctattcatatgaaaaaatccttagagaagtttgttggagatgcaactcgcctaacagataagcttctagaattgtgcaataaaccggttgatggaagtagttccacattaagcatgagcactcattttaaaatgcttaaaaagctggtagaagaagcaacatttagtgaaatcctcattcctctacaatcagtcatgatacctacacttccatcaattctgggtacccatgctaaccatgctagccatgaaccatttcctggacattgggcctatattgcagggtttgatgatatggtggaaattcttgcttctcttcagaaaccaaagaagatttctttaaaaggctcagatggaaagttctacatcatgatgtgtaagccaaaagatgacctgagaaaggattgtagactaatggaattcaattccttgattaataagtgcttaagaaaagatgcagagtctcgtagaagagaacttcatattcgaacatatgcagttattccactaaatgatgaatgtgggattattgaatgggtgaacaacactgctggtttgagacctattctgaccaaactatataaagaaaagggagtgtatatgacaggaaaagaacttcgccagtgtatgctaccaaagtcagcagctttatctgaaaaactcaaagtattccgagaatttctcctgcccaggcatcctcctatttttcatgagtggtttctgagaacattccctgatcctacatcatggtacagtagtagatcagcttactgccgttccactgcagtaatgtcaatggttggttatattctggggcttggagaccgtcatggtgaaaatattctctttgattctttgactggtgaatgcgtacatgtagatttcaattgtcttttcaataagggagaaacctttgaagttccagaaattgtgccatttcgcctgactcataatatggttaatggaatgggtcctatgggaacagagggtctttttcgaagagcatgtgaagttacaatgaggctgatgcgtgatcagcgagagcctttaatgagtgtcttaaagacttttctacatgatcctcttgtggaatggagtaaaccagtgaaagggcattccaaagcgccactgaatgaaactggagaagttgtcaatgaaaaggccaagacccatgttcttgacattgagcagcgactacaaggtgtaatcaagactcgaaatagagtgacaggactgccgttatctattgaaggacatgtgcattaccttatacaggaagctactgatgaaaacttactatgccagatgtatcttggttggactccatatatgtgaaatgaaattatgtaaaagaatatgttaataatctaaaagtaatgcatttggtatgaatctgtggttgtatctgttcaattctaaagtacaacataaatttacgttctcagcaactgttatttctctctgatcattaattatatgtaaaataatatacattcagttattaagaaataaactgctttcttaata

SEQ ID NO: 72457 - DNA, 7935 bp, Artificial Sequence
  derived and/or modified sequence
atgggcgagcacggcctggagctggccagcatgatccccgccctgagagagctgggcagcgccacccccgaggagtacaacaccgtggtgcagaagcccagacagatcctgtgccagttcatcgacagaatcctgaccgacgtgaacgtggtggccgtggagctggtgaagaagaccgacagccagcccaccagcgtgatgctgctggacttcatccagcacatcatgaagagcagccccctgatgttcgtgaacgtgagcggcagccacgaggccaagggcagctgcatcgagttcagcaactggatcatcaccagactgctgagaatcgccgccacccccagctgccacctgctgcacaagaagatctgcgaggtgatctgcagcctgctgttcctgttcaagagcaagagccccgccatcttcggcgtgctgaccaaggagctgctgcagctgttcgaggacctggtgtacctgcacagaagaaacgtgatgggccacgccgtggagtggcccgtggtgatgagcagattcctgagccagctggacgagcacatgggctacctgcagagcgcccccctgcagctgatgagcatgcagaacctggagttcatcgaggtgaccctgctgatggtgctgaccagaatcatcgccatcgtgttcttcagaagacaggagctgctgctgtggcagatcggctgcgtgctgctggagtacggcagccccaagatcaagagcctggccatcagcttcctgaccgagctgttccagctgggcggcctgcccgcccagcccgccagcaccttcttcagcagcttcctggagctgctgaagcacctggtggagatggacaccgaccagctgaagctgtacgaggagcccctgagcaagctgatcaagaccctgttccccttcgaggccgaggcctacagaaacatcgagcccgtgtacctgaacatgctgctggagaagctgtgcgtgatgttcgaggacggcgtgctgatgagactgaagagcgacctgctgaaggccgccctgtgccacctgctgcagtacttcctgaagttcgtgcccgccggctacgagagcgccctgcaggtgagaaaggtgtacgtgagaaacatctgcaaggccctgctggacgtgctgggcatcgaggtggacgccgagtacctgctgggccccctgtacgccgccctgaagatggagagcatggagatcatcgaggagatccagtgccagacccagcaggagaacctgagcagcaacagcgacggcatcagccccaagagaagaagactgagcagcagcctgaaccccagcaagagagcccccaagcagaccgaggagatcaagcacgtggacatgaaccagaagagcatcctgtggagcgccctgaagcagaaggccgagagcctgcagatcagcctggagtacagcggcctgaagaaccccgtgatcgagatgctggagggcatcgccgtggtgctgcagctgaccgccctgtgcaccgtgcactgcagccaccagaacatgaactgcagaaccttcaaggactgccagcacaagagcaagaagaagcccagcgtggtgatcacctggatgagcctggacttctacaccaaggtgctgaagagctgcagaagcctgctggagagcgtgcagaagctggacctggaggccaccatcgacaaggtggtgaagatctacgacgccctgatctacatgcaggtgaacagcagcttcgaggaccacatcctggaggacctgtgcggcatgctgagcctgccctggatctacagccacagcgacgacggctgcctgaagctgaccaccttcgccgccaacctgctgaccctgagctgcagaatcagcgacagctacagcccccaggcccagagcagatgcgtgttcctgctgaccctgttccccagaagaatcttcctggagtggagaaccgccgtgtacaactgggccctgcagagcagccacgaggtgatcagagccagctgcgtgagcggcttcttcatcctgctgcagcagcagaacagctgcaacagagtgcccaagatcctgatcgacaaggtgaaggacgacagcgacatcgtgaagaaggagttcgccagcatcctgggccagctggtgtgcaccctgcacggcatgttctacctgaccagcagcctgaccgagcccttcagcgagcacggccacgtggacctgttctgcagaaacctgaaggccaccagccagcacgagtgcagcagcagccagctgaaggccagcgtgtgcaagcccttcctgttcctgctgaagaagaagatccccagccccgtgaagctggccttcatcgacaacctgcaccacctgtgcaagcacctggacttcagagaggacgagaccgacgtgaaggccgtgctgggcaccctgctgaacctgatggaggaccccgacaaggacgtgagagtggccttcagcggcaacatcaagcacatcctggagagcctggacagcgaggacggcttcatcaaggagctgttcgtgctgagaatgaaggaggcctacacccacgcccagatcagcagaaacaacgagctgaaggacaccctgatcctgaccaccggcgacatcggcagagccgccaagggcgacctggtgcccttcgccctgctgcacctgctgcactgcctgctgagcaagagcgccagcgtgagcggcgccgcctacaccgagatcagagccctggtggccgccaagagcgtgaagctgcagagcttcttcagccagtacaagaagcccatctgccagttcctggtggagagcctgcacagcagccagatgaccgccctgcccaacaccccctgccagaacgccgacgtgagaaagcaggacgtggcccaccagagagagatggccctgaacaccctgagcgagatcgccaacgtgttcgacttccccgacctgaacagattcctgaccagaaccctgcaggtgctgctgcccgacctggccgccaaggccagccccgccgccagcgccctgatcagaaccctgggcaagcagctgaacgtgaacagaagagagatcctgatcaacaacttcaagtacatcttcagccacctggtgtgcagctgcagcaaggacgagctggagagagccctgcactacctgaagaacgagaccgagatcgagctgggcagcctgctgagacaggacttccagggcctgcacaacgagctgctgctgagaatcggcgagcactaccagcaggtgttcaacggcctgagcatcctggccagcttcgccagcagcgacgacccctaccagggccccagagacatcatcagccccgagctgatggccgactacctgcagcccaagctgctgggcatcctggccttcttcaacatgcagctgctgagcagcagcgtgggcatcgaggacaagaagatggccctgaacagcctgatgagcctgatgaagctgatgggccccaagcacgtgagcagcgtgagagtgaagatgatgaccaccctgagaaccggcctgagattcaaggacgacttccccgagctgtgctgcagagcctgggactgcttcgtgagatgcctggaccacgcctgcctgggcagcctgctgagccacgtgatcgtggccctgctgcccctgatccacatccagcccaaggagaccgccgccatcttccactacctgatcatcgagaacagagacgccgtgcaggacttcctgcacgagatctacttcctgcccgaccaccccgagctgaagaagatcaaggccgtgctgcaggagtacagaaaggagaccagcgagagcaccgacctgcagaccaccctgcagctgagcatgaaggccatccagcacgagaacgtggacgtgagaatccacgccctgaccagcctgaaggagaccctgtacaagaaccaggagaagctgatcaagtacgccaccgacagcgagaccgtggagcccatcatcagccagctggtgaccgtgctgctgaagggctgccaggacgccaacagccaggccagactgctgtgcggcgagtgcctgggcgagctgggcgccatcgaccccggcagactggacttcagcaccaccgagacccagggcaaggacttcaccttcgtgaccggcgtggaggacagcagcttcgcctacggcctgctgatggagctgaccagagcctacctggcctacgccgacaacagcagagcccaggacagcgccgcctacgccatccaggagctgctgagcatctacgactgcagagagatggagaccaacggccccggccaccagctgtggagaagattccccgagcacgtgagagagatcctggagccccacctgaacaccagatacaagagcagccagaagagcaccgactggagcggcgtgaagaagcccatctacctgagcaagctgggcagcaacttcgccgagtggagcgccagctgggccggctacctgatcaccaaggtgagacacgacctggccagcaagatcttcacctgctgcagcatcatgatgaagcacgacttcaaggtgaccatctacctgctgccccacatcctggtgtacgtgctgctgggctgcaaccaggaggaccagcaggaggtgtacgccgagatcatggccgtgctgaagcacgacgaccagcacaccatcaacacccaggacatcgccagcgacctgtgccagctgagcacccagaccgtgttcagcatgctggaccacctgacccagtgggccagacacaagttccaggccctgaaggccgagaagtgcccccacagcaagagcaacagaaacaaggtggacagcatggtgagcaccgtggactacgaggactaccagagcgtgaccagattcctggacctgatcccccaggacaccctggccgtggccagcttcagaagcaaggcctacaccagagccgtgatgcacttcgagagcttcatcaccgagaagaagcagaacatccaggagcacctgggcttcctgcagaagctgtacgccgccatgcacgagcccgacggcgtggccggcgtgagcgccatcagaaaggccgagcccagcctgaaggagcagatcctggagcacgagagcctgggcctgctgagagacgccaccgcctgctacgacagagccatccagctggagcccgaccagatcatccactaccacggcgtggtgaagagcatgctgggcctgggccagctgagcaccgtgatcacccaggtgaacggcgtgcacgccaacagaagcgagtggaccgacgagctgaacacctacagagtggaggccgcctggaagctgagccagtgggacctggtggagaactacctggccgccgacggcaagagcaccacctggagcgtgagactgggccagctgctgctgagcgccaagaagagagacatcaccgccttctacgacagcctgaagctggtgagagccgagcagatcgtgcccctgagcgccgccagcttcgagagaggcagctaccagagaggctacgagtacatcgtgagactgcacatgctgtgcgagctggagcacagcatcaagcccctgttccagcacagccccggcgacagcagccaggaggacagcctgaactgggtggccagactggagatgacccagaacagctacagagccaaggagcccatcctggccctgagaagagccctgctgagcctgaacaagagacccgactacaacgagatggtgggcgagtgctggctgcagagcgccagagtggccagaaaggccggccaccaccagaccgcctacaacgccctgctgaacgccggcgagagcagactggccgagctgtacgtggagagagccaagtggctgtggagcaagggcgacgtgcaccaggccctgatcgtgctgcagaagggcgtggagctgtgcttccccgagaacgagaccccccccgagggcaagaacatgctgatccacggcagagccatgctgctggtgggcagattcatggaggagaccgccaacttcgagagcaacgccatcatgaagaagtacaaggacgtgaccgcctgcctgcccgagtgggaggacggccacttctacctggccaagtactacgacaagctgatgcccatggtgaccgacaacaagatggagaagcagggcgacctgatcagatacatcgtgctgcacttcggcagaagcctgcagtacggcaaccagttcatctaccagagcatgcccagaatgctgaccctgtggctggactacggcaccaaggcctacgagtgggagaaggccggcagaagcgacagagtgcagatgagaaacgacctgggcaagatcaacaaggtgatcaccgagcacaccaactacctggccccctaccagttcctgaccgccttcagccagctgatcagcagaatctgccacagccacgacgaggtgttcgtggtgctgatggagatcatcgccaaggtgttcctggcctacccccagcaggccatgtggatgatgaccgccgtgagcaagagcagctaccccatgagagtgaacagatgcaaggagatcctgaacaaggccatccacatgaagaagagcctggagaagttcgtgggcgacgccaccagactgaccgacaagctgctggagctgtgcaacaagcccgtggacggcagcagcagcaccctgagcatgagcacccacttcaagatgctgaagaagctggtggaggaggccaccttcagcgagatcctgatccccctgcagagcgtgatgatccccaccctgcccagcatcctgggcacccacgccaaccacgccagccacgagcccttccccggccactgggcctacatcgccggcttcgacgacatggtggagatcctggccagcctgcagaagcccaagaagatcagcctgaagggcagcgacggcaagttctacatcatgatgtgcaagcccaaggacgacctgagaaaggactgcagactgatggagttcaacagcctgatcaacaagtgcctgagaaaggacgccgagagcagaagaagagagctgcacatcagaacctacgccgtgatccccctgaacgacgagtgcggcatcatcgagtgggtgaacaacaccgccggcctgagacccatcctgaccaagctgtacaaggagaagggcgtgtacatgaccggcaaggagctgagacagtgcatgctgcccaagagcgccgccctgagcgagaagctgaaggtgttcagagagttcctgctgcccagacacccccccatcttccacgagtggttcctgagaaccttccccgaccccaccagctggtacagcagcagaagcgcctactgcagaagcaccgccgtgatgagcatggtgggctacatcctgggcctgggcgacagacacggcgagaacatcctgttcgacagcctgaccggcgagtgcgtgcacgtggacttcaactgcctgttcaacaagggcgagaccttcgaggtgcccgagatcgtgcccttcagactgacccacaacatggtgaacggcatgggccccatgggcaccgagggcctgttcagaagagcctgcgaggtgaccatgagactgatgagagaccagagagagcccctgatgagcgtgctgaagaccttcctgcacgaccccctggtggagtggagcaagcccgtgaagggccacagcaaggcccccctgaacgagaccggcgaggtggtgaacgagaaggccaagacccacgtgctggacatcgagcagagactgcagggcgtgatcaagaccagaaacagagtgaccggcctgcccctgagcatcgagggccacgtgcactacctgatccaggaggccaccgacgagaacctgctgtgccagatgtacctgggctggaccccctacatgtag

SEQ ID NO: 72458 - protein, 298 aa, Artificial Sequence
  derived and/or modified sequence
MVRMVPVLLSLLLLLGPAVPQENQDGRYSLTYIYTGLSKHVEDVPAFQALGSLNDLQFFRYNSKDRKSQPMGLWRQVEGMEDWKQDSQLQKAREDIFMETLKDIVEYYNDSNGSHVLQGRFGCEIENNRSSGAFWKYYYDGKDYIEFNKEIPAWVPFDPAAQITKQKWEAEPVYVQRAKAYLEEECPATLRKYLKYSKNILDRQDPPSVVVTSHQAPGEKKKLKCLAYDFYPGKIDVHWTRAGEVQEPELRGDVLHNGNGTYQSWVVVAVPPQDTAPYSCHVQHSSLAQPLVVPWEAS

SEQ ID NO: 72459 - DNA, 897 bp, Artificial Sequence
  derived and/or modified sequence
atggtaaggatggtccccgtgctgctgtccctcctgctcctattaggtccggctgtgccccaggagaaccaggatggccggtacagcctcacttacatttatacgggactgtcaaaacacgtggaagacgtgcccgccttccaggcgctgggttcattaaacgatctccagttctttagatacaatagtaaagatagaaagtctcagccaatgggattgtggcgccaggtggaagggatggaagactggaaacaggatagtcaactccagaaagcacgggaggacatcttcatggaaaccttgaaagatatcgtggagtattacaatgactcgaacggaagtcatgtgctgcaaggcagatttggttgcgagatcgaaaacaaccgctcttccggcgccttctggaaatactactacgatggcaaagactacatcgaatttaataaggaaatacctgcctgggtcccgttcgatccagccgcgcagattaccaaacagaagtgggaggctgagccggtttatgtccagcgggctaaggcgtaccttgaagaggaatgtcccgcaaccttgcggaagtacttgaagtactcaaagaatatcttagatagacaggatcccccgagcgtcgtagttacatcacaccaagcaccaggcgaaaaaaagaaattaaaatgcctcgcatatgacttctaccccggcaagatcgacgtccactggaccagggctggagaagttcaagaacctgagcttcgaggcgacgtgctacacaacggcaacggaacttaccagagctgggtggtggtggccgtgcccccacaggacaccgccccttactcgtgccacgttcaacactcctccctggcacagcctctggtcgttccatgggaggcatcctag

SEQ ID NO: 72460 - DNA, 897 bp, Artificial Sequence
  derived and/or modified sequence
atggtgaggatggtgcctgtgctgctgagcctgctgctgctgctgggccctgctgtgccccaggagaaccaggacggccgctacagcctgacctacatctacacaggcctgagcaagcacgtggaggatgtgcctgccttccaggccctgggcagcctgaatgacctgcagttcttccgctacaacagcaaggacaggaagagccagcccatgggcctgtggaggcaggtggagggcatggaggactggaagcaggacagccagctgcagaaggcccgggaggacatcttcatggagaccctgaaggacatcgtggagtactacaatgacagcaatggcagccacgtgctgcagggccgcttcggctgtgaaattgagaacaacagaagcagcggggccttctggaagtactactatgatggcaaggactacatcgagttcaacaaggagatcccagcctgggtgccctttgatcctgctgcccagatcaccaagcagaagtgggaggccgagcctgtgtatgtgcagagggccaaggcctacctggaggaggagtgcccagccaccctgaggaagtacctgaagtacagcaagaacatcctggaccggcaggacccccccagcgtggtggtgaccagccaccaggcccctggagagaagaagaagctgaagtgcctggcctatgacttctacccaggcaagattgatgtgcactggacccgggccggggaggtgcaggagcctgagctgcggggagatgtgctgcacaatggaaatggcacctaccagagctgggtggtggtggccgtgcccccccaggacacagccccctacagctgccacgtgcagcacagcagcctggcccagcccctggtggtgccctgggaggccagctag

SEQ ID NO: 72461 - DNA, 1307 bp, Artificial Sequence
  derived and/or modified sequence
atcatttttttttctctattaggggaggagcccgtcctggcactcccattggcctgtagattcacctcccctgggcagggccccaggacccaggataatatctgtgcctcctgcccagaaccctccaagcagacacaatggtaagaatggtgcctgtcctgctgtctctgctgctgcttctgggtcctgctgtcccccaggagaaccaagatggtcgttactctctgacctatatctacactgggctgtccaagcatgttgaagacgtccccgcgtttcaggcccttggctcactcaatgacctccagttctttagatacaacagtaaagacaggaagtctcagcccatgggactctggagacaggtggaaggaatggaggattggaagcaggacagccaacttcagaaggccagggaggacatctttatggagaccctgaaagacatcgtggagtattacaacgacagtaacgggtctcacgtattgcagggaaggtttggttgtgagatcgagaataacagaagcagcggagcattctggaaatattactatgatggaaaggactacattgaattcaacaaagaaatcccagcctgggtccccttcgacccagcagcccagataaccaagcagaagtgggaggcagaaccagtctacgtgcagcgggccaaggcttacctggaggaggagtgccctgcgactctgcggaaatacctgaaatacagcaaaaatatcctggaccggcaagatcctccctctgtggtggtcaccagccaccaggccccaggagaaaagaagaaactgaagtgcctggcctacgacttctacccagggaaaattgatgtgcactggactcgggccggcgaggtgcaggagcctgagttacggggagatgttcttcacaatggaaatggcacttaccagtcctgggtggtggtggcagtgcccccgcaggacacagccccctactcctgccacgtgcagcacagcagcctggcccagcccctcgtggtgccctgggaggccagctaggaagcaagggttggaggcaatgtgggatctcagacccagtagctgcccttcctgcctgatgtgggagctgaaccacagaaatcacagtcaatggatccacaaggcctgaggagcagtgtggggggacagacaggaggtggatttggagaccgaagactgggatgcctgtcttgagtagacttggacccaaaaaatcatctcaccttgagcccacccccaccccattgtctaatctgtagaagctaataaataatcatccctccttgcctagca

SEQ ID NO: 72462 - DNA, 897 bp, Artificial Sequence
  derived and/or modified sequence
atggtgcggatggtgcccgtgctgctgagcctgctgctgctgctgggacccgcagtgccccaggagaatcaggatggacgttacagcttgacatacatctatacaggattgtcaaagcacgtggaagacgtgccagcgttccaagcgcttgggtccttaaacgacttgcagttttttaggtacaattctaaggataggaaatcccaacctatggggttatggcgccaagtggaaggcatggaggattggaaacaggattctcagcttcagaaggccagagaggatatcttcatggagacactgaaggacattgtggaatactacaatgattctaacggctcgcatgttctccaggggcgatttggctgcgagattgaaaacaatcggtcctctggagctttctggaaatattactacgatggaaaagactatatagagttcaataaggaaattcctgcatgggtgcctttcgatccagcggcacagatcaccaaacagaagtgggaggcagagcctgtttacgtccagagggccaaagcttacctcgaagaagaatgccctgcgaccttaagaaagtaccttaagtactcaaagaacattctcgatcgacaagaccccccctctgtggtggtgacctcacaccaggctcccggagagaagaagaaactcaagtgcctggcttatgacttttaccccgggaagatagatgtgcattggacgcgagcaggagaggtccaggagcccgagttgagaggggacgtgcttcacaatgggaacggtacttaccagagctgggtggttgtcgcagttccgccccaggataccgcgccctacagttgccacgtgcagcatagctcactggctcaaccacttgtggtcccatgggaagcctcatag

SEQ ID NO: 72463 - DNA, 897 bp, Artificial Sequence
  derived and/or modified sequence
atggtgcgcatggtgcctgttctgttgtctcttctgcttctgctgggtcctgccgtgccccaggagaaccaggatggacgctacagcttaacctacatctatacaggactgtccaagcatgtggaggacgtcccggcttttcaggcactggggtcactaaacgatttacagttttttaggtacaatagtaaggataggaaatcgcagcccatggggttatggaggcaagtcgagggaatggaagactggaaacaggacagccaactgcagaaggcaagagaagacatctttatggagacactcaaggacatagtagagtactacaatgatagcaacggctcccatgttctgcaggggaggtttggatgcgagattgaaaacaacaggagttctggtgcattctggaagtattactacgatggaaaagactacattgagttcaataaggagatccccgcatgggtgccctttgacccagctgcacagatcaccaaacagaagtgggaagctgaaccggtgtatgtccagagagccaaggcctacctggaagaggaatgtcccgctactctgcgcaaatacctgaaatactccaagaacattctggataggcaggacccgccttcggtggtggtgacctcacaccaagcccctggagagaagaagaagctaaagtgcctggcatacgacttttatccagggaagatcgatgtgcattggacacgcgcaggcgaggtccaggagcccgaactccgtggtgatgtcctccacaacggcaacggtacttaccaaagctgggttgtggttgcagttcctccacaagatacagcgccatactcctgtcacgttcaacactcctctctagctcagcctcttgtagtcccctgggaagcgtcctag

SEQ ID NO: 72464 - DNA, 897 bp, Artificial Sequence
  derived and/or modified sequence
atggtgagaatggtgcccgtgctgctgagcctgctgctgctgctgggccccgccgtgccccaggagaaccaggacggcagatacagcctgacctacatctacaccggcctgagcaagcacgtggaggacgtgcccgccttccaggccctgggcagcctgaacgacctgcagttcttcagatacaacagcaaggacagaaagagccagcccatgggcctgtggagacaggtggagggcatggaggactggaagcaggacagccagctgcagaaggccagagaggacatcttcatggagaccctgaaggacatcgtggagtactacaacgacagcaacggcagccacgtgctgcagggcagattcggctgcgagatcgagaacaacagaagcagcggcgccttctggaagtactactacgacggcaaggactacatcgagttcaacaaggagatccccgcctgggtgcccttcgaccccgccgcccagatcaccaagcagaagtgggaggccgagcccgtgtacgtgcagagagccaaggcctacctggaggaggagtgccccgccaccctgagaaagtacctgaagtacagcaagaacatcctggacagacaggacccccccagcgtggtggtgaccagccaccaggcccccggcgagaagaagaagctgaagtgcctggcctacgacttctaccccggcaagatcgacgtgcactggaccagagccggcgaggtgcaggagcccgagctgagaggcgacgtgctgcacaacggcaacggcacctaccagagctgggtggtggtggccgtgcccccccaggacaccgccccctacagctgccacgtgcagcacagcagcctggcccagcccctggtggtgccctgggaggccagctag

SEQ ID NO: 72465 - protein, 1406 aa, Artificial Sequence
  derived and/or modified sequence
MWSLTASEGESTTAHFFLGAGDEGLGTRGIGMRPEESDSELLEDEEDEVPPEPQIIVGICAMTKKSKSKPMTQILERLCRFDYLTVVILGEDVILNEPVENWPSCHCLISFHSKGFPLDKAVAYSKLRNPFLINDLAMQYYIQDRREVYRILQEEGIDLPRYAVLNRDPARPEECNLIEGEDQVEVNGAVFPKPFVEKPVSAEDHNVYIYYPSSAGGGSQRLFRKIGSRSSVYSPESSVRKTGSYIYEEFMPTDGTDVKVYTVGPDYAHAEARKSPALDGKVERDSEGKEIRYPVMLTAMEKLVARKVCVAFKQTVCGFDLLRANGHSFVCDVNGFSFVKNSMKYYDDCAKILGNTIMRELAPQFQIPWSIPTEAEDIPIVPTTSGTMMELRCVIAIIRHGDRTPKQKMKMEVKHPRFFALFEKHGGYKTGKLKLKRPEQLQEVLDITRLLLAELEKEPGGEIEEKTGKLEQLKSVLEMYGHFSGINRKVQLTYYPHGVKASNEGQDPQRETLAPSLLLVLKWGGELTPAGRVQAEELGRAFRCMYPGGQGDYAGFPGCGLLRLHSTFRHDLKIYASDEGRVQMTAAAFAKGLLALEGELTPILVQMVKSANMNGLLDSDGDSLSSCQHRVKARLHHILQQDAPFGPEDYDQLAPTRSTSLLNSMTIIQNPVKVCDQVFALIENLTHQIRERMQDPRSVDLQLYHSETLELMLQRWSKLERDFRQKSGRYDISKIPDIYDCVKYDVQHNGSLGLQGTAELLRLSKALADVVIPQEYGISREEKLEIAVGFCLPLLRKILLDLQRTHEDESVNKLHPLYSRGVLSPGRHVRTRLYFTSESHVHSLLSVFRYGGLLDETQDAQWQRALDYLSAISELNYMTQIVIMLYEDNTQDPLSEERFHVELHFSPGVKGVEEEGSAPAGCGFRPASSENEEMKTNQGSMENLCPGKASDEPDRALQTSPQPPEGPGLPRRSPLIRNRKAGSMEVLSETSSSRPGGYRLFSSSRPPTEMKQSGLGFEGCSMVPTIYPLETLHNALSLRQVSEFLSRVCQRHTDAQAQASAALFDSMHSSQASDNPFSPPRTLHSPPLQLQQRSEKPPWLETRFCHVGQAGLELLTSSDLPASASQSAGITGVSHRTQPDSSGPSSTVSSAGPSSPTTVDGNSQFGFSDQPSLNSHVAEEHQGLGLLQETPGSGAQELSIEGEQELFEPNQSPQVPPMETSQPYEEVSQPCQEVPDISQPCQDISEALSQPCQKVPDISQQCQENHDNGNHTCQEVPHISQPCQKSSQLCQKVSEEVCQLCLENSEEVSQPCQGVSVEVGKLVHKFHVGVGSLVQETLVEVGSPAEEIPEEVIQPYQEFSVEVGRLAQETSAINLLSQGIPEIDKPSQEFPEEIDLQAQEVPEEIN

SEQ ID NO: 72466 - protein, 114 aa, Artificial Sequence
  derived and/or modified sequence
MWSLTASEGESTTAHFFLGAGDEGLGTRGIGMRPEESDSELLEDEEDEVPPEPQIIVGICAMTKKSKSKPMTQILERLCRFDYLTVVILGEDVILNEPVENWPSCHCLISFHSK

SEQ ID NO: 72467 - protein, 133 aa, Artificial Sequence
  derived and/or modified sequence
MWSLTASEGESTTAHFFLGAGDEGLGTRGIGMRPEESDSELLEDEEDEVPPEPQIIVGICAMTKKSKSKPMTQILERLCRFDYLTVVILGEDVILNEPVENWPSCHCLISFHSKGFPLDKAVAYSKLRNPFLI

SEQ ID NO: 72468 - protein, 117 aa, Artificial Sequence
  derived and/or modified sequence
  misc_feature (1)..(1): Xaa can be any naturally occurring amino acid
XAGRRGRTTPQTLEFPGAQTLAISRGCRCASPRRGRGGWWSLTARVLYITNKAGTFPFLLGKYLEEKLLGNWVETRFRHIDWAGLELLSSSNRPSLTSQSARITGVNHRARPYFLSK

SEQ ID NO: 72469 - DNA, 4221 bp, Artificial Sequence
  derived and/or modified sequence
atgtggagcctgaccgccagcgagggcgagagcaccaccgcccacttcttcctgggcgccggcgacgagggcctgggcaccagaggcatcggcatgagacccgaggagagcgacagcgagctgctggaggacgaggaggacgaggtgccccccgagccccagatcatcgtgggcatctgcgccatgaccaagaagagcaagagcaagcccatgacccagatcctggagagactgtgcagattcgactacctgaccgtggtgatcctgggcgaggacgtgatcctgaacgagcccgtggagaactggcccagctgccactgcctgatcagcttccacagcaagggcttccccctggacaaggccgtggcctacagcaagctgagaaaccccttcctgatcaacgacctggccatgcagtactacatccaggacagaagagaggtgtacagaatcctgcaggaggagggcatcgacctgcccagatacgccgtgctgaacagagaccccgccagacccgaggagtgcaacctgatcgagggcgaggaccaggtggaggtgaacggcgccgtgttccccaagcccttcgtggagaagcccgtgagcgccgaggaccacaacgtgtacatctactaccccagcagcgccggcggcggcagccagagactgttcagaaagatcggcagcagaagcagcgtgtacagccccgagagcagcgtgagaaagaccggcagctacatctacgaggagttcatgcccaccgacggcaccgacgtgaaggtgtacaccgtgggccccgactacgcccacgccgaggccagaaagagccccgccctggacggcaaggtggagagagacagcgagggcaaggagatcagataccccgtgatgctgaccgccatggagaagctggtggccagaaaggtgtgcgtggccttcaagcagaccgtgtgcggcttcgacctgctgagagccaacggccacagcttcgtgtgcgacgtgaacggcttcagcttcgtgaagaacagcatgaagtactacgacgactgcgccaagatcctgggcaacaccatcatgagagagctggccccccagttccagatcccctggagcatccccaccgaggccgaggacatccccatcgtgcccaccaccagcggcaccatgatggagctgagatgcgtgatcgccatcatcagacacggcgacagaacccccaagcagaagatgaagatggaggtgaagcaccccagattcttcgccctgttcgagaagcacggcggctacaagaccggcaagctgaagctgaagagacccgagcagctgcaggaggtgctggacatcaccagactgctgctggccgagctggagaaggagcccggcggcgagatcgaggagaagaccggcaagctggagcagctgaagagcgtgctggagatgtacggccacttcagcggcatcaacagaaaggtgcagctgacctactacccccacggcgtgaaggccagcaacgagggccaggacccccagagagagaccctggcccccagcctgctgctggtgctgaagtggggcggcgagctgacccccgccggcagagtgcaggccgaggagctgggcagagccttcagatgcatgtaccccggcggccagggcgactacgccggcttccccggctgcggcctgctgagactgcacagcaccttcagacacgacctgaagatctacgccagcgacgagggcagagtgcagatgaccgccgccgccttcgccaagggcctgctggccctggagggcgagctgacccccatcctggtgcagatggtgaagagcgccaacatgaacggcctgctggacagcgacggcgacagcctgagcagctgccagcacagagtgaaggccagactgcaccacatcctgcagcaggacgcccccttcggccccgaggactacgaccagctggcccccaccagaagcaccagcctgctgaacagcatgaccatcatccagaaccccgtgaaggtgtgcgaccaggtgttcgccctgatcgagaacctgacccaccagatcagagagagaatgcaggaccccagaagcgtggacctgcagctgtaccacagcgagaccctggagctgatgctgcagagatggagcaagctggagagagacttcagacagaagagcggcagatacgacatcagcaagatccccgacatctacgactgcgtgaagtacgacgtgcagcacaacggcagcctgggcctgcagggcaccgccgagctgctgagactgagcaaggccctggccgacgtggtgatcccccaggagtacggcatcagcagagaggagaagctggagatcgccgtgggcttctgcctgcccctgctgagaaagatcctgctggacctgcagagaacccacgaggacgagagcgtgaacaagctgcaccccctgtacagcagaggcgtgctgagccccggcagacacgtgagaaccagactgtacttcaccagcgagagccacgtgcacagcctgctgagcgtgttcagatacggcggcctgctggacgagacccaggacgcccagtggcagagagccctggactacctgagcgccatcagcgagctgaactacatgacccagatcgtgatcatgctgtacgaggacaacacccaggaccccctgagcgaggagagattccacgtggagctgcacttcagccccggcgtgaagggcgtggaggaggagggcagcgcccccgccggctgcggcttcagacccgccagcagcgagaacgaggagatgaagaccaaccagggcagcatggagaacctgtgccccggcaaggccagcgacgagcccgacagagccctgcagaccagcccccagccccccgagggccccggcctgcccagaagaagccccctgatcagaaacagaaaggccggcagcatggaggtgctgagcgagaccagcagcagcagacccggcggctacagactgttcagcagcagcagaccccccaccgagatgaagcagagcggcctgggcttcgagggctgcagcatggtgcccaccatctaccccctggagaccctgcacaacgccctgagcctgagacaggtgagcgagttcctgagcagagtgtgccagagacacaccgacgcccaggcccaggccagcgccgccctgttcgacagcatgcacagcagccaggccagcgacaaccccttcagcccccccagaaccctgcacagcccccccctgcagctgcagcagagaagcgagaagcccccctggctggagaccagattctgccacgtgggccaggccggcctggagctgctgaccagcagcgacctgcccgccagcgccagccagagcgccggcatcaccggcgtgagccacagaacccagcccgacagcagcggccccagcagcaccgtgagcagcgccggccccagcagccccaccaccgtggacggcaacagccagttcggcttcagcgaccagcccagcctgaacagccacgtggccgaggagcaccagggcctgggcctgctgcaggagacccccggcagcggcgcccaggagctgagcatcgagggcgagcaggagctgttcgagcccaaccagagcccccaggtgccccccatggagaccagccagccctacgaggaggtgagccagccctgccaggaggtgcccgacatcagccagccctgccaggacatcagcgaggccctgagccagccctgccagaaggtgcccgacatcagccagcagtgccaggagaaccacgacaacggcaaccacacctgccaggaggtgccccacatcagccagccctgccagaagagcagccagctgtgccagaaggtgagcgaggaggtgtgccagctgtgcctggagaacagcgaggaggtgagccagccctgccagggcgtgagcgtggaggtgggcaagctggtgcacaagttccacgtgggcgtgggcagcctggtgcaggagaccctggtggaggtgggcagccccgccgaggagatccccgaggaggtgatccagccctaccaggagttcagcgtggaggtgggcagactggcccaggagaccagcgccatcaacctgctgagccagggcatccccgagatcgacaagcccagccaggagttccccgaggagatcgacctgcaggcccaggaggtgcccgaggagatcaactag

SEQ ID NO: 72470 - DNA, 2454 bp, Artificial Sequence
  derived and/or modified sequence
atgtggagcctgaccgccagcgagggcgagagcaccaccgcccacttcttcctgggcgccggcgacgagggcctgggcaccagaggcatcggcatgagacccgaggagagcgacagcgagctgctggaggacgaggaggacgaggtgccccccgagccccagatcatcgtgggcatctgcgccatgaccaagaagagcaagagcaagcccatgacccagatcctggagagactgtgcagattcgactacctgaccgtggtgatcctgggcgaggacgtgatcctgaacgagcccgtggagaactggcccagctgccactgcctgatcagcttccacagcaagggcttccccctggacaaggccgtggcctacagcaagctgagaaaccccttcctgatcaacgacctggccatgcagtactacatccaggacagaagagaggtgtacagaatcctgcaggaggagggcatcgacctgcccagatacgccgtgctgaacagagaccccgccagacccgaggagtgcaacctgatcgagggcgaggaccaggtggaggtgaacggcgccgtgttccccaagcccttcgtggagaagcccgtgagcgccgaggaccacaacgtgtacatctactaccccagcagcgccggcggcggcagccagagactgttcagaaagatcggcagcagaagcagcgtgtacagccccgagagcagcgtgagaaagaccggcagctacatctacgaggagttcatgcccaccgacggcaccgacgtgaaggtgtacaccgtgggccccgactacgcccacgccgaggccagaaagagccccgccctggacggcaaggtggagagagacagcgagggcaaggagatccagtaccccgtgatgctgaccgccatggagaagctggtggccagaaaggtgtgcgtggccttcaagcagaccgtgtgcggcttcgacctgctgagagccaacggccacagcttcgtgtgcgacgtgaacggcttcagcttcgtgaagaacagcatgaagtactacgacgactgcgccaagatcctgggcaacaccatcatgagagagctggccccccagttccagatcccctggagcatccccaccgaggccgaggacatccccatcgtgcccaccaccagcggcaccatgatggagctgagatgcgtgatcgccatcatcagacacggcgacagaacccccaagcagaagatgaagatggaggtgaagcaccccagattcttcgccctgttcgagaagcacggcggctacaagaccggcaagctgaagctgaagagacccgagcagctgcaggaggtgctggacatcaccagactgctgctggccgagctggagaaggagcccggcggcgagatcgaggagaagaccggcaagctggagcagctgaagagcgtgctggagatgtacggccacttcagcggcatcaacagaaaggtgcagctgacctactacccccacggcgtgaaggccagcaacgagggccaggacccccagagagagaccctggcccccagcctgctgctggtgctgaagtggggcggcgagctgacccccgccggcagagtgcaggccgaggagctgggcagagccttcagatgcatgtaccccggcggccagggcgactacgccggcttccccggctgcggcctgctgagactgcacagcaccttcagacacgacctgaagatctacgccagcgacgagggcagagtgcagatgaccgccgccgccttcgccaagggcctgctggccctggagggcgagctgacccccatcctggtgcagatggtgaagagcgccaacatgaacggcctgctggacagcgacggcgacagcctgagcagctgccagcacagagtgaaggccagactgcaccacatcctgcagcaggacgcccccttcggccccgaggactacgaccagctggcccccaccagaagcaccagcctgctgaacagcatgaccatcatccagaaccccgtgaaggtgtgcgaccaggtgttcgccctgatcgagaacctgacccaccagatcagagagagaatgcaggaccccagaagcgtggacctgcagctgtaccacagcgagaccctggagctgatgctgcagagatggagcaagctggagagagacttcagacagaagagcggcagatacgacatcagcaagatccccgacatctacgactgcgtgaagtacgacgtgcagcacaacggcagcctgggcctgcagggcaccgccgagctgctgagactgagcaaggccctggccgacgtggtgatcccccaggagtacggcatcagcagagaggagaagctggagatcgccgtgggcttctgcctgcccctgctgagaaagatcctgctggacctgcagagaacccacgaggacgagagcgtgaacaagctgcaccccctgtag

SEQ ID NO: 72471 - DNA, 5083 bp, Artificial Sequence
  derived and/or modified sequence
atgtggtcattgacggccagtgagggcgagagtaccacggcccacttcttccttggagctggagatgaggggctgggcacccgtggaataggcatgaggccagaagagagtgacagcgagctccttgaggatgaggaggatgaagtgcctcctgaacctcagatcattgttggcatctgtgccatgaccaagaaatccaagtccaagccaatgactcaaatcctagagcgactctgcagatttgactacctgactgttgtcattctgggagaagatgtaatccttaatgaacctgtggaaaactggccatcctgccactgcctcatctctttccactccaaaggctttcctctggacaaagctgttgcttactccaagcttcgaaacccctttcttatcaatgatctggccatgcagtattacatccaagataggagggaggtgtaccggatcctgcaggaagagggtattgatctgcctcgatatgctgtgctcaaccgtgatcctgcccggcctgaggaatgcaacctgatagaaggtgaagaccaagtagaggtcaatggagctgtctttcccaagccctttgtggagaagccagtgagtgcagaagaccacaatgtttacatctactaccccagctcagctggaggaggaagccagcgtctctttcgtaagattggcagccgaagcagtgtttactctcctgagagcagcgtccgaaagacggggtcgtacatctatgaggagtttatgccaacagatggcacagatgtcaaggtgtatacagtggggccagattatgcccatgctgaagctagaaaatctccagctttggatgggaaggttgaacgagacagtgaggggaaagagattcgatatccagtcatgctgactgccatggaaaagctggtggccaggaaagtctgcgtagctttcaagcaaacagtttgtggatttgaccttcttcgtgccaatggtcattcctttgtgtgtgatgtcaatggctttagttttgtcaagaactcgatgaaatactacgatgactgtgccaagattctggggaacaccataatgcgggagcttgccccacagttccagattccatggtccatccccacggaggctgaggacattcccattgttcccaccacatctggcactatgatggaacttcgttgtgtcattgcaattattcgtcatggggatcgtactcccaagcagaagatgaagatggaagtgaaacacccaaggttttttgctctgtttgaaaaacatggtggctacaagacagggaaattaaaactcaagcgacctgagcagctccaggaggtgctggatatcacaaggctgttgttggctgaactggagaaagaaccaggtggtgagatcgaggagaagactggaaaactagagcagctgaagtctgtactggagatgtatggtcacttctcaggtataaaccggaaggtacaattgacttactaccctcatggagtaaaagcttctaatgaggggcaagatccacagagggaaactctggccccatctctgttgctggtactgaagtggggtggagaactgactcctgctggccgtgttcaggctgaggagctggggcgagcttttcgctgcatgtaccctggaggacagggtgactatgctggcttccctggttgtgggctgcttcgtctccatagcactttccgccacgatctcaagatctatgcctctgatgagggtcgtgttcagatgactgctgctgccttcgccaagggccttctggctctagaaggggagctgacacccattttggtgcaaatggtgaagagtgccaacatgaatgggctactggacagcgatggggattccttgagcagctgccagcaccgggtgaaggctcggctgcaccatattctacagcaggatgcgccctttggccctgaggactacgatcagctggctcccaccagaagtacttccctgctcaactccatgactatcatccagaatcctgtgaaggtctgtgatcaggtatttgccctgatcgaaaacctcacccaccagatccgggaacgaatgcaggaccccaggtctgtagacctgcagctctaccacagtgagacactagagctaatgctacagcgttggagcaagctggagcgtgactttcgacagaagagtgggcgctatgatatcagtaagatccctgacatctatgactgtgtcaagtatgatgtgcagcacaatgggagtctgggacttcaaggcacagcagagttgctccgtctctctaaggcactggctgatgtggtcattccccaggagtacgggatcagtcgggaggagaaactggaaattgctgtgggcttctgtcttccactgttgcggaagatactacttgacctgcagagaacccacgaggatgagtctgtcaacaagctgcatcccctgtactcccgaggcgtgctctccccaggtcgccacgttcgaacgcgtctctatttcaccagtgagagccatgtccactccctgctcagtgtcttccgttatggaggacttcttgatgagacccaggatgcacaatggcagcgagctttggattatcttagtgccatctcagagcttaactacatgacccagattgtcatcatgctttatgaggacaacacacaggatcccttatcagaggaacggttccatgtggagctacacttcagccccggagtgaaaggtgttgaggaagaaggcagtgccccggctggctgtggattccgtccagcctcttctgagaatgaggagatgaaaaccaaccaaggcagtatggagaacctgtgtccaggaaaggcatcagatgaaccagaccgggcattgcagacttcaccccagcctcctgagggccctggccttccgaggagatcacccctcattcgtaaccgaaaagctggttccatggaggtactttctgagacttcatcctcgaggcctggtggctaccggctcttttcatcttcacggccacccacagaaatgaagcagagtggcctagggtttgaagggtgttccatggtgcctaccatctaccctctggaaacactgcataatgccctttccctacgtcaagtgagtgaattcttgagtagagtctgccagcgccacactgatgcccaggcacaggcatctgcagccctctttgattccatgcacagcagccaggcctcagataacccattttctccaccacgtactcttcattcacctcccctgcaactccagcagcgctctgagaagcccccttggttagagacaaggttttgccatgttggccaggctggtttagagctcctgacctcaagtgatctgcctgcctcggcctcccaaagtgctgggattacaggcgtgagccaccgcacccagccagacagcagtggcccttctagcactgtgtccagtgctggtccttcttcccctactacagtagatggtaactcccaatttggcttcagtgatcaaccctccctaaattcacacgtggctgaagaacatcaaggccttgggctgctccaggagacccctgggagtggagcacaagagctctccatagaaggggagcaagagctttttgaaccaaatcagtccccacaggtgccacctatggaaaccagccagccatacgaggaggtcagccagccatgtcaggaggtccctgacatcagccagccatgccaggacatttctgaggcgctcagccagccatgtcagaaggtccctgacatcagccagcaatgccaggagaaccatgacaatggtaaccacacatgccaggaggtccctcacatcagccagccatgccagaagtccagccaactgtgccagaaagtctctgaggaagtttgccagctatgtctggagaactccgaggaggtcagccagccatgccagggggtctctgtggaggttggcaagctggtccataagttccatgtaggggttggtagcttggtccaggaaacccttgtagaagttggcagcccagctgaagagatccctgaggaggtcatccagccataccaggagttctctgtggaggttggcaggctggcccaggagacttctgcgatcaatctgttatctcagggcatccctgagattgataaaccatcccaagagttccctgaggagattgatctgcaggcccaggaggtccctgaggagataaattagaagtcctgggtggtccctgaagtgattgatcagctgcctggagagggtattcctcaagcccagcatccatctggtgatccaaaccctcagagccagtctctagcccatgaccagcactcaccccttccaccagcaacatgtgattaattttctcattagtggtatcacactataccagccatttgagccagcaaccttttctgttggctaactcactggccagctctcaccagcggtgtctggggaagtagttctctttgtatgaagcatacctgtgccagagctgtggttgaggaggagccagttttaggttcgaagaagccattggctcctcacttagccattagacttgaataggatttccttggggtgggttggtctgtcattacccagccttctctgagcatcctaggaaatcacagattgttaaaggaaatgccgcttcactgctgaagacaccatctggcgacagcaaatgcaaaagaggggactctagggtcttcacttttctggggaaatgttcacgacttctcaaggtacgcttagaccatatgtgcattcaggggactcttgtctttgccagcactcctcaggtgagcccgggatggctatctgaaatgtctggaaaatagagtcccttccccaaacatctgacatggccactaaatctttagacttgccttatagatccttccatatcatccccaagtgccccttctgcctcagtcctgttcctctgggcaatagctctagggaaaagtaggtattagactgctgtgcaaaattcagagcaactacttaaaatgctctagaggattcttagccagtctgtgaaagtgggcctcctctgtggtggggctgt

SEQ ID NO: 72472 - DNA, 5559 bp, Artificial Sequence
  derived and/or modified sequence
gcgggactcaagagtagccttcctcgaggacctgcctttcccatttgctgcctgaagttaatgtttcttgctggccaaatcagggacatgccggcattagcgggatgagtgggtgttccggcagggatgtggtcattgacggccagtgagggcgagagtaccacggcccacttcttccttggagctggagatgaggggctgggcacccgtggaataggcatgaggccagaagagagtgacagcgagctccttgaggatgaggaggatgaagtgcctcctgaacctcagatcattgttggcatctgtgccatgaccaagaaatccaagtccaagccaatgactcaaatcctagagcgactctgcagatttgactacctgactgttgtcattctgggagaagatgtaatccttaatgaacctgtggaaaactggccatcctgccactgcctcatctctttccactccaaaggctttcctctggacaaagctgttgcttactccaagcttcgaaacccctttcttatcaatgatctggccatgcagtattacatccaagataggagggaggtgtaccggatcctgcaggaagagggtattgatctgcctcgatatgctgtgctcaaccgtgatcctgcccggcctgaggaatgcaacctgatagaaggtgaagaccaagtagaggtcaatggagctgtctttcccaagccctttgtggagaagccagtgagtgcagaagaccacaatgtttacatctactaccccagctcagctggaggaggaagccagcgtctctttcgtaagattggcagccgaagcagtgtttactctcctgagagcagcgtccgaaagacggggtcgtacatctatgaggagtttatgccaacagatggcacagatgtcaaggtgtatacagtggggccagattatgcccatgctgaagctagaaaatctccagctttggatgggaaggttgaacgagacagtgaggggaaagagattcgatatccagtcatgctgactgccatggaaaagctggtggccaggaaagtctgcgtagctttcaagcaaacagtttgtggatttgaccttcttcgtgccaatggtcattcctttgtgtgtgatgtcaatggctttagttttgtcaagaactcgatgaaatactacgatgactgtgccaagattctggggaacaccataatgcgggagcttgccccacagttccagattccatggtccatccccacggaggctgaggacattcccattgttcccaccacatctggcactatgatggaacttcgttgtgtcattgcaattattcgtcatggggatcgtactcccaagcagaagatgaagatggaagtgaaacacccaaggttttttgctctgtttgaaaaacatggtggctacaagacagggaaattaaaactcaagcgacctgagcagctccaggaggtgctggatatcacaaggctgttgttggctgaactggagaaagaaccaggtggtgagatcgaggagaagactggaaaactagagcagctgaagtctgtactggagatgtatggtcacttctcaggtataaaccggaaggtacaattgacttactaccctcatggagtaaaagcttctaatgaggggcaagatccacagagggaaactctggccccatctctgttgctggtactgaagtggggtggagaactgactcctgctggccgtgttcaggctgaggagctggggcgagcttttcgctgcatgtaccctggaggacagggtgactatgctggcttccctggttgtgggctgcttcgtctccatagcactttccgccacgatctcaagatctatgcctctgatgagggtcgtgttcagatgactgctgctgccttcgccaagggccttctggctctagaaggggagctgacacccattttggtgcaaatggtgaagagtgccaacatgaatgggctactggacagcgatggggattccttgagcagctgccagcaccgggtgaaggctcggctgcaccatattctacagcaggatgcgccctttggccctgaggactacgatcagctggctcccaccagaagtacttccctgctcaactccatgactatcatccagaatcctgtgaaggtctgtgatcaggtatttgccctgatcgaaaacctcacccaccagatccgggaacgaatgcaggaccccaggtctgtagacctgcagctctaccacagtgagacactagagctaatgctacagcgttggagcaagctggagcgtgactttcgacagaagagtgggcgctatgatatcagtaagatccctgacatctatgactgtgtcaagtatgatgtgcagcacaatgggagtctgggacttcaaggcacagcagagttgctccgtctctctaaggcactggctgatgtggtcattccccaggagtacgggatcagtcgggaggagaaactggaaattgctgtgggcttctgtcttccactgttgcggaagatactacttgacctgcagagaacccacgaggatgagtctgtcaacaagctgcatcccctgtactcccgaggcgtgctctccccaggtcgccacgttcgaacgcgtctctatttcaccagtgagagccatgtccactccctgctcagtgtcttccgttatggaggacttcttgatgagacccaggatgcacaatggcagcgagctttggattatcttagtgccatctcagagcttaactacatgacccagattgtcatcatgctttatgaggacaacacacaggatcccttatcagaggaacggttccatgtggagctacacttcagccccggagtgaaaggtgttgaggaagaaggcagtgccccggctggctgtggattccgtccagcctcttctgagaatgaggagatgaaaaccaaccaaggcagtatggagaacctgtgtccaggaaaggcatcagatgaaccagaccgggcattgcagacttcaccccagcctcctgagggccctggccttccgaggagatcacccctcattcgtaaccgaaaagctggttccatggaggtactttctgagacttcatcctcgaggcctggtggctaccggctcttttcatcttcacggccacccacagaaatgaagcagagtggcctagggtttgaagggtgttccatggtgcctaccatctaccctctggaaacactgcataatgccctttccctacgtcaagtgagtgaattcttgagtagagtctgccagcgccacactgatgcccaggcacaggcatctgcagccctctttgattccatgcacagcagccaggcctcagataacccattttctccaccacgtactcttcattcacctcccctgcaactccagcagcgctctgagaagcccccttggttagagacaaggttttgccatgttggccaggctggtttagagctcctgacctcaagtgatctgcctgcctcggcctcccaaagtgctgggattacaggcgtgagccaccgcacccagccagacagcagtggcccttctagcactgtgtccagtgctggtccttcttcccctactacagtagatggtaactcccaatttggcttcagtgatcaaccctccctaaattcacacgtggctgaagaacatcaaggccttgggctgctccaggagacccctgggagtggagcacaagagctctccatagaaggggagcaagagctttttgaaccaaatcagtccccacaggtgccacctatggaaaccagccagccatacgaggaggtcagccagccatgtcaggaggtccctgacatcagccagccatgccaggacatttctgaggcgctcagccagccatgtcagaaggtccctgacatcagccagcaatgccaggagaaccatgacaatggtaaccacacatgccaggaggtccctcacatcagccagccatgccagaagtccagccaactgtgccagaaagtctctgaggaagtttgccagctatgtctggagaactccgaggaggtcagccagccatgccagggggtctctgtggaggttggcaagctggtccataagttccatgtaggggttggtagcttggtccaggaaacccttgtagaagttggcagcccagctgaagagatccctgaggaggtcatccagccataccaggagttctctgtggaggttggcaggctggcccaggagacttctgcgatcaatctgttatctcagggcatccctgagattgataaaccatcccaagagttccctgaggagattgatctgcaggcccaggaggtccctgaggagataaattagaagtcctgggtggtccctgaagtgattgatcagctgcctggagagggtattcctcaagcccagcatccatctggtgatccaaaccctcagagccagtctctagcccatgaccagcactcaccccttccaccagcaacatgtgattaattttctcattagtggtatcacactataccagccatttgagccagcaaccttttctgttggctaactcactggccagctctcaccagcggtgtctggggaagtagttctctttgtatgaagcatacctgtgccagagctgtggttgaggaggagccagttttaggttcgaagaagccattggctcctcacttagccattagacttgaataggatttccttggggtgggttggtctgtcattacccagccttctctgagcatcctaggaaatcacagattgttaaaggaaatgccgcttcactgctgaagacaccatctggcgacagcaaatgcaaaagaggggactctagggtcttcacttttctggggaaatgttcacgacttctcaaggtacgcttagaccatatgtgcattcaggggactcttgtctttgccagcactcctcaggtgagcccgggatggctatctgaaatgtctggaaaatagagtcccttccccaaacatctgacatggccactaaatctttagacttgccttatagatccttccatatcatccccaagtgccccttctgcctcagtcctgttcctctgggcaatagctctagggaaaagtaggtattagactgctgtgcaaaattcagagcaactacttaaaatgctctagaggattcttagccagtctgtgaaagtgggcctcctctgtggtggggctgtttggcttaggagatgctgtagtagtagagataatcaggttctattttaagcaatcagcagagatcaatattgtacagatacaagcaaaggtttaataaatatatatatatatatttatttctgtagttgtgccagggacagactggccaaagaccaaacactgcagggtccccaagaaatttgtccttatatcattgtgtctgagggccagatatgattatgaagctttttccaaagatccagggatgggaatgggagtgggtaggaggggtaatgcggtcattggagtcgggggctggaacattatgagtgctcaataaatataaactaatgagaatggtggtgatgga

SEQ ID NO: 72473 - DNA, 4221 bp, Artificial Sequence
  derived and/or modified sequence
atgtggtcactgacggccagtgaaggagaatctacgactgcgcactttttcttgggagccggggacgaaggtctcgggactagaggtatcggcatgcgtcccgaagaatccgatagcgagctgctggaagatgaagaggacgaggtgccacctgagcctcaaatcattgtcggaatctgcgccatgacaaagaagtctaaaagtaagcctatgacccaaatactcgaacgactttgcaggtttgactacctaacagtggtcattctgggcgaagacgttatcctgaatgagcccgttgagaactggccttcgtgccattgcctcatctcatttcacagtaagggctttccattggacaaagccgttgcatattctaagctgcgaaaccccttcctgatcaacgacctggctatgcagtattatatccaggatcggcgggaggtgtataggatcttgcaggaggagggaatcgatctcccccgttatgcggtcttgaatcgcgaccccgctcgacccgaagaatgcaatctgatcgaaggggaagatcaggtagaagtcaatggagccgtgtttccaaagccatttgtcgaaaaaccagttagtgctgaggaccacaatgtgtatatatactatccgtcttccgccggcggcggcagtcagagactctttaggaagatagggtctcgttctagtgtgtattcgccagaatccagtgtgcggaagactgggtcctacatctatgaagagttcatgcccacagatggaacagatgttaaggtgtacacagtggggcctgattacgcacacgcagaggcgagaaagtctccggcccttgatgggaaagtggagagagattctgagggtaaagagatccgatacccagtgatgctgactgcaatggagaagcttgttgcacggaaggtgtgtgtggccttcaagcagaccgtgtgcggattcgacctgttgcgggcgaatggccactcctttgtgtgcgatgtgaacggtttctcttttgtcaagaactctatgaagtactatgatgattgcgcgaagatcctgggcaacaccattatgcgggaactagccccccaattccagattccatggtccatccctactgaggccgaggatattcctattgtccccaccaccagtggcaccatgatggaactgaggtgtgtgatcgcaatcatccgccatggagacagaacaccaaaacagaaaatgaagatggaggtgaaacaccctcgtttcttcgccctgttcgagaagcacggaggctacaagaccggcaagctaaaattaaagagaccagagcagcttcaggaggtgctggacataactcgcctactgctggctgaactcgaaaaagagcctgggggcgagattgaggagaaaacaggcaagcttgagcagctgaaatccgtcctcgagatgtatggacactttagtggcataaaccggaaggttcagttaacctactaccctcatggggtgaaggcctccaacgagggccaggacccacagagggagacacttgcaccctccctactgctggttctgaagtgggggggggagttgacacccgctgggcgcgtgcaggcagaagaactagggagagcttttcgttgtatgtatccaggtgggcagggcgactatgccggattccctggatgtggattactcagactgcatagtacctttcggcacgatcttaagatttatgcttccgatgaaggacgggttcagatgaccgctgcagcttttgcaaagggtctcctagcccttgagggcgaactgacccctattctggtgcagatggtcaaaagtgctaacatgaacggcctcctcgattctgatggggacagtctgtcatcttgtcaacacagagtcaaagcccggctgcatcatatcttacagcaggatgcacctttcgggcctgaagattacgatcaactagcaccaacaaggtcaacaagcctgctgaacagcatgacaattatacagaaccccgtaaaggtgtgtgatcaggtgttcgctctgatagaaaacctgacccatcagatacgcgaaaggatgcaggacccacgctccgtggatctgcagctgtaccattccgagaccctggagctgatgctccagcgatggtcaaagcttgagcgagacttcaggcaaaagtccgggcgctatgacatcagtaagattccggacatctatgactgtgtgaaatatgatgttcagcataatggctccctcggtctgcagggaactgccgagctgttgcgactgagtaaagcacttgcagatgtggttataccacaggaatacggcatctctcgcgaggagaagttggagattgctgtaggcttctgcttacccctgttacgcaaaatactgctagacctccagcgcactcatgaagatgaatcggtgaataaattgcatcctctatatagcaggggagtgctgtcacctgggcggcatgtgaggacccgactctacttcacaagcgaatcgcacgtgcactctcttctgagcgtctttagatatggtggtctcctggatgagacccaggacgctcagtggcagagggccctggactatctgtcagcaatcagtgaacttaattacatgacacagattgtgattatgctgtatgaagacaacacgcaagatccgctgagtgaagaaagattccatgtggagctgcatttttctcccggagtgaaaggggttgaggaggaaggctctgcaccggccggctgcgggtttaggcctgcctccagtgagaacgaagaaatgaaaaccaaccagggcagcatggagaacctgtgccccggaaaggcctccgacgagcctgaccgcgcccttcaaacttccccccaaccgcctgaaggacctggtctcccccgccgcagccccctgatccgaaatcgaaaggccgggagcatggaggtcctttccgagacaagttcctcccgacccgggggttaccgccttttctcctcaagccgcccaccaacggaaatgaagcagagcgggctaggtttcgagggctgctccatggtccctacaatttacccactcgaaaccttgcataatgcgttgagccttcgacaggtgagcgagtttctcagccgcgtctgccagagacatacagacgcacaggctcaggcaagcgcagctctgtttgacagcatgcattcgtcacaggcaagtgataatccattcagcccccccaggaccctccactctccccccctccagctccagcagcgctctgaaaagcctccttggctggaaactagattttgtcacgttggccaggcaggactcgaattactcacctcatccgacttaccagcgtcagcatctcagagcgccggaatcacaggagtgtcacaccggactcagcctgactccagcggcccaagcagtactgtgagttccgccggtcctagttcccctacaaccgtggatggaaattcccagttcgggttttcagatcagccttctttaaacagtcacgtcgccgaggagcaccaaggtctgggcttgttgcaggagacaccaggctctggggcccaggagctgtccattgagggcgaacaagagttgttcgagccaaatcaatcaccacaggtgcctcccatggaaacttcacagccctacgaagaggtgtctcagccatgtcaggaggtgccagatattagccagccatgccaggacatttcagaggcactgtcacagccatgccagaaggtgccagatatctctcaacagtgccaggaaaaccatgacaacggcaatcacacttgtcaggaggtgcctcatatctcgcagccctgccagaagagttcacagctatgccaaaaggtctctgaggaggtttgtcaactctgtctagaaaactcagaggaggtcagccaaccttgccaaggcgtatcagtggaggtcggaaaattggttcacaaatttcatgtgggtgttggttccctagtccaggagaccctggtggaagtgggatctccagcagaagaaattcctgaggaagtgatacagccttaccaagagttttcagtggaagtggggcggcttgcccaggagaccagcgcgatcaatctgctgtctcagggcatccccgagattgacaagcccagccaggagtttccagaagagatcgacttacaagcacaagaagtccctgaagaaattaactag

SEQ ID NO: 72474 - DNA, 4221 bp, Artificial Sequence
  derived and/or modified sequence
atgtggagcttaaccgccagcgaaggcgagagtaccactgcccattttttcttgggtgcaggggatgagggcctcggcacacgcggcattggcatgaggcctgaggagtcagactctgaactcctggaagacgaagaggacgaagtgccccctgaacctcagatcatagtggggatttgcgctatgacaaagaaaagcaagagcaagcccatgacacagatcctggaacggctgtgccgctttgattatctgaccgtggtcatcctgggcgaggatgtaatactcaatgaacccgtggaaaattggcccagctgtcattgcctaataagtttccattcgaagggctttccgcttgacaaggcggtggcgtactcaaaattgagaaacccattcctgatcaacgacctggccatgcagtattacatccaagataggcgcgaagtgtaccgcattctgcaagaggaagggattgacctaccccggtatgctgtcctcaacagagaccccgcacggcccgaagagtgtaatctgatcgaaggtgaggaccaggtcgaagtaaatggagctgttttccctaaaccgtttgtagagaagcctgtttctgccgaagaccacaacgtttacatctactaccctagttccgccggtggcggatcgcagcggctgttccgaaaaattggttcccgctcatccgtgtactcccccgagagctcggtgaggaagaccggatcgtatatttacgaggagtttatgcccaccgacggtaccgacgttaaagtttacacagtcggacctgattacgcccacgcagaggccagaaagtcgccagcactcgacggcaaagtggaacgggattctgagggtaaagagataaggtaccccgtgatgctgactgctatggagaagttagtagccagaaaagtctgtgtggcctttaagcagacagtctgcggctttgatctgctccgcgctaatgggcatagtttcgtgtgtgacgttaacggtttttcatttgtaaagaactcaatgaaatactacgatgactgcgctaaaatactcggcaacacgatcatgcgggaactcgcccctcagtttcagattccgtggagcataccaaccgaagctgaggacatacctattgtaccgaccacatctggcacaatgatggaactcaggtgtgtcattgccataattaggcacggagacagaaccccaaagcagaaaatgaagatggaggttaaacaccctcggttcttcgctttgtttgaaaagcacgggggctataagactggcaagctgaaattaaaacgccccgagcaattacaggaagtcctcgatataacaaggctgttgcttgctgaacttgagaaggagccgggtggtgagattgaagagaagaccgggaagcttgagcagctcaaaagcgtgcttgaaatgtacgggcatttttctggcattaatcggaaggtccagctgacatactacccccacggcgtgaaggcatcgaatgaagggcaggatccacagagagaaaccctagcaccttctcttctgttggtacttaaatggggcggggagctcactcctgctgggcgcgtccaagctgaagaattaggcagagctttccggtgcatgtatcccggcggtcagggcgattatgccggctttcccggatgcgggttgctgcggcttcacagtaccttccgccatgatttgaagatttatgcttctgacgagggaagggttcaaatgaccgccgcagcctttgctaaagggcttttggccctggagggggagctcacgcccatcttagtgcagatggtcaagagtgctaatatgaatggcctcctggattccgacggcgattcgctctcatcatgtcagcaccgagtaaaggcccgcctccatcacatcctgcagcaagatgccccctttggtcctgaagattacgaccagctggcccctactcgtagtacttcactgctcaactcaatgacaattatacagaaccccgtgaaagtgtgcgaccaagtgttcgccctgatcgagaacctcactcaccaaatccgagaacgtatgcaggacccccgaagtgtggatctgcagctgtatcacagtgaaacactggagcttatgcttcaacggtggtctaagttggagagggattttcgccagaagtcaggccgatacgacatttctaagatcccagacatttacgattgtgtgaagtacgacgtacagcataacggttccctagggttacagggaactgcagaactgctcagattgtctaaggccttggctgatgtggtgatcccgcaggagtatggcataagccgagaagaaaagttggaaatcgcggttgggttctgcctcccgttactgcgcaagattctgctcgatctgcaaaggacgcatgaagacgaatctgtgaacaaactccatcccctgtattcaaggggcgtccttagccctggccgccatgtgcgcacccgtctgtattttacatccgaatcacatgttcacagcctgctgagtgtctttaggtacggcggactacttgacgagacccaggacgcacagtggcagagggctctggactacctgagtgccatctcagaactgaattatatgacccagatagtaatcatgctgtacgaagacaacactcaggatcctctctcggaggagcgcttccacgtggagttacacttcagccccggagttaaaggagtagaggaggagggatccgcccccgccggatgcggtttccgtccagcttcatcagaaaatgaggagatgaaaactaatcagggctctatggagaacctttgtccaggtaaagccagcgacgagcccgatcgcgctctccagacctcccctcagcctccagaagggcctggccttcctcgcagaagtcccttgatcagaaacagaaaagctggctcgatggaagtgctcagcgagactagctcatcacggcctggaggataccggctcttcagtagtagccgaccacccaccgagatgaaacagagcggcctggggtttgaagggtgtagtatggttcccaccatctatccacttgaaaccctgcacaacgcgctgtccctacgacaggtgagtgaattcctctctcgagtgtgccagcgccataccgatgcacaagcccaggcctcagccgctctgttcgactccatgcactcgtcccaggcttccgacaacccattttcaccgccacgcacacttcactcaccgcctctccaactccagcaacggtccgagaagcctccatggttggagaccagattctgccatgtgggtcaagccggactggaactccttactagctctgatttacccgcctctgcgtctcagtctgctggtattaccggcgtgtctcatcgtacccagccggatagttctggaccctcctctaccgttagcagcgctggacccagcagtcccactaccgtcgacggaaactcgcagttcggtttctcggaccagccctcactgaactcccatgttgctgaagagcatcagggcctgggtctgcttcaggagactcccgggtctggggctcaagagctttcaattgaaggagagcaagaactctttgaacccaatcagagcccacaggtgcccccaatggaaacttctcagccctacgaggaagtgagtcagccttgccaggaagtgcccgatatcagccagccatgccaggacatatcagaagccctctcacagccatgtcagaaagtgccagacattagtcaacagtgccaggagaatcatgacaacgggaaccatacttgccaagaagttcctcacatcagtcagccctgtcagaaaagctcgcagctgtgtcagaaggtcagtgaagaagtgtgtcagctgtgcctggagaatagtgaggaagtgagccaaccctgccagggggtgtccgttgaggtaggaaagctggtacacaaatttcatgttggcgtgggctcgttagttcaggagacgttagtggaagttggaagtccagccgaggaaatcccagaggaagtcattcagccatatcaggagttcagcgtggaagtgggcaggttggcacaagaaactagtgcaatcaatcttctttctcagggcataccggagatagacaaacccagccaggagttcccggaggaaattgacctgcaggctcaggaggtccccgaggaaatcaattag

SEQ ID NO: 72475 - DNA, 2454 bp, Artificial Sequence
  derived and/or modified sequence
atgtggtccctgacagcatccgagggcgagtctactacagctcatttcttcctgggcgccggcgacgaagggctgggcactcggggcatcggaatgcgaccagaggagtccgattctgaactcctggaggatgaggaagacgaagttccaccggaacctcagattatagtgggaatctgcgcgatgaccaagaaaagcaagagcaagccgatgacacagattcttgagcgcctgtgccgtttcgattatctcaccgtcgttatattaggtgaggacgttatcctcaatgaaccagtggagaactggcctagctgccattgcctgatttccttccactcaaaagggtttcctctggataaggccgtagcctactcgaagttacgaaacccatttcttattaatgatttagccatgcagtactatatccaggacaggcgcgaggtgtataggatcctgcaagaagaaggtatcgacttgccacggtacgcagtacttaacagagatcctgcccgcccagaagagtgcaacctgatcgagggggaagatcaagtcgaagtcaacggtgccgtcttccccaagcctttcgtggaaaaacccgtgagtgctgaagaccacaatgtgtacatatactacccctcttccgctgggggcgggagccagcggttgtttagaaagatcggttcacggtcgagcgtttacagtcctgaaagttcagtgagaaagactggatcttacatctacgaggaatttatgccgactgatgggaccgacgtaaaagtgtacacggtgggcccagattacgcccatgcagaagcaagaaagagccctgccctcgacgggaaggtggagcgcgacagtgagggcaaggaaattcagtacccagtgatgctgactgccatggagaagttagtcgccaggaaggtgtgcgtggcatttaagcaaacagtctgtgggttcgatctactgagggctaacgggcacagctttgtctgcgacgtgaacggattctcttttgtcaagaattccatgaaatactacgatgattgtgccaagatccttgggaatacgattatgcgagagcttgccccccagtttcagattccatggagcatcccaacagaagccgaggacatcccgatcgtccccaccacctctggaactatgatggagctgcgatgtgtgatcgcaattatcaggcacggggaccggacccctaagcagaagatgaagatggaagtgaaacatcctaggtttttcgccctttttgaaaaacatggaggatataaaactgggaaacttaaactcaagaggcctgaacagttgcaagaagtgctggatatcactcggctccttcttgcagaactcgagaaggagcccgggggggaaatcgaggaaaaaacgggaaaactcgagcagcttaagtcagttcttgaaatgtatggccactttagtggaatcaacagaaaagtccaacttacctattaccctcatggcgttaaggcatccaatgagggccaggatccccagcgcgagacactggcgcctagtcttcttctggttttgaagtggggaggggagctaaccccagcggggagggttcaagccgaggaattggggagggctttcagatgcatgtacccgggtggacagggcgactacgcgggcttccccggctgtggactcttgcgcctgcatagcacctttcgacacgatctcaagatctacgcctcagatgaaggtagggtgcagatgaccgctgccgcgttcgctaagggtttactcgccctggagggagagctgaccccaatcctggtgcagatggtgaagagcgccaatatgaacgggttgcttgactccgatggagactctctgtcatcctgccagcaccgggtgaaagctcgattgcaccacatcctgcagcaggatgcacctttcggcccagaggactatgaccaactagccccaaccaggtcgaccagcctgctcaatagcatgacaattatccagaatcctgtgaaggtttgtgatcaagtgtttgcgctgattgagaatctgacccaccagattcgggagaggatgcaagatcccagatccgtggatctccagctgtatcattcagaaaccctagagttgatgctccagagatggtcaaagctggagagagattttagacagaagtcgggacgatacgatatctctaagattcccgacatatacgactgtgtgaagtacgatgtgcagcacaatggctctctaggtttacagggaactgctgagcttctgcgcctctccaaggcgctggctgacgtggtgatcccacaagaatatggcatcagtagagaagagaaactggaaatcgcagtcggtttctgcttaccgctgttaagaaagatccttctggacttgcagaggactcacgaagatgagagcgttaacaaactgcaccccctctag

SEQ ID NO: 72476 - DNA, 4221 bp, Artificial Sequence
  derived and/or modified sequence
atgtggagcctgacagccagcgagggggagagcaccacagcccacttcttcctgggcgctggagatgagggcctgggcacccggggcatcggcatgaggcctgaggagagtgacagcgagctgctggaggatgaggaggatgaggtgcccccagagccccagatcatcgtgggcatctgtgccatgaccaagaagagcaagagcaagcccatgacccagatcctggagcggctgtgccgctttgactacctgactgtggtgatcctgggagaagatgtgatcctgaatgaacctgtggagaactggcccagctgccactgcctgatctccttccacagcaagggcttccccctggacaaggctgtggcctacagcaagctgaggaaccccttcctgatcaatgacctggccatgcagtactacatccaggacagaagagaggtgtaccgcatcctgcaggaggagggcatcgacctgcccaggtatgctgtgctgaacagagatcctgcccggcctgaggagtgcaacctgattgaaggagaggaccaggtggaggtgaatggagctgtgttccccaagccctttgtggagaagcctgtgtctgctgaggaccacaacgtgtacatctactaccccagcagcgctgggggcggcagccagaggctcttcaggaagattggcagccgcagctctgtgtacagccctgagagctctgtgaggaagacaggcagctacatctatgaggagttcatgcccacagatggaacagatgtgaaggtgtacacagtgggccctgactatgcccacgccgaggccaggaagagccctgccctggatggcaaggtggagcgggacagcgagggcaaggagatccgctaccctgtgatgctgacagccatggagaagctggtggccaggaaggtgtgtgtggccttcaagcagacagtgtgtggctttgacctgctgcgggccaacggccacagctttgtgtgtgatgtgaatggcttctcctttgtgaagaacagcatgaagtactatgatgactgtgccaagatcctgggcaacaccatcatgagggagctggccccccagttccagatcccctggagcatccccacagaagctgaggacatccccatcgtgcccaccaccagcggcaccatgatggagctgcgctgtgtgattgccatcatccgccacggggacaggacccccaagcagaagatgaagatggaggtgaagcacccccgcttctttgccctgtttgagaagcatggaggctacaagacaggcaagctgaagctgaagaggcctgagcagctgcaggaggtgctggacatcacccggctgctgctggccgagctggagaaggagcctggaggagaaattgaggagaagacaggcaagctggagcagctgaagtctgtgctggagatgtatggccacttcagcggcatcaacaggaaggtgcagctgacctactacccccatggagtgaaggccagcaatgaaggccaggacccccagcgggagaccctggcccccagcctgctgctggtgctgaagtggggcggggagctgaccccagctggccgggtgcaggccgaggagctgggccgggccttccgctgcatgtacccaggcggccagggcgactatgccggcttccctggctgcggcctgctgcggctgcacagcaccttcagacatgacctgaagatctatgccagtgatgagggccgggtgcagatgacagctgctgcctttgccaagggcctgctggccctggagggggagctgacccccatcctggtgcagatggtgaagagcgccaacatgaatggcctgctggacagtgatggagacagcctgagcagctgccagcaccgggtgaaggcccggctgcaccacatcctgcagcaggatgccccctttggacctgaggactatgaccagctggcccccaccaggagcaccagcctgctgaacagcatgaccatcatccagaaccctgtgaaggtgtgtgaccaggtgtttgccctgattgagaacctgacccaccagatccgggagaggatgcaggaccccaggtctgtggacctgcagctgtaccacagcgagaccctggagctgatgctgcagcgctggagcaagctggagcgggacttccggcagaagagcggccgctatgacatcagcaagatcccagacatctatgactgtgtgaagtatgatgtgcagcacaacggcagcctgggcctgcagggcacagctgagctgctgcggctgagcaaggccctggctgatgtggtgatcccccaggagtatggcatcagccgggaggagaagctggagattgctgtgggcttctgcctgcccctgctgaggaagatcctgctggacctgcagaggacccatgaagatgagagcgtgaacaagctgcaccccctgtacagcagaggagtgctgagccctggccgccacgtgaggacccggctgtacttcaccagcgagagccacgtgcacagcctgctgagcgtcttccgctatggaggcctgctggatgagacccaggatgcccagtggcagagggccctggactacctgagcgccatcagcgagctgaactacatgacccagatcgtcatcatgctgtatgaggacaacacccaggaccccctgtctgaggagcgcttccacgtggagctgcacttcagccctggggtgaagggcgtggaggaggagggcagcgccccagctggctgcggcttccggcctgccagcagtgaaaatgaggagatgaagaccaaccagggctccatggagaacctgtgccctgggaaggccagtgatgagccagaccgggccctgcagaccagcccccagcccccagagggccctggcctgcccaggaggagccccctcatccggaacaggaaggccggctccatggaggtgctgtctgagaccagcagcagcaggcctgggggctaccgcctcttcagcagcagccggcccccaacagagatgaagcagagcggcctgggctttgagggctgcagcatggtgcccaccatctaccccctggagaccctgcacaatgccctgagcctgcggcaggtgtctgagttcctgagccgggtgtgccagaggcacacagatgcccaggcccaggccagcgctgccctgtttgacagcatgcacagcagccaggccagtgacaaccccttcagcccccccaggaccctgcacagcccccccctgcagctgcagcagaggtctgagaagccaccctggctggagacccgcttctgccacgtgggccaggccggcctggagctgctgaccagcagtgacctgcctgccagcgccagccagagcgctggcatcactggagtgagccacaggacccagcctgacagcagcggccccagcagcacagtgagcagcgctggccccagcagccccaccaccgtggatggcaacagccagtttggcttcagtgaccagcccagcctgaacagccacgtggccgaggagcaccagggcctgggcctgctgcaggagaccccaggcagcggggcccaggagctgagcattgaaggagagcaggagctgtttgagcccaaccagagcccccaggtgccccccatggagaccagccagccctatgaggaggtgtcccagccctgccaggaggtgcctgacatcagccagccctgccaggacatcagcgaggccctgagccagccctgccagaaggtgcctgacatcagccagcagtgccaggagaaccacgacaatggaaaccacacctgccaggaggtgccccacatcagccagccctgccagaagagcagccagctgtgccagaaggtgtctgaggaggtgtgccagctgtgcctggagaacagcgaggaggtgtcccagccctgccagggcgtgtctgtggaggtgggcaagctggtgcacaagttccacgtgggcgtgggcagcctggtgcaggagaccctggtggaggtgggcagccctgctgaggagatccctgaggaggtgatccagccctaccaggagttctctgtggaggtgggccgcctggcccaggagaccagcgccatcaacctgctgagccagggcatccctgagattgacaagcccagccaggagttccctgaggagattgacctgcaggcccaggaggtgcctgaggagatcaactag

SEQ ID NO: 72477 - DNA, 2454 bp, Artificial Sequence
  derived and/or modified sequence
atgtggagcctgacagccagcgagggggagagcaccacagcccacttcttcctgggcgctggagatgagggcctgggcacccggggcatcggcatgaggcctgaggagagtgacagcgagctgctggaggatgaggaggatgaggtgcccccagagccccagatcatcgtgggcatctgtgccatgaccaagaagagcaagagcaagcccatgacccagatcctggagcggctgtgccgctttgactacctgactgtggtgatcctgggagaagatgtgatcctgaatgaacctgtggagaactggcccagctgccactgcctgatctccttccacagcaagggcttccccctggacaaggctgtggcctacagcaagctgaggaaccccttcctgatcaatgacctggccatgcagtactacatccaggacagaagagaggtgtaccgcatcctgcaggaggagggcatcgacctgcccaggtatgctgtgctgaacagagatcctgcccggcctgaggagtgcaacctgattgaaggagaggaccaggtggaggtgaatggagctgtgttccccaagccctttgtggagaagcctgtgtctgctgaggaccacaacgtgtacatctactaccccagcagcgctgggggcggcagccagaggctcttcaggaagattggcagccgcagctctgtgtacagccctgagagctctgtgaggaagacaggcagctacatctatgaggagttcatgcccacagatggaacagatgtgaaggtgtacacagtgggccctgactatgcccacgccgaggccaggaagagccctgccctggatggcaaggtggagcgggacagcgagggcaaggagatccagtaccctgtgatgctgacagccatggagaagctggtggccaggaaggtgtgtgtggccttcaagcagacagtgtgtggctttgacctgctgcgggccaacggccacagctttgtgtgtgatgtgaatggcttctcctttgtgaagaacagcatgaagtactatgatgactgtgccaagatcctgggcaacaccatcatgagggagctggccccccagttccagatcccctggagcatccccacagaagctgaggacatccccatcgtgcccaccaccagcggcaccatgatggagctgcgctgtgtgattgccatcatccgccacggggacaggacccccaagcagaagatgaagatggaggtgaagcacccccgcttctttgccctgtttgagaagcatggaggctacaagacaggcaagctgaagctgaagaggcctgagcagctgcaggaggtgctggacatcacccggctgctgctggccgagctggagaaggagcctggaggagaaattgaggagaagacaggcaagctggagcagctgaagtctgtgctggagatgtatggccacttcagcggcatcaacaggaaggtgcagctgacctactacccccatggagtgaaggccagcaatgaaggccaggacccccagcgggagaccctggcccccagcctgctgctggtgctgaagtggggcggggagctgaccccagctggccgggtgcaggccgaggagctgggccgggccttccgctgcatgtacccaggcggccagggcgactatgccggcttccctggctgcggcctgctgcggctgcacagcaccttcagacatgacctgaagatctatgccagtgatgagggccgggtgcagatgacagctgctgcctttgccaagggcctgctggccctggagggggagctgacccccatcctggtgcagatggtgaagagcgccaacatgaatggcctgctggacagtgatggagacagcctgagcagctgccagcaccgggtgaaggcccggctgcaccacatcctgcagcaggatgccccctttggacctgaggactatgaccagctggcccccaccaggagcaccagcctgctgaacagcatgaccatcatccagaaccctgtgaaggtgtgtgaccaggtgtttgccctgattgagaacctgacccaccagatccgggagaggatgcaggaccccaggtctgtggacctgcagctgtaccacagcgagaccctggagctgatgctgcagcgctggagcaagctggagcgggacttccggcagaagagcggccgctatgacatcagcaagatcccagacatctatgactgtgtgaagtatgatgtgcagcacaacggcagcctgggcctgcagggcacagctgagctgctgcggctgagcaaggccctggctgatgtggtgatcccccaggagtatggcatcagccgggaggagaagctggagattgctgtgggcttctgcctgcccctgctgaggaagatcctgctggacctgcagaggacccatgaagatgagagcgtgaacaagctgcaccccctgtag

SEQ ID NO: 72478 - DNA, 4221 bp, Artificial Sequence
  derived and/or modified sequence
atgtggagcctgaccgccagcgagggcgagagcaccaccgcccactttttcctcggcgcaggcgacgaagggctgggaacaaggggtatcgggatgaggccggaagaatccgacagcgagctgctcgaagatgaggaggacgaagtccctcccgagcctcagattatagtgggtatatgtgccatgaccaaaaagtcaaaatccaagccaatgacccagattttggaacgtctgtgtaggtttgactatctgacagtggtgattcttggtgaggacgtgatcctgaatgagcctgtcgaaaattggccctcttgccactgcctgatctcatttcacagtaagggcttccctctggataaggcagtggcctattctaaattgagaaatcccttcctgatcaatgatctcgcaatgcagtactacatacaggacaggcgagaggtttaccgcattctccaggaggagggcattgatttacctaggtacgctgttctcaaccgggaccctgcccggccagaagaatgtaatctcatcgaaggagaggatcaggtggaagtcaatggcgctgtgttccctaagcccttcgtggagaaaccagtgtctgccgaggatcataatgtctacatttactatcccagcagtgccggaggcggcagccaacgactatttaggaagatcggttcaaggtcatctgtgtactcaccggagtcctcagttaggaagacaggttcctacatctatgaggaatttatgcccactgacgggaccgacgtgaaagtttacactgtcgggccagattacgcgcatgccgaggcccgcaagtcccccgccttggatggcaaagttgaaagggatagcgaggggaaggaaattagatatcccgtcatgctgacagctatggaaaaactcgttgcacgcaaggtgtgtgtcgcctttaagcagactgtatgcggatttgatctcctgcgagctaacggccacagctttgtgtgcgacgttaatggtttctcatttgtgaaaaatagtatgaagtattatgacgattgcgccaagatcctgggcaacaccatcatgagagagctcgcaccgcagttccaaatcccatggtcaattcccaccgaagccgaggatatccctattgtgccaactacaagtgggacaatgatggagctaagatgtgtcatcgcgataatccggcacggggaccgaacccctaagcagaagatgaagatggaggtgaagcaccccaggttcttcgctctcttcgagaaacacggcgggtataagaccggaaaactgaagttgaaacggcccgaacaactgcaggaggtgttggatatcaccaggctgctactggccgagctggagaaggagcctggaggagagatcgaagaaaaaaccggaaagcttgagcagctcaagtccgtgctcgaaatgtacgggcatttctccggaataaaccggaaggttcaattgacctactatcctcatggagttaaggctagcaacgaagggcaggatccacagcgagaaactcttgccccgtctttgctgctggtgctgaaatggggcggggagctgactcctgctggtagggtccaggccgaagaactaggccgggctttcaggtgtatgtacccaggcggccaaggcgactacgccggatttcccggctgtggcctgctgcggctccacagtaccttccggcacgatctcaagatctacgcgagcgacgaagggagggttcaaatgacagcggctgcctttgccaagggcttgctagccctggaaggcgaactcacgcctattctggtgcagatggtgaaatcagccaatatgaacggcttgttggattccgatggagactctttaagcagctgccagcacagagttaaagccagactgcaccacatactccagcaggatgccccctttggacccgaggattacgatcagttggccccaactcggagtacaagcctgctgaactccatgaccattatccagaaccctgtcaaagtatgtgatcaagtgttcgcattgatcgaaaacctgacccaccagatcagagagagaatgcaagatcctcgcagcgtcgacttgcagctttaccactccgaaactctggaactgatgttgcagagatggtcaaaacttgagagagatttccgccagaagtccggccgttacgacatctccaaaattccggacatctacgattgtgtcaagtacgacgtgcaacacaatgggtccctcggcctgcaaggcaccgcagaacttctgcgcctgtccaaggccctggccgacgtggtgatcccgcaggagtacggcatatcacgggaagaaaaattggagatagccgtcggcttttgtctccccctcctgcggaagattctactggatcttcagagaactcatgaagacgagtccgtaaataaactgcaccctctgtacagtagaggtgtcctgagccctggccggcacgtcaggactcggctatactttacttctgaatctcatgttcactctttgctcagtgtgttccgctatgggggtcttctggacgaaacgcaggacgcgcagtggcaacgagccctagactacctgtccgcaatatctgagcttaattacatgacgcagattgtgatcatgctctacgaggacaatacccaggacccgctgtcagaggagagattccacgtggaacttcacttctcgcccggggtcaaaggggttgaggaggaggggtctgcgcccgccgggtgcggattccgccctgcttctagcgaaaacgaggagatgaagacaaatcagggctcaatggagaacctctgtccgggaaaggcaagcgatgaacctgatcgggcactgcagacgagtccacagcccccagaaggacccggtttacccaggcgtagccccctgattaggaatagaaaagctggctcaatggaggtgctgagcgagactagtagctcacgtccaggtgggtataggctgttcagtagctccagaccgccgaccgagatgaaacagagtggactgggtttcgaagggtgttctatggtccccaccatataccctttagagacactccacaacgccctcagtttgaggcaggtttcagaatttctctctcgagtatgccaaagacatacagatgcccaggctcaggcttcagcggcactgttcgactcgatgcattcctcccaggcttctgataacccttttagcccgccccgcacactccatagtccccccctgcagctgcagcaacgctctgagaagcctccatggctggagacacgcttctgccatgtgggccaggcggggctcgagttgttgacctcatcagatctgcctgcctccgcctcacagtccgcaggaatcacaggggtgtcacacaggacacaaccagattcttccgggcccagttctaccgtgagtagcgccggcccatcaagccccacaacggtggacggaaacagccagttcggatttagcgatcagccctccctaaacagccatgttgctgaagaacaccaagggcttggtcttctacaagaaacgcctgggtcaggagcccaggaactgagcatcgagggtgagcaggagctgtttgaaccaaaccaaagtccccaggtgcccccgatggagacttcgcagccatacgaggaggttagtcagccttgccaggaagtccccgacatatcccagccgtgtcaggatatttcagaggctttgagtcagccttgccaaaaagtcccagacatttcacagcagtgccaggaaaaccacgacaacggcaaccacacatgccaggaggtcccacatatttctcagccctgccagaaatcctcccagctttgccaaaaagtgtcagaagaggtgtgtcagctgtgccttgaaaattccgaggaagtgagccagccctgccagggagtgtccgtagaagttggaaagctcgttcacaagttccacgtcggggttggttctttggttcaggagaccctagttgaggtgggatccccggcggaggagatccccgaagaggtcatccagccctatcaggaattctctgtggaagtgggcagactggctcaagaaacgtcagcaattaacctcctgagtcaagggatccctgagatcgacaagccaagccaggaattccctgaggagatcgaccttcaggcccaagaggttcccgaagaaataaactag

SEQ ID NO: 72479 - DNA, 4221 bp, Artificial Sequence
  derived and/or modified sequence
atgtggagcctgaccgccagcgagggcgagagcaccaccgcccacttcttcttaggcgcgggagacgaagggctgggtacacgggggatcgggatgaggccagaagagagtgatagcgagctcctggaagatgaagaggatgaggttcctccggaaccccaaatcattgtcggtatctgtgccatgaccaaaaaaagtaagtctaagccgatgacacaaatactggaaaggctgtgcagatttgattatctcaccgtagtgatactcggtgaagatgtgattctgaatgagccagttgaaaactggccctcttgtcattgccttattagcttccatagcaaagggtttccactggacaaagctgtggcttattcgaaactgcggaacccgttcctgatcaacgacctggcaatgcaatattatatacaggacagacgcgaagtgtacaggattttacaggaagagggaatcgacctgccacgttatgcagtcttaaatagagatcctgcccggccagaggaatgcaacttgatcgaaggcgaagaccaggttgaagtgaatggtgctgtgtttcccaagccttttgtggagaaacccgtcagtgctgaggatcataacgtatatatttattatccttcatctgcaggtggtggaagtcagaggctcttcagaaagatcggcagcagaagctcagtgtattccccagagtctagtgttcggaagacgggctcctacatctacgaggagttcatgcccaccgatggcacagacgtcaaagtgtatacagtgggcccagactatgcccacgctgaggcaaggaagtcccctgcgctggacgggaaggtggagcgtgactccgagggtaaggaaatcagatatcctgtaatgttgacggcgatggagaaactggtggcacggaaagtgtgcgtggctttcaagcagaccgtctgcggctttgacttgttgagagccaatggccacagttttgtctgtgatgttaatggattcagctttgtgaagaattcaatgaaatattacgacgattgtgctaagatcctcggaaacactatcatgcgcgaattggctcctcagttccagataccttggagcattcccaccgaagctgaggacatcccaatcgtaccaactacatctggcaccatgatggagctccggtgcgtgatcgctatcattcggcacggcgatcgaaccccaaagcagaaaatgaagatggaagtcaagcacccgcggttctttgctctgttcgagaaacatggcggctacaagactggcaagctgaagttgaaaaggccagagcagttacaggaggtgctcgacataactcgacttttgctcgcagagctggagaaggaacctggtggtgagattgaagaaaagaccggtaaacttgaacagctgaagagcgtcctggagatgtatggacatttcagcggcatcaaccgcaaggtacagctgacatattacccacacggagtgaaggcaagcaatgagggccaagacccgcaacgcgaaacactcgcacctagcctcctgctagtgctaaagtggggaggcgaactcactcccgctggtcgcgttcaggcagaggaactggggcgcgcctttagatgcatgtatccgggaggccagggcgattatgccggcttccccggttgtggcctacttagattacacagcacatttcgacacgacttaaaaatctacgcctctgatgagggccgtgtgcagatgacagcagcggctttcgctaagggactcttggcgcttgagggcgagctgaccccgatactggtccagatggtcaagagcgcaaacatgaacgggttgctggactccgatggcgattctctctcctcttgccagcaccgcgttaaggcgcgtctgcatcatatcctgcagcaagacgcaccttttggccccgaggactatgatcagcttgctcctacaagatctacctctctccttaatagcatgactatcattcagaaccctgttaaggtgtgtgaccaagtgtttgcactcatagaaaatcttacgcaccagatcagagaacggatgcaggatccacggagcgtggatctgcaactgtatcacagtgaaactctggagttgatgttacaaaggtggagcaaactggaacgcgactttcggcagaaatcaggccgatacgatattagcaagatccctgacatatatgactgcgtaaaatatgacgtccagcataatggatctctgggacttcagggcaccgccgaactgctccgcctgtcaaaagctctcgccgatgttgtaattccgcaggaatatggcatctctcgagaggaaaagctagaaatcgccgttggcttttgcctgcccttattgaggaaaattctgctggacttgcagaggacacacgaggacgagtcagtgaataagctgcatcccctgtattctagaggagttttgagtcccggcaggcacgttcgcactcgcctatacttcaccagtgagagtcacgtacactctctgctcagtgttttccgctatggaggtctgctggatgagacacaggacgcgcagtggcaaagggctcttgattacctgtctgctatttcagagcttaattacatgacacagatcgtaataatgttatatgaagacaatactcaggaccctttgagtgaggaaagattccacgttgagctgcactttagcccaggggtcaagggtgttgaggaggagggttccgcccctgctggctgtgggttccgccctgccagtagcgagaacgaggaaatgaaaaccaatcagggaagtatggagaacctgtgtccaggcaaagctagtgatgaacctgatcgagcactccagacatctccacagccgcctgagggccctggtcttccgcgacggtcccctttgatccgtaataggaaggccgggtctatggaggtcttgtctgagacttcgtcgtctcggcccggagggtatagattattctcttcttcacggccacctacggagatgaagcaaagtggcctcggattcgaaggctgcagcatggtaccaacgatatatccgcttgagactttgcacaacgcactgtccctaagacaagtctccgaattcctgagtcgggtgtgtcagcgacatactgatgcccaggcacaggcctccgccgccctgttcgacagcatgcacagctctcaggctagtgataatccattttcccctcctcgcaccctgcactctcccccactgcagctgcagcagcggagcgaaaaacccccatggctggaaactcgattttgccatgtaggtcaagcagggctcgagctgctcacgagttctgacctgccagctagcgcctcacaaagtgcaggaattaccggggtttcccataggactcagccggatagcagtgggccaagttccacggtaagctccgccgggcctagcagcccgactacagtggatgggaacagtcaattcggattttctgatcaacccagcctcaactctcacgtggcagaggagcaccaggggcttggactgctgcaggaaacgcccggatctggggcccaagagttgtccatcgaaggagagcaggagctcttcgaaccaaatcaaagccctcaggtgccccccatggaaacctcccagccatacgaggaggtctcgcaaccttgccaagaggtgcctgatatttcacagccttgccaggacatctccgaggcattatctcaaccgtgtcagaaagtcccagatataagccaacaatgtcaggagaatcacgacaatgggaaccacacatgccaagaggtcccccatatatcacaaccatgtcagaaatcctcacaactctgtcaaaaagtcagcgaagaggtgtgccagctatgtctggaaaattctgaagaggtgtcacagccgtgccagggcgtgtccgttgaagtgggcaagctggtgcacaagtttcatgttggagtgggctccctggtgcaggagactctggtagaagtggggtcgccagccgaagaaatacctgaggaagttattcagccctaccaggagttttcagtggaggtgggccgcctggcccaagagacaagtgctattaacctgctgagccaggggatcccagaaatagacaagccgtcgcaggaatttcccgaggaaatcgacctccaagcccaggaagtgcccgaagagataaactag

SEQ ID NO: 72480 - DNA, 2592 bp, Artificial Sequence
  derived and/or modified sequence
ccttctcttctggtaggactcaagagtagccttcctcgaggacctgcctttcccatttgctgcctgaagttaatgtttcttgctggccaaatcagggacatgccggcattagcgggatgagtgggtgttccggcagggatgtggtcattgacggccagtgagggcgagagtaccacggcccacttcttccttggagctggagatgaggggctgggcacccgtggaataggcatgaggccagaagagagtgacagcgagctccttgaggatgaggaggatgaagtgcctcctgaacctcagatcattgttggcatctgtgccatgaccaagaaatccaagtccaagccaatgactcaaatcctagagcgactctgcagatttgactacctgactgttgtcattctgggagaagatgtaatccttaatgaacctgtggaaaactggccatcctgccactgcctcatctctttccactccaaaggctttcctctggacaaagctgttgcttactccaagcttcgaaacccctttcttatcaatgatctggccatgcagtattacatccaagataggagggaggtgtaccggatcctgcaggaagagggtattgatctgcctcgatatgctgtgctcaaccgtgatcctgcccggcctgaggaatgcaacctgatagaaggtgaagaccaagtagaggtcaatggagctgtctttcccaagccctttgtggagaagccagtgagtgcagaagaccacaatgtttacatctactaccccagctcagctggaggaggaagccagcgtctctttcgtaagattggcagccgaagcagtgtttactctcctgagagcagcgtccgaaagacggggtcgtacatctatgaggagtttatgccaacagatggcacagatgtcaaggtgtatacagtggggccagattatgcccatgctgaagctagaaaatctccagctttggatgggaaggttgaacgagacagtgaggggaaagagattcaatatccagtcatgctgactgccatggaaaagctggtggccaggaaagtctgcgtagctttcaagcaaacagtttgtggatttgaccttcttcgtgccaatggtcattcctttgtgtgtgatgtcaatggctttagttttgtcaagaactcgatgaaatactacgatgactgtgccaagattctggggaacaccataatgcgggagcttgccccacagttccagattccatggtccatccccacggaggctgaggacattcccattgttcccaccacatctggcactatgatggaacttcgttgtgtcattgcaattattcgtcatggggatcgtactcccaagcagaagatgaagatggaagtgaaacacccaaggttttttgctctgtttgaaaaacatggtggctacaagacagggaaattaaaactcaagcgacctgagcagctccaggaggtgctggatatcacaaggctgttgttggctgaactggagaaagaaccaggtggtgagatcgaggagaagactggaaaactagagcagctgaagtctgtactggagatgtatggtcacttctcaggtataaaccggaaggtacaattgacttactaccctcatggagtaaaagcttctaatgaggggcaagatccacagagggaaactctggccccatctctgttgctggtactgaagtggggtggagaactgactcctgctggccgtgttcaggctgaggagctggggcgagcttttcgctgcatgtaccctggaggacagggtgactatgctggcttccctggttgtgggctgcttcgtctccatagcactttccgccacgatctcaagatctatgcctctgatgagggtcgtgttcagatgactgctgctgccttcgccaagggccttctggctctagaaggggagctgacacccattttggtgcaaatggtgaagagtgccaacatgaatgggctactggacagcgatggggattccttgagcagctgccagcaccgggtgaaggctcggctgcaccatattctacagcaggatgcgccctttggccctgaggactacgatcagctggctcccaccagaagtacttccctgctcaactccatgactatcatccagaatcctgtgaaggtctgtgatcaggtatttgccctgatcgaaaacctcacccaccagatccgggaacgaatgcaggaccccaggtctgtagacctgcagctctaccacagtgagacactagagctaatgctacagcgttggagcaagctggagcgtgactttcgacagaagagtgggcgctatgatatcagtaagatccctgacatctatgactgtgtcaagtatgatgtgcagcacaatgggagtctgggacttcaaggcacagcagagttgctccgtctctctaaggcactggctgatgtggtcattccccaggagtacgggatcagtcgggaggagaaactggaaattgctgtgggcttctgtcttccactgttgcggaagatactacttgacctgcagagaacccacgaggatgagtctgtcaacaagctgcatcccctgtga

SEQ ID NO: 72481 - DNA, 2454 bp, Artificial Sequence
  derived and/or modified sequence
atgtggagcctgaccgccagcgagggcgagagcaccaccgcccacttcttcttaggggccggcgatgagggactgggtactcgtggcatcggaatgcggcccgaagagagcgattcggaactgctcgaggacgaggaggatgaggttccccccgaaccccagataatagttggcatatgcgccatgaccaagaagtcaaagagtaaaccaatgacccagattcttgaaagactgtgccgcttcgactatctaacagtggtcatacttggcgaggatgtgatccttaatgagcccgttgaaaattggcctagctgccactgcctcattagcttccactccaaaggttttcccttggacaaagccgtcgcatactcaaaactcaggaatcccttcctaatcaacgacttagccatgcagtactatatccaagataggcgcgaagtctaccgaattctccaagaagaagggatagacctcccccgatacgctgttctgaatagagaccctgctcgtcctgaagagtgtaatctgatcgagggtgaagatcaggtagaggtgaacggcgccgtctttcccaaacccttcgttgagaagcccgtctctgcagaagaccacaatgtgtatatttactatccttcctctgccggaggcggttcacaaagactgtttaggaagataggttcaagaagcagcgtgtacagtcccgagtctagtgtgcgcaagacgggatcttacatctacgaagagttcatgcctacagatggcaccgacgtcaaggtttacactgtgggccccgattacgctcacgccgaggccagaaagtcccctgcattggacggtaaggtggaaagggacagtgaagggaaggaaattcaatacccagtgatgctcaccgctatggagaagttggtcgcccggaaggtctgtgtggccttcaagcagactgtctgtgggtttgacttgctgcgagctaacgggcatagcttcgtatgtgacgtcaacggcttcagcttcgtcaaaaactctatgaaatactacgatgattgtgcaaagatccttggcaacaccatcatgagggagctggcaccacaattccaaatcccctggagtatccccaccgaggccgaggacatccccattgtccccactactagtggcacgatgatggagttgcgatgtgtgatagctatcatcagacatggcgacagaactccaaaacagaagatgaaaatggaggtgaagcaccctaggttcttcgctctgttcgaaaagcacggcggctataagacaggcaagttaaagcttaaacgaccagaacagctgcaggaggtactggatattacccgcttgctgttggccgagttggaaaaagagccaggaggtgaaatcgaagagaaaacaggaaagcttgaacagctgaagtccgttctggaaatgtacggccactttagtggcataaatcgcaaggtgcaactgacctactacccccacggagtgaaagccagtaacgagggacaggaccctcagcgggagacgctggccccctccctcctcctcgtcttgaaatgggggggtgaactgacccccgctggccgggtgcaggcagaggagcttggaagagcctttagatgcatgtatcctggagggcagggcgactacgccggattccccgggtgtgggctcctgcgtctccatagcactttcaggcacgacctcaagatttacgccagtgatgaggggcgagtacagatgacggccgccgcgttcgctaagggcctgctggccctcgaaggggaattaacccctatcctcgtccagatggtcaagtcagccaacatgaatggtctattggacagtgacggagacagcttgagttcctgccagcatagggttaaagctagactgcatcacatactgcagcaggacgcgccatttggccccgaagattacgatcagctggcacctactcggagcacgtctttgctgaacagtatgactattatccagaatcccgtcaaagtttgcgatcaggtgtttgcactgattgagaacctgacacatcaaattcgtgagcgtatgcaggaccccaggtctgtcgatctgcaactatatcattcggagactttggagttaatgctgcagcggtggtcaaagctggaacgcgacttcaggcagaagagcggccgatacgacatatctaaaattccggacatctatgactgtgtgaaatacgacgtgcaacataacggcagtcttggccttcagggcaccgccgaactgttgcgcctgtccaaggcactcgctgatgtagttatcccacaagaatacggaataagtagggaagagaagttggagattgctgtcgggttctgcctgccactgctgcgcaagatcctgctggatctccaacggacccacgaggacgaaagtgtgaataagcttcatccgctgtag

SEQ ID NO: 72482 - DNA, 4221 bp, Artificial Sequence
  derived and/or modified sequence
atgtggtccttgactgcatcagagggcgaatcaacaaccgctcacttttttctgggcgcaggtgatgagggactgggaaccagaggcatcggcatgcgacctgaggaatccgactcagaactgctggaggacgaagaggatgaggtgcctccagagccccaaatcattgtcggcatctgcgccatgaccaagaagtctaagtctaagcccatgacccaaatccttgaaagactgtgccggtttgactatctgacggtcgttattctaggggaggatgtgatcctcaacgagccagtggagaactggcccagttgccactgtctgatcagcttccattcgaaaggctttcctctcgataaggccgtcgcttatagcaagcttcgcaaccccttcctgataaacgaccttgccatgcaatactacatccaggataggcgagaagtgtacaggatcctgcaggaggagggtatcgatcttcccaggtatgccgtcctgaacagagatcctgcaagaccggaggagtgcaacttaatagaaggggaagatcaggtggaggtgaacggtgccgtgttcccaaaacccttcgttgagaagcctgtatccgctgaagaccacaatgtgtacatctattacccaagtagtgcgggtgggggttcacaacgcctgtttcggaagattggcagccgttcttctgtttactcacctgaatctagcgtgagaaaaacaggctcttatatctatgaggaatttatgccgacagacggtaccgatgtcaaggtgtatactgtgggccctgactacgcccacgcagaggctcgtaagagtcctgcacttgacggtaaagtagaacgggactccgaaggcaaagagatcagatatcctgtaatgctgaccgccatggagaaacttgtcgctcgtaaggtatgcgtggcctttaaacagacagtttgcgggttcgatcttcttagggccaatgggcactcattcgtgtgcgacgtcaatggcttttcatttgtgaaaaatagcatgaaatattacgacgattgtgcgaaaatactggggaatactattatgagggagttagcccctcaattccagatcccctggtctattcccaccgaggctgaagatatccctattgtgccgactacgtctggcaccatgatggagttgcggtgcgtcatcgctattattagacacggagataggacacctaaacagaaaatgaaaatggaggtgaagcatccacgcttcttcgcactttttgagaaacatggcggatacaagaccggtaaactgaaactgaagaggcctgagcagctgcaggaagttctggatatcactcgcctgctgcttgccgagctggaaaaggagccaggcggagagatcgaagaaaaaaccggcaaacttgaacagctgaaatcggttctcgagatgtatggccacttcagcgggatcaatcgaaaggttcagcttacatactacccccatggagtgaaggcgtctaacgagggccaggaccctcagagggaaactttggccccttctctgctgctcgttctcaagtggggcggagagctgacacccgctggtcgagttcaggctgaggaactgggaagggccttcagatgtatgtaccctgggggtcaaggagattacgcgggattccctgggtgcggcctcttaagactgcactcaacgtttcggcacgacctcaagatctatgcaagcgatgaaggcagggttcagatgaccgccgcagcctttgccaaggggctgctagccctggaaggcgagctgacaccaatattagtccagatggttaagtccgcaaatatgaatgggttgctggacagcgacggggactcattatctagctgccagcaccgtgtgaaggccaggctgcaccatatcctgcaacaggatgcaccctttggacccgaggattatgatcagctcgcaccgacacggtcaacaagtctgctcaactccatgaccatcattcagaaccccgtcaaagtgtgtgaccaagttttcgcactgatcgagaatctaactcatcagatcagagagagaatgcaggatcctcgctccgtggatctgcagctttaccacagtgagaccttggaattaatgctgcaacgctggtccaaactggagagagactttagacagaagtcaggcagatatgatatctccaaaatacccgacatatatgactgtgtaaagtatgacgtgcaacataatggatcccttggcctccagggaacagccgagctgctgagactaagtaaagctctggcagatgtagtcatcccccaagaatacggcatttctcgcgaggagaaattagaaatagccgtggggttttgccttccgctgctgaggaagatcctgctggatctgcagagaacccatgaagacgagtccgtgaacaaacttcacccactctacagtaggggagtgttgagtcccggaagacacgttcgtacaaggctatactttacatctgagagtcacgtgcattctctcctcagcgtcttccgctatgggggattgctggatgagacccaggatgcccaatggcagcgcgcactggattacctcagcgccataagcgagctcaactatatgacccagattgttattatgctgtacgaggataacacccaagatccattatccgaagagaggttccacgtagagctgcacttttcgccaggcgtgaagggagtcgaagaagaggggtctgctcccgctggttgcggatttcgaccagcaagctccgagaacgaggaaatgaaaacaaaccagggaagtatggagaacttatgtcctggaaaggctagcgatgagccagaccgtgctctgcagactagccctcagcctccagaggggccaggccttccaaggcgctcacccctcatcagaaatcgtaaagcaggaagcatggaggtcctctccgagaccagcagtagccgaccaggcggatataggctgttctcttccagtcgtcctcccactgagatgaaacaatcggggctcggtttcgaaggctgtagtatggttcctacgatctaccctttggagaccttgcacaatgccctctcactcaggcaggtctccgagttcttaagtcgggtgtgccaacgtcataccgatgcgcaggcccaagcatctgcagcgttgtttgacagtatgcactccagccaggcatccgacaacccatttagtccacccaggaccctgcactcccctcctctccagttgcagcagaggagcgagaaacccccttggttggaaacacgtttttgtcatgtaggacaggctggcttggagttgctgaccagtagcgacctgccagccagcgcttctcagagcgcagggatcacaggcgtcagccatcggacgcagcctgattcttcaggtccctcttcaaccgtgtcatccgccggtccgtcttcccccacgacagttgatggcaactctcagttcggcttctctgatcaaccttcgttaaacagccatgtggcagaggaacaccagggcctaggtctactgcaggagacaccagggtcaggggctcaggagctgagtattgagggcgagcaggaattattcgaaccaaaccagagccctcaggtgccacccatggaaacctcccagccctacgaggaggtttcacaaccttgccaggaggtaccagacataagtcagccctgccaggatataagcgaagccctgtcccaaccttgccagaaggttccagatattagccagcagtgccaggaaaaccacgataacggtaaccacacatgtcaggaggtgccacatatttcacagccgtgccagaaatctagtcagctgtgccagaaggtttctgaagaagtctgtcagctatgtctagagaattcagaagaggtttcacagccctgtcagggcgttagtgttgaagtaggaaaactggtgcataagttccatgttggagtgggaagcttggtgcaggaaactctcgttgaggtcggcagcccggcagaggagattccagaagaagtgatccaaccttatcaggaattctccgtggaggtgggacggctggcgcaggagacatcagcaatcaatctgctcagtcaggggatacctgaaatcgataagcctagtcaggagttccccgaagaaattgatctccaggcccaagaggtgccagaggagattaattag

SEQ ID NO: 72483 - DNA, 4221 bp, Artificial Sequence
  derived and/or modified sequence
atgtggtctctcactgcctcagaaggcgagagcacgaccgcccatttcttccttggcgctggggacgaggggctaggtactcggggaattggcatgaggcctgaagaatcagattctgaactgctcgaagacgaggaggacgaggtccctccagagccgcagattatagtaggcatctgcgcgatgaccaaaaagagtaaaagtaagcctatgacccagatattagagcgtctctgcaggtttgactatctcactgttgtgatcctcggagaagacgtcatcttgaacgaacccgttgagaactggccgagttgccattgcctgatctccttccattccaagggattccctctggataaagccgttgcctatagcaaactgagaaacccgttcctcataaacgatcttgccatgcaatactatattcaggatcgaagggaggtctatagaatacttcaggaggaggggatagatttgccacggtatgccgtcctgaatcgggatcctgccagacctgaggagtgcaaccttattgagggagaggaccaggtggaggtgaacggagccgtcttcccgaagccgttcgtagaaaaaccagtgagcgccgaggatcataacgtctatatctactatccatcctcagccggaggtggcagccagcgtctgtttcgtaagatcggctccagatcctccgtttattcccccgaaagctctgtacgcaagacgggttcatacatatacgaggaattcatgcctaccgatggaaccgatgtgaaagtgtacacagtgggaccagattacgcgcacgcagaagcccgaaagtccccagcactcgatggcaaagtggaaagggactctgagggaaaagaaattcggtatcccgtgatgctgacagctatggagaagttggtggccaggaaagtctgtgtggccttcaaacagaccgtgtgcggcttcgacctcctcagagccaacggccacagttttgtgtgcgacgtcaatggcttctcttttgtgaagaactctatgaagtattatgacgattgcgctaagatactgggcaacacaatcatgcgcgagctggctccccagttccagatcccatggagcatcccgactgaggctgaggacataccaattgtgccgactacaagcggaacaatgatggaactaaggtgtgtaattgctattatcagacacggcgacaggacacccaagcagaaaatgaaaatggaggtgaagcaccctagatttttcgcgctctttgagaagcatggaggatacaaaacaggcaagttgaaactgaagcgtcccgaacaacttcaggaggtgttggacatcacgaggctcttgttggcggagcttgaaaaggaacctggcggtgaaatagaggagaagactggtaaactggagcagctaaagagcgtactagagatgtacgggcatttctccgggattaataggaaagtgcagctcacttactatccccatggcgtaaaggcttctaatgaaggtcaggatcctcaaagggaaacactggctcctagcctgttgcttgtcctgaagtggggaggcgagctgacaccagcagggcgagtccaggcagaagaactgggcagggcgttccggtgcatgtacccaggaggtcagggagactatgccggtttccctggttgcggacttctgagactgcatagtacctttcgccatgatctcaaaatctacgctagtgacgagggtagggtgcagatgactgcagcagctttcgcgaagggactactggccctggagggcgagctgacaccgatccttgtgcagatggtgaaatcggctaacatgaatgggctcctggacagcgacggcgattcactgagctcatgtcaacacagagttaaagcccgtctgcatcatatactgcagcaggacgccccttttgggcctgaggactacgaccagctggcccctaccaggtccacaagtctcctgaactctatgactatcatccagaaccctgtgaaggtctgcgatcaggtcttcgccctgattgaaaatcttacccaccaaatcagagaacggatgcaagatccgaggagcgtcgacctgcagctctaccacagtgagacactggaactgatgctgcagcggtggagtaaattagaaagggacttccggcagaaatccggtaggtacgacatatcaaaaattcccgacatctacgactgtgtgaagtacgatgttcagcacaatgggtcgctgggactccaaggaactgccgagctgcttaggttgagtaaggctcttgccgatgttgtgataccccaagaatacggaatctcccgagaagaaaagttggaaatcgcagtgggattctgtttgcctctcctgcgaaaaatcctgcttgatctccagagaacacacgaggacgagtcagttaacaagctccaccccctttactctcgtggagtcctttccccaggaaggcatgtgcggacaaggttgtacttcacaagcgaatcgcacgttcacagtctgcttagcgtttttcgatatggcggactgctggacgaaactcaggatgctcagtggcagagagcactggactacctgagcgccatttcagagctgaattatatgacccagatcgtgattatgctctatgaggacaacactcaagaccccttgtcagaagaacggttccacgtggagctgcatttcagccccggtgttaaaggtgttgaggaggagggctccgcgcctgcaggatgtggctttcgtcccgcatcaagcgaaaatgaagagatgaagactaaccaaggatctatggagaatctgtgcccgggtaaggctagtgatgagcctgacagagctctgcagactagccctcagcctcctgagggtccgggacttccaaggcgttctcccttgattcgcaataggaaggctggcagcatggaggttctaagtgagacatcctcatcaaggcccggagggtataggctcttctcaagctcccggcctcccacggaaatgaaacagagcgggctgggttttgagggatgtagtatggtgccaaccatttaccccttggagacactgcacaatgcattgtccctccgacaggtctctgaatttctctcaagagtgtgtcagagacacaccgacgcgcaagcccaagccagtgccgcattgttcgatagtatgcactctagccaggcgtcagataaccctttctcccctccgaggaccctgcactcgccaccactccagcttcagcagcgctctgagaagcccccttggctcgagacaagattctgccatgtagggcaggccggactggaattgttaacctcctcagatcttccggctagcgcaagtcagtcagctggaatcactggcgtctctcatcgcacacaacccgactcttccggcccttcgtctaccgtcagcagcgccggtccttcctccccgaccaccgtggacggaaacagccaattcggcttttccgatcagccttcccttaactctcatgtggcggaggagcaccagggactggggctcctccaggagactccaggctctggagctcaggaactttccatagaaggggaacaggagctattcgagcccaaccagtcgccacaggtacctcccatggaaactagccagccttatgaggaagtctctcagccctgccaagaggtgccagatatttcacagccctgccaggacatttccgaagccctgagccagccctgtcagaaagtgccggatatcagtcagcagtgccaggaaaatcacgataatggtaaccatacctgccaagaggtgccccacatttctcagccctgtcagaaatcatcccagttgtgccagaaagtcagcgaagaggtgtgtcagctgtgcctggagaacagcgaggaggtctcccagccttgtcagggcgtgagcgtggaggtcggcaagttagtccataaattccatgtcggtgtagggtcattggtgcaggaaacactggtcgaagtggggagcccagcagaggagatcccagaggaagtgatccagccataccaagaattctccgtggaagtgggaaggttagcccaggagacatccgcaattaacttgctgagtcaggggattccggagattgataagccttcccaagagttcccagaggagatcgacctgcaagcgcaagaagtgcccgaggaaatcaactag

SEQ ID NO: 72484 - DNA, 2454 bp, Artificial Sequence
  derived and/or modified sequence
atgtggtctctgactgcaagcgagggagagtccactactgctcacttcttccttggagcaggagacgaggggctaggcacccgaggcatcggaatgcgtcccgaggagtcagattctgaactgctcgaggacgaggaggacgaggtcccgccagaaccccaaatcattgtcgggatttgtgccatgactaagaaaagtaaaagcaaaccgatgacccagattcttgaacggctgtgccgcttcgactatctgaccgttgttattcttggagaagatgtgatcctcaatgagcccgtggagaactggccctcctgtcattgcctgatcagctttcacagtaaggggtttcctttggacaaggccgtggcttattccaaactgaggaatccctttctcataaacgacctggccatgcagtactatatccaggaccggcgagaggtatacagaatactgcaagaggagggcattgacctgccacgctatgcagttctgaaccgggaccccgctcgcccagaggagtgcaatctgattgaaggcgaggaccaggtggaagtcaatggggcagtgttcccaaagccctttgttgagaaacccgtgagtgccgaggatcacaacgtgtatatatattacccctcttcagccggaggcggtagtcagcggctctttaggaagatcggttccagatctagtgtatattcacccgagtcctctgtcaggaagaccggctcatatatatacgaagaattcatgcccacagacgggaccgacgtcaaagtgtacacagtaggtcccgactacgcccacgccgaggctcgaaaatctcccgcactggatgggaaagtggaacgggatagtgaaggtaaggagattcaatacccagtgatgctgacggcaatggagaagttggttgccaggaaggtgtgtgttgcctttaagcaaactgtatgcggattcgatttgctcagggctaatggacattcttttgtatgtgatgttaatgggttcagcttcgtcaagaattccatgaaatactatgacgattgtgcaaaaattcttggaaacaccatcatgcgggaactcgcaccgcagtttcaaatcccctggtcaataccaactgaggccgaagatatcccgatcgtgccaaccacatcagggactatgatggagttgcggtgtgtaatcgccattatccgacatggcgatcgcactcctaagcagaagatgaaaatggaagtcaaacaccctcgcttcttcgctttgtttgagaagcatggaggctataagactggcaagctcaagctgaaacgccctgagcagctccaggaggtactcgatattacaaggttgctgctggccgaattggagaaagaacccggtggggagatcgaggagaagacaggaaagctggagcagctgaagtccgtgctggaaatgtatggacacttcagcggcatcaaccgcaaagtccaactgacctattacccccacggggtgaaggctagcaatgaaggacaggacccccagcgcgaaaccctcgcccctagccttctcctggtgctgaagtggggcggagaattgacccctgcgggacgggtgcaagccgaggaactcgggagagcatttcgctgtatgtatcccggtggccagggcgactacgccggattcccagggtgcggcctgctgaggctgcatagtaccttccgacatgacctcaagatctacgcttccgatgaaggacgggtacagatgaccgcagccgcattcgccaaggggttactcgcattggaaggggagctgacaccaatcctggtgcagatggtgaagagcgccaatatgaatgggctgcttgactccgacggtgattctctgagttcatgccaacatagggtaaaggcccgattacaccatatattacaacaagatgcccctttcggcccagaggattacgatcagctggctcctacaagatcaacttccttgcttaactcgatgacaattattcagaatcccgtgaaggtgtgcgatcaagtgtttgccttaatcgaaaatctaacacaccagatccgagaacgtatgcaggatccgcgatcagtggatctccagctgtaccactcggagactctggagcttatgttgcagaggtggagcaaattagaacgcgatttcagacagaagtcgggtagatacgacatatcaaagattcccgatatttacgactgcgtaaagtacgacgtccagcacaacggaagtctgggtttgcagggcacggcggagttgcttagactctcaaaggctctggcagacgtcgtgattccccaagaatacggaataagtcgcgaagagaaattggagatcgccgtaggcttctgtttaccgttattacgaaaaattctgctggatctccagcggacccatgaagatgaatcggttaataagcttcatcctctctag

SEQ ID NO: 72485 - DNA, 517 bp, Artificial Sequence
  derived and/or modified sequence
ggtatctcagcaaccgctgggcatccggaggatgtggggacgcggagctgagaggctccgggctagctaggtgtaggggtggacgggtcccaggaccctggtgagggttctctacttggccttcggtgggggtcaagacgcaggcacctacgccaaaggggagcaaagccgggctcggcccgaggcccccaggacctccatctcccaatgttggagtagagacagggttttgccctgttggccaagctggtcttgaactcctgacctcaagtgatccacccgcctcggcctcccaaagtgttgggattacaggcgtgagccatcgtgcccagccagattctccatttctaacaagttcccaggtgatgtcgatgaagctggaatccgacacgtgacggtctgtccgccgtctcagactagaggagcgctgtaaacgccatggctcccaagaagctgtcctgccttcgttccctgctgctgccgctcagcctgacgctactgctgccccaggcagaca

SEQ ID NO: 72486 - DNA, 609 bp, Artificial Sequence
  derived and/or modified sequence
atctcagcaaccgctgggcatccggaggatgtggggacgcggagctgagaggctccgggctagctaggtgtaggggtggacgggtcccaggaccctggtgagggttctctacttggccttcggtgggggtcaagacgcaggcacctacgccaaaggggagcaaagccgggctcggcccgaggcccccaggacctccatctcccaatgttggagtagagacagggttttgccctgttggccaagctggtcttgaactcctgacctcaagtgatccacccgcctcggcctcccaaagtgttgggattacaggcgtgagccatcgtgcccagccagattctccatttctaacaagttcccaggtgatgtcgatgaagctggttcgtgaactgcactttaacatgatgtagaaattttacaaactagtagagtaagggggtggctgcaggctggagaggaagtccaggctaaacgcctggcaacttgaggtggtttccgcccccttgctcgctgaggttccctcccaggaatccgacacgtgacggtctgtccgccgtctcagactagaggagcgctgtaaacgccatggctcccaagaagctgtcctgcctt

SEQ ID NO: 72487 - DNA, 354 bp, Artificial Sequence
  derived and/or modified sequence
tgagccggcagaagaggcagaaccaccccccagaccctggagttccccggcgcccagaccctggccatcagcagaggctgcagatgcgccagccccagaagaggcagaggcggctggtggagcctgaccgccagagtgctgtacatcaccaacaaggccggcaccttccccttcctgctgggcaagtacctggaggagaagctgctgggcaactgggtggagaccagattcagacacatcgactgggccggcctggagctgctgagcagcagcaacagacccagcctgaccagccagagcgccagaatcaccggcgtgaaccacagagccagaccctacttcctgagcaagtag

SEQ ID NO: 72488 - DNA, 354 bp, Artificial Sequence
  derived and/or modified sequence
tgagctgggcgcagagggcgtactacaccccagacgctcgaatttccaggcgcccagaccctggccataagccgcggatgtcggtgcgccagtcctcgacgaggacggggaggctggtggtcactgacggcgagagtgctttatattaccaacaaggccggcacctttcccttcctgctgggcaaatatttggaagagaagctcttggggaactgggttgaaaccagattccgccacatcgactgggccggattggagctccttagttctagtaacagaccctcgctgaccagtcaaagtgcccggataacgggggtcaaccatagggccaggccctatttcctgtctaaatag

SEQ ID NO: 72489 - DNA, 354 bp, Artificial Sequence
  derived and/or modified sequence
tgagctggccggcggggccgcaccaccccccagaccctggagttccctggggcccagaccctggccatcagccggggctgccgctgtgccagcccccggcggggccggggcggctggtggagcctgacagcccgggtgctgtacatcaccaacaaggccggcaccttccccttcctgctgggcaagtacctggaggagaagctgctgggcaactgggtggagacccgcttccgccacatcgactgggccggcctggagctgctgagcagcagcaaccggcccagcctgaccagccagagcgcccgcatcaccggggtgaaccaccgggcccggccctacttcctgagcaagtag

SEQ ID NO: 72490 - DNA, 354 bp, Artificial Sequence
  derived and/or modified sequence
tgagccggccggcggggccggaccaccccccagaccctggagttccccggagctcaaactctggccattagtagaggctgtcgatgcgcatctcctaggcgcgggcggggagggtggtggtcactgacagcacgagtgttgtacattactaataaagcgggcacatttccttttcttctggggaaatatctggaggagaagctcctggggaactgggtggagacgagattccgacacatcgattgggctggcctggagttgctttcctcctccaaccgtccatccttgacgtcgcagtccgccaggattaccggggtcaatcacagagctcgaccatattttttgtccaagtag

SEQ ID NO: 72491 - DNA, 354 bp, Artificial Sequence
  derived and/or modified sequence
taggcgggtcggagggggagaactactcctcaaacgttagaatttcccggagctcagacactggccatttccaggggatgcaggtgcgcatcacctcgaagaggcagaggcggatggtggtctttgacagcgcgagttctttacatcactaataaggccggaacttttccgtttttgttggggaaatacctagaggaaaagttattgggaaactgggtggaaacgagatttagacacattgactgggccggtctggagctcctgtcttcaagtaatcgcccaagtttgacaagccagtccgcacggattactggtgtaaatcacagggccaggccttacttcctctccaaatag

SEQ ID NO: 72492 - protein, 640 aa, Artificial Sequence
  derived and/or modified sequence
MLRSTLAQQGTPVYSVAWGPDSEKVLYTAGKQLIIKPLQPNAKVLQWKAHDGIILKVDWNSVNDLILSAGEDCKYKVWDSYGRPLYNSQPHEHPITSVAWAPDGELFAVGSFHTLRLCDKTGWSYALEKPNTGSIFNIAWSIDGTQIAGACGNGHVVFAHVVEQHWEWKNFQVTLTKRRAMQVRNVLNDAVDLLEFRDRVIKASLNYAHLVVSTSLQCYVFSTKNWNTPIIFDLKEGTVSLILQAERHFLLVDGSSIYLYSYEGRFISSPKFPGMRTDILNAQTVSLSNDTIAIRDKADEKIIFLFEASTGKPLGDGKFLSHKNEILEIALDQKGLTNDRKIAFIDKNRDLCITSVKRFGKEEQIIKLGTMVHTLAWNDTCNILCGLQDTRFIVWYYPNTVYVDRDILPKTLYERDASEFSKNPHIVSFVGNQVTIRRADGSLVHISITPYPAILHEYVSSSKWEDAVRLCRFVKEQTMWACLAAMAVANRDMTTAEIAYAAIGEIDKVQYINSIKNLPSKESKMAHILLFSGNIQEAEIVLLQAGLVYQAIQININLYNWERALELAVKYKTHVDTVLAYRQKFLETFGKQETNKRYLHYAEGLQIDWEKIKAKIEMEITKEREQSSSSQSSKSIGLKP

SEQ ID NO: 72493 - DNA, 1923 bp, Artificial Sequence
  derived and/or modified sequence
atgctgcgttccacgctcgcacagcaaggtacacccgtgtatagtgtggcctggggccccgattcagaaaaggtgttatacaccgcggggaagcagctcatcattaaaccattgcagcctaatgctaaggtcctgcaatggaaagcacatgacgggatcatcctaaaggttgactggaacagtgtcaatgacctgattctgagtgccggtgaggactgtaagtacaaggtgtgggatagttatggtaggccattatataacagccaaccgcatgagcacccaattacctctgtggcttgggctccagacggagaattattcgccgtgggcagcttccacaccctaagactgtgtgataagacgggctggtcttacgcgctcgagaagcctaacaccggttccatttttaacatcgcatggtctatagacggtacacagatcgcaggtgcctgtggaaatggtcacgtcgtttttgcccatgtggtggagcaacattgggagtggaagaatttccaggtcacccttacaaagagaagggccatgcaggtgaggaacgtgctgaatgatgcggtagatctgctcgagtttcgagatcgagtgattaaagcctccctgaattatgctcatcttgtcgtgtccacttcactccaatgctacgtgttcagtactaaaaattggaacacccccataattttcgatctgaaagaaggtacagtgtccctgatactccaggccgagaggcacttcctcctcgttgacggcagctctatctacttatactcttatgaggggcgcttcatttcctctcctaagttccctggtatgagaacagatatcctgaatgcgcaaaccgtctcacttagcaatgatactattgccatccgcgataaagctgatgaaaagatcattttcctgtttgaggcgagcacaggaaagccgttaggcgatgggaagtttcttagccacaagaacgagatcctggagattgcgctggatcagaagggcttgacgaacgaccgcaaaattgcgttcatcgacaagaacagagacctgtgtatcacgagcgtgaagaggttcggaaaggaagagcagattatcaaactaggaacaatggttcatacactcgcctggaatgacacatgcaacatcttatgtggactccaggacacaaggttcatagtttggtattacccaaacacagtttacgtggacagggacatacttcccaaaaccctgtatgaaagagacgcatctgagttttccaaaaaccctcatattgtgagttttgtcggtaaccaagtgactatcaggagggcagatggatcattagtacatatcagtattacaccttatcccgccatactccacgaatacgtctctagctccaagtgggaagatgctgtgcggctgtgcaggttcgtgaaggagcagactatgtgggcgtgtttagctgctatggctgtggccaaccgcgacatgacaacggcagagatcgcctatgcagctattggggagattgataaagtgcagtatataaattctataaagaacttgccttcaaaagagagtaagatggcccacatcctgctgttctccggaaacattcaggaagcggagatagtcttactacaagccggcctagtatatcaggctatccagatcaacattaatctatataattgggagcgagccctggaactggcggtgaagtataaaacacatgtggacacggtgctggcttaccggcagaaattccttgagacgttcgggaaacaggagacaaataaacggtatctgcattatgccgaaggccttcagatcgactgggagaagattaaagctaaaatcgaaatggagattactaaggaaagagaacagagttcatcttcgcaatcatccaagtccatcggcctgaagccctag

SEQ ID NO: 72494 - DNA, 1923 bp, Artificial Sequence
  derived and/or modified sequence
atgctgagatccaccctagcacagcagggaactccggtctacagcgtggcttggggcccagattccgaaaaggtactatacacggctggaaagcagctgattattaagccgctgcaacccaacgccaaagttctacaatggaaagcgcacgacggaattatcctgaaggtggattggaatagcgtaaacgatctgatcctttcagctggggaggactgcaagtataaagtgtgggactcttacggccgcccactgtataattctcaaccacacgaacacccaattacttctgtggcgtgggctcccgatggagaattattcgccgtcggcagcttccacacgctgcgactctgcgataaaaccggatggtcctacgccttggaaaaacctaacaccggtagcatctttaacattgcatggagtatcgatggaacccagattgctggggcatgcggaaacggccatgtggtctttgcccacgtggtcgaacaacactgggaatggaagaatttccaggtcaccttgaccaagaggcgggcaatgcaggtccgtaatgtgctcaacgacgcagtcgatctgctggaattccgggatcgagtgattaaggcgagcctgaactatgctcaccttgtggtatcaacttcccttcagtgctatgtcttcagcacaaaaaactggaataccccgatcatcttcgatttgaaggagggaactgtttcccttatactgcaagctgaacgccatttcctgctagtggatgggtcatctatttacttatactcatacgagggcaggttcatctccagtcccaagtttccgggaatgcgcacagacatattaaatgcacagacagtatccctgtctaacgatactatcgcaattcgcgataaggctgatgagaaaatcatattcctgtttgaagcgtcaaccggaaagcccctcggtgatggtaagttcctgagccacaagaatgagatcctggagatcgcgctggaccagaaaggcctgaccaatgaccgcaagatcgcttttattgacaagaaccgggacctgtgcatcaccagcgtgaaacgattcggcaaagaagagcagatcattaaattaggcaccatggttcatactctggcatggaatgacacctgtaacatcctgtgcggactacaggatacgcggtttatcgtatggtactacccgaacactgtgtatgtagaccgagatatcctgcccaaaactctgtacgaacgggatgcctctgaattttcgaagaatcctcacatcgtgtcttttgtcggtaatcaggtgactatccggcgcgctgatggcagtcttgtccacataagcataaccccgtaccccgccattctgcacgagtacgtgtctagttcaaagtgggaggacgcggtccggctctgtaggtttgttaaagagcagacaatgtgggcttgccttgccgcgatggcagtcgccaaccgtgacatgacgacagccgagatcgcctacgctgctattggcgaaatcgacaaagtccaatacatcaactcgatcaaaaatcttccatcaaaagagtccaagatggcgcacattcttttgttctctggcaacatccaagaggcagaaattgtactcttgcaggctggactcgtgtatcaagccatccagataaacatcaatctgtataattgggaaagagctttggagctagccgttaagtataagacacatgtggacacagttttagcctatcggcaaaaattcctcgagacttttggaaagcaggaaactaacaaaaggtatcttcactacgctgagggactgcagattgactgggagaagataaaggctaaaatcgagatggaaataacaaaagagcgagaacagtctagctcgagccagtcctccaagagcattggactgaaaccgtag

SEQ ID NO: 72495 - DNA, 1923 bp, Artificial Sequence
  derived and/or modified sequence
atgctgcggagcaccctggcccagcagggcacccctgtgtacagcgtggcctggggccctgacagcgagaaggtgctgtacacagctgggaagcagctgatcatcaagcccctgcagcccaatgccaaggtgctgcagtggaaggcccatgatggcatcatcctgaaggtggactggaacagcgtgaatgacctgatcctgtctgctggggaggactgcaagtacaaggtgtgggacagctatggccggcccctgtacaacagccagccccatgagcaccccatcacctctgtggcctgggccccagatggagagctgtttgctgtgggcagcttccacaccctgcggctgtgtgacaagacaggctggagctatgccctggagaagcccaacacaggcagcatcttcaacatcgcctggagcattgatggcacccagattgctggggcctgtggaaatggacatgtggtgtttgcccacgtggtggagcagcactgggagtggaagaacttccaggtgaccctgaccaagaggcgggccatgcaggtgagaaatgtgctgaatgatgctgtggacctgctggagttccgggacagagtcatcaaggccagcctgaactatgcccacctggtggtgtccaccagcctgcagtgctacgtgttcagcaccaagaactggaacacccccatcatctttgacctgaaggagggcaccgtgtccctcatcctgcaggccgagcggcacttcctgctggtggatggcagcagcatctacctgtacagctatgagggccgcttcatcagcagccccaagtttcctggcatgaggacagacatcctgaatgcccagacagtgtccctgagcaatgacaccatcgccatccgggacaaggcagatgagaagatcatcttcctgtttgaggccagcacaggcaagcccctgggagatggcaagttcctgagccacaagaatgagatcctggagatcgccctggaccagaagggcctgaccaatgacaggaagatcgccttcatcgacaagaacagagacctgtgcatcacctctgtgaagagatttgggaaggaggagcagatcatcaagctgggcaccatggtgcacaccctggcctggaatgacacctgcaacatcctgtgtggcctgcaggacacccgcttcatcgtgtggtactaccccaacacagtgtatgtggaccgggacatcctgcccaagaccctgtatgaaagagatgccagcgagttcagcaagaacccccacatcgtgtcctttgtgggcaaccaggtgaccatcagaagagcagatggcagcctggtgcacatcagcatcaccccctacccagccatcctgcacgagtatgtgagcagcagcaagtgggaggatgctgtgcggctgtgccgctttgtgaaggagcagaccatgtgggcctgcctggccgccatggctgtggccaacagagacatgaccacagctgagatcgcctatgctgccatcggggagattgacaaggtgcagtacatcaacagcatcaagaacctgcccagcaaggagagcaagatggcccacatcctgctcttcagcggcaacatccaggaggccgagatcgtgctgctgcaggccggcctggtgtaccaggccatccagatcaacatcaacctgtacaactgggagcgggccctggagctggccgtgaagtacaagacccacgtggacacagtgctggcctaccggcagaagttcctggagaccttcggcaagcaggagaccaacaagcgctacctgcactacgccgagggcctgcagattgactgggagaagatcaaggccaagattgagatggagatcaccaaggagcgggagcagagcagcagcagccagagcagcaagagcatcggcctgaagccctag

SEQ ID NO: 72496 - DNA, 1923 bp, Artificial Sequence
  derived and/or modified sequence
atgctgcggagcaccctggcccagcagggcacccccgtgtacagcgtggcctgggggcctgacagcgagaaagtgctgtacacagccggaaagcagctgatcattaagcccctgcagcccaatgccaaggtcctccagtggaaggcacatgatgggatcatcctcaaggtggactggaatagtgtgaacgatttgattctgagcgctggcgaggattgtaagtataaggtgtgggactcatacggcaggccattgtacaatagccagcctcacgaacaccccattacatcggtggcatgggctcctgacggggagcttttcgccgtaggatcctttcataccctgcggttgtgcgacaagaccggttggtcctatgccctcgaaaaaccaaatactggctcaattttcaacatcgcatggtctatcgacggaacccagatcgccggagcttgtgggaacggccacgtggtgttcgcccatgtggtggaacaacattgggaatggaaaaacttccaggtaactctgaccaagcggagggcaatgcaggtgcggaacgtgctcaacgatgcagtcgatctgctggagtttcgggacagagtcattaaggcatcactgaactacgcgcacctcgtggtgtctaccagcctgcagtgctacgtgttctccacaaaaaactggaatacaccaataatcttcgaccttaaggaaggaacggtaagccttattctgcaggctgagcgtcacttcctgctggtggacggctcttccatctacctgtactcctatgaaggccgattcatcagttccccgaaattccccggaatgagaacagacattctcaatgcacagacagtgagtctgagcaatgacaccattgccatccgcgacaaggccgacgaaaagattattttcctgttcgaggcctcaacgggtaagcccctcggagacggtaagtttctttcacacaagaatgaaatcctggagatagcgctagaccagaagggcctgaccaacgatcgaaagattgcttttattgacaagaacagagacctgtgtataactagtgtgaaacggtttggaaaggaggaacagataataaagctcggaaccatggtgcataccctggcgtggaacgatacatgcaatattctgtgtgggctgcaggatacacggtttatcgtgtggtattatcctaacacggtgtatgttgatcgggatatattgccgaagaccctctatgagagggatgctagtgagttctccaagaaccctcacattgtctcttttgtagggaaccaggtaaccatcaggagagcagatgggagtcttgtacacatttcaattacaccctacccggctatcctgcatgaatatgtctcgagcagcaagtgggaagacgccgtccggctttgccgatttgtgaaggagcaaactatgtgggcatgtttggccgctatggcggtcgcaaacagagatatgacgacagccgagattgcttatgcggcgatcggtgagattgacaaggtgcaatacattaatagcatcaagaacctccctagcaaggagtcgaagatggctcatatactcctgttctccggcaacattcaagaagcggagattgttctgcttcaggctgggcttgtgtaccaggctattcagataaacattaacctttacaattgggagcgcgccttggagttggccgttaagtacaaaactcacgtggacacagtacttgcttaccggcagaaatttctggagaccttcgggaaacaagaaacaaacaagcgttatctgcactacgccgaggggcttcagatcgactgggagaagataaaagctaaaattgaaatggaaatcactaaagaacgcgagcaatcttcttcctcacagtctagcaaatctatcggcttgaaaccatag

SEQ ID NO: 72497 - DNA, 1923 bp, Artificial Sequence
  derived and/or modified sequence
atgctgcggagcaccctggcccagcagggcacccccgtgtacagcgtcgcctgggggcccgacagtgagaaagtgctgtacaccgctggtaaacagctgataattaaacctttacaaccaaatgctaaggtgctgcagtggaaagctcacgatggaatcatccttaaggtggactggaattcagtcaatgaccttattctgtccgccggagaagactgtaagtacaaggtatgggattcttatggaagacctttgtataactcacaacctcacgaacaccccataacaagcgttgcctgggcgcccgatggcgagttatttgcggtgggctctttccacacgctgagactgtgcgacaaaactggatggagttatgccttggagaaacccaacaccggcagcatctttaatatcgcgtggtctatagatggcactcagatcgccggtgcatgcggtaacggccatgtcgtcttcgcacatgtcgtggagcagcattgggagtggaagaatttccaggtgactctgaccaaacggagagcaatgcaagtgcggaatgtactcaacgacgcagtcgatctgttagaatttagagatagggttataaaggccagtcttaactacgcccatttagtcgtgagtacatcccttcaatgttatgtgttcagcaccaagaattggaacactcccatcatatttgatctgaaggagggaactgtatccctcatcttacaggcagagagacacttcctactggtcgacggctcctccatctacctgtacagctatgagggcagatttatctcctcccctaagttcccagggatgaggacggacatcctgaacgcccagacggtgagcctttctaacgataccattgccattcgcgacaaggcagatgaaaaaatcatcttcctctttgaagccagtaccggaaagcccctgggagacgggaaatttttgtctcacaagaatgaaatcctggaaatagctctggatcagaagggcctcacgaacgaccgaaaaattgccttcatcgacaagaatcgggacctctgtatcacctcagtcaaaaggttcggaaaagaggaacagatcatcaagctcgggaccatggtgcataccctcgcctggaacgatacatgcaacattctatgcggcctccaggacaccaggtttatcgtctggtactacccaaataccgtctacgtggaccgggacatcctgcccaagacattgtacgaaagagacgctagcgagttttccaagaacccacacattgtgtctttcgtcggaaatcaggtgacgatcaggagggcggatggctctctagtccacattagcatcactccctacccggctattctacatgagtacgtatcatcctctaagtgggaggacgccgtgcgtctgtgccggttcgttaaagagcaaacgatgtgggcctgcctggctgcaatggccgtggctaatcgggatatgacaactgcggagattgcttacgcggccatcggcgagatagacaaagtacagtatattaactccatcaagaatcttccatcaaaagagtcaaagatggcccatatcctcctgttctctggaaatatacaggaagctgagatcgttttgctccaggcaggactcgtctaccaggcaatacagattaacataaacctgtataactgggagcgggctcttgaattggcagtgaagtacaagacacatgtggatacagtcctggcttacaggcagaaatttctggagaccttcggaaagcaggagacaaacaaaagatatttgcattacgccgagggactccagattgactgggaaaagataaaggccaaaatcgaaatggaaatcacgaaggagagggagcagagctcctccagccagtcgtcaaagagcattggattgaaaccctag

SEQ ID NO: 72498 - DNA, 1923 bp, Artificial Sequence
  derived and/or modified sequence
atgctgagaagtacgttggcccaacaagggacccctgtttacagtgtcgcatggggacctgacagcgaaaaagtgttgtacaccgctggcaagcagttgattatcaagcccctgcagccaaacgctaaggtcctccagtggaaagcccacgacgggattatcctgaaggtcgattggaactcagtcaacgatctcattctctcggcaggggaggattgcaaatacaaggtgtgggactcttacggtcgtcctctgtacaatagccagcctcacgagcaccctatcaccagcgtggcgtgggcaccagacggggagctgtttgccgttggctcttttcacactcttcgattgtgtgacaagactgggtggtcatacgccctcgagaaacctaacaccgggagcatctttaacattgcctggagtattgacggaacacagatcgccggagcctgtggtaacggccacgttgtgttcgcccatgtggtcgaacagcactgggaatggaagaacttccaggtcactcttaccaaacgtcgtgctatgcaggtccggaatgtgttgaatgatgctgtggacttactggaatttagagacagggtgattaaggctagccttaactacgcacacctcgttgtctccacatctcttcagtgttatgtcttctctactaaaaactggaacacccccatcatatttgatctgaaagaaggtaccgtgtctcttattctgcaagcggagagacacttcctcctcgtggatggaagctctatatacctgtattcatatgagggcaggttcatctcctctcctaaattcccgggtatgaggaccgatattctcaacgcccagaccgtaagcctgagcaatgacacaatcgcgatcagagacaaagcagatgaaaagatcatcttcctgtttgaagcaagcacaggcaaacccctgggtgacgggaagtttctcagccataagaatgagatactcgagatcgctctggaccaaaagggccttaccaacgaccgcaagatcgccttcattgacaagaatcgtgacctatgcatcaccagcgttaagcgctttggtaaagaggagcaaattattaagttaggcaccatggtccataccctggcttggaatgacacctgtaacatcctgtgcggccttcaggatacacgtttcattgtttggtactatccaaatacagtttacgtggatcgggacatcctgcccaagacgttatacgagcgcgacgcctcagaattctccaagaacccccacattgtttctttcgtaggcaaccaagtcacgataaggcgggcagatggtagcctcgtgcatatctccatcacaccttaccctgctatcctgcacgaatacgttagttcttctaagtgggaagatgccgtgcgtctgtgccgctttgtcaaggaacaaacaatgtgggcttgtttggcagctatggccgtggcaaatcgggacatgaccacggcagagatcgcctacgctgctattggcgagattgacaaagttcaatacattaactctattaaaaacttgcccagtaaggagagcaaaatggctcacatactcctgttctccggtaatattcaggaagcagaaatagtgcttttgcaggccggactcgtgtatcaggcgatacaaattaatatcaatctctataattgggaacgggcactggagctggccgtaaaatataaaacacacgtcgatacagttttggcctaccggcagaagttcttagaaacattcggtaaacaggagacgaataagagatacctgcattacgcggaaggactgcagattgactgggaaaaaataaaggctaaaatagaaatggagatcacgaaggaaagggaacagtcctccagttcccagagcagcaaaagtattggactgaaaccttag

SEQ ID NO: 72499 - DNA, 1923 bp, Artificial Sequence
  derived and/or modified sequence
atgctgcgcagcacactggcccagcaaggaacccccgtctattccgtggcctggggtcccgattctgagaaggtgctgtataccgctggcaaacagctaatcatcaagcccctgcaaccgaatgctaaagtacttcagtggaaagcccatgacgggatcattttgaaggtcgattggaattcagtaaacgatttaatcctaagcgccggtgaagattgtaagtataaagtgtgggacagttacggcaggcctctatataacagccagccacacgagcaccccataacctctgttgcgtgggccccagacggggagctgtttgccgtgggctccttccatactctgaggctttgcgacaagacaggatggagttacgccctggaaaaaccaaatactgggagtatctttaacatcgcgtggtctattgacgggacacaaatagccggagcctgcggaaacgggcatgtagtgtttgctcatgttgtcgagcaacactgggagtggaagaacttccaagtgacactgacaaagcggagagcaatgcaggttcggaacgttctgaacgacgccgtcgatctcctggaattccgcgaccgagttatcaaagcctctctcaattacgctcaccttgttgtatcgacttcactgcagtgctatgttttctcgaccaaaaattggaatacacccatcattttcgacttaaaagagggcaccgtgtcactgattcttcaggccgaacggcactttctgctggtggatgggagcagcatttacctgtactcttatgaaggtcgatttattagctctccgaagttccctggcatgcggactgacattctaaacgctcagaccgtctcactgtctaacgataccatcgccattcgggacaaggccgatgaaaagataatttttttgttcgaagccagcaccggaaaacccctgggcgacggcaagtttctgtcacacaaaaatgaaattttggagatcgccttggaccagaagggcctcaccaacgacagaaaaatcgcgttcattgataaaaaccgcgacctctgcatcacctccgtcaagaggtttgggaaagaggaacagatcatcaaactgggaaccatggtgcatacactcgcttggaacgacacttgtaatatcctgtgtggcctgcaggacactcgcttcatagtttggtattacccaaacaccgtttacgtcgatcgtgatattctgccaaagactctgtacgagcgcgatgcctccgaatttagcaagaacccacatatcgtgagttttgttgggaatcaggttacaatccgcagagccgacggttccctcgtgcacatctcgattaccccatatcctgccatcctccacgaatacgtgagctcaagtaagtgggaggatgccgtgcgcctgtgccgattcgtgaaggaacaaaccatgtgggcttgcctggctgcaatggccgtggctaatcgcgacatgaccaccgctgaaatcgcttacgcggctattggcgaaatagataaagtgcaatacatcaactctatcaaaaacttaccttccaaggaaagcaagatggcacacatattactgtttagcgggaatattcaggaagcggaaattgtgttactacaagccggactggtttatcaggccatccaaattaacattaacctgtacaattgggaacgagcactagagctggcagtgaaatacaagactcacgtggacaccgtactagcctaccggcagaagtttcttgaaacttttggaaagcaagagactaacaagaggtatttgcactatgccgaggggctgcagatcgactgggagaagatcaaggccaagatcgaaatggaaatcaccaaggaaagagaacagtcttccagcagccagtcaagtaaatcaattggtctgaagccatag

SEQ ID NO: 72500 - DNA, 1923 bp, Artificial Sequence
  derived and/or modified sequence
atgctgagaagcaccctggcccagcagggcacccccgtgtacagcgtggcctggggccccgacagcgagaaggtgctgtacaccgccggcaagcagctgatcatcaagcccctgcagcccaacgccaaggtgctgcagtggaaggcccacgacggcatcatcctgaaggtggactggaacagcgtgaacgacctgatcctgagcgccggcgaggactgcaagtacaaggtgtgggacagctacggcagacccctgtacaacagccagccccacgagcaccccatcaccagcgtggcctgggcccccgacggcgagctgttcgccgtgggcagcttccacaccctgagactgtgcgacaagaccggctggagctacgccctggagaagcccaacaccggcagcatcttcaacatcgcctggagcatcgacggcacccagatcgccggcgcctgcggcaacggccacgtggtgttcgcccacgtggtggagcagcactgggagtggaagaacttccaggtgaccctgaccaagagaagagccatgcaggtgagaaacgtgctgaacgacgccgtggacctgctggagttcagagacagagtgatcaaggccagcctgaactacgcccacctggtggtgagcaccagcctgcagtgctacgtgttcagcaccaagaactggaacacccccatcatcttcgacctgaaggagggcaccgtgagcctgatcctgcaggccgagagacacttcctgctggtggacggcagcagcatctacctgtacagctacgagggcagattcatcagcagccccaagttccccggcatgagaaccgacatcctgaacgcccagaccgtgagcctgagcaacgacaccatcgccatcagagacaaggccgacgagaagatcatcttcctgttcgaggccagcaccggcaagcccctgggcgacggcaagttcctgagccacaagaacgagatcctggagatcgccctggaccagaagggcctgaccaacgacagaaagatcgccttcatcgacaagaacagagacctgtgcatcaccagcgtgaagagattcggcaaggaggagcagatcatcaagctgggcaccatggtgcacaccctggcctggaacgacacctgcaacatcctgtgcggcctgcaggacaccagattcatcgtgtggtactaccccaacaccgtgtacgtggacagagacatcctgcccaagaccctgtacgagagagacgccagcgagttcagcaagaacccccacatcgtgagcttcgtgggcaaccaggtgaccatcagaagagccgacggcagcctggtgcacatcagcatcaccccctaccccgccatcctgcacgagtacgtgagcagcagcaagtgggaggacgccgtgagactgtgcagattcgtgaaggagcagaccatgtgggcctgcctggccgccatggccgtggccaacagagacatgaccaccgccgagatcgcctacgccgccatcggcgagatcgacaaggtgcagtacatcaacagcatcaagaacctgcccagcaaggagagcaagatggcccacatcctgctgttcagcggcaacatccaggaggccgagatcgtgctgctgcaggccggcctggtgtaccaggccatccagatcaacatcaacctgtacaactgggagagagccctggagctggccgtgaagtacaagacccacgtggacaccgtgctggcctacagacagaagttcctggagaccttcggcaagcaggagaccaacaagagatacctgcactacgccgagggcctgcagatcgactgggagaagatcaaggccaagatcgagatggagatcaccaaggagagagagcagagcagcagcagccagagcagcaagagcatcggcctgaagccctag

SEQ ID NO: 72501 - protein, 180 aa, Artificial Sequence
  derived and/or modified sequence
MGNSLLRENSFRRQQNTQEMPWNVRMQSPKQRTSRCWDHHIAEGCFCLPWKKILIFEKRQDSQNENERMSSTPIQDNVDQTYSEELCYTLINHRVLCTRPSGNSAEEYYENVPCKAERPRESLGGTETEYSLLHMPSTDPRHARSPEDEYELLMPHRISSHFLQQPRPLMAPSETQFSHL

SEQ ID NO: 72502 - DNA, 543 bp, Artificial Sequence
  derived and/or modified sequence
atgggtaacagtctgctgagggagaatagctttagaaggcaacagaacacacaggagatgccttggaatgtgcggatgcagtctcccaaacagagaacttccagatgctgggatcatcatattgccgaagggtgcttttgtttaccctggaagaagattttgatatttgagaagcgccaagactctcagaacgagaatgaaaggatgagtagcaccccaatccaggataatgttgaccagacatattcagaggaattgtgttacactttaatcaaccacagggtgctgtgtactcgccctagtggaaatagcgctgaagaatattacgaaaacgtcccctgcaaggccgagcgcccgcgggagagccttggtgggaccgaaactgagtattcactgcttcacatgccttccacagatccaaggcacgcgcggtccccagaggacgagtatgagctcttgatgcctcaccggatctcttcccactttctgcaacagcccaggccactaatggcaccatccgaaacgcagttttcccacctttag

SEQ ID NO: 72503 - DNA, 1036 bp, Artificial Sequence
  derived and/or modified sequence
tcctttctgctgtctctgcacgggtggccagagccacacagccctttctttaagtcaggagttgccctgtcagagcacaaggcaagaaggaagtggtaaagggacggaggggaagccctgagaggactgagaggatgggaaattctctgctgagagaaaacagtttcaggcggcagcagaacactcaagagatgccttggaatgtgagaatgcaaagccccaaacagagaacatccagatgctgggatcaccatatcgctgaagggtgtttctgccttccatggaaaaaaatactcatttttgaaaagaggcaagattcccaaaacgaaaatgaaagaatgtcatctactcccatccaggacaatgttgaccagacctactcagaggagctgtgctataccctcatcaatcatcgggttctctgtacaaggccatcagggaactctgctgaagagtactatgagaatgttccctgcaaagctgagagacccagagagtccttgggaggaactgagactgagtattcacttctacatatgccttctacagaccccaggcatgcccgatccccagaagatgaatatgaacttctcatgcctcacagaatctcctctcactttctgcaacagccacgtccacttatggccccttctgagactcagttttcccatttatagtgaagtggctggactagcatttgtttagcaccaacaaataaaaggtgggatgggggatctgcctgaagcagggatgggacacaaagtccctccagcttatctcccacaacaaccctttccctgcagagcatggtttgtataccacaagccctcttagcacgcaaaagccaaaatctaaagatcaaccatttatcctgaacaacaccatttgagaaagaggtaaccatctttggttctacatggtttggagagtatagtggtaggaggggctccctgattcccctaaagctatgcacaccacaaggggctctgctcttctgtctgggatcttcttataaagtgttcccatgatcattctc

SEQ ID NO: 72504 - DNA, 543 bp, Artificial Sequence
  derived and/or modified sequence
atgggcaacagcctgctgcgggagaacagcttccggcggcagcagaacacccaggagatgccctggaatgtgaggatgcagagccccaagcagaggaccagccgctgctgggaccaccacatcgccgagggctgcttctgcctgccctggaagaagatcctgatctttgagaagaggcaggacagccagaatgaaaatgaaagaatgagcagcacccccatccaggacaacgtggaccagacctacagcgaggagctgtgctacaccctcatcaaccaccgggtgctgtgcacccggcccagcggcaacagcgctgaggagtactatgaaaatgtgccctgcaaggccgagcggccccgggagagcctgggcggcacagaaacagagtacagcctgctgcacatgcccagcacagaccccaggcatgcccggagcccagaagatgaatatgagctgctgatgccccaccgcatcagcagccacttcctgcagcagccccggcccctgatggcccccagcgagacccagttcagccacctgtag

SEQ ID NO: 72505 - DNA, 543 bp, Artificial Sequence
  derived and/or modified sequence
atgggcaacagcctgctgcgggagaacagcttccggcggcagcagaacactcaggaaatgccctggaatgttcgaatgcaaagtcccaagcagcgaacctctcggtgctgggatcaccatattgcagagggttgcttttgcctcccatggaagaagatcttaatttttgaaaaacgccaggactcacaaaatgaaaatgagaggatgagcagtacaccaattcaagacaatgtcgatcaaacctattccgaagagctgtgttacaccctgatcaatcatagggtcctctgcactcgcccaagtggcaatagtgcagaggagtattacgagaatgtgccttgtaaggctgaaagacctcgagaaagcctgggaggaactgagaccgagtactctctgctgcacatgccctcaactgaccctcgacacgctcggtcccccgaagatgagtacgaacttctaatgccgcaccggatcagctcccacttcctgcagcagccccggcctttaatggctccgtcagaaactcaattcagccacctctag

SEQ ID NO: 72506 - DNA, 543 bp, Artificial Sequence
  derived and/or modified sequence
atgggtaacagtctgttgagggaaaacagcttcaggcgccagcaaaatacccaagaaatgccttggaacgttcgcatgcagtccccaaagcagagaacatcacgttgctgggaccaccatattgcagaaggctgcttctgtcttccatggaagaagattctgattttcgaaaagcgacaggatagccagaacgagaatgagaggatgtctagcactccgattcaggacaacgtggatcaaacatacagcgaagaactatgttacacgctgatcaaccacagagtcctctgcacacggccatcaggtaattcagcggaagagtactatgaaaacgtcccatgtaaagcagaacggcctagagagagcctcggcggaactgaaacagaatactccctgctgcacatgcccagcacggatccccgacatgcccgttcccctgaagacgagtacgagctactgatgcctcacaggatatcatctcacttcttacaacagccgagaccactcatggcaccatccgaaactcagttctcccacctgtag

SEQ ID NO: 72507 - DNA, 543 bp, Artificial Sequence
  derived and/or modified sequence
atgggcaacagcctgctgagagagaacagcttcagaagacagcagaacacccaggagatgccctggaacgtgagaatgcagagccccaagcagagaaccagcagatgctgggaccaccacatcgccgagggctgcttctgcctgccctggaagaagatcctgatcttcgagaagagacaggacagccagaacgagaacgagagaatgagcagcacccccatccaggacaacgtggaccagacctacagcgaggagctgtgctacaccctgatcaaccacagagtgctgtgcaccagacccagcggcaacagcgccgaggagtactacgagaacgtgccctgcaaggccgagagacccagagagagcctgggcggcaccgagaccgagtacagcctgctgcacatgcccagcaccgaccccagacacgccagaagccccgaggacgagtacgagctgctgatgccccacagaatcagcagccacttcctgcagcagcccagacccctgatggcccccagcgagacccagttcagccacctgtag

SEQ ID NO: 72508 - protein, 163 aa, Artificial Sequence
  derived and/or modified sequence
MGNSLLRENRRQQNTQEMPWNVRMQSPKQRTSRKKILIFEKRQDSQNENERMSSTPIQDNVDQTYSEELCYTLINHRVLCTRPSGNSAEEYYENVPCKAERPRESLGGTETEYSLLHMPSTDPRHARSPEDEYELLMPHRISSHFLQQPRPLMAPSETQFSHL

SEQ ID NO: 72509 - DNA, 492 bp, Artificial Sequence
  derived and/or modified sequence
atgggtaacagcctgcttagggagaatagacggcagcagaacacccaagaaatgccatggaatgtgcgtatgcagagtccaaagcagcgcacgtcacggaaaaagatccttatttttgagaaacgccaggacagtcagaacgagaacgagaggatgagctcaacacctatacaggataacgtggaccagacctactccgaggagctctgttataccctcataaaccatcgtgtgctctgtaccagacccagtggcaacagcgccgaggagtattatgagaacgtcccatgcaaggcagaacggccacgagaatccctaggaggtacagagaccgagtattctctgcttcacatgccatcaaccgatccacgtcatgcgagaagcccagaagatgaatacgagttgctgatgcctcatcggataagcagccacttcctacagcagccgaggccattgatggctccatccgagacacagttttcacacctgtag

SEQ ID NO: 72510 - DNA, 623 bp, Artificial Sequence
  derived and/or modified sequence
tttctgctgtctctgcacgggtggccagagccacacagccctttctttaagtcaggagttgccctgtcagagcacaaggcaagaaggaagtggtaaagggacggaggggaagccctgagaggactgagaggatgggaaattctctgctgagagaaaacaggcggcagcagaacactcaagagatgccttggaatgtgagaatgcaaagccccaaacagagaacatccaggaaaaaaatactcatttttgaaaagaggcaagattcccaaaacgaaaatgaaagaatgtcatctactcccatccaggacaatgttgaccagacctactcagaggagctgtgctataccctcatcaatcatcgggttctctgtacaaggccatcagggaactctgctgaagagtactatgagaatgttccctgcaaagctgagagacccagagagtccttgggaggaactgagactgagtattcacttctacatatgccttctacagaccccaggcatgcccgatccccagaagatgaatatgaacttctcatgcctcacagaatctcctctcactttctgcaacagccacgtccacttatggccccttctgagactcagttttcccatttatag

SEQ ID NO: 72511 - DNA, 492 bp, Artificial Sequence
  derived and/or modified sequence
atgggcaacagcctgctgcgggagaacagacggcagcagaacacccaggagatgccctggaatgtgaggatgcagagccccaagcagaggaccagcaggaagaagatcctgatctttgagaagaggcaggacagccagaatgaaaatgaaagaatgagcagcacccccatccaggacaacgtggaccagacctacagcgaggagctgtgctacaccctcatcaaccaccgggtgctgtgcacccggcccagcggcaacagcgctgaggagtactatgaaaatgtgccctgcaaggccgagcggccccgggagagcctgggcggcacagaaacagagtacagcctgctgcacatgcccagcacagaccccaggcatgcccggagcccagaagatgaatatgagctgctgatgccccaccgcatcagcagccacttcctgcagcagccccggcccctgatggcccccagcgagacccagttcagccacctgtag

SEQ ID NO: 72512 - DNA, 492 bp, Artificial Sequence
  derived and/or modified sequence
atgggcaacagcctgctgcgggagaaccggcggcagcagaacacccaggagatgccctggaacgtgcgaatgcagtctcctaaacagcgcacaagtaggaaaaaaatcctcattttcgagaaacgccaggattcccagaacgagaatgaaaggatgagctcaacacctatccaagataatgtcgatcaaacatactccgaagagctgtgttacactcttatcaaccacagagttctatgtactcgaccatctgggaactccgctgaggagtactacgagaacgtgccctgtaaagcagagaggcctagggagtccttaggcgggaccgagacggagtatagtcttctgcacatgcccagcaccgacccgcgccacgccaggtctccagaagacgaatacgagcttctgatgccacaccggatcagcagccacttcctccagcagcctaggcccctcatggccccgagcgagacccagttcagccacctctag

SEQ ID NO: 72513 - DNA, 492 bp, Artificial Sequence
  derived and/or modified sequence
atgggcaactccctcctgcgtgagaataggagacagcagaatacgcaggaaatgccatggaacgtacgaatgcagagccccaagcagaggacctctcgcaagaagatcctgatatttgaaaagcgccaagactcacagaatgagaatgagcgtatgagtagcacaccaattcaagataacgtcgaccaaacttatagcgaagagctgtgctacactctaatcaatcacagagtcctctgcacacgcccttcaggcaactctgccgaggaatactacgagaatgtgccctgtaaagctgagagacccagggaaagcctggggggtaccgaaactgagtactctctgcttcacatgccctcaacagatccccgacatgccagaagcccggaagatgagtatgagctgttgatgccgcaccggattagctcacacttccttcagcagccgaggcctttaatggctccatcggagacccagttttcccatctttag

SEQ ID NO: 72514 - DNA, 492 bp, Artificial Sequence
  derived and/or modified sequence
atgggcaacagcctgctgagagagaacagaagacagcagaacacccaggagatgccctggaacgtgagaatgcagagccccaagcagagaaccagcagaaagaagatcctgatcttcgagaagagacaggacagccagaacgagaacgagagaatgagcagcacccccatccaggacaacgtggaccagacctacagcgaggagctgtgctacaccctgatcaaccacagagtgctgtgcaccagacccagcggcaacagcgccgaggagtactacgagaacgtgccctgcaaggccgagagacccagagagagcctgggcggcaccgagaccgagtacagcctgctgcacatgcccagcaccgaccccagacacgccagaagccccgaggacgagtacgagctgctgatgccccacagaatcagcagccacttcctgcagcagcccagacccctgatggcccccagcgagacccagttcagccacctgtag

SEQ ID NO: 72515 - protein, 843 aa, Artificial Sequence
  derived and/or modified sequence
MVAEESGPGAQNSPYQLRRKTLLPKRTACPTKNSMEGASTSTTENFGHRAKRARVSGKSQDLSAAPAEQYLQEKLPDEVVLKIFSYLLEQDLCRAACVCKRFSELANDPILWKRLYMEVFEYTRPMMHPEPGKFYQINPEEYEHPNPWKESFQQLYKGAHVKPGFAEHFYSNPARYKGRENMLYYDTIEDALGGVQEAHFDGLIFVHSGIYTDEWIYIESPITMIGAAPGKVADKVIIENTRDSTFVFMEGSEDAYVGYMTIRFNPDDKSAQHHNAHHCLEITVNCSPIIDHCIIRSTCTVGSAVCVSGQGACPTIKHCNISDCENVGLYITDHAQGIYEDNEISNNALAGIWVKNHGNPIIRRNHIHHGRDVGVFTFDHGMGYFESCNIHRNRIAGFEVKAYANPTVVRCEIHHGQTGGIYVHEKGRGQFIENKIYANNFAGVWITSNSDPTIRGNSIFNGNQGGVYIFGDGRGLIEGNDIYGNALAGIQIRTNSCPIVRHNKIHDGQHGGIYVHEKGQGVIEENEVYSNTLAGVWVTTGSTPVLRRNRIHSGKQVGVYFYDNGHGVLEDNDIYNHMYSGVQIRTGSNPKIRRNKIWGGQNGGILVYNSGLGCIEDNEIFDNAMAGVWIKTDSNPTLRRNKIHDGRDGGICIFNGGRGLLEENDIFRNAQAGVLISTNSHPILRKNRIFDGFAAGIEITNHATATLEGNQIFNNRFGGLFLASGVNVTMKDNKIMNNQDAIEKAVSRGQCLYKISSYTSYPMHDFYRCHTCNTTDRNAICVNCIKKCHQGHDVEFIRHDRFFCDCGAGTLSNPCTLAGEPTHDTDTLYDSAPPIESNTLQHN

SEQ ID NO: 72516 - protein, 927 aa, Artificial Sequence
  derived and/or modified sequence
MNSVRAANRRPRRVSRPRPVQQQQQQPPQQPPPQPPQQQPPQQQPPPPPQQQQQQQPPPPPPPPPPLPQERNNVGERDDDVPADMVAEESGPGAQNSPYQLRRKTLLPKRTACPTKNSMEGASTSTTENFGHRAKRARVSGKSQDLSAAPAEQYLQEKLPDEVVLKIFSYLLEQDLCRAACVCKRFSELANDPILWKRLYMEVFEYTRPMMHPEPGKFYQINPEEYEHPNPWKESFQQLYKGAHVKPGFAEHFYSNPARYKGRENMLYYDTIEDALGGVQEAHFDGLIFVHSGIYTDEWIYIESPITMIGAAPGKVADKVIIENTRDSTFVFMEGSEDAYVGYMTIRFNPDDKSAQHHNAHHCLEITVNCSPIIDHCIIRSTCTVGSAVCVSGQGACPTIKHCNISDCENVGLYITDHAQGIYEDNEISNNALAGIWVKNHGNPIIRRNHIHHGRDVGVFTFDHGMGYFESCNIHRNRIAGFEVKAYANPTVVRCEIHHGQTGGIYVHEKGRGQFIENKIYANNFAGVWITSNSDPTIRGNSIFNGNQGGVYIFGDGRGLIEGNDIYGNALAGIQIRTNSCPIVRHNKIHDGQHGGIYVHEKGQGVIEENEVYSNTLAGVWVTTGSTPVLRRNRIHSGKQVGVYFYDNGHGVLEDNDIYNHMYSGVQIRTGSNPKIRRNKIWGGQNGGILVYNSGLGCIEDNEIFDNAMAGVWIKTDSNPTLRRNKIHDGRDGGICIFNGGRGLLEENDIFRNAQAGVLISTNSHPILRKNRIFDGFAAGIEITNHATATLEGNQIFNNRFGGLFLASGVNVTMKDNKIMNNQDAIEKAVSRGQCLYKISSYTSYPMHDFYRCHTCNTTDRNAICVNCIKKCHQGHDVEFIRHDRFFCDCGAGTLSNPCTLAGEPTHDTDTLYDSAPPIESNTLQHN

SEQ ID NO: 72517 - protein, 351 aa, Artificial Sequence [sequence omitted]

SEQ ID NO: 72518 - DNA, 3933 bp, Artificial Sequence
  derived and/or modified sequence
cggccgcgcccggtgcagcaacagcagcagcagcccccgcagcagccgccgccgcagccgccccagcagcagccgccccagcagcagcctccgccgccgccgcagcagcagcagcagcagcagcctccgccgccgccaccgccgcctccgccgctgcctcaggagcggaacaacgtcggcgagcgggatgatgatgtgcctgcagatatggttgcagaagaatcaggtcctggtgcacaaaatagtccataccaacttcgtagaaaaactcttttgccgaaaagaacagcgtgtcccacaaagaacagtatggagggcgcctcaacttcaactacagaaaactttggtcatcgtgcaaaacgtgcaagagtgtctggaaaatcacaagatctatcagcagcacctgctgaacagtatcttcaggagaaactgccagatgaagtggttctaaaaatcttctcttacttgctggaacaggatctttgtagagcagcttgtgtatgtaaacgcttcagtgaacttgctaatgatccaattttgtggaaacgattatatatggaagtatttgaatatactcgccctatgatgcatcctgaacctggaaaattctaccagattaatccagaagagtatgaacatccaaatccctggaaagagagtttccagcagttgtataaaggtgcacatgtaaagccaggatttgctgaacatttctacagtaaccctgcaagatataaaggaagagaaaatatgttgtattatgatactattgaagatgcccttggtggggtacaagaggctcattttgatggacttatctttgttcattctggaatatatactgatgaatggatatatattgaatctccaatcaccatgattggtgcagcacctgggaaagtggcagacaaagttataattgaaaacactagagattcaaccttcgtttttatggaaggctctgaagatgcttatgttggatatatgacaataaggtttaaccctgatgacaaatctgcacaacaccacaatgcacaccactgcttagagattacagtaaattgtagccctattattgatcactgtatcatccgaagtacatgtacagttggttctgcagtatgtgttagtggtcaaggagcatgtcccaccatcaagcactgtaacatcagtgactgtgaaaatgttggactatatataacagatcatgcacagggaatatatgaggataatgaaatttccaataatgcgttagctgggatttgggttaaaaatcatggaaacccaattattagacggaatcatattcatcatggacgtgatgttggtgtgttcacatttgatcatggcatgggttactttgaaagttgcaatatacacagaaataggatagcaggctttgaagtaaaagcctatgctaaccctacagtggttcgatgtgaaattcaccatgggcagactggaggaatatatgtccatgaaaaaggaagaggacaattcatagagaataaaatctatgcaaacaactttgcaggtgtatggattacctcaaatagtgacccaacaataaggggaaattctatatttaatggaaatcaaggaggagtttacatctttggtgatggacgaggccttattgaaggaaatgacatttatggcaatgcattagcaggaattcaaattaggacaaacagttgtccaattgttcggcataacaaaattcatgatggccagcatggtgggatttatgtgcatgaaaagggacaaggagtaatagaagagaatgaagtttatagtaacactctagctggagtctgggtgacaactggcagcactccagtactgagaagaaaccggatacacagtggcaagcaggttggtgtttatttttatgacaatggacatggagtgctagaagacaatgatatctataatcatatgtattcaggggttcagataaggactggaagcaaccccaaaattagacgcaacaaaatctggggaggacagaatggtggaattctagtttataattctggtctaggctgtatagaagacaatgaaatatttgacaatgcaatggctggagtctggattaagacagatagtaatcctacactaagaagaaataaaatccatgatggaagagatggtggcatctgtatatttaatgggggtcgaggtctccttgaagaaaatgatattttcaggaatgctcaagcaggtgttctcatcagcactaatagtcatccaatcttaaggaaaaacagaatatttgatggatttgccgcaggtattgaaattacaaatcacgcaactgcaacactagaaggcaatcagatttttaacaaccggtttggaggcttatttttagcatctggtgttaatgtgacaatgaaagataacaaaataatgaacaatcaagatgccatagaaaaggctgttagtagaggccaatgtttatataaaatatcaagttataccagctatcccatgcatgatttctacagatgtcatacttgtaacaccacagatcgaaatgccatatgtgtgaactgcattaagaagtgccatcagggacatgatgtagagtttattagacatgataggtttttctgtgactgtggtgctggaacactgtctaatccttgtacattagctggtgagcctacacatgatacagatacactatatgactctgctccacctatagaatctaatacattgcagcacaactgaattccttccctaaagaaaaagtcctgccattgtaacatcataacttaaaacacttttttggaagaagatttaaaatatttgcccatgctacaggaagagactgtattaaaaatggatacacaaggtcagttgacactatgaagctcaagctaccaaaaagaaagtggcaatatattgactcaggatctcaaagctgggtgttttagcattactgtgtaaagacttgaagggacagaagtgaagaaaataagctgcaattttgtacagataccaacttctgaaaagctggtgtttttacaactagcattgaatgcagtccaatttgcagtagtaatcttcaatagacaagcagctttgttgctgcctttatggacatgggtaccaattgcttttgtaatatggtaaaaatgtgagctagcacttctgcgttccttttgattttttttttttaacatgtattcagattgagaaatatgattttaatgctttaatctcatgtagtttgtttttaatttcaagcaaaatcttactgtacttgaatgtgccctgttttgttagcacacctagacttgctgtaactgtactcatgtcccagtatgtacgttctttctatgaaagagaaaacactaatcttaaattatatccagcaatgtttctggtatcctttaagaaaagttaagactattatttccttcccttccctgtgcagcattcaaaatcacccctagaaaaagtgagtgttttaatgagacttcctaggaagggatgcactgtaaaacaaaagtattcttgtaactcagttttgtgaaaggtaaaaaactactatgttttaagtacactttagaaagtctcttcaaaacaaacagtcctgtatttgaactctgttcatagtttttttttgaacagtttagacaaaactgctggaaattaaaccaatttcctgcattaagctgagacaagtatatatacagccctatacagtttcatagcttttcctcccccatttatgtgtattggtgacagtgggtataaaacagcctgaaagtgtatgcatgtaccataacatctagacttaatatattgtggagtattcaataaccattatgtagaaggtagataagaattaaaagggtttaatttcctagaaagaaaatggaaaaatggtcatttttaaaaaataaagtttattagatc

SEQ ID NO: 72519 - DNA, 591 bp, Artificial Sequence
  derived and/or modified sequence
cggccgcgcccggtgcagcaacagcagcagcagcccccgcagcagccgccgccgcagccgccccagcagcagccgccccagcagcagcctccgccgccgccgcagcagcagcagcagcagcagcctccgccgccgccaccgccgcctccgccgctgcctcaggagcggaacaacgtcggcgagcgggatgatgatgtgcctgcagatatggttgcagaagaatcaggtcctggtgcacaaaatagtccataccaacttcgtagaaaaactcttttgccgaaaagaacagcgtgtcccacaaagaacagtatggagggcgcctcaacttcaactacagaaaactttggtcatcgtgcaaaacgtgcaagagtgtctggaaaatcacaagatctatcagcagcacctgctgaacagtatcttcaggagaaactgccagatgaagtggttctaaaaatcttctcttacttgctggaacaggatctttgtagagcagcttgtgtatgtaaacgcttcagtgaacttgctaatgatccaattttgtggctaggcgaagtggctcacgcctataatcccagcactttgggaggctga

SEQ ID NO: 72520 - DNA, 3844 bp, Artificial Sequence
  derived and/or modified sequence
atcatagcaataagatttgtaaaacattgcaatggctgaaaaactgtctaacaggaaattttaagtgttattccaaagaagaacaagcctaaaaatgatgatgtgcctgcagatatggttgcagaagaatcaggtcctggtgcacaaaatagtccataccaacttcgtagaaaaactcttttgccgaaaagaacagcgtgtcccacaaagaacagtatggagggcgcctcaacttcaactacagaaaactttggtcatcgtgcaaaacgtgcaagagtgtctggaaaatcacaagatctatcagcagcacctgctgaacagtatcttcaggagaaactgccagatgaagtggttctaaaaatcttctcttacttgctggaacaggatctttgtagagcagcttgtgtatgtaaacgcttcagtgaacttgctaatgatccaattttgtggaaacgattatatatggaagtatttgaatatactcgccctatgatgcatcctgaacctggaaaattctaccagattaatccagaagagtatgaacatccaaatccctggaaagagagtttccagcagttgtataaaggtgcacatgtaaagccaggatttgctgaacatttctacagtaaccctgcaagatataaaggaagagaaaatatgttgtattatgatactattgaagatgcccttggtggggtacaagaggctcattttgatggacttatctttgttcattctggaatatatactgatgaatggatatatattgaatctccaatcaccatgattggtgcagcacctgggaaagtggcagacaaagttataattgaaaacactagagattcaaccttcgtttttatggaaggctctgaagatgcttatgttggatatatgacaataaggtttaaccctgatgacaaatctgcacaacaccacaatgcacaccactgcttagagattacagtaaattgtagccctattattgatcactgtatcatccgaagtacatgtacagttggttctgcagtatgtgttagtggtcaaggagcatgtcccaccatcaagcactgtaacatcagtgactgtgaaaatgttggactatatataacagatcatgcacagggaatatatgaggataatgaaatttccaataatgcgttagctgggatttgggttaaaaatcatggaaacccaattattagacggaatcatattcatcatggacgtgatgttggtgtgttcacatttgatcatggcatgggttactttgaaagttgcaatatacacagaaataggatagcaggctttgaagtaaaagcctatgctaaccctacagtggttcgatgtgaaattcaccatgggcagactggaggaatatatgtccatgaaaaaggaagaggacaattcatagagaataaaatctatgcaaacaactttgcaggtgtatggattacctcaaatagtgacccaacaataaggggaaattctatatttaatggaaatcaaggaggagtttacatctttggtgatggacgaggccttattgaaggaaatgacatttatggcaatgcattagcaggaattcaaattaggacaaacagttgtccaattgttcggcataacaaaattcatgatggccagcatggtgggatttatgtgcatgaaaagggacaaggagtaatagaagagaatgaagtttatagtaacactctagctggagtctgggtgacaactggcagcactccagtactgagaagaaaccggatacacagtggcaagcaggttggtgtttatttttatgacaatggacatggagtgctagaagacaatgatatctataatcatatgtattcaggggttcagataaggactggaagcaaccccaaaattagacgcaacaaaatctggggaggacagaatggtggaattctagtttataattctggtctaggctgtatagaagacaatgaaatatttgacaatgcaatggctggagtctggattaagacagatagtaatcctacactaagaagaaataaaatccatgatggaagagatggtggcatctgtatatttaatgggggtcgaggtctccttgaagaaaatgatattttcaggaatgctcaagcaggtgttctcatcagcactaatagtcatccaatcttaaggaaaaacagaatatttgatggatttgccgcaggtattgaaattacaaatcacgcaactgcaacactagaaggcaatcagatttttaacaaccggtttggaggcttatttttagcatctggtgttaatgtgacaatgaaagataacaaaataatgaacaatcaagatgccatagaaaaggctgttagtagaggccaatgtttatataaaatatcaagttataccagctatcccatgcatgatttctacagatgtcatacttgtaacaccacagatcgaaatgccatatgtgtgaactgcattaagaagtgccatcagggacatgatgtagagtttattagacatgataggtttttctgtgactgtggtgctggaacactgtctaatccttgtacattagctggtgagcctacacatgatacagatacactatatgactctgctccacctatagaatctaatacattgcagcacaactgaattccttccctaaagaaaaagtcctgccattgtaacatcataacttaaaacacttttttggaagaagatttaaaatatttgcccatgctacaggaagagactgtattaaaaatggatacacaaggtcagttgacactatgaagctcaagctaccaaaaagaaagtggcaatatattgactcaggatctcaaagctgggtgttttagcattactgtgtaaagacttgaagggacagaagtgaagaaaataagctgcaattttgtacagataccaacttctgaaaagctggtgtttttacaactagcattgaatgcagtccaatttgcagtagtaatcttcaatagacaagcagctttgttgctgcctttatggacatgggtaccaattgcttttgtaatatggtaaaaatgtgagctagcacttctgcgttccttttgattttttttttttaacatgtattcagattgagaaatatgattttaatgctttaatctcatgtagtttgtttttaatttcaagcaaaatcttactgtacttgaatgtgccctgttttgttagcacacctagacttgctgtaactgtactcatgtcccagtatgtacgttctttctatgaaagagaaaacactaatcttaaattatatccagcaatgtttctggtatcctttaagaaaagttaagactattatttccttcccttccctgtgcagcattcaaaatcacccctagaaaaagtgagtgttttaatgagacttcctaggaagggatgcactgtaaaacaaaagtattcttgtaactcagttttgtgaaaggtaaaaaactactatgttttaagtacactttagaaagtctcttcaaaacaaacagtcctgtatttgaactctgttcatagtttttttttgaacagtttagacaaaactgctggaaattaaaccaatttcctgcattaagctgagacaagtatatatacagccctatacagtttcatagcttttcctcccccatttatgtgtattggtgacagtgggtataaaacagcctgaaagtgtatgcatgtaccataacatctagacttaatatattgtggagtattcaataaccattatgtagaaggtagataagaattaaaagggtttaatttcctagaaagaaaatggaaaaatggtcatttttaaaaaataaagtttattagatcataa

SEQ ID NO: 72521 - DNA, 4055 bp, Artificial Sequence
  derived and/or modified sequence
ctcctgccccgaagctcgctgtgcgtgtgcgtgtgtgtgtccctccgccaacgccgccacctcagcccggcaaatgaactccgtccgagccgccaaccggagacccaggcgagtgtcgcggccgcgcccggtgcagcaacagcagcagcagcccccgcagcagccgccgccgcagccgccccagcagcagccgccccagcagcagcctccgccgccgccgcagcagcagcagcagcagcagcctccgccgccgccaccgccgcctccgccgctgcctcaggagcggaacaacgtcggcgagcgggatgatgatgtgcctgcagatatggttgcagaagaatcaggtcctggtgcacaaaatagtccataccaacttcgtagaaaaactcttttgccgaaaagaacagcgtgtcccacaaagaacagtatggagggcgcctcaacttcaactacagaaaactttggtcatcgtgcaaaacgtgcaagagtgtctggaaaatcacaagatctatcagcagcacctgctgaacagtatcttcaggagaaactgccagatgaagtggttctaaaaatcttctcttacttgctggaacaggatctttgtagagcagcttgtgtatgtaaacgcttcagtgaacttgctaatgatccaattttgtggaaacgattatatatggaagtatttgaatatactcgccctatgatgcatcctgaacctggaaaattctaccagattaatccagaagagtatgaacatccaaatccctggaaagagagtttccagcagttgtataaaggtgcacatgtaaagccaggatttgctgaacatttctacagtaaccctgcaagatataaaggaagagaaaatatgttgtattatgatactattgaagatgcccttggtggggtacaagaggctcattttgatggacttatctttgttcattctggaatatatactgatgaatggatatatattgaatctccaatcaccatgattggtgcagcacctgggaaagtggcagacaaagttataattgaaaacactagagattcaaccttcgtttttatggaaggctctgaagatgcttatgttggatatatgacaataaggtttaaccctgatgacaaatctgcacaacaccacaatgcacaccactgcttagagattacagtaaattgtagccctattattgatcactgtatcatccgaagtacatgtacagttggttctgcagtatgtgttagtggtcaaggagcatgtcccaccatcaagcactgtaacatcagtgactgtgaaaatgttggactatatataacagatcatgcacagggaatatatgaggataatgaaatttccaataatgcgttagctgggatttgggttaaaaatcatggaaacccaattattagacggaatcatattcatcatggacgtgatgttggtgtgttcacatttgatcatggcatgggttactttgaaagttgcaatatacacagaaataggatagcaggctttgaagtaaaagcctatgctaaccctacagtggttcgatgtgaaattcaccatgggcagactggaggaatatatgtccatgaaaaaggaagaggacaattcatagagaataaaatctatgcaaacaactttgcaggtgtatggattacctcaaatagtgacccaacaataaggggaaattctatatttaatggaaatcaaggaggagtttacatctttggtgatggacgaggccttattgaaggaaatgacatttatggcaatgcattagcaggaattcaaattaggacaaacagttgtccaattgttcggcataacaaaattcatgatggccagcatggtgggatttatgtgcatgaaaagggacaaggagtaatagaagagaatgaagtttatagtaacactctagctggagtctgggtgacaactggcagcactccagtactgagaagaaaccggatacacagtggcaagcaggttggtgtttatttttatgacaatggacatggagtgctagaagacaatgatatctataatcatatgtattcaggggttcagataaggactggaagcaaccccaaaattagacgcaacaaaatctggggaggacagaatggtggaattctagtttataattctggtctaggctgtatagaagacaatgaaatatttgacaatgcaatggctggagtctggattaagacagatagtaatcctacactaagaagaaataaaatccatgatggaagagatggtggcatctgtatatttaatgggggtcgaggtctccttgaagaaaatgatattttcaggaatgctcaagcaggtgttctcatcagcactaatagtcatccaatcttaaggaaaaacagaatatttgatggatttgccgcaggtattgaaattacaaatcacgcaactgcaacactagaaggcaatcagatttttaacaaccggtttggaggcttatttttagcatctggtgttaatgtgacaatgaaagataacaaaataatgaacaatcaagatgccatagaaaaggctgttagtagaggccaatgtttatataaaatatcaagttataccagctatcccatgcatgatttctacagatgtcatacttgtaacaccacagatcgaaatgccatatgtgtgaactgcattaagaagtgccatcagggacatgatgtagagtttattagacatgataggtttttctgtgactgtggtgctggaacactgtctaatccttgtacattagctggtgagcctacacatgatacagatacactatatgactctgctccacctatagaatctaatacattgcagcacaactgaattccttccctaaagaaaaagtcctgccattgtaacatcataacttaaaacacttttttggaagaagatttaaaatatttgcccatgctacaggaagagactgtattaaaaatggatacacaaggtcagttgacactatgaagctcaagctaccaaaaagaaagtggcaatatattgactcaggatctcaaagctgggtgttttagcattactgtgtaaagacttgaagggacagaagtgaagaaaataagctgcaattttgtacagataccaacttctgaaaagctggtgtttttacaactagcattgaatgcagtccaatttgcagtagtaatcttcaatagacaagcagctttgttgctgcctttatggacatgggtaccaattgcttttgtaatatggtaaaaatgtgagctagcacttctgcgttccttttgattttttttttttaacatgtattcagattgagaaatatgattttaatgctttaatctcatgtagtttgtttttaatttcaagcaaaatcttactgtacttgaatgtgccctgttttgttagcacacctagacttgctgtaactgtactcatgtcccagtatgtacgttctttctatgaaagagaaaacactaatcttaaattatatccagcaatgtttctggtatcctttaagaaaagttaagactattatttccttcccttccctgtgcagcattcaaaatcacccctagaaaaagtgagtgttttaatgagacttcctaggaagggatgcactgtaaaacaaaagtattcttgtaactcagttttgtgaaaggtaaaaaactactatgttttaagtacactttagaaagtctcttcaaaacaaacagtcctgtatttgaactctgttcatagtttttttttgaacagtttagacaaaactgctggaaattaaaccaatttcctgcattaagctgagacaagtatatatacagccctatacagtttcatagcttttcctcccccatttatgtgtattggtgacagtgggtataaaacagcctgaaagtgtatgcatgtaccataacatctagacttaatatattgtggagtattcaataaccattatgtagaaggtagataagaattaaaagggtttaatttcctagaaagaaaatggaaaaatggtcatttttaaaaaataaagtttattagatcataa

SEQ ID NO: 72522 - DNA, 2028 bp, Artificial Sequence
  derived and/or modified sequence
gttagctgggatttgggttaaaaatcatggaaacccaattattagacggaatcatattcatcatggacgtgatgttggtgtgttcacatttgatcatggcatgggttactttgaaagttgcaatatacacagaaataggatagcaggctttgaagtaaaagcctatgctaaccctacagtggttcgatgtgaaattcaccatgggcagactggaggaatatatgtccatgaaaaaggaagaggacaattcatagagaataaaatctatgcaaacaactttgcaggtgtatggattacctcaaatagtgacccaacaataaggggaaattctatatttaatggaaatcaaggaggagtttacatctttggtgatggacgaggccttattgaaggaaatgacatttatgcatgaaaagggacaaggagtaatagaagagaatgaagtttatagtaacactctagctggagtctgggtgacaactggcagcactccagtactgagaagaaaccggatacacagtggcaagcaggttggtgtttatttttatgacaatggacatggagtgctagaagacaatgatatctataatcatatgtattcaggggttcagataaggactggaagcaaccccaaaattagacgcaacaaaatctggggaggacagaatggtggaattctagtttataattctggtctaggctgtatagaagacaatgaaatatttgacaatgcaatggctggagtctggattaagacagatagtaatcctacactaagaagaaataaaatccatgatggaagagatggtggcatctgtatatttaatgggggtcgaggtctccttgaagaaaatgatattttcaggaatgctcaagcaggtgttctcatcagcactaatagtcatccaatcttaaggaaaaacagaatatttgatggatttgccgcaggtattgaaattacaaatcacgcaactgcaacactagaaggcaatcagatttttaacaaccggtttggaggcttatttttagcatctggtgttaatgtgacaatgaaagataacaaaataatgaacaatcaagatgccatagaaaaggctgttagtagaggccaatgtttatataaaatatcaagttataccagctatcccatgcatgatttctacagatgtcatacttgtaacaccacagatcgaaatgccatatgtgtgaactgcattaagaagtgccatcagggacatgatgtagagtttattagacatgataggtttttctgtgactgtggtgctggaacactgtctaatccttgtacattagctggtgagcctacacatgatacagatacactatatgactctgctccacctatagaatctaatacattgcagcacaactgaattccttccctaaagaaaaagtcctgccattgtaacatcataacttaaaacacttttttggaagaagatttaaaatatttgcccatgctacaggaagagactgtattaaaaatggatacacaaggtcagttgacactatgaagctcaagctaccaaaaagaaagtggcaatatattgactcaggatctcaaagctgggtgttttagcattactgtgtaaagacttgaagggacagaagtgaagaaaataagctgcaattttgtacagataccaacttctgaaaagctggtgtttttacaactagcattgaatgcagtccaatttgcagtagtaatcttcaatagacaagcagctttgttgctgcctttatggacatgggtaccaattgcttttgtaatatggtaaaaatgtgagctagcacttctgcgttccttttgattttttttttttaacatgtattcagattgagaaatatgattttaatgctttaatctcatgtagtttgtttttaatttcaagcaaaatcttactgtacttgaatgtgccctgttttgttagcacacctagacttgctgtaactgtactcatgtcccagtatgtacgttctttctatgaaagagaaaacactaatctt

SEQ ID NO: 72523 - DNA, 2532 bp, Artificial Sequence
  derived and/or modified sequence
atggtagctgaggagtccggacccggggcacagaacagcccttaccagctcagacggaagaccctcttacctaagcggactgcctgtccaaccaaaaatagcatggaaggagcgtcaacaagcacgacagagaattttggtcacagagcaaaacgcgcacgcgtgtctggaaagtcccaggacctgtccgcagcccccgccgaacagtatctccaggagaagctgcctgatgaggttgtgttaaaaatcttctcctacctcctggagcaggatctctgcagagccgcctgtgtgtgcaaacgtttttctgagcttgccaatgaccccattctctggaagcgcctgtatatggaagttttcgagtatacccgcccaatgatgcaccctgagccaggcaaattctatcagatcaatccagaggaatacgagcaccctaacccctggaaggaatccttccagcagctgtacaaaggagctcatgttaaacctggcttcgcagagcacttttatagtaaccctgcccgctataagggccgagaaaatatgctgtactatgatactattgaggatgcactcgggggagtccaggaggcccacttcgatggtctcatttttgtacattccggaatctacacggacgaatggatttatatagagtcccctatcacgatgatcggggccgcacccgggaaagtagctgacaaggtgatcatcgagaatacccgagattcaacctttgtattcatggaaggttccgaagatgcctacgttgggtatatgaccattcggttcaaccccgacgataagtcagcccagcatcacaatgcccatcattgcctggagatcaccgtgaattgctcccctatcatcgaccactgtattatccgctccacatgtacggtgggctctgcagtgtgcgtgtctggtcagggcgcttgccccaccattaagcactgcaacatttctgattgcgagaatgtcggattatatatcactgatcatgcccaggggatctatgaagacaacgaaatctccaacaatgctctcgcggggatttgggtaaaaaaccatggtaatccaattatccgtcggaaccatatccaccacggcagggatgtaggcgtgtttacctttgaccatggcatgggttatttcgagagttgcaacattcacagaaacagaatcgcaggttttgaggtgaaggcttatgccaatccaactgttgtccgctgtgagatacatcatggccaaaccgggggcatatatgtacacgaaaaaggacgtggacagttcattgagaataagatctacgccaacaactttgccggcgtgtggatcacatcaaattccgacccaactattcgtggtaactccatcttcaatggtaaccaggggggcgtgtacattttcggcgatggacggggactcatcgaagggaacgatatatacgggaacgcactggcaggcatacagattagaaccaacagttgtcctattgtgaggcataataagatccatgatggacaacacggcggtatctatgtccacgagaagggtcagggtgtgattgaggagaacgaagtgtattccaatactttggcgggggtctgggtaaccaccgggagcaccccggtactgcgcagaaacagaatccactccggcaaacaggtgggagtttatttctacgacaatgggcacggtgtgctcgaggataatgacatttacaatcatatgtatagcggcgtccagattagaaccggctcaaatcccaaaatcagacggaataaaatctggggagggcagaacggcgggattttagtgtacaactccgggctgggatgcattgaggataatgagatattcgataacgccatggctggagtgtggattaagactgattccaatcctacactgagaaggaataagatccatgatgggagagacggggggatttgcatttttaatggcggtcgcggtttgctcgaggaaaacgatatctttaggaacgcacaggccggtgttttgatctctaccaatagccatccaatcttgcgaaaaaacagaatcttcgacggtttcgccgctggaatcgagataacaaaccacgccactgctacgctggaaggcaaccagatatttaacaacaggtttggtggcttattcctggcgagtggagtgaatgtgacaatgaaagacaataaaattatgaacaaccaggatgccattgaaaaggccgtatcaagaggccagtgtctttataaaatcagtagttacacttcatatcctatgcacgatttttataggtgtcatacctgtaacaccactgacaggaatgctatatgtgtaaactgcattaagaagtgccaccagggccacgacgtggaattcatccgccatgaccgctttttttgcgattgcggggctggtacactgtcgaatccttgtaccctggcaggtgaacccacccacgataccgacaccctctacgacagtgcacctcccattgagtctaacacactacaacataactag

SEQ ID NO: 72524 - DNA, 2532 bp, Artificial Sequence
  derived and/or modified sequence
atggttgcggaggaatcaggccccggggcgcagaactcaccatatcaactgaggcgaaagacattgcttcctaaacggactgcgtgtcctaccaaaaactctatggaaggcgcctccacttcaactacagaaaacttcgggcacagggccaaacgagcacgggtgtctgggaagtctcaggatctgtcagctgcgcccgcagaacagtatttgcaggagaaactgcctgatgaagtggtgctgaagattttctcctatctcctggagcaggatctgtgccgggccgcttgcgtctgcaaaaggttctccgagctggccaacgatcctattctctggaagaggctgtacatggaagtttttgagtacacaaggcccatgatgcaccctgaacctggaaaattttaccaaatcaatcctgaagaatacgagcatcccaatccgtggaaagaatccttccagcaactctacaagggagcccacgtgaaaccgggcttcgctgagcacttttattccaaccctgctcgttataagggccgtgaaaacatgctttactacgatactattgaggacgctctggggggggtgcaggaggctcacttcgatgggctgatcttcgtgcactctggaatctataccgatgaatggatatatattgagtcccctatcacgatgataggtgcagcccccggaaaggtggcggacaaggttatcattgagaacaccagagactctacatttgtgttcatggagggatctgaagatgcgtatgtgggctacatgactatcaggttcaatccagacgataagagcgcccaacatcacaacgcgcatcactgcctcgagatcacagtgaattgttctccaatcatcgatcattgtattattagatccacctgtaccgttggctctgccgtgtgtgtgtccgggcagggggcatgcccaacaattaagcattgcaacatttcagattgtgaaaatgtggggctgtatataaccgatcacgcccaaggcatttacgaggataatgagatttcgaacaacgcattagcaggcatttgggtcaaaaaccacggtaacccaatcatacgcagaaaccatatccaccacggaagagacgtaggggtgttcaccttcgaccacggcatggggtatttcgagtcttgtaatattcataggaacaggattgcgggttttgaagtaaaggcttacgctaacccaactgtggtgaggtgcgagatccatcatggccagaccggcgggatatacgtacacgaaaaaggcaggggacagttcatagagaacaagatttacgctaacaactttgctggcgtgtggattacaagtaacagcgacccgactatccgggggaacagcattttcaacggcaaccagggcggcgtctatattttcggcgatggtaggggactgatcgaaggtaatgacatttacggcaacgctcttgcaggaatccagattagaaccaactcttgccctatcgtgaggcacaacaaaatccacgacggtcagcacggcggcatttatgtccacgagaagggccaaggggtcatcgaggagaacgaagtgtacagcaataccctcgccggagtgtgggtgaccacaggctctactcccgttctccgtcggaatcgcatccattccggaaagcaggtaggagtgtacttttatgataatggacatggagtgctcgaagataatgacatttacaaccatatgtactccggagtacagatacggactggaagtaatcccaagatcagaaggaacaagatttggggcgggcagaatggtgggatcctggtttataactccggactcggatgcattgaggacaatgaaatctttgacaacgccatggctggcgtctggattaaaacggactccaatccgacccttcgcagaaataagattcatgacggcagggacgggggtatatgcattttcaacggcggccggggattactggaggaaaacgatattttcaggaatgcacaggctggagttctcatctccacgaattctcaccctatccttcgcaaaaaccggatcttcgatggctttgccgcgggcattgagattactaatcatgctacagccactcttgaaggcaatcaaatcttcaacaatcgattcgggggactttttctggcgtcaggcgtgaatgtaacaatgaaggataataaaattatgaataaccaggatgccattgaaaaggctgtcagcaggggacaatgcctttataagatcagctcttacacgtcttaccctatgcacgacttctatagatgtcatacttgcaatactactgatcgtaatgctatttgcgtcaattgtatcaagaagtgccaccagggacatgacgttgaattcattcgccatgaccgctttttttgcgactgtggtgcggggaccctgagcaatccatgtacccttgccggtgagcccacccatgataccgacacactgtatgacagtgccccaccgatcgaatcaaacactcttcagcacaattag

SEQ ID NO: 72525 - DNA, 2784 bp, Artificial Sequence
  derived and/or modified sequence
atgaattccgttagggctgcaaatcgccgccctcgaagggtgtctaggcctcgaccagtgcagcagcagcagcaacagccgccacagcagccgccacctcagccacctcagcaacagcctcctcaacagcaacctccacctcctcctcagcaacaacaacaacagcagccgccaccaccccctccaccaccgccacccttaccacaggaacggaataacgtaggcgagcgagacgacgacgttccagcagacatggttgccgaagaaagcggccctggagcacagaactccccttaccagctgcggaggaagactctgttgcccaagcggaccgcatgccccaccaagaatagtatggagggagccagcacaagcacaaccgaaaactttggccaccgcgctaagagagccagagtgtctggaaaaagtcaggacctctctgcggcaccagcggaacagtacctgcaggagaagcttccagacgaagtggtcttaaaaattttttcctacttgctggagcaggatctatgccgggctgcctgcgtttgcaaacgcttcagtgagttggccaacgatcctatactgtggaagcggttgtatatggaggtcttcgaatatacccggcctatgatgcacccggagcctggaaaattttaccagataaacccggaagagtacgagcatccgaatccttggaaagagtccttccagcagctctacaaaggagcccacgtgaagcccggcttcgcagaacacttctactccaaccctgcccgttataaggggcgcgagaatatgctgtactatgacaccattgaggacgctttgggcggcgttcaagaagcacattttgacggtttgatatttgtgcacagtgggatctataccgacgaatggatctacatcgaatctcctattactatgataggagccgctcctggtaaggtggcagataaggtcataatcgagaacacccgcgacagcactttcgtctttatggaggggtcggaggatgcgtacgtaggttacatgaccatccgttttaatccggatgataaaagcgcgcagcatcacaacgcccaccattgcttggaaattacagtcaactgtagtcccatcatcgaccactgcattatccggagcacttgcaccgtgggtagcgccgtctgcgttagtgggcagggcgcctgccccacaataaaacactgcaatatctccgattgtgagaacgtggggctgtacattacagaccatgcacaggggatttacgaagacaatgagatctccaacaacgccctcgcaggcatctgggtcaaaaaccacgggaaccccatcattcgccgaaatcacatccaccatggacgggacgttggcgtgttcaccttcgaccacggtatgggatactttgaatcttgtaatattcatcgaaacaggatcgcgggcttcgaagtaaaagcctatgctaaccccactgtcgtcagatgcgaaattcaccacggacagactggcgggatctacgttcatgaaaagggacgcgggcaattcatcgagaacaagatttacgcgaataatttcgcgggtgtgtggatcacctctaacagcgaccccacaatccgtggcaattcgatctttaatggcaatcagggaggcgtctacatcttcggggatggtcgggggttgatcgaaggtaacgatatttacgggaatgcactcgccggtattcaaatccgcaccaatagctgtcctatcgtgcgacataacaagatccacgatgggcagcatggtggcatttatgtgcatgaaaaaggccagggggtgatcgaggagaacgaggtctactccaacacactcgctggggtgtgggttaccaccggatctactccggttctccggcggaacaggatccattccgggaaacaagtgggcgtctatttttacgataatggccatggcgtcctggaggataatgacatttataaccacatgtactcaggggtgcagatcagaactggctccaaccccaagattcggcgcaacaaaatttgggggggccagaatggtggcattttggtatacaattctgggctgggttgcattgaagataacgaaatctttgataatgcaatggcgggtgtgtggatcaaaaccgactcaaatcctacactccgcagaaataaaatccacgacggtcgggatggcggaatttgtatctttaatggcggcaggggcctgctcgaagaaaacgacatctttcgcaacgcacaggctggcgtcctaatttctacgaactcacaccctatcctgcggaagaatcggattttcgatgggttcgctgcaggtattgaaattaccaatcatgcgactgcgaccttggagggcaaccagatttttaacaatcgatttggcggcctgttccttgcatctggagttaacgttacaatgaaagataacaagatcatgaataaccaggacgctatcgagaaggccgttagccgtggccagtgcctgtacaagataagtagctatacgagctaccccatgcacgacttctaccggtgccacacatgcaataccaccgaccggaatgctatatgtgtcaattgtataaagaaatgccatcagggacatgacgtcgaattcatcaggcatgatcgctttttctgcgattgcggcgctggtactctgtccaacccatgcacgctggcaggcgagcccacacatgacaccgataccttatatgacagtgcgcctccaatcgaaagcaataccctgcagcacaattag

SEQ ID NO: 72526 - DNA, 2532 bp, Artificial Sequence
  derived and/or modified sequence
atggtggccgaggagagcggccctggggcccagaacagcccctaccagctgcggaggaagaccctgctgcccaagaggacagcctgccccaccaagaacagcatggagggcgccagcaccagcaccacagagaactttggccaccgggccaagagggcccgggtgtctgggaagagccaggacctgtctgctgccccagctgagcagtacctgcaggagaagctgcctgatgaggtggtgctgaagatcttctcctacctgctggagcaggacctgtgcagagctgcctgtgtgtgcaagcgcttcagcgagctggccaatgaccccatcctgtggaagaggctgtacatggaggtgtttgagtacacccggcccatgatgcaccctgagcccgggaagttctaccagatcaaccctgaggagtatgagcaccccaacccctggaaggagagcttccagcagctgtacaagggggcccacgtgaagccaggctttgctgagcacttctacagcaacccagcccgctacaagggccgggagaacatgctgtactatgacaccattgaagatgccctgggcggcgtgcaggaggcccactttgatggcctcatctttgtgcacagcggcatctacacagatgagtggatctacatcgagagccccatcaccatgattggagctgcccctgggaaggtggccgacaaggtgatcatcgagaacacccgggacagcacctttgtgttcatggagggctctgaagatgcctacgtgggctacatgaccatccgcttcaacccagatgacaagagcgcccagcaccacaatgcccaccactgcctggagatcaccgtgaactgcagccccatcatcgaccactgcatcatccgcagcacctgcaccgtgggcagcgctgtgtgtgtgtctggccagggcgcctgccccaccatcaagcactgcaacatcagtgactgtgaaaatgtgggcctgtacatcacagaccacgcccagggcatctatgaggacaatgagatcagcaacaatgccctggccggcatctgggtgaagaaccacggcaaccccatcatcagaagaaaccacatccaccacggcagagatgtgggcgtcttcacctttgaccacggcatgggctactttgagagctgcaacatccacaggaacagaattgctggctttgaggtgaaggcctatgccaaccccaccgtggtgcgctgtgagatccaccacggccagacaggaggcatctacgtgcatgagaagggccggggccagttcatcgagaacaagatctatgccaacaactttgctggggtgtggatcaccagcaacagcgaccccaccatccggggcaacagcatcttcaatggaaaccagggcggcgtgtacatctttggagatggccggggcctgattgagggcaatgacatctatggaaatgccctggccggcatccagatccgcaccaacagctgccccatcgtgcgccacaacaagatccatgatggccagcacggcggcatctacgtgcatgagaagggccagggcgtgattgaagaaaatgaggtgtacagcaacaccctggccggcgtgtgggtgaccaccggcagcacccctgtgctgcggaggaaccgcatccacagcggcaagcaggtgggcgtgtacttctatgacaatggccacggcgtgctggaggacaatgacatctacaaccacatgtacagcggcgtgcagatcagaacaggcagcaaccccaagatcagaagaaacaagatctggggcggccagaatggaggcatcctggtgtacaacagcggcctgggctgcatcgaggacaatgagatctttgacaatgccatggccggcgtgtggatcaagacagacagcaaccccaccctgcggaggaacaagatccatgatggaagagatggcggcatctgcatcttcaatggaggccggggcctgctggaggagaatgacatcttcagaaatgcccaggccggcgtgctgatcagcaccaacagccaccccatcctgaggaagaaccgcatctttgatggctttgctgctggcatcgagatcaccaaccacgccacagccaccctggagggcaaccagatcttcaacaacagatttggaggcctcttcctggccagcggcgtgaatgtgaccatgaaggacaacaagatcatgaacaaccaggatgccatcgagaaggctgtgtcccggggccagtgcctgtacaagatcagcagctacaccagctaccccatgcatgacttctaccgctgccacacctgcaacaccacagacagaaatgccatctgtgtgaactgcatcaagaagtgccaccagggccatgatgtggagttcatcagacatgaccgcttcttctgtgactgtggggccggcaccctgagcaacccctgcaccctggccggggagcccacccatgacacagacaccctgtatgattctgccccacccatcgagagcaacaccctgcagcacaactag

SEQ ID NO: 72527 - DNA, 2784 bp, Artificial Sequence
  derived and/or modified sequence
atgaacagcgtgcgggccgccaacagaagaccccggcgggtgtcccggcccaggcctgtgcagcagcagcagcagcagcccccccagcagcccccaccccagcccccccagcagcagcccccccagcagcagcccccacctccaccccagcagcagcagcagcagcagcccccacctcctcctcctcctcctccacccctgccccaggagagaaataatgtgggggagagagatgatgatgtgcctgctgacatggtggccgaggagagcggccctggggcccagaacagcccctaccagctgcggaggaagaccctgctgcccaagaggacagcctgccccaccaagaacagcatggagggcgccagcaccagcaccacagagaactttggccaccgggccaagagggcccgggtgtctgggaagagccaggacctgtctgctgccccagctgagcagtacctgcaggagaagctgcctgatgaggtggtgctgaagatcttctcctacctgctggagcaggacctgtgcagagctgcctgtgtgtgcaagcgcttcagcgagctggccaatgaccccatcctgtggaagaggctgtacatggaggtgtttgagtacacccggcccatgatgcaccctgagcccgggaagttctaccagatcaaccctgaggagtatgagcaccccaacccctggaaggagagcttccagcagctgtacaagggggcccacgtgaagccaggctttgctgagcacttctacagcaacccagcccgctacaagggccgggagaacatgctgtactatgacaccattgaagatgccctgggcggcgtgcaggaggcccactttgatggcctcatctttgtgcacagcggcatctacacagatgagtggatctacatcgagagccccatcaccatgattggagctgcccctgggaaggtggccgacaaggtgatcatcgagaacacccgggacagcacctttgtgttcatggagggctctgaagatgcctacgtgggctacatgaccatccgcttcaacccagatgacaagagcgcccagcaccacaatgcccaccactgcctggagatcaccgtgaactgcagccccatcatcgaccactgcatcatccgcagcacctgcaccgtgggcagcgctgtgtgtgtgtctggccagggcgcctgccccaccatcaagcactgcaacatcagtgactgtgaaaatgtgggcctgtacatcacagaccacgcccagggcatctatgaggacaatgagatcagcaacaatgccctggccggcatctgggtgaagaaccacggcaaccccatcatcagaagaaaccacatccaccacggcagagatgtgggcgtcttcacctttgaccacggcatgggctactttgagagctgcaacatccacaggaacagaattgctggctttgaggtgaaggcctatgccaaccccaccgtggtgcgctgtgagatccaccacggccagacaggaggcatctacgtgcatgagaagggccggggccagttcatcgagaacaagatctatgccaacaactttgctggggtgtggatcaccagcaacagcgaccccaccatccggggcaacagcatcttcaatggaaaccagggcggcgtgtacatctttggagatggccggggcctgattgagggcaatgacatctatggaaatgccctggccggcatccagatccgcaccaacagctgccccatcgtgcgccacaacaagatccatgatggccagcacggcggcatctacgtgcatgagaagggccagggcgtgattgaagaaaatgaggtgtacagcaacaccctggccggcgtgtgggtgaccaccggcagcacccctgtgctgcggaggaaccgcatccacagcggcaagcaggtgggcgtgtacttctatgacaatggccacggcgtgctggaggacaatgacatctacaaccacatgtacagcggcgtgcagatcagaacaggcagcaaccccaagatcagaagaaacaagatctggggcggccagaatggaggcatcctggtgtacaacagcggcctgggctgcatcgaggacaatgagatctttgacaatgccatggccggcgtgtggatcaagacagacagcaaccccaccctgcggaggaacaagatccatgatggaagagatggcggcatctgcatcttcaatggaggccggggcctgctggaggagaatgacatcttcagaaatgcccaggccggcgtgctgatcagcaccaacagccaccccatcctgaggaagaaccgcatctttgatggctttgctgctggcatcgagatcaccaaccacgccacagccaccctggagggcaaccagatcttcaacaacagatttggaggcctcttcctggccagcggcgtgaatgtgaccatgaaggacaacaagatcatgaacaaccaggatgccatcgagaaggctgtgtcccggggccagtgcctgtacaagatcagcagctacaccagctaccccatgcatgacttctaccgctgccacacctgcaacaccacagacagaaatgccatctgtgtgaactgcatcaagaagtgccaccagggccatgatgtggagttcatcagacatgaccgcttcttctgtgactgtggggccggcaccctgagcaacccctgcaccctggccggggagcccacccatgacacagacaccctgtatgattctgccccacccatcgagagcaacaccctgcagcacaactag

SEQ ID NO: 72528 - DNA, 2532 bp, Artificial Sequence
  derived and/or modified sequence
atggtggccgaggagagcggccccggcgcccagaacagcccctaccagctgagaagaaaaaccctcctgccgaagagaaccgcctgtccgacgaagaactctatggaaggggccagcacatcaactacagagaatttcggacacagagccaagcgcgcacgagtgtcaggcaagtcccaggaccttagtgccgcccctgcagaacagtatttgcaggagaagctacctgacgaggtcgtgctcaagatctttagctaccttctcgagcaggacctatgtcgagccgcatgcgtttgcaagcgtttttcagagttagcgaatgacccaatcctgtggaagcgcctctatatggaagtttttgagtataccagaccaatgatgcaccccgaacctgggaaattttaccagataaatcccgaagagtacgagcaccccaatccatggaaagagtcttttcagcagttatataagggtgcacatgtcaagcctggattcgccgaacacttttactccaatccagcgcggtataaaggcagggaaaacatgctgtactatgatacgatagaagacgctttgggcggcgtccaggaggcccactttgatgggctgattttcgtacactccggaatttacacggacgaatggatctatatcgagtcaccaatcacaatgattggggcagccccaggaaaggtggcagacaaagtaatcattgagaatacacgagattctactttcgtgtttatggaaggcagtgaggatgcatatgtcgggtatatgacaatccgcttcaatcctgatgataaatcagcccagcatcataacgcccaccactgtctggagattactgtgaactgttcccccatcattgatcactgcataatccggtcaacatgcactgttggaagtgctgtgtgcgtctctgggcagggagcatgcccaaccataaagcattgcaatatcagcgattgcgaaaacgttgggttgtatatcacagaccacgcccaggggatctatgaagacaatgagatatctaataacgcattagccggcatatgggtaaaaaaccacggcaatcccattattcgtagaaaccacatccaccacggccgagacgtcggcgtctttacgtttgatcacggtatggggtactttgagtcttgtaatatccaccggaaccggattgctggcttcgaggtgaaggcatatgcaaacccgaccgtggtgcgttgcgagatccaccatggacagaccggaggaatctatgtccacgagaagggcagaggtcagtttattgaaaataagatctacgcaaacaatttcgctggggtgtggattacgtcgaactccgacccaacaattagggggaactcgatattcaatggtaaccagggcggggtttacatttttggggatggaagaggtctgatcgagggtaacgatatttatggaaatgccttggccggcatccagatccggacaaattcctgcccaatagtgaggcacaacaaaattcacgatggccagcacgggggcatttacgtacacgaaaaaggtcagggcgtgatcgaggaaaatgaggtttattcaaacactctggctggtgtgtgggtaacgacagggtccacccccgttctgaggcggaacaggattcacagtgggaaacaagttggtgtttacttttatgacaacggccacggtgtcctcgaagataatgatatttataaccatatgtacagcggcgtccagatcaggacgggttccaaccctaagattcgtcgaaataaaatctggggtggccaaaatggcggaattctggtgtacaattcaggactgggctgtattgaggataacgagatcttcgacaatgcgatggccggggtgtggattaagacagattcaaaccctacacttcggaggaataagattcacgacgggcgggacggcggaatttgcatcttcaatgggggcagaggcctcctggaagaaaacgacatctttcggaacgcccaggccggcgtcttgatcagcaccaactcacatcccattctacgcaaaaatcggatattcgacgggttcgcagccggaatcgagattaccaaccacgcaaccgctacacttgagggcaaccagatattcaacaacaggtttgggggtttgttcttggcgtctggagttaatgttactatgaaagacaataaaatcatgaataaccaggacgccatagagaaggctgtgtctcgagggcagtgtctgtacaagataagttcttacaccagctatccaatgcatgacttttaccgctgccacacctgcaacaccaccgaccggaatgctatttgtgtgaactgcattaaaaagtgccaccaggggcacgatgtcgagttcattaggcacgataggtttttctgcgattgcggcgccggcaccttgtctaatccttgtaccttagctggagagcccacccacgatactgatacactgtatgattcagctcctccaattgaatcaaatacgctgcagcataactag

SEQ ID NO: 72529 - DNA, 2532 bp, Artificial Sequence
  derived and/or modified sequence
atggtggccgaggagagcggccccggcgcccagaacagcccctaccagctcaggcgcaagaccttactgcccaaacggacagcctgtcccaccaaaaacagtatggagggggctagcacaagcactacagagaactttggccacagggccaaaagagcccgggtcagcggtaaaagccaggacctgagtgccgcgcccgcagaacagtacctccaggagaaattacctgacgaggtagtcctaaagatattttcctaccttctggagcaagatctttgccgggcggcttgtgtgtgcaagcgcttttctgagcttgcaaatgatccaattctgtggaaaaggctgtatatggaggtgtttgaatatacacgccctatgatgcatcctgagcctgggaagttttaccagattaacccggaagagtacgaacaccctaacccttggaaggaatccttccagcagctgtacaaaggtgcccacgtgaagccgggcttcgctgagcacttttatagtaatcccgcccggtataagggtcgtgaaaacatgctctattacgataccatcgaggacgccctgggtggcgtgcaagaagctcactttgatgggcttatttttgtacattcagggatttacactgacgaatggatctatatcgagtccccaatcactatgattggggctgccccgggcaaagtagccgataaggtaatcatagagaatactcgcgacagcaccttcgtcttcatggagggatctgaggacgcttatgttggatacatgaccatacgcttcaaccccgatgacaagagcgcacagcatcacaacgcacaccattgcctggagatcaccgtcaattgtagtcctattatcgatcactgcatcatacgatctacatgcactgtaggatcggccgtttgtgtgtctggacagggcgcctgccctacgatcaaacactgcaacatctcagactgtgagaatgtaggcttgtatattaccgatcacgcgcaggggatctatgaggataacgagattagcaacaatgctctggccgggatttgggtgaagaaccacgggaacccaatcatcagacggaatcatattcaccatggccgggatgtgggagtgtttacattcgatcacggcatggggtactttgagagttgcaatatccacagaaatcggattgccggctttgaggtcaaagcgtatgctaatcctacagtggtccggtgtgagattcaccacggtcagaccgggggcatttatgtccacgagaagggaaggggacaatttatcgaaaacaagatttatgctaataacttcgctggcgtatggataacttccaactccgaccctacaattcgagggaactcaatctttaatggcaaccaaggcggcgtatatatctttggcgacggacggggactcatcgaaggcaatgatatctatggcaatgccctcgccgggatacaaattaggaccaattcatgcccaattgtgaggcacaataagattcatgacggacagcacggcggcatttacgtccacgaaaaaggccagggcgtcattgaagagaacgaagtctatagcaacacactcgccggtgtgtgggtgactacaggctcaactcccgtgctgcgccgcaacaggatacacagcgggaaacaggttggcgtgtatttttacgacaatggccacggggtcctggaggacaatgatatctataaccatatgtactctggagtgcagatccgaactggctccaacccgaagattagacgcaacaagatttgggggggccagaacggaggtattctggtgtacaactcaggccttggatgtattgaagataacgagatctttgacaatgccatggcaggcgtctggataaaaacggattcaaacccaacactgcggagaaacaaaattcacgatgggcgtgacggcgggatctgcatcttcaatggcggtaggggcctcttagaagagaatgacatttttaggaacgcccaggccggggttcttattagtaccaactcccacccaatcctgagaaaaaatagaatttttgacggtttcgctgccgggatagaaatcacaaatcacgctaccgcgacactggagggcaaccagattttcaacaaccggtttgggggactttttctcgcctccggtgttaatgttactatgaaggacaacaaaatcatgaacaatcaagatgcaatcgaaaaggccgtctcaaggggacagtgtctctacaagatatcaagctatacgtcatacccaatgcacgacttctacaggtgtcacacctgtaatacaactgaccgaaatgcaatctgcgtaaactgcatcaagaagtgccaccagggccatgacgttgaattcatccggcacgaccggttcttttgtgactgtggggcaggcaccctttccaacccctgcaccttagccggagaacctactcatgacaccgataccttgtacgactccgcgccacctatcgagagtaacacccttcagcataactag

SEQ ID NO: 72530 - DNA, 2784 bp, Artificial Sequence
  derived and/or modified sequence
atgaacagcgtgcgggccgccaaccggcggccccggcgggtgagccggcctaggcctgtccagcagcaacagcagcagcccccccaacagcctcctccccagcccccccagcagcagcccccccagcagcagcctcctccaccaccccagcaacaacagcagcagcagcctcctcctcctcctcccccccccccacccttaccccaagaacggaacaatgtcggagagcgagatgatgatgtgcctgccgacatggtcgcggaggaatccgggccaggagcgcaaaattcaccatatcaattacgcagaaaaacgctgctcccaaaacggacagcttgcccaactaaaaactcaatggagggcgcgagtacctctaccactgagaactttggccatagagcaaagagggcccgcgtgagtggcaaatctcaggacctgtcagcagcaccggctgagcagtatttgcaggaaaagttaccggatgaagtggtattgaagattttctcatacttgctagaacaggatctttgtcgcgcagcttgtgtctgtaagcgattttctgagctggctaacgaccctatcctctggaaacgcctgtacatggaggtttttgagtacacgaggcccatgatgcatcccgagccaggcaaattctaccaaattaatccagaagagtacgagcaccccaatccctggaaggagagtttccagcaactctacaagggcgcacatgtcaagcctggatttgccgagcacttttatagcaaccctgcacggtacaagggtcgcgagaacatgttgtattatgacacaatcgaggacgccctgggcggcgtccaggaagcccactttgacggattaatcttcgttcactcagggatctatactgacgagtggatttacattgagagccccattaccatgataggggcagcaccaggaaaagtggcggacaaagtgatcatcgaaaacacaagggactcaacatttgtcttcatggaaggttccgaagatgcatatgtggggtatatgactatcaggttcaaccccgatgacaaaagtgcgcagcaccacaatgctcatcactgtcttgagatcaccgttaattgtagcccaatcatcgatcactgcatcatccgctcgacatgtacggtgggatctgccgtctgtgtgtccggccagggcgcctgtccaactatcaagcactgtaatatttcagactgcgaaaatgtaggcctatatattaccgaccacgctcagggaatctatgaggataacgaaatctcaaacaatgcgctggcaggaatttgggtgaagaaccatgggaatcccatcatcaggaggaaccacatccaccacgggcgggacgtcggtgtgtttacctttgatcatgggatggggtatttcgaatcctgcaacatccacagaaaccgcatcgctggattcgaggtcaaagcgtatgccaaccctacagttgtgaggtgcgaaatccatcatgggcagaccggcgggatctacgtccacgagaaggggagggggcagttcattgaaaataaaatttacgccaataactttgccggtgtctggatcactagcaacagtgacccaactatcagaggcaattccatttttaacggtaaccaaggcggagtatacatcttcggtgatgggcggggtctcattgaaggtaacgacatttacggtaacgcacttgcggggatccagattcgaacgaattcttgcccgatcgtgcgacacaacaagatccacgatggacaacacgggggcatttatgtgcacgaaaaggggcagggcgtaatcgaagagaacgaggtttattccaacacgcttgccggcgtgtgggtcacaactgggagtactcccgtacttcggaggaataggattcactcgggcaaacaggtgggcgtctacttctatgataacgggcacggcgtgttggaggacaacgacatctataaccatatgtacagtggtgtgcagatcagaacaggatctaatcccaagatccgacgcaacaaaatctggggcggtcagaacggggggatcctcgtttacaattcagggctcggctgtatcgaggacaatgagattttcgacaacgccatggccggggtgtggatcaaaacagatagcaatcctacacttcggcgcaacaagattcacgacggccgagacggaggaatttgtatcttcaatggcggcaggggactcttggaagagaacgatatcttccgcaatgcacaggcaggggtgctgatctcgactaatagtcatcccattttacgaaaaaatagaatcttcgacggttttgctgccggtatagaaatcactaatcacgctactgctacattggaaggtaatcaaatttttaacaaccggttcggcggtctctttctggcctccggtgtcaatgttacgatgaaggacaataagatcatgaacaatcaggacgcaatcgagaaagctgtgtctcggggacaatgcctctacaaaatatctagctataccagctacccaatgcatgatttctatcgttgtcatacttgtaatacaactgatcggaatgctatatgtgtaaactgcattaaaaagtgccatcagggacatgatgtcgagtttattcggcatgatcgttttttctgtgactgcggggctggaaccctgtccaatccgtgtaccttagctggagaaccaacacacgataccgatacactctacgacagcgcacccccaatcgaatccaacaccctgcagcataactag

SEQ ID NO: 72531 - DNA, 2532 bp, Artificial Sequence
  derived and/or modified sequence
atggtcgccgaagaatcaggccctggcgcacagaactcgccatatcagctgagaaggaaaacgttgctgcccaaacgcaccgcttgtccaacaaagaactctatggagggtgcctccaccagtaccacagaaaacttcggccatcgcgctaagcgcgctcgtgtaagtgggaagtcccaggacctgtcggctgcccctgcagaacagtatttgcaagaaaagttgcccgacgaagtggttctcaaaattttcagctatctccttgagcaggacctgtgcagagctgcatgcgtgtgcaaaaggttcagcgagttggctaacgatccaattctatggaaacgactttatatggaagtatttgagtatacaaggccaatgatgcatcccgagcccggtaagttttatcagatcaatcccgaagagtatgaacaccccaacccctggaaggagagcttccagcagctctacaagggcgcacacgttaaacccggatttgccgaacacttctatagtaatcccgcacgctacaaagggagggaaaatatgttgtactatgacaccattgaggacgcacttggcggtgtgcaggaggcacattttgacggactaatctttgtacattctggaatctatactgatgaatggatctatattgaatccccaatcaccatgatcggcgcagcacccggaaaagtggccgataaggtgattattgagaacacacgggactccacattcgtgttcatggaggggtccgaggatgcctacgtcggttatatgacaatccggtttaatcccgatgacaaatctgcgcagcaccataatgcccaccactgcctagagatcactgtgaattgcagccctattatagaccactgtattattcgatcgacctgcacagtcggctccgccgtttgtgtctccggtcagggtgcttgccctactatcaagcactgtaatatctctgactgcgaaaacgtgggcctgtacataacagaccacgctcagggtatctacgaggataacgagatcagcaacaatgccctcgctggtatatgggtcaagaaccatggcaacccgatcattcggagaaatcatatccaccacggcagagatgtgggcgtctttacgtttgaccacgggatgggatatttcgagagttgcaatatacaccggaaccggatagccggattcgaggtcaaagcctatgccaatcccacagtcgtgagatgtgaaattcatcacggccagaccgggggaatctacgtgcatgagaaaggcagaggacagtttatcgaaaataagatctacgctaataattttgctggagtttggattaccagcaacagcgatcctaccatcaggggtaattccatattcaacgggaaccagggcggagtttacatcttcggcgacggacgcggtcttatagaaggcaatgatatctatggtaacgccctggctggcatccaaattcgtacaaactcctgccccatagtgagacacaataaaatccacgacggccagcatggtggcatctatgttcacgagaaagggcagggcgttattgaagagaatgaagtttactctaataccctggctggagtgtgggtgactaccggatctacgcccgtcctacgcaggaaccgtattcattcagggaagcaggtgggtgtctacttctatgacaatgggcatggagtcctcgaggacaacgacatttacaatcatatgtactcaggcgtacagatcaggactggcagtaaccctaagatcagacgcaacaagatttggggagggcagaacggcggtatattggtttacaactcaggccttggatgtattgaggataacgagatcttcgacaatgccatggccggagtgtggatcaagaccgactctaaccctaccctaaggagaaataaaatacacgatggcagggacgggggtatctgcatcttcaacgggggacggggtcttcttgaagagaacgacatcttccggaatgcacaggctggagtactgatctccacaaacagtcacccaatactgaggaagaaccgcatcttcgacggcttcgcagctggaatagaaatcactaaccatgctactgcgacgctagaagggaaccagattttcaataatagattcggcggactgtttctggcaagcggcgtaaatgtcaccatgaaggataataagattatgaacaatcaggatgctatagagaaggcagtgagtaggggtcaatgtctgtacaaaatttcatcctacacgagctatccaatgcacgatttctatagatgtcacacctgcaatacaactgatagaaatgcgatatgcgtgaattgtataaaaaagtgtcatcagggccatgatgtcgagtttatccggcatgacaggtttttttgtgattgcggggcaggcaccctgagtaacccttgcaccctcgctggggagccaacccacgatactgataccctgtacgatagtgccccacctatcgaatcaaacacacttcagcataattag

SEQ ID NO: 72532 - DNA, 2532 bp, Artificial Sequence
  derived and/or modified sequence
atggtggccgaggagagcggaccaggcgcacagaatagtccttaccagctgaggaggaagacactgctgcccaagcgaacagcctgtcccaccaagaatagcatggaaggtgcttccacctcaaccaccgaaaattttggtcatagagccaagagggcacgggtcagcggaaagagtcaggatctgtccgccgctccagcagaacagtacctccaggaaaaactacccgacgaggtggtgttaaagattttcagctatctgcttgaacaggacctttgtcgagctgcttgcgtctgcaaaaggttcagtgagctggccaacgacccaattctgtggaaaaggctgtatatggaggtctttgaatataccaggccaatgatgcatccagaacccggtaagttctatcagatcaatccagaggagtacgagcacccaaacccttggaaagaaagttttcaacagctgtataagggcgcacatgtaaagccaggatttgcggagcatttctattctaatccagcgagatataaaggacgagaaaacatgctctactacgatactatcgaagacgctctcggcggagtgcaagaggcacatttcgacggccttatctttgtgcacagcgggatttacactgatgagtggatttatattgagtcacctattactatgatcggcgctgcccctggcaaggtcgcagataaggtgatcattgagaacaccagagactctacttttgtcttcatggaagggtctgaagatgcctacgtggggtacatgaccattcggttcaacccagatgacaaatccgctcagcatcacaacgcccaccattgcctggaaatcactgtgaactgttctcctatcatcgatcactgtattatccgcagcacttgcacagtgggatcagctgtgtgcgtctccggacaaggagcctgtccaacaattaagcattgcaatattagcgactgcgagaacgtcggcctttacattacagatcacgctcagggcatttacgaggacaatgagatatcgaataatgccctggctgggatttgggtcaaaaaccacggcaacccaattatcagacgtaatcacattcaccatgggagggacgttggagtgttcacctttgaccatgggatgggctactttgaaagttgcaacatccaccgcaatagaatcgccggtttcgaagttaaagcttatgccaacccaaccgttgtgagatgcgaaatacatcacgggcaaacaggaggaatttatgtgcatgaaaaaggtagaggccagttcatagaaaacaaaatttacgcaaataacttcgcaggggtgtggatcacaagcaacagcgacccaacgattcgcggtaactcaattttcaatgggaatcagggcggagtgtatatctttggcgacggtcggggtttaatcgaaggaaatgacatttacgggaacgcattggctggtatccagattaggacaaattcttgtccaattgtgcgccacaataagatacacgatggccaacatggtggtatttatgtccatgagaaagggcagggcgtcatcgaagagaatgaggtgtattcaaatactctggccggagtatgggttacaactggttcaacaccggtgttacgacggaataggatacacagcgggaaacaggtgggcgtttacttttacgacaacggccacggagtcctggaggataatgacatctacaaccatatgtacagcggcgttcagattcgaactggaagcaaccctaagattcgtcgtaataagatctggggcggtcagaacggcggaatcctggtgtacaactccggccttgggtgtatagaggataatgaaatttttgacaatgccatggccggtgtttggattaagactgactccaatcccacgctgcggagaaataaaattcacgatggcagagacggcggtatatgcatctttaatggaggccgagggctgctagaagaaaatgatatctttaggaatgcacaggccggtgtcctgatatcaactaactcacacccaatcctgaggaagaatcggatcttcgacgggtttgctgccggtatcgagatcaccaatcatgccaccgcaactctcgaaggtaatcagatctttaacaataggttcggcggattgttcctcgcatcaggcgtcaatgtcactatgaaggataacaaaatcatgaacaatcaggatgcgattgaaaaggctgtttcaaggggacagtgcctatacaaaatatcctcctatactagttatcctatgcatgacttctaccggtgccacacctgtaacactactgaccggaacgcaatctgcgtgaattgtataaagaagtgccatcagggtcacgatgtcgagtttatacgccatgatcggttcttttgtgattgcggggctggcacacttagcaatccctgcacccttgcaggtgagcctacacatgacactgacaccctctacgattccgcacctcccatcgagagcaacaccctgcagcacaattag

SEQ ID NO: 72533 - DNA, 2784 bp, Artificial Sequence
  derived and/or modified sequence
atgaactctgtcagggcagccaaccgcaggcccaggcgagtctcccggccacgccctgttcagcagcagcagcagcagcctccccagcagccacccccacagccgcctcaacagcagccaccccagcagcagccaccccctccgccacagcagcaacagcaacagcaacccccaccgccaccccctcctcctccccctttgccacaggaaagaaacaatgtcggtgagcgggatgatgatgtcccagcagacatggtggccgaggaatcaggcccaggcgctcaaaattccccttaccaactgcgcaggaaaactctgctgcctaagaggaccgcttgtcccactaaaaattcaatggaaggcgctagcacaagtaccactgagaatttcggccatcgtgcgaagagggcacgggtgtccggtaagtcacaggatttatcagcagctccagcggaacagtacctgcaggagaagctgccagatgaggtcgttcttaaaatcttttcatatttgctggagcaagacttgtgtagagccgcatgtgtctgcaagaggttcagtgagctcgctaatgatccaatactgtggaaaaggctgtatatggaggtgttcgagtacacccggccaatgatgcacccagagccaggcaagttctatcagatcaacccagaagaatatgaacaccctaatccctggaaggaatctttccagcagctctacaagggggctcacgtaaaaccaggcttcgcagaacatttctattccaatcctgccagatacaagggtcgcgaaaatatgttatactatgacactatagaggatgccctgggcggtgtgcaggaggcccatttcgatgggctcatatttgtacactctggcatttacaccgacgaatggatatacattgaatctccaatcaccatgatcggtgccgctcctggtaaggtcgccgataaggtcatcatcgagaacaccagggactcaacatttgtgtttatggaagggagtgaagatgcatacgtggggtatatgaccatcagattcaatcctgacgataagtctgcccagcatcataatgctcaccactgtttggaaattactgtaaactgtagtcctatcatcgaccattgcattatacgcagcacatgtaccgtagggtcagctgtgtgtgtatccggtcaaggcgcatgccctactataaaacactgtaacatcagcgactgcgaaaatgtgggtctgtacattaccgaccatgctcaaggcatttacgaggataacgaaattagtaataacgctttggccggaatctgggtcaagaaccacgggaaccccattatcagaaggaaccacatccatcatgggagagacgtaggagtcttcacattcgaccacgggatggggtacttcgaatcttgcaacatacatcggaatagaatcgctggcttcgaggtgaaggcctatgcgaatccaacagtcgtgcgatgcgaaattcatcacggccagacggggggtatatacgtgcacgagaaggggagaggccagtttatcgagaataaaatttacgccaacaactttgctggagtatggattacgtccaactccgaccctacgataagagggaactccatcttcaatggtaaccaaggcggtgtttacattttcggcgacggaaggggactgattgaaggaaacgacatttacggaaacgccctagcaggcatacagattcgaacgaatagctgccctatcgtgcggcacaacaagattcacgacggccaacacgggggaatctacgtgcacgagaaagggcagggcgtcatcgaggagaacgaggtgtatagtaacactctggccggtgtttgggtcaccacaggcagcaccccagtactaaggagaaaccgcattcactccggtaagcaggtgggagtctacttctatgacaatggccacggggtactcgaggataacgacatatacaatcacatgtatagcggagtgcagattcggactggcagcaatcccaaaattcgcagaaataagatatgggggggacagaacgggggtattttagtatataattctggcctcggctgcattgaagataacgagatcttcgacaacgctatggcaggcgtctggatcaagactgactctaacccaactctgcgcaggaacaaaattcacgatggtcgtgacggtgggatatgtattttcaacggaggacgtggattgctggaggaaaatgatatttttaggaacgcacaggcgggtgttctcatttctacaaacagccatcctatactcagaaaaaacaggatatttgacggattcgcagccggaatcgaaatcaccaaccatgccaccgccaccctggaggggaaccagatttttaataaccggttcggaggcctattcctcgcctccggtgtcaatgtgacaatgaaggataacaagatcatgaacaaccaggacgccatcgagaaggctgtttcacggggtcagtgcctgtacaagatcagttcttacacctcctatccgatgcacgacttctaccggtgtcatacatgtaatacgacagatcgcaacgcaatttgcgtgaattgcatcaagaaatgtcaccaggggcatgatgttgagttcatccggcatgaccgctttttttgtgactgcggagccggtacattgtccaacccatgcaccctggcgggagagccgacccacgacacagacaccctctacgatagcgctccaccaattgagtccaatacactgcagcacaactag

SEQ ID NO: 72534 - DNA, 2532 bp, Artificial Sequence
  derived and/or modified sequence
atggtggccgaggagagcggccccggcgcccagaacagcccctaccagctgagaagaaagaccctgctgcccaagagaaccgcctgccccaccaagaacagcatggagggcgccagcaccagcaccaccgagaacttcggccacagagccaagagagccagagtgagcggcaagagccaggacctgagcgccgcccccgccgagcagtacctgcaggagaagctgcccgacgaggtggtgctgaagatcttcagctacctgctggagcaggacctgtgcagagccgcctgcgtgtgcaagagattcagcgagctggccaacgaccccatcctgtggaagagactgtacatggaggtgttcgagtacaccagacccatgatgcaccccgagcccggcaagttctaccagatcaaccccgaggagtacgagcaccccaacccctggaaggagagcttccagcagctgtacaagggcgcccacgtgaagcccggcttcgccgagcacttctacagcaaccccgccagatacaagggcagagagaacatgctgtactacgacaccatcgaggacgccctgggcggcgtgcaggaggcccacttcgacggcctgatcttcgtgcacagcggcatctacaccgacgagtggatctacatcgagagccccatcaccatgatcggcgccgcccccggcaaggtggccgacaaggtgatcatcgagaacaccagagacagcaccttcgtgttcatggagggcagcgaggacgcctacgtgggctacatgaccatcagattcaaccccgacgacaagagcgcccagcaccacaacgcccaccactgcctggagatcaccgtgaactgcagccccatcatcgaccactgcatcatcagaagcacctgcaccgtgggcagcgccgtgtgcgtgagcggccagggcgcctgccccaccatcaagcactgcaacatcagcgactgcgagaacgtgggcctgtacatcaccgaccacgcccagggcatctacgaggacaacgagatcagcaacaacgccctggccggcatctgggtgaagaaccacggcaaccccatcatcagaagaaaccacatccaccacggcagagacgtgggcgtgttcaccttcgaccacggcatgggctacttcgagagctgcaacatccacagaaacagaatcgccggcttcgaggtgaaggcctacgccaaccccaccgtggtgagatgcgagatccaccacggccagaccggcggcatctacgtgcacgagaagggcagaggccagttcatcgagaacaagatctacgccaacaacttcgccggcgtgtggatcaccagcaacagcgaccccaccatcagaggcaacagcatcttcaacggcaaccagggcggcgtgtacatcttcggcgacggcagaggcctgatcgagggcaacgacatctacggcaacgccctggccggcatccagatcagaaccaacagctgccccatcgtgagacacaacaagatccacgacggccagcacggcggcatctacgtgcacgagaagggccagggcgtgatcgaggagaacgaggtgtacagcaacaccctggccggcgtgtgggtgaccaccggcagcacccccgtgctgagaagaaacagaatccacagcggcaagcaggtgggcgtgtacttctacgacaacggccacggcgtgctggaggacaacgacatctacaaccacatgtacagcggcgtgcagatcagaaccggcagcaaccccaagatcagaagaaacaagatctggggcggccagaacggcggcatcctggtgtacaacagcggcctgggctgcatcgaggacaacgagatcttcgacaacgccatggccggcgtgtggatcaagaccgacagcaaccccaccctgagaagaaacaagatccacgacggcagagacggcggcatctgcatcttcaacggcggcagaggcctgctggaggagaacgacatcttcagaaacgcccaggccggcgtgctgatcagcaccaacagccaccccatcctgagaaagaacagaatcttcgacggcttcgccgccggcatcgagatcaccaaccacgccaccgccaccctggagggcaaccagatcttcaacaacagattcggcggcctgttcctggccagcggcgtgaacgtgaccatgaaggacaacaagatcatgaacaaccaggacgccatcgagaaggccgtgagcagaggccagtgcctgtacaagatcagcagctacaccagctaccccatgcacgacttctacagatgccacacctgcaacaccaccgacagaaacgccatctgcgtgaactgcatcaagaagtgccaccagggccacgacgtggagttcatcagacacgacagattcttctgcgactgcggcgccggcaccctgagcaacccctgcaccctggccggcgagcccacccacgacaccgacaccctgtacgacagcgccccccccatcgagagcaacaccctgcagcacaactag

SEQ ID NO: 72535 - DNA, 2784 bp, Artificial Sequence
  derived and/or modified sequence
atgaacagcgtgagagccgccaacagaagacccagaagagtgagcagacccagacccgtgcagcagcagcagcagcagcccccccagcagccccccccccagcccccccagcagcagcccccccagcagcagccccccccccccccccagcagcagcagcagcagcagccccccccccccccccccccccccccccccctgccccaggagagaaacaacgtgggcgagagagacgacgacgtgcccgccgacatggtggccgaggagagcggccccggcgcccagaacagcccctaccagctgagaagaaagaccctgctgcccaagagaaccgcctgccccaccaagaacagcatggagggcgccagcaccagcaccaccgagaacttcggccacagagccaagagagccagagtgagcggcaagagccaggacctgagcgccgcccccgccgagcagtacctgcaggagaagctgcccgacgaggtggtgctgaagatcttcagctacctgctggagcaggacctgtgcagagccgcctgcgtgtgcaagagattcagcgagctggccaacgaccccatcctgtggaagagactgtacatggaggtgttcgagtacaccagacccatgatgcaccccgagcccggcaagttctaccagatcaaccccgaggagtacgagcaccccaacccctggaaggagagcttccagcagctgtacaagggcgcccacgtgaagcccggcttcgccgagcacttctacagcaaccccgccagatacaagggcagagagaacatgctgtactacgacaccatcgaggacgccctgggcggcgtgcaggaggcccacttcgacggcctgatcttcgtgcacagcggcatctacaccgacgagtggatctacatcgagagccccatcaccatgatcggcgccgcccccggcaaggtggccgacaaggtgatcatcgagaacaccagagacagcaccttcgtgttcatggagggcagcgaggacgcctacgtgggctacatgaccatcagattcaaccccgacgacaagagcgcccagcaccacaacgcccaccactgcctggagatcaccgtgaactgcagccccatcatcgaccactgcatcatcagaagcacctgcaccgtgggcagcgccgtgtgcgtgagcggccagggcgcctgccccaccatcaagcactgcaacatcagcgactgcgagaacgtgggcctgtacatcaccgaccacgcccagggcatctacgaggacaacgagatcagcaacaacgccctggccggcatctgggtgaagaaccacggcaaccccatcatcagaagaaaccacatccaccacggcagagacgtgggcgtgttcaccttcgaccacggcatgggctacttcgagagctgcaacatccacagaaacagaatcgccggcttcgaggtgaaggcctacgccaaccccaccgtggtgagatgcgagatccaccacggccagaccggcggcatctacgtgcacgagaagggcagaggccagttcatcgagaacaagatctacgccaacaacttcgccggcgtgtggatcaccagcaacagcgaccccaccatcagaggcaacagcatcttcaacggcaaccagggcggcgtgtacatcttcggcgacggcagaggcctgatcgagggcaacgacatctacggcaacgccctggccggcatccagatcagaaccaacagctgccccatcgtgagacacaacaagatccacgacggccagcacggcggcatctacgtgcacgagaagggccagggcgtgatcgaggagaacgaggtgtacagcaacaccctggccggcgtgtgggtgaccaccggcagcacccccgtgctgagaagaaacagaatccacagcggcaagcaggtgggcgtgtacttctacgacaacggccacggcgtgctggaggacaacgacatctacaaccacatgtacagcggcgtgcagatcagaaccggcagcaaccccaagatcagaagaaacaagatctggggcggccagaacggcggcatcctggtgtacaacagcggcctgggctgcatcgaggacaacgagatcttcgacaacgccatggccggcgtgtggatcaagaccgacagcaaccccaccctgagaagaaacaagatccacgacggcagagacggcggcatctgcatcttcaacggcggcagaggcctgctggaggagaacgacatcttcagaaacgcccaggccggcgtgctgatcagcaccaacagccaccccatcctgagaaagaacagaatcttcgacggcttcgccgccggcatcgagatcaccaaccacgccaccgccaccctggagggcaaccagatcttcaacaacagattcggcggcctgttcctggccagcggcgtgaacgtgaccatgaaggacaacaagatcatgaacaaccaggacgccatcgagaaggccgtgagcagaggccagtgcctgtacaagatcagcagctacaccagctaccccatgcacgacttctacagatgccacacctgcaacaccaccgacagaaacgccatctgcgtgaactgcatcaagaagtgccaccagggccacgacgtggagttcatcagacacgacagattcttctgcgactgcggcgccggcaccctgagcaacccctgcaccctggccggcgagcccacccacgacaccgacaccctgtacgacagcgccccccccatcgagagcaacaccctgcagcacaactag

SEQ ID NO: 72536 - protein, 185 aa, Artificial Sequence
  derived and/or modified sequence
MSLNLPEASLLSRASWPEQAKEPRREGHTDKQQTEDVLAAGLRCLPHLPAICARRMSPAFRAMDVEPRAKGVLLEPFVHQVGGHSCVLRFNETTLCKPLVPREHQFYETLPAEMRKFTPQYKGKSQLLEGLPHWRGDVRDRGHGRPWQPSLEPSLPPTLCFPSLSSFSSSWPSAQHLTPSVFNPW

SEQ ID NO: 72537 - DNA, 558 bp, Artificial Sequence
  derived and/or modified sequence
atgagtctgaacctgccggaggcatcactgctctcccgcgcctcatggccagaacaagctaaggagcctaggcgcgagggtcacactgataaacagcagacagaggacgtgctagcggcaggcttaagatgcttgcctcacctaccagccatctgcgctcggagaatgtctccggcatttcgagccatggacgtggagccacgcgctaagggcgtccttctggagccctttgttcaccaggtggggggccattcatgcgtattgagatttaacgaaacaactctctgcaaacccctggtgcccagagagcaccagttttacgagaccctgccagccgagatgaggaaattcaccccccagtacaaaggtaaatcacagctgctggaaggtttgcctcactggaggggggacgttagagaccggggccacggcagaccctggcaaccaagcctcgaaccatcgcttcctcccactttgtgttttccaagcctcagcagcttctcgtccagctggccctccgctcagcacctgaccccttctgtgttcaatccatggtag

SEQ ID NO: 72538 - DNA, 1185 bp, Artificial Sequence
  derived and/or modified sequence
cattttggtgcgagagaaacaataggacggaaacgccgaggaacccggctgaggcggcagcagagcatcctggccagaacaagccaaggagccaagacgagagggacacacggacaaacaacagacagaagacgtactggccgctggactccgctgcctcccccatctccccgccatctgcgcccggaggatgagcccagccttcagggccatggatgtggagccccgcgccaaaggcgtccttctggagccctttgtccaccaggtcggggggcactcatgcgtgctccgcttcaatgagacaaccctgtgcaagcccctggtcccaagggaacatcagttctacgagaccctccctgctgagatgcgcaaattcactccccagtacaaaggacaaagccaaaggccccttgttagctggccatccctgccccattttttcccctggtcctttcccctgtggccacagggaagtgtggcctgaataccccaccccggctcctctgcacccagagctgggggccacctcagaagtgtcatctctctctgagcacgcattcccctgcagcagtcgaggactgagcagattgagtgatgctggggcagagaggcctgggaggaaaggtgttcagccagtcgtttgtaaggcgctcgtcggcacctgctgaaacgcccccacctgacagccccatcctcaaagactgtcttaattactcatggcaggttctagagacttaaggggaaaagctgctttcaaggccaccacatgtctgtgctccccaaccagctctatctgccttgtgttcattttgttattttgtgacgtgagactgcaaagaccaataaaaacatattttataagaacaaaaggcctgggtgcctacccgtgtgggggcactgtgggaagcctttgctagggtgtcttgtgctgtgtggtttgttttgtttgcccctttattttgctttgcttacccagtcttcccttactcttggatgcttcttaaccctcaggcaaacctgtgttccccctgtattcaggctctgctttaaagcaagccatgaggctgttggagtttctgtttagggcattaaaaattcccgcaaactataaagagcaatgttttcagtcttttaggattagaagaattacataaaaattaataaacattttcaatgatggaaaaa

SEQ ID NO: 72539 - DNA, 792 bp, Artificial Sequence
  derived and/or modified sequence
ggtgcgagagaaacaataggacggaaacgccgaggaacccggctgaggcggcagggtctcgctctgtcacccaggctggagtacagtcatgtgatcacggctcactgcagccttgacctcccaggctccagtgacccttccatctcagcctcccaagtagctgggaccacagcagagcatcctggccagaacaagccaaggagccaagacgagagggacacacggacaaacaacagacagaagacgtactggccgctggactccgctgcctcccccatctccccgccatctgcgcccggaggatgagcccagccttcagggccatggatgtggagccccgcgccaaaggcgtccttctggagccctttgtccaccaggtcggggggcactcatgcgtgctccgcttcaatgagacaaccctgtgcaagcccctggtcccaagggaacatcagttctacgagaccctccctgctgagatgcgcaaattcactccccagtacaaaggacaaagccaaaggccccttgttagctggccatccctgccccattttttcccctggtcctttcccctgtggccacagggaagtgtggcctgaataccccaccccggctcctctgcacccagagctgggggccacctcagaagtgtcatctctctctgagcacgcattcccctgcagcagtcgaggactgagcagattgagtgatgctggggcagagaggcctgggaggaaaggtgttcagccagtcgtttgtaaggcgctcgtcggcacctgctgaaacgcccccacc

SEQ ID NO: 72540 - DNA, 2174 bp, Artificial Sequence
  derived and/or modified sequence
cattttggtgcgagagaaacaataggacggaaacgccgaggaacccggctgaggcggcagcttcctaggtgacagacaggtacactgtatgctagccctgtatctgtctgagcagtggaatgtgccaggaaagaaggagcaaccactgactgatgaacctttgccagtctcccttccaagagggatgccagagccttctgtaagctcctgagatgtcactggtatctaggcaacagggatgagcctgaacctccctgaggccagcttactgagcagagcatcctggccagaacaagccaaggagccaagacgagagggacacacggacaaacaacagacagaagacgtactggccgctggactccgctgcctcccccatctccccgccatctgcgcccggaggatgagcccagccttcagggccatggatgtggagccccgcgccaaaggcgtccttctggagccctttgtccaccaggtcggggggcactcatgcgtgctccgcttcaatgagacaaccctgtgcaagcccctggtcccaagggaacatcagttctacgagaccctccctgctgagatgcgcaaattcactccccagtacaaaggtaagtcccagctgctggaggggttgccacactggcgaggagatgtgagagatcgtggccatggaaggccctggcagccatccctggagccctcactccctcccactctgtgctttccctccctctcctccttctcctcctcctggccctcagcccagcatctcacaccctcagttttcaatccctggtaagattgctcaattctgttttgttgtgtggatttgagtttgattttggtagaagtgtagttgtgttttatgttcaggtgtctcttgatcacagtaacccatagtcccccactggggggacggtgggggaagactttgggaggattttacccagaatacttgccgcctgctttttgtcctccaggaaaccagaagcccgggtaattaggtaggccggggagcagcgttgagtcagatggaatgcaggagtgggaggcctgtgctgattagcccaagccctttgctgttacagaatgtccccaaaattgctatatgaaagcaacccttcgattcacatatgataattttttatttctttttataatgtattttataggggacatcagcagccaccagcatggtggggtctttgttggggagtgggggagtcttttgtaaatcaagtaagaatccattaaagaaattaattttaaatgtgcattacctggttacataaaggactctagaacaacttaggttcttttgggactgttgaaacattgtctttaaggacagaatgtactgggtgcctttctctgtactctgaatatgcatgtgtattgcggtggggatgggggagttgggggccctcacttggtccttctctgttgtttttttccaggacaaagccaaaggccccttgttagctggccatccctgccccattttttcccctggtcctttcccctgtggccacagggaagtgtggcctgaataccccaccccggctcctctgcacccagagctgggggccacctcagaagtgtcatctctctctgagcacgcattcccctgcagcagtcgaggactgagcagattgagtgatgctggggcagagaggcctgggaggaaaggtgttcagccagtcgtttgtaaggcgctcgtcggcacctgctgaaacgcccccacctgacagccccatcctcaaagactgtcttaattactcatggcaggttctagagacttaaggggaaaagctgctttcaaggccaccacatgtctgtgctccccaaccagctctatctgccttgtgttcattttgttattttgtgacgtgagactgcaaagaccaataaaaacatattttataagaacaaaaggcctgggtgcctacccgtgtgggggcactgtgggaagcctttgctagggtgtcttgtgctgtgtggtttgttttgtttgcccctttattttgctttgcttacccagtcttcccttactcttggatgcttcttaaccctcaggcaaacctgtgttccccctgtattcaggctctgctttaaagcaagccatgaggctgttggagtttctgtttagggcattaaaaattcccgcaaactataaa

SEQ ID NO: 72541 - DNA, 558 bp, Artificial Sequence
  derived and/or modified sequence
atgagcctgaacctgcctgaggccagcctgctgagccgggcctcctggccagagcaggccaaggagccccggcgggagggccacacagacaagcagcagacagaagatgtgctggccgccggcctgcgctgcctgccccacctgcctgccatctgtgcccggaggatgagccctgccttccgggccatggatgtggagccccgggccaagggcgtgctgctggagccctttgtgcaccaggtgggcggccacagctgtgtgctgcgcttcaatgagaccaccctgtgcaagcccctggtgccccgggagcaccagttctatgagaccctgcctgctgagatgaggaagttcaccccccagtacaagggcaagagccagctgctggagggcctgccccactggagaggagatgtgcgggaccggggccacggccggccctggcagcccagcctggagcccagcctgccccccaccctgtgcttccccagcctgagcagcttcagcagctcctggcccagcgcccagcacctgacccccagcgtcttcaacccctggtag

SEQ ID NO: 72542 - DNA, 558 bp, Artificial Sequence
  derived and/or modified sequence
atgagcctgaacctgcccgaggccagcctgctgagccgggccagctggccagaacaggcaaaggagcctcggcgagagggacacaccgataaacagcagaccgaagacgtgctcgccgcaggcctgaggtgtctgccacacctcccagcaatctgtgctcgtaggatgtcacctgccttcagagctatggatgtggagccacgggcaaaaggtgtactgctagaaccattcgtgcatcaagttggaggacatagctgtgttttacgctttaacgagaccacactttgcaaaccactggtccctcgggaacatcagttttacgagacattgcccgcagagatgcgtaagtttaccccccaatacaaagggaaatcccagctgttggaggggctaccacactggaggggagacgttcgcgatagggggcacggcaggccatggcaaccgtccctcgaacctagtttgccccctacactgtgtttcccctccttatcgtcattttcttcatcctggcctagtgcgcagcacttgacgcccagcgtgttcaacccttggtag

SEQ ID NO: 72543 - DNA, 558 bp, Artificial Sequence
  derived and/or modified sequence
atgagcctgaatctgccggaggcctctctcctctccagggccagctggccagagcaggccaaagagccgcgacgagagggccacaccgataagcagcagacagaggacgtattggccgcagggctgcgatgtcttccacacctgccagctatttgtgcccgacggatgagtcccgcttttcgggctatggatgtagaacccagagccaagggcgtgctgctggagcctttcgtgcatcaggtaggcggtcactcctgcgtgctccggttcaatgagactacattgtgcaagccattggtgcccagggagcatcaattttacgaaaccctgccggctgagatgcgaaagttcacaccgcagtacaaggggaagtcacaacttttggaaggccttccccactggcgcggagacgtgagggataggggccatgggaggccgtggcagccaagcctagagccaagcctgccacccaccctgtgctttccgtcactctctagtttctcaagcagttggccttctgcgcaacatcttaccccaagcgtgtttaacccatggtag

SEQ ID NO: 72544 - DNA, 558 bp, Artificial Sequence
  derived and/or modified sequence
atgagcctgaacctgcccgaggccagcctgctgagcagagccagctggcccgagcaggccaaggagcccagaagagagggccacaccgacaagcagcagaccgaggacgtgctggccgccggcctgagatgcctgccccacctgcccgccatctgcgccagaagaatgagccccgccttcagagccatggacgtggagcccagagccaagggcgtgctgctggagcccttcgtgcaccaggtgggcggccacagctgcgtgctgagattcaacgagaccaccctgtgcaagcccctggtgcccagagagcaccagttctacgagaccctgcccgccgagatgagaaagttcaccccccagtacaagggcaagagccagctgctggagggcctgccccactggagaggcgacgtgagagacagaggccacggcagaccctggcagcccagcctggagcccagcctgccccccaccctgtgcttccccagcctgagcagcttcagcagcagctggcccagcgcccagcacctgacccccagcgtgttcaacccctggtag

SEQ ID NO: 72545 - protein, 188 aa, Artificial Sequence
  derived and/or modified sequence
MNLCQSPFQEGCQSLLASWPEQAKEPRREGHTDKQQTEDVLAAGLRCLPHLPAICARRMSPAFRAMDVEPRAKGVLLEPFVHQVGGHSCVLRFNETTLCKPLVPREHQFYETLPAEMRKFTPQYKGKSQLLEGLPHWRGDVRDRGHGRPWQPSLEPSLPPTLCFPSLSSFSSSWPSAQHLTPSVFNPW

SEQ ID NO: 72546 - DNA, 567 bp, Artificial Sequence
  derived and/or modified sequence
atgaacctgtgtcagtctcccttccaagaaggatgccagtcgttgctggcatcgtggcctgagcaggccaaagagcccagaagagaaggccatacggacaagcagcaaacagaagacgtgttagccgctggcctcaggtgtctgcctcatctgccggcaatctgcgccagacggatgagccctgccttcagagctatggacgtggagcctagggccaaaggcgtactgttagagccttttgttcatcaggtaggcggacatagctgcgtgctgagattcaatgagactaccctgtgtaagcccctggtgccgcgtgaacaccagttctacgagacgcttcccgctgagatgcggaagtttactccccagtacaaggggaaaagccaattgctcgaggggcttccacattggcgcggagacgtgcgcgacagaggccatggccggccgtggcagcccagcctggaaccaagcctgccccctactctgtgcttcccaagcctgagttcctttagctccagttggccatccgctcagcatctgacccccagtgtgttcaatccctggtag

SEQ ID NO: 72547 - DNA, 1565 bp, Artificial Sequence
  derived and/or modified sequence
ttttggtgcgagagaaacaataggacggaaacgccgaggaacccggctgaggcggcagcttcctaggtgacagacaggtacactgtatgctagccctgtatctgtctgagcagtggaatgtgccaggaaagaaggagcaaccactgactgatgaacctttgccagtctcccttccaagagggatgccagagccttctagcatcctggccagaacaagccaaggagccaagacgagagggacacacggacaaacaacagacagaagacgtactggccgctggactccgctgcctcccccatctccccgccatctgcgcccggaggatgagcccagccttcagggccatggatgtggagccccgcgccaaaggcgtccttctggagccctttgtccaccaggtcggggggcactcatgcgtgctccgcttcaatgagacaaccctgtgcaagcccctggtcccaagggaacatcagttctacgagaccctccctgctgagatgcgcaaattcactccccagtacaaaggtaagtcccagctgctggaggggttgccacactggcgaggagatgtgagagatcgtggccatggaaggccctggcagccatccctggagccctcactccctcccactctgtgctttccctccctctcctccttctcctcctcctggccctcagcccagcatctcacaccctcagttttcaatccctggtaagattgctcaattctgttttgttgtgtggatttgagtttgattttggtagaagtgtagttgtgttttatgttcaggtgtctcttgatcacagtaacccatagtcccccactggggggacggtgggggaagactttgggaggattttacccagaatacttgccgcctgctttttgtcctccaggaaaccagaagcccgggtaattaggtaggccggggagcagcgttgagtcagatggaatgcaggagtgggaggcctgtgctgattagcccaagccctttgctgttacagaatgtccccaaaattgctatatgaaagcaacccttcgattcacatatgataattttttatttctttttataatgtattttataggggacatcagcagccaccagcatggtggggtctttgttggggagtgggggagtcttttgtaaatcaagtaagaatccattaaagaaattaattttaaatgtgcattacctggttacataaaggactctagaacaacttaggttcttttgggactgttgaaacattgtctttaaggacagaatgtactgggtgcctttctctgtactctgaatatgcatgtgtattgcggtggggatgggggagttgggggccctcacttggtccttctctgttgtttttttccaggacaaagccaaaggccccttgttagctggccatccctgccccattttttcccctggtcctttcccctgtggccacagggaagtgtggcctgaataccccaccccggctcctctgcacccagagctgggggccacctcagaagtgtcatctctctctgagcacgcattcccctgcagcagtcgaggactga

SEQ ID NO: 72548 - DNA, 567 bp, Artificial Sequence
  derived and/or modified sequence
atgaacctgtgccagagccccttccaggagggctgccagagcctgctggcctcctggccagagcaggccaaggagccccggcgggagggccacacagacaagcagcagacagaagatgtgctggccgccggcctgcgctgcctgccccacctgcctgccatctgtgcccggaggatgagccctgccttccgggccatggatgtggagccccgggccaagggcgtgctgctggagccctttgtgcaccaggtgggcggccacagctgtgtgctgcgcttcaatgagaccaccctgtgcaagcccctggtgccccgggagcaccagttctatgagaccctgcctgctgagatgaggaagttcaccccccagtacaagggcaagagccagctgctggagggcctgccccactggagaggagatgtgcgggaccggggccacggccggccctggcagcccagcctggagcccagcctgccccccaccctgtgcttccccagcctgagcagcttcagcagctcctggcccagcgcccagcacctgaccccatctgtgttcaacccctggtag

SEQ ID NO: 72549 - DNA, 567 bp, Artificial Sequence
  derived and/or modified sequence
atgaacctgtgccagagccccttccaggagggctgccagagcctgttagctagctggcccgagcaggccaaggagccacggagggagggtcacaccgacaaacagcagacagaggacgtgctggcggccggtctgaggtgcttgccccacctgcccgctatctgcgcccggcgcatgagtcctgcttttcgggctatggacgtcgagccgcgcgcaaaaggtgtcctgctagaaccatttgtgcaccaggttggtggccacagttgcgtgttgcgttttaatgagacaacactgtgcaaacctctagtgccgagggaacaccaattttatgaaacactgccagccgaaatgaggaaattcaccccacagtacaagggaaagtctcagctgctggagggcctgcctcactggcgcggcgatgtgagagaccgaggacatggacggccatggcaaccatcactggaaccctctttacccccaactctgtgctttccatccctctctagcttctcaagctcctggccatcagcccaacacctgacaccctccgtttttaatccatggtag

SEQ ID NO: 72550 - DNA, 567 bp, Artificial Sequence
  derived and/or modified sequence
atgaacctctgccaatctccttttcaggaaggttgccagtctttgttggcctcgtggcctgagcaggccaaggaacctagacgagagggacatacagacaaacagcagacggaggatgttcttgccgctggcctgaggtgcctaccccatctgccagccatctgcgcaagacgaatgagcccagctttccgcgcaatggacgttgaaccccgtgctaagggggttctcctggagccatttgtacatcaagtcggaggccactcgtgtgtcctcagattcaacgaaacaacattgtgtaaacctctggtgccaagggagcatcagttctacgagacactgcccgcagagatgcgaaagttcaccccccagtacaaagggaagtcgcaactgcttgaagggcttcctcattggaggggtgacgtacgagatcgcggacacggcagaccctggcagccatccctggagccctcattgccacccaccctttgcttcccctccttaagcagcttctcctccagctggccctccgcccagcaccttactccatcagtgttcaacccgtggtag

SEQ ID NO: 72551 - DNA, 567 bp, Artificial Sequence
  derived and/or modified sequence
atgaacctgtgccagagccccttccaggagggctgccagagcctgctggccagctggcccgagcaggccaaggagcccagaagagagggccacaccgacaagcagcagaccgaggacgtgctggccgccggcctgagatgcctgccccacctgcccgccatctgcgccagaagaatgagccccgccttcagagccatggacgtggagcccagagccaagggcgtgctgctggagcccttcgtgcaccaggtgggcggccacagctgcgtgctgagattcaacgagaccaccctgtgcaagcccctggtgcccagagagcaccagttctacgagaccctgcccgccgagatgagaaagttcaccccccagtacaagggcaagagccagctgctggagggcctgccccactggagaggcgacgtgagagacagaggccacggcagaccctggcagcccagcctggagcccagcctgccccccaccctgtgcttccccagcctgagcagcttcagcagcagctggcccagcgcccagcacctgacccccagcgtgttcaacccctggtag

SEQ ID NO: 72552 - protein, 740 aa, Artificial Sequence
  derived and/or modified sequence
METDESPSPLPCGPAGEAVMESRARPFQALPREQSPPPPLQTSSGAEVMDVGSGGDGQSELPAEDPFNFYGASLLSKGSFSKGRLLIDPNCSGHSPRTARHAPAVRKFSPDLKLLKDVKISVSFTESCRSKDRKVLYTGAERDVRAECGLLLSPVSGDVHACPFGGSVGDGVGIGGESADKKDEENELDQEKRVEYAVLDELEDFTDNLELDEEGAGGFTAKAIVQRDRVDEEALNFPYEDDFDNDVDALLEEGLCAPKKRRTEEKYGGDSDHPSDGETSVQPMMTKIKTVLKSRGRPPTEPLPDGWIMTFHNSGVPVYLHRESRVVTWSRPYFLGTGSIRKHDPPLSSIPCLHYKKMKDNEEREQSSDLTPSGDVSPVKPLSRSAELEFPLDEPDSMGADPGPPDEKDPLGAEAAPGALGQVKAKVEVCKDESVDLEEFRSYLEKRFDFEQVTVKKFRTWAERRQFNREMKRKQAESERPILPANQKLITLSVQDAPTKKEFVINPNGKSEVCILHEYMQRVLKVRPVYNFFECARATLEILIPDFVKQTSEEKPKDSEELEYFNHISIEDSRVYELTSKAGLLSPYQILHECLKRNHGMGDTSIKFEVVPGKNQKSEYVMACGKHTVRGWCKNKRVGKQLASQKILQLLHPHVKNWGSLLRMYGRESSKMVKQETSDKSVIELQQYAKKNKPNLHILSKLQEEMKRLAEEREETRKKPKMSIVASAQPGGEPLCTVDV

SEQ ID NO: 72553 - DNA, 2223 bp, Artificial Sequence
  derived and/or modified sequence
atggaaaccgacgagagtccgtcaccattaccatgcggaccagccggagaagccgtgatggagagcagagcacgaccctttcaggccttaccacgtgagcagagtcctcccccaccccttcagacaagttccggggcggaggtgatggatgtcggaagtgggggggatggccagtccgaactgcctgccgaggatccctttaatttttacggagcctctctcctctccaagggctccttcagcaaagggaggctgctgattgacccgaactgtagcggccactcaccccggactgccaggcacgcacctgccgtcaggaaattcagtcccgatctcaagctgctcaaggatgtaaagatcagcgtatccttcacagaaagttgtcgctccaaagatcgcaaggtactgtatacaggagctgaaagagacgtgagagccgagtgtggactgttgttgagtcccgtgagtggagatgtgcatgcatgtcctttcggcggctccgttggggacggtgtgggaattggaggcgaatccgccgataagaaggatgaggaaaatgagcttgatcaggaaaaacgggtagagtacgccgtcctcgatgagcttgaggattttacggacaacctggaactcgatgaagagggagccggagggtttactgccaaggccattgtgcagcgggaccgtgtggatgaagaggctctgaacttcccctacgaagatgacttcgacaacgatgtggacgcactcctggaggaaggtttatgtgcccctaagaagaggaggacagaggaaaaatacggcggcgattccgatcacccatctgatggcgagacaagcgtccagccaatgatgaccaaaatcaagaccgttcttaagtctaggggccgtcccccaacagaacccttgccagatgggtggatcatgacattccacaattctggtgtcccagtgtatttacaccgggaatctcgcgtggttacctggagtaggccgtacttcctgggtactggctctattcggaagcacgatcctcctctctcctccataccatgtcttcactacaaaaaaatgaaggataacgaggagcgggagcaaagttctgatcttactccaagtggcgacgtgtcgcccgtgaagcctctctctcgaagtgccgagctggaatttcccctcgatgagcctgacagcatgggcgcagatccaggcccccccgacgaaaaggacccactgggggcagaagccgcaccaggagcccttggccaggttaaggccaaagtggaggtgtgtaaagacgagagtgtggacctggaagaattcaggtcctaccttgaaaaacgctttgactttgaacaggtcactgtaaaaaagtttagaacttgggccgagagaaggcagtttaatagagaaatgaaacgaaagcaggcagaaagcgagaggccaatcctccccgcaaatcagaagctgattacgctgtctgtccaggacgcacccactaaaaaagagttcgtcattaacccaaacggaaaatccgaagtctgcatccttcacgagtacatgcagcgcgtactgaaagtcagacccgtgtataattttttcgagtgtgccagagcgaccctggaaatcctgattcctgatttcgttaaacaaacctcagaagagaagcccaaggattctgaagaactagagtacttcaaccatatttctatcgaggactctagagtatatgagctgaccagcaaggctgggctcttgtcaccataccagattctgcacgagtgcctgaagcgcaaccacggcatgggggacacttctattaaatttgaagttgtgccaggaaaaaaccaaaagagcgagtacgtcatggcctgcggtaagcacacagtccgaggatggtgtaaaaataagagagttggcaagcagctcgctagccaaaagattttacaactattacatccccacgtgaagaattggggctctctgctgcgcatgtacggcagggagtcatcaaagatggtcaagcaggagacgagcgacaaatctgttatcgaactgcagcagtatgctaagaagaacaagcctaacctgcatatcctcagtaaactgcaggaggaaatgaagcggctggctgaagaacgagaggagacccggaagaagcccaaaatgagtattgttgccagtgcccagccagggggagagccattatgcaccgtggatgtgtag

SEQ ID NO: 72554 - DNA, 2223 bp, Artificial Sequence
  derived and/or modified sequence
atggagaccgatgagtcaccaagtccccttccttgtggccctgcaggcgaagccgtgatggagtctagggcgcgcccattccaggcactgcccagagaacagtcaccaccgccccctctccagacatcctcaggggcagaggtcatggatgtggggtcgggcggcgacggccaatccgaacttcccgctgaggatcctttcaatttctacggtgctagtctactatcgaagggaagcttttcgaaggggcggctgctcattgatcctaattgcagcggccattcacccagaaccgcccggcatgccccggccgttcggaagtttagccctgacctaaaactgctgaaggacgtgaagatctccgtcagtttcactgagagttgtcgatctaaggatcgaaaggtgttatatactggcgcggaaagagatgtaagggccgagtgcgggctcctcctatcaccggtgtcgggggatgtacacgcttgtcctttcggaggctccgttggagatggtgtgggaatcggcggcgagagtgccgataaaaaagacgaggagaacgagcttgaccaggaaaaaagagtggagtacgcagtgctcgacgaattggaggacttcactgacaatctcgagttggacgaagagggtgctggaggctttaccgcaaaggccattgttcaaagagaccgtgtggacgaagaagctctcaattttccttatgaggacgacttcgacaacgacgttgacgctctccttgaggaggggctttgcgctcccaaaaaacggaggactgaggagaaatacgggggggattcagatcacccttctgatggcgaaacctccgtccaaccaatgatgacaaaaattaagaccgtgctcaaaagtaggggtaggcccccaacggagcccttgcccgatggatggattatgacctttcacaattctggcgtgcccgtgtacctgcaccgcgaaagccgcgtcgttacatggtcccggccttattttttgggcaccggaagcatcaggaaacacgacccaccactttctagcattccatgccttcactataaaaaaatgaaagataatgaagaaagggaacagtctagcgatctcacaccttctggggatgtcagccctgtgaaacccttaagcaggtccgccgagttagagtttccattggacgagcctgattccatgggagcggaccccggtcctccggacgagaaagaccctctcggtgcagaggcggctcccggggccctcgggcaggtgaaagcaaaggtcgaagtttgtaaggacgaatccgtagatctggaagagtttaggtcttacctggagaagaggtttgacttcgaacaagtaacggttaagaaatttcgcacctgggctgagcgaaggcagttcaatcgagagatgaagagaaagcaagccgagtctgaacgtcctattctgccagcaaatcaaaagctcataaccctgtctgtgcaagacgctccaaccaagaaggagttcgtcatcaaccctaacggcaaatccgaggtctgcattctgcacgagtatatgcagagagtcctcaaggttcggcccgtgtacaacttcttcgagtgtgctcgcgcaacgctggagatactgataccagatttcgtcaagcagacctccgaggaaaaacccaaggattccgaagagctcgaatactttaaccacatttcaatcgaggacagcagggtttatgaactaacgtccaaggctggccttctgagtccctatcagatccttcatgagtgcttgaagcgtaaccacggtatgggcgatacatcaatcaaattcgaagttgtgcccggtaagaaccagaaaagtgaatatgtgatggcctgtggaaaacacacagtgcgaggatggtgcaagaacaagcgagtgggaaagcagctggccagccaaaaaatattgcagctgctccaccctcatgtgaaaaattggggctcacttttgcgtatgtacgggcgagagtcttcaaagatggttaaacaggaaaccagcgataagagcgtgattgaattacagcagtatgccaagaaaaataaaccaaacctgcatattctctccaaactacaagaggaaatgaaaagacttgccgaggagcgagaggagacgagaaagaagccgaaaatgtccatcgttgcctcggcacagccaggaggggagccgctctgcacagtggatgtgtag

SEQ ID NO: 72555 - DNA, 378 bp, Artificial Sequence
  derived and/or modified sequence
atggaaacagacgagtctcctagtcccctgccatgcggtcctgctggcgaagccgtaatggagagccgcgcacgcccttttcaggcactccccagagagcagtctcccccccctcccctgcagactagctccggtgctgaagtaatggatgtggggtcagggggcgacggacagtctgaactgcctgctgaggatccctttaacttctatggcgcctcattgctgtctaaaggctctttctcgaaaggacggttacttattgaccctaactgtagtggccatagtccccggactgcccgccacgctcccgccgtcagaaagtttagccctgatctgaagctgctgaaagacgtaaagatttctgtgtccttcacctag

SEQ ID NO: 72556 - DNA, 2223 bp, Artificial Sequence
  derived and/or modified sequence
atggagacagatgagagccccagccccctgccctgtggccctgctggggaggccgtgatggagagccgggcccggcccttccaggccctgccccgggagcagagccccccaccacccctgcagaccagcagcggggctgaggtgatggatgtgggcagcggaggagatggccagagcgagctgcctgctgaggaccccttcaacttctacggggccagcctgctgagcaagggcagcttcagcaagggccgcctgctgattgaccccaactgcagcggccacagccccaggacagcccggcatgccccagctgtgaggaagttctccccagacctgaagctgctgaaggatgtgaagatctctgtgtccttcacagagagctgccgcagcaaggacaggaaggtgctgtacaccggggctgagagagatgtgcgggcagaatgtggcctgctgctgagccctgtgtctggagatgtgcacgcctgcccctttggaggctctgtgggagatggagtgggcatcggcggggagagcgctgacaagaaggatgaagaaaatgagctggaccaggagaagagggtggagtatgctgtgctggatgagctggaggacttcacagacaacctggagctggatgaggagggcgctgggggcttcaccgccaaggccatcgtgcagagggacagagtggatgaggaggccctgaacttcccctatgaagatgactttgacaatgatgtggatgccctgctggaggagggcctgtgtgcccccaagaagagaagaacagaggagaagtatggaggagacagcgaccaccccagtgatggagagacctctgtgcagcccatgatgaccaagatcaagacagtgctgaagagccggggccggcccccaacagagcccctgcctgatggctggatcatgaccttccacaacagcggcgtgcctgtgtacctgcaccgggagagccgggtggtgacctggagccggccctacttcctgggcaccggcagcatcaggaagcatgacccccccctgagcagcatcccctgcctgcactacaagaagatgaaggacaatgaggagcgggagcagagcagtgacctgaccccatctggagatgtgtcccctgtgaagcccctgagccgctctgctgagctggagttccccctggatgagccagacagcatgggcgctgaccccggccccccagatgagaaggaccccctgggcgctgaggccgcccctggggccctgggccaggtgaaggccaaggtggaggtgtgcaaggatgagagcgtggacctggaggagttccgcagctacctggagaagagatttgattttgagcaggtgacagtgaagaagttccgcacctgggccgagcggcggcagttcaaccgggagatgaagaggaagcaggccgagagcgagcggcccatcctgcctgccaaccagaagctgatcaccctgtctgtgcaggatgcccccaccaagaaggagtttgtgatcaaccccaacgggaagtctgaggtgtgcatcctgcacgagtacatgcagagggtgctgaaggtgcggcctgtgtacaacttctttgaatgtgcccgggccaccctggagatcctgatcccagactttgtgaagcagaccagcgaggagaagcccaaggacagcgaggagctggagtacttcaaccacatcagcattgaggacagccgggtgtatgagctgaccagcaaggccggcctgctgagcccctaccagatcctgcatgaatgtctgaagagaaatcatggcatgggagacaccagcatcaagtttgaggtggtgcctgggaagaaccagaagtcagaatatgtgatggcctgtgggaagcacacagtgcggggctggtgcaagaacaagagggtgggcaagcagctggccagccagaagatcctgcagctgctgcacccccacgtgaagaactggggcagcctgctgaggatgtatggccgggagagcagcaagatggtgaagcaggagaccagtgacaagtctgtgattgagctgcagcagtatgccaagaagaacaagcccaacctgcacatcctgagcaagctgcaggaggagatgaagaggctggccgaggagcgggaggagaccaggaagaagcccaagatgagcatcgtggccagcgcccagcccggcggggagcccctgtgcaccgtggatgtgtag

SEQ ID NO: 72557 - DNA, 378 bp, Artificial Sequence
  derived and/or modified sequence
atggagacagatgagagccccagccccctgccctgtggccctgctggggaggccgtgatggagagccgggcccggcccttccaggccctgccccgggagcagagccccccaccacccctgcagaccagcagcggggctgaggtgatggatgtgggcagcggaggagatggccagagcgagctgcctgctgaggaccccttcaacttctacggggccagcctgctgagcaagggcagcttcagcaagggccgcctgctgattgaccccaactgcagcggccacagccccaggacagcccggcatgccccagctgtgaggaagttctccccagacctgaagctgctgaaggatgtgaagatctctgtgtccttcacctag

SEQ ID NO: 72558 - DNA, 2223 bp, Artificial Sequence
  derived and/or modified sequence
atggagaccgacgagagccccagccccctgccctgcggccccgccggggaagctgtgatggagagccgagctcgtccattccaggctctcccgagagagcagtcccctcccccaccgcttcagacctcaagcggtgctgaggtgatggatgtaggctctggcggagacgggcagtctgagctgcccgctgaagatcccttcaatttttacggcgcctctttgctgtctaaagggtcctttagcaaggggagacttctaatagacccgaattgctccgggcatagcccgaggacagctcggcacgctcccgcggtgcgaaagttcagcccagaccttaaactgcttaaagacgtgaaaataagcgtgtcattcacggaatcatgccgatctaaggacagaaaagttctgtatactggcgctgaacgagacgtgagggcggagtgcggactcctgcttagccctgtttctggcgatgtgcacgcatgtccctttggcgggagtgtgggagacggcgttgggatcggtggagaatctgccgataaaaaagacgaagagaacgaactggatcaggagaaaagagtggagtacgcagtgctggatgagctggaggactttacagacaatctagagctcgatgaggaaggtgctggaggattcaccgcaaaggccatagtgcagcgcgatcgcgtcgatgaggaagccctgaacttcccatacgaagacgacttcgacaatgacgtggacgccctcctggaggagggactgtgtgcgcctaaaaaacggagaactgaggagaagtatgggggggacagcgatcatccaagcgacggggaaacatctgtccagcccatgatgacaaagatcaaaacagtgttgaagtccaggggcagaccccctacagaacccttacccgatgggtggatcatgacctttcataattccggcgtccctgtctacctccaccgcgaatcccgagttgttacatggtcacggccttacttcctgggcacaggatctataagaaagcacgacccacccttgagcagcattccctgtctccactacaagaaaatgaaagacaatgaagagcgagagcagagcagcgatcttacaccctcaggcgacgtgtcccctgtgaaacccttatctcggtcggccgaactggagttcccactggatgagcccgattccatgggagccgatccgggtcccccagatgagaaggatcctctgggagctgaagcggccccgggcgcactcggccaggtgaaagccaaagtggaggtctgtaaagacgaatctgttgacctcgaggagttccggagctatctggagaagcggtttgacttcgaacaagtcacagtgaagaagtttaggacttgggcggaacgtcggcagtttaacagagagatgaagcggaagcaggcggagagcgagcgtcctatcctgcctgctaatcaaaagttaatcaccctgagcgttcaggatgccccaacaaagaaggaattcgtgattaaccccaatggaaaatccgaagtgtgtatcttacatgaatacatgcaaagggtgctgaaagtaaggcccgtgtataatttcttcgaatgtgccagggccactctggaaattctgatacctgactttgtcaaacaaacgagtgaagaaaaaccaaaagatagcgaggagctcgagtacttcaaccatatcagtattgaggattcacgtgtgtacgaactgacctctaaggccggcctactgtcaccatatcagattttacatgaatgcctgaagaggaaccacggcatgggcgacacgagcattaaatttgaagtggtgcccggaaagaaccagaaaagtgagtatgttatggcttgcggcaaacacacagtaagaggctggtgcaagaacaaaagagtggggaagcagttggcctctcagaagattctgcagctgttacacccacacgtcaagaattggggcagtttactgagaatgtatggccgagaatcctcaaagatggtaaagcaggaaacctcagacaagagcgtgatagagctgcagcagtacgccaagaaaaacaaaccgaacctgcatattctgtctaagctacaggaagagatgaagagactcgctgaagaaagagaggagacaaggaagaagcctaaaatgagcatcgtcgcaagcgcgcagcctggaggtgaacctctctgcaccgtcgacgtgtag

SEQ ID NO: 72559 - DNA, 2223 bp, Artificial Sequence
  derived and/or modified sequence
atggagaccgacgagagccccagccccctgccctgcggccccgccggagaggctgtaatggagagcagagcccggccatttcaagctctgcctcgggaacaaagtccacccccccctctgcagacctcatctggagctgaggtgatggacgtgggatccgggggcgatggccagtctgaattgcctgcagaggatcctttcaatttttacggcgcgtcgctcctgagcaagggttcattttcgaagggaagactcttaattgaccctaactgctccggccactccccgcgtacagctcgacacgccccagccgtaagaaagttctctcccgacctgaagctgttgaaggatgtgaagattagcgtgtccttcactgaatcctgtaggtccaaggaccggaaggtcttgtacacgggggccgagcgtgatgtgcgggctgagtgcggtctgcttctgagtcctgtcagtggcgatgtacatgcatgcccttttggcgggtcagtcggggacggggtggggattgggggagaatcagccgataagaaggatgaagagaacgaactggatcaagaaaagagggttgagtatgcggtcttagacgaactcgaggacttcaccgacaatctggagcttgacgaggaaggcgccggcggattcacggccaaggcaattgttcagcgtgaccgggttgacgaggaggcgctcaacttcccctacgaggatgacttcgataacgacgtggacgctctgttggaggagggcctatgcgcccctaaaaaaaggcgcaccgaggagaagtatggcggtgattcggatcatcccagcgacggtgagaccagcgtgcaaccaatgatgacaaaaatcaagacagttttaaaaagtaggggccgcccaccaacagaacccctgccggacggctggattatgacattccacaactcaggagtgcccgtctacctgcatagggaaagcagagttgtgacctggtcccggccctactttcttggcaccggctcaattcggaagcacgatcctccactcagctccattccgtgcttgcattacaagaagatgaaagacaatgaggaaagggagcagagcagtgacctgacgccaagcggggatgtgtcccccgtcaaaccacttagtagatctgctgaacttgagttcccgctcgacgaaccagatagtatgggtgctgacccggggcctccagatgagaaagacccgctcggggccgaggccgcccccggggctctgggccaagttaaggcaaaagttgaagtttgtaaagatgaaagtgtggatctggaggagttccggagttatctggagaaaaggtttgactttgagcaggtgacagtgaaaaagttccgcacctgggccgagcggagacagtttaaccgtgaaatgaagcgaaaacaggcggaatcagaaagaccaatcctcccagccaatcagaaactaattaccttgagtgtacaggatgctccaacaaagaaagaattcgtgatcaacccgaatggcaaatctgaagtgtgcattttgcatgaatacatgcagcgggtcttgaaagtacggcctgtgtacaacttcttcgagtgtgcaagggcaacactggaaattctaataccagacttcgtgaagcagacaagcgaagagaagcccaaggactcagaagagttggagtattttaaccatataagcatcgaagactctagggtgtacgagttaacatccaaagcaggcctactgagtccataccagattcttcatgaatgcctgaaacgaaatcacggcatgggcgacacaagcataaagtttgaggtcgttcccggcaagaaccagaagagcgaatacgtgatggcttgcggaaagcatactgtgcgcggttggtgcaaaaacaagcgcgtgggtaagcaattggcatcgcagaaaatcctgcagttgttgcaccctcatgtcaaaaactggggctcactgctacgcatgtacgggagagaatcttccaagatggtcaaacaggagacgagcgataagagcgtaatcgagctgcagcaatacgctaaaaagaataaaccaaacttacacatcctctctaaactgcaagaggaaatgaagagactcgccgaggaacgtgaagagacccggaaaaagcccaagatgagcatcgtcgccagcgcccagccagggggcgagcccctgtgtaccgttgacgtttag

SEQ ID NO: 72560 - DNA, 378 bp, Artificial Sequence
  derived and/or modified sequence
atggagaccgacgagagccccagccccctgccctgcggccccgccggcgaggccgtcatggaatcacgcgcgcgaccatttcaggcgttgcctagagaacagtcccccccacctcctctccaaacatcatccggagctgaggtgatggatgtggggtcgggcggtgacggacaatctgaattgcctgctgaggatccgttcaacttctacggagcctctctgctgtctaaaggcagcttctctaagggacgcctcctgattgaccctaattgttctgggcattccccaaggaccgcccgtcacgcccccgccgtgcggaagttttcaccggatctgaaacttcttaaggacgttaagataagcgtgtcctttacctag

SEQ ID NO: 72561 - DNA, 2223 bp, Artificial Sequence
  derived and/or modified sequence
atggaaacggacgaaagcccctcgcctctcccgtgcggcccagccggagaagctgtgatggaaagccgcgctcgccctttccaggccctgccccgtgagcagtccccccctcctcctctgcaaacttcttcaggtgcagaggtgatggacgtcggttcaggtggagacggccaaagtgagctgccggcagaggacccattcaacttctacggagcaagtctgctctccaaaggttctttttccaaaggtcggctgctgattgacccgaattgtagcggccatagcccgaggacagctcgccatgcccctgccgttagaaagttttcccctgaccttaaactcctcaaagacgtgaagatttctgtgtctttcactgagtcttgccggagcaaggataggaaggtattatataccggagcggagagagatgtccgcgcagagtgcggtctcttgctgagccctgtgtccggcgacgtgcatgcctgccctttcgggggaagcgtcggtgatggcgtagggatcgggggagaaagcgcggacaaaaaagatgaagagaacgagctggatcaagaaaaacgtgtggagtatgctgtcttagatgagctcgaggatttcactgataatctggagctggatgaagaaggcgctgggggatttacagcaaaagcgattgtgcagcgtgaccgggtcgacgaggaggctctcaactttccatatgaagatgacttcgacaacgatgtcgatgcactcttagaagagggtttatgtgcacccaagaaacgtaggactgaggagaagtacggcggagatagtgaccatccttcagacggagagacctccgttcagccgatgatgacgaagataaagaccgtgctcaaaagtagaggaagaccaccgacagagcccctacccgacggatggatcatgaccttccacaatagcggtgtgcctgtttacctacatcgcgaatcaagagtggtgacatggtcaaggccttacttcctcggaactggcagtatcaggaagcatgatcccccactctccagcattccctgcctccactacaaaaagatgaaggataatgaggaaagggaacaatcatctgatttgacaccctctggcgatgtgtcacctgtgaagccccttagtcgcagcgccgaacttgagtttcctctggacgaacctgattccatgggggcagacccagggcctcctgatgagaaggatccgcttggagctgaagctgcccctggtgctctgggccaggtcaaagccaaggtggaggtctgtaaggacgagtcagtggatctcgaagaatttcgcagctatcttgagaagcgctttgacttcgaacaggtgacggtgaaaaagttcaggacctgggccgagcgaagacagtttaaccgtgagatgaaacggaaacaggcagagtctgagaggccaatcctccctgcgaatcagaagctcattaccttgagtgtgcaggacgctcctacaaaaaaagagtttgtgatcaatcccaatggcaaatcagaagtctgtatccttcacgaatacatgcaaagagtcctgaaagtgagacccgtgtacaacttttttgagtgtgcacgggctaccctggaaatccttatccccgacttcgtcaagcaaacttccgaagaaaagccaaaagatagcgaagagctggagtattttaaccacatctcaatagaggattctagagtgtacgagctgacgtctaaggcagggttgttgtctccatatcagattctccatgaatgcctcaaaaggaatcacggtatgggagatacgtcaataaaatttgaggtcgttcccggaaagaatcagaaaagcgaatacgttatggcatgtggtaagcacacggtgcggggatggtgcaagaacaaacgcgtaggaaaacaactggcatcccagaagatcctccagctcttgcatccgcatgttaagaactggggtagtttgttgcgtatgtacggaagggagagcagcaaaatggtcaaacaggaaacgtccgacaagagtgtcatcgagctgcagcagtatgccaagaaaaacaaacctaacctgcacatcctgagtaagctgcaggaggagatgaagcgcctggctgaggaaagggaggaaacacgaaagaagcctaaaatgtcaattgttgcgtctgcccagccgggaggcgagccattgtgcactgttgacgtctag

SEQ ID NO: 72562 - DNA, 2223 bp, Artificial Sequence
  derived and/or modified sequence
atggaaactgatgaatccccttctcctcttccgtgcggacctgccggtgaagcagtcatggagtcccgcgctcgcccttttcaggccctccctcgcgaacagtcccccccacctccgctgcagacctcctctggcgcagaggtcatggacgttggcagcggtggagacggtcagtctgagttgcctgccgaagatccctttaatttctacggcgcttctctcctgtcaaaaggttccttcagcaagggaaggttactcattgatcctaactgttccgggcattcgcccagaacagccaggcacgctccagcggtgaggaaattctcccctgacctgaagctcctgaaggatgttaagatctctgtgtcattcacagaatcctgtcgctccaaagatcgcaaggtgctctacactggcgcagagcgggatgtccgggcagagtgcggactgctgctgtctccggtgtccggggacgtccacgcctgtcccttcggaggctcagtgggcgacggcgtcgggatcggcggagaatcagcggataagaaagatgaggaaaacgaactggatcaagagaaaagggtggaatatgccgtcctggacgagctcgaagatttcacggataacttggaattggacgaagagggtgcaggcggatttacagctaaagccatagtacagcgcgatcgcgtcgacgaggaggccctgaactttccttatgaagacgatttcgataacgacgtcgacgccttactggaggaggggttgtgcgcaccgaagaagcgacgcacagaggaaaagtatggaggggattccgatcatcccagcgatggcgagacgagcgtgcaacctatgatgaccaagatcaagactgtgctgaagagtcgagggaggcccccaacagagcccctgcccgacgggtggatcatgacattccacaattcaggtgttccggtttaccttcaccgcgaatcgcgtgtcgtcacctggtctagaccatatttcctcggaacaggaagcataaggaaacacgacccccctctgagctcaatcccatgcctccattacaagaagatgaaagacaacgaggaacgggaacaaagctctgatctcaccccctcgggcgacgtgagccccgtcaagcctctgtcccggtcagccgaactggagttccctctggatgagccagacagcatgggagcagaccccggtccaccagatgaaaaagatccactgggggctgaggccgcacctggtgccttaggccaagtgaaggcgaaggtggaggtttgcaaggatgagtcggtcgacttagaagaatttcggtcttacctcgagaagagatttgatttcgagcaggttaccgtaaagaaatttcgcacctgggctgagcggaggcagttcaaccgagagatgaagcggaagcaggcggagtctgaacggccaattctgccggcaaaccagaagcttattactttgtccgttcaggacgcacctaccaagaaagaatttgttatcaatccaaacggtaagtctgaggtctgcatactccatgagtatatgcagagggtgcttaaagtgcggccagtctacaacttctttgagtgcgcacgcgctaccctggagatactgattccagattttgtgaagcaaacctcagaggagaagcctaaggacagtgaagagttggagtattttaatcatatcagtatcgaggattccagagtgtacgagttaacatctaaggcagggttgctctcaccctaccagatcctgcacgagtgccttaagcggaaccatggtatgggagacacctctatcaagttcgaggtggttccaggcaagaatcaaaaatctgaatacgtaatggcctgtggcaagcacacagtccggggatggtgtaaaaataaaagggttggaaagcaactcgcctctcagaagatactgcagttgctgcacccacatgtcaaaaattgggggagtttgctccggatgtacggcagagagtctagtaagatggtaaagcaagagacctcggacaagagcgtgatagaactccaacagtacgccaagaagaataaacccaatttgcatattctctccaagctgcaagaagagatgaagagattagctgaagaaagggaagagacacggaagaaacccaagatgtccatcgttgcctctgcccaacccggaggtgaacccctttgtaccgtagatgtttag

SEQ ID NO: 72563 - DNA, 378 bp, Artificial Sequence
  derived and/or modified sequence
atggagacagatgagagtcccagccccctgccgtgcgggccagctggagaggccgtaatggaatcccgcgcaaggcccttccaggccttacctcgggaacagtcgccaccgccacctcttcagacttcctccggcgctgaagtcatggatgtgggaagcggaggagacggccagagtgagttgcccgcagaagacccatttaatttttacggcgcatcactgctgtcaaaaggctcgttttcgaaagggcgtctcctgattgaccccaactgctcaggccactctccacgcaccgctcgtcacgcccctgctgtgcgcaagttctcccctgacctgaaattactgaaagatgtgaagatctctgtgagcttcacctag

SEQ ID NO: 72564 - DNA, 2223 bp, Artificial Sequence
  derived and/or modified sequence
atggagaccgacgagagccccagccccctgccctgcggccccgccggcgaggccgtgatggagagcagagccagacccttccaggccctgcccagagagcagagcccccccccccccctgcagaccagcagcggcgccgaggtgatggacgtgggcagcggcggcgacggccagagcgagctgcccgccgaggaccccttcaacttctacggcgccagcctgctgagcaagggcagcttcagcaagggcagactgctgatcgaccccaactgcagcggccacagccccagaaccgccagacacgcccccgccgtgagaaagttcagccccgacctgaagctgctgaaggacgtgaagatcagcgtgagcttcaccgagagctgcagaagcaaggacagaaaggtgctgtacaccggcgccgagagagacgtgagagccgagtgcggcctgctgctgagccccgtgagcggcgacgtgcacgcctgccccttcggcggcagcgtgggcgacggcgtgggcatcggcggcgagagcgccgacaagaaggacgaggagaacgagctggaccaggagaagagagtggagtacgccgtgctggacgagctggaggacttcaccgacaacctggagctggacgaggagggcgccggcggcttcaccgccaaggccatcgtgcagagagacagagtggacgaggaggccctgaacttcccctacgaggacgacttcgacaacgacgtggacgccctgctggaggagggcctgtgcgcccccaagaagagaagaaccgaggagaagtacggcggcgacagcgaccaccccagcgacggcgagaccagcgtgcagcccatgatgaccaagatcaagaccgtgctgaagagcagaggcagaccccccaccgagcccctgcccgacggctggatcatgaccttccacaacagcggcgtgcccgtgtacctgcacagagagagcagagtggtgacctggagcagaccctacttcctgggcaccggcagcatcagaaagcacgacccccccctgagcagcatcccctgcctgcactacaagaagatgaaggacaacgaggagagagagcagagcagcgacctgacccccagcggcgacgtgagccccgtgaagcccctgagcagaagcgccgagctggagttccccctggacgagcccgacagcatgggcgccgaccccggcccccccgacgagaaggaccccctgggcgccgaggccgcccccggcgccctgggccaggtgaaggccaaggtggaggtgtgcaaggacgagagcgtggacctggaggagttcagaagctacctggagaagagattcgacttcgagcaggtgaccgtgaagaagttcagaacctgggccgagagaagacagttcaacagagagatgaagagaaagcaggccgagagcgagagacccatcctgcccgccaaccagaagctgatcaccctgagcgtgcaggacgcccccaccaagaaggagttcgtgatcaaccccaacggcaagagcgaggtgtgcatcctgcacgagtacatgcagagagtgctgaaggtgagacccgtgtacaacttcttcgagtgcgccagagccaccctggagatcctgatccccgacttcgtgaagcagaccagcgaggagaagcccaaggacagcgaggagctggagtacttcaaccacatcagcatcgaggacagcagagtgtacgagctgaccagcaaggccggcctgctgagcccctaccagatcctgcacgagtgcctgaagagaaaccacggcatgggcgacaccagcatcaagttcgaggtggtgcccggcaagaaccagaagagcgagtacgtgatggcctgcggcaagcacaccgtgagaggctggtgcaagaacaagagagtgggcaagcagctggccagccagaagatcctgcagctgctgcacccccacgtgaagaactggggcagcctgctgagaatgtacggcagagagagcagcaagatggtgaagcaggagaccagcgacaagagcgtgatcgagctgcagcagtacgccaagaagaacaagcccaacctgcacatcctgagcaagctgcaggaggagatgaagagactggccgaggagagagaggagaccagaaagaagcccaagatgagcatcgtggccagcgcccagcccggcggcgagcccctgtgcaccgtggacgtgtag

SEQ ID NO: 72565 - DNA, 378 bp, Artificial Sequence
  derived and/or modified sequence
atggagaccgacgagagccccagccccctgccctgcggccccgccggcgaggccgtgatggagagcagagccagacccttccaggccctgcccagagagcagagcccccccccccccctgcagaccagcagcggcgccgaggtgatggacgtgggcagcggcggcgacggccagagcgagctgcccgccgaggaccccttcaacttctacggcgccagcctgctgagcaagggcagcttcagcaagggcagactgctgatcgaccccaactgcagcggccacagccccagaaccgccagacacgcccccgccgtgagaaagttcagccccgacctgaagctgctgaaggacgtgaagatcagcgtgagcttcacctag

SEQ ID NO: 72566 - DNA, 4419 bp, Artificial Sequence
  derived and/or modified sequence
aggcccgccctccgctcgcccggcgcggcaggcgggtgccggcgaccggagagcctggacaggctttccagatggctgcggcggtcggtcggtgaggctttcccggctgtggtttggctgcgggcggcttgggcagcccgcgggcgcctcaggtagaagaagaaaggtgccactccggcatgaagacagactcgcttagtcgccagtcacttaagctgagtgcattgtgatttccaataattgaggcagtggttctaaaagctgtctacattaatgaaaagagcaatgtggccagcttgactaagccgccagcgcacagcgcggcaggacgcgcccgggtctcagcggacttgtgcatgttagctgtgtagatttatgtgagggcttgtaaaactctggtcttgtaaactagtcttaagcgcttttaatatggagacagatgagagcccctctccgctcccgtgtgggcccgcaggagaagcggtgatggagagccgagctcgccccttccaagcgctgccccgtgagcagtctccaccacctcccctgcaaacgtccagtggtgcagaggtaatggacgttggctctggtggtgatggacagtccgaactccctgctgaggaccccttcaacttctacggagcttctcttctctccaaaggatccttctctaagggccgcctcctcatagacccgaactgtagtggccacagcccgcgcaccgcccggcacgcacctgcggtccggaagttctcccctgaccttaagttgcttaaggatgtaaagattagcgtgagctttaccgagagctgcaggagtaaggacaggaaggtgctgtacacaggagcagagcgcgacgtgcgggcggagtgcggtctgctccttagccctgtcagtggggacgtgcatgcttgtccctttggcgggagtgttggtgacggggtaggcatagggggtgagagtgctgataagaaggatgaggagaatgagctggatcaggaaaagagagtggagtatgcagtgctcgatgagttagaagattttactgacaatttggagctagatgaagaaggagcaggcgggttcacggctaaagcaatcgttcagagagacagagtggatgaagaggccttgaatttcccctacgaggatgactttgacaacgatgtggatgctctgctggaagaaggcctttgtgcccccaaaaagaggcgaacagaggaaaaatatggcggagacagcgaccatccgtccgatggagagacaagtgtgcagccgatgatgaccaagattaaaacagtgctcaaaagtcgtggccgcccacctacagagccgctgcccgacgggtggatcatgacattccataactctggagtcccggtgtacctacacagagagtctcgggtggtcacctggtccaggccatacttcttgggaacgggaagcatacggaaacacgaccctcctctgagtagcatcccttgtctgcattataagaaaatgaaggacaacgaggaacgggagcaaagcagtgacctcacccctagtggggatgtgtcccccgtcaagcccctgagccgatctgcagagctggagtttcccctggatgagcctgactctatgggtgctgacccggggcccccggacgagaaagacccactaggggctgaggcagcccctggggccctggggcaggtgaaggccaaagtcgaggtgtgcaaagatgaatccgttgatctcgaggaatttcgaagctacctggagaagcgttttgactttgagcaagttactgtgaaaaaattcaggacttgggctgagcggcggcaattcaatcgggaaatgaagcggaagcaggcggagtccgagaggcccatcttgccagccaatcagaagctcattactttatcagtgcaagatgcacccacaaagaaagagtttgttattaaccccaacgggaaatccgaggtctgcatcctgcacgagtacatgcagcgtgtcctcaaggtccgccctgtctataatttctttgaatgtgcccgagctacactggaaatcctcatccctgactttgttaaacagacctctgaagagaagcccaaagacagtgaagaactcgagtattttaaccacatcagcatcgaggactcgcgggtctacgagctgaccagcaaggctgggctgttgtctccatatcagatcctccacgagtgccttaaaagaaaccatgggatgggtgacacgtctatcaagtttgaagtggttcctgggaaaaaccagaagagtgaatacgtcatggcgtgtggcaagcacacagtgcgcgggtggtgtaagaacaagagagttggaaagcagttagcctcacagaagatccttcagctgctgcacccacatgtcaagaactgggggtctttactgcgcatgtatggccgtgagagcagcaagatggtcaagcaggagacatcggacaagagtgtgattgagctgcagcagtatgccaagaagaacaagcccaacctgcacatcctcagcaagctccaagaggagatgaagaggctagctgaggaaagggaggagactcgaaagaagcccaagatgtccattgtggcgtccgcccagcctggcggtgagcccctgtgcaccgtggacgtgtgagggaggtggcacgggccagggcgcgggggccgccagccgcacttctgaggagaccagcagtcatgcatcgtgcaccacagtgtcaggcctccaacccacgctccttccctgtggccaacctgtgggcccggccttagggtggaggctttagtgtacagggacagccatggccacacagcacacatgtggagcagcggctctccctggaaagctccaggcctgaatggatggactcagcgactgcaccagtggcagctggtgactgtggacagtggtggaccctgcttctgtgcacctgctgcaggctctttttatgaaggctttcatgaattttagtatgtaatacgcactgacgacacatgatgcttggatgacagatgagaggggatggctgagtcctgtggctggcccgtgatgccaggtggcccatgtgcccagggcgcctgcagggctgctacagggacctggtcaggaggtgcacatggtgccctgccctcacccaccctctgtgtttccccttctttgaaaaggtagaagagaaaggaatattttaaacctttttggcttaaacagaattttagcatcagaactagctttctgggattggaggcaaaccatcaaggtggtccctctccagtctggacacgatgccagcaaggatgacgtcctgccacctcctggagttaccctggcctcctagggtccctttttctgatgaagtcttaattccctaaaagcgcctctttggacactgaggccctctctgcctttcctggcctccggcaacagttttttacaaagattttttgcagtcgagtccatatgtccacccattgatttttaaagcttttgtgatattttagcattttgaaagactttcacagtgagagtagaaggtagatttggaatcatgcattttagcaagtggacttgttgaaacaggaagcaagggccttcagtgtagcccattcttgatccagagctgttgcctgtgacagcggtttctctggatgtcaaaggcagctgcctggtgcccagcttgcttctcgactggtggcccctatgggtgggtgtgcgatggaaatgtgttcctgccggagtctgaggcaccagggtgtgctcaaaggctggccctggtggtggactggcacctgtgcagagtgccgtgtgcttgtggtgcgccatctgaagcaagagtccagcgttctgccgtgtctgtcccccaccatgccccctacaggcggtactgatggcgcttttttttttttttctgtcaggaaaacaatgttggcctgtgggccgcccacaacatatccttccctcactacctgtgtgaccaaggttggcttctgttgacctttaaaaaagaaaccctcaactcaaattgctataattagacacttgcttctgtcttgcctcctgtctgcagctgtgaatagtcatttgactgtgactgttgcccttagccagccagatgcgcctgtgaaccaaagcttcgtgcacatgtgttcccctaaaggttggggagcctcgctgtgtcttgctgttcccaggcaccaccacagcaggtgctgccatactcttgtggtctctgtgcgccccccccccccccccacccgtctgccaagcatgggtatgaatcgtgcacacagccatgcttcaaggccggggcaggggagcctgtgctgatgccatccagggcactgggctgtgcctggaaggcgagccttgattgtctgaacacataaagcaaactgtccagaaggg

SEQ ID NO: 72567 - DNA, 4129 bp, Artificial Sequence
  derived and/or modified sequence
gtggccagcttgactaagccgccagcgcacagcgcggcaggacgcgcccgggtctcagcggacttgtgcatgttagctgtgtagatttatgtgagggcttgtaaaactctggtcttgtaaactagtcttaagcgcttttaatatggagacagatgagagcccctctccgctcccgtgtgggcccgcaggagaagcggtgatggagagccgagctcgccccttccaagcgctgccccgtgagcagtctccaccacctcccctgcaaacgtccagtggtgcagaggtaatggacgttggctctggtggtgatggacagtccgaactccctgctgaggaccccttcaacttctacggagcttctcttctctccaaaggatccttctctaagggccgcctcctcatagacccgaactgtagtggccacagcccgcgcaccgcccggcacgcacctgcggtccggaagttctcccctgaccttaagttgcttaaggatgtaaagattagcgtgagctttaccgagagctgcaggagtaaggacaggaaggtgctgtacacaggagcagagcgcgacgtgcgggcggagtgcggtctgctccttagccctgtcagtggggacgtgcatgcttgtccctttggcgggagtgttggtgacggggtaggcatagggggtgagagtgctgataagaaggatgaggagaatgagctggatcaggaaaagagagtggagtatgcagtgctcgatgagttagaagattttactgacaatttggagctagatgaagaaggagcaggcgggttcacggctaaagcaatcgttcagagagacagagtggatgaagaggccttgaatttcccctacgaggatgactttgacaacgatgtggatgctctgctggaagaaggcctttgtgcccccaaaaagaggcgaacagaggaaaaatatggcggagacagcgaccatccgtccgatggagagacaagtgtgcagccgatgatgaccaagattaaaacagtgctcaaaagtcgtggccgcccacctacagagccgctgcccgacgggtggatcatgacattccataactctggagtcccggtgtacctacacagagagtctcgggtggtcacctggtccaggccatacttcttgggaacgggaagcatacggaaacacgaccctcctctgagtagcatcccttgtctgcattataagaaaatgaaggacaacgaggaacgggagcaaagcagtgacctcacccctagtggggatgtgtcccccgtcaagcccctgagccgatctgcagagctggagtttcccctggatgagcctgactctatgggtgctgacccggggcccccggacgagaaagacccactaggggctgaggcagcccctggggccctggggcaggtgaaggccaaagtcgaggtgtgcaaagatgaatccgttgatctcgaggaatttcgaagctacctggagaagcgttttgactttgagcaagttactgtgaaaaaattcaggacttgggctgagcggcggcaattcaatcgggaaatgaagcggaagcaggcggagtccgagaggcccatcttgccagccaatcagaagctcattactttatcagtgcaagatgcacccacaaagaaagagtttgttattaaccccaacgggaaatccgaggtctgcatcctgcacgagtacatgcagcgtgtcctcaaggtccgccctgtctataatttctttgaatgtgcccgagctacactggaaatcctcatccctgactttgttaaacagacctctgaagagaagcccaaagacagtgaagaactcgagtattttaaccacatcagcatcgaggactcgcgggtctacgagctgaccagcaaggctgggctgttgtctccatatcagatcctccacgagtgccttaaaagaaaccatgggatgggtgacacgtctatcaagtttgaagtggttcctgggaaaaaccagaagagtgaatacgtcatggcgtgtggcaagcacacagtgcgcgggtggtgtaagaacaagagagttggaaagcagttagcctcacagaagatccttcagctgctgcacccacatgtcaagaactgggggtctttactgcgcatgtatggccgtgagagcagcaagatggtcaagcaggagacatcggacaagagtgtgattgagctgcagcagtatgccaagaagaacaagcccaacctgcacatcctcagcaagctccaagaggagatgaagaggctagctgaggaaagggaggagactcgaaagaagcccaagatgtccattgtggcgtccgcccagcctggcggtgagcccctgtgcaccgtggacgtgtgagggaggtggcacgggccagggcgcgggggccgccagccgcacttctgaggagaccagcagtcatgcatcgtgcaccacagtgtcaggcctccaacccacgctccttccctgtggccaacctgtgggcccggccttagggtggaggctttagtgtacagggacagccatggccacacagcacacatgtggagcagcggctctccctggaaagctccaggcctgaatggatggactcagcgactgcaccagtggcagctggtgactgtggacagtggtggaccctgcttctgtgcacctgctgcaggctctttttatgaaggctttcatgaattttagtatgtaatacgcactgacgacacatgatgcttggatgacagatgagaggggatggctgagtcctgtggctggcccgtgatgccaggtggcccatgtgcccagggcgcctgcagggctgctacagggacctggtcaggaggtgcacatggtgccctgccctcacccaccctctgtgtttccccttctttgaaaaggtagaagagaaaggaatattttaaacctttttggcttaaacagaattttagcatcagaactagctttctgggattggaggcaaaccatcaaggtggtccctctccagtctggacacgatgccagcaaggatgacgtcctgccacctcctggagttaccctggcctcctagggtccctttttctgatgaagtcttaattccctaaaagcgcctctttggacactgaggccctctctgcctttcctggcctccggcaacagttttttacaaagattttttgcagtcgagtccatatgtccacccattgatttttaaagcttttgtgatattttagcattttgaaagactttcacagtgagagtagaaggtagatttggaatcatgcattttagcaagtggacttgttgaaacaggaagcaagggccttcagtgtagcccattcttgatccagagctgttgcctgtgacagcggtttctctggatgtcaaaggcagctgcctggtgcccagcttgcttctcgactggtggcccctatgggtgggtgtgcgatggaaatgtgttcctgccggagtctgaggcaccagggtgtgctcaaaggctggccctggtggtggactggcacctgtgcagagtgccgtgtgcttgtggtgcgccatctgaagcaagagtccagcgttctgccgtgtctgtcccccaccatgccccctacaggcggtactgatggcgcttttttttttttttctgtcaggaaaacaatgttggcctgtgggccgcccacaacatatccttccctcactacctgtgtgaccaaggttggcttctgttgacctttaaaaaagaaaccctcaactcaaattgctataattagacacttgcttctgtcttgcctcctgtctgcagctgtgaatagtcatttgactgtgactgttgcccttagccagccagatgcgcctgtgaaccaaagcttcgtgcacatgtgttcccctaaaggttggggagcctcgctgtgtcttgctgttcccaggcaccaccacagcaggtgctgccatactcttgtggtctctgtgcgccccccccccccccccacccgtctgccaagcatgggtatgaatcgtgcacacagccatgcttcaaggccggggcaggggagcctgtgctgatgccatccagggcactgggctgtgcctggaaggcgagccttgattgtctgaacacataaagcaaactgtccagaa

SEQ ID NO: 72568 - DNA, 770 bp, Artificial Sequence
  derived and/or modified sequence
ggggctggggggcgggccccgggcccaggcgttgccgactctcgtcgctgtccgcccgggtaaagaggctcctctcccggagggcccgaagcctagcatcgccttcaggcgggaaaggtagaagaagaaaggtgccactccggcatgaagacagactcgcttagtcgccagtcacttaagctgagtgcattgtgatttccaataattgaggcagtggttctaaaagctgtctacattaatgaaaagagcaatgtggccagcttgactaagccgccagcgcacagcgcggcaggacgcgcccgggtctcagcggacttgtgcatgttagctgtgtagatttatgtgagggcttgtaaaactctggtcttgtaaactagtcttaagcgcttttaatatggagacagatgagagcccctctccgctcccgtgtgggcccgcaggagaagcggtgatggagagccgagctcgccccttccaagcgctgccccgtgagcagtctccaccacctcccctgcaaacgtccagtggtgcagaggtaatggacgttggctctggtggtgatggacagtccgaactccctgctgaggaccccttcaacttctacggagcttctcttctctccaaaggatccttctctaagggccgcctcctcatagacccgaactgtagtggccacagcccgcgcaccgcccggcacgcacctgcggtccggaagttctcccctgaccttaagttgcttaaggatgtaaagattagcgtgagctttaccg

SEQ ID NO: 72569 - protein, 449 aa, Artificial Sequence
  derived and/or modified sequence
MKFQGPLACLLLALCLGSGEAGPLQSGEESTGTNIGEALGHGLGDALSEGVGKAIGKEAGGAAGSKVSEALGQGTREAVGTGVRQVPGFGVADALGNRVGEAAHALGNTGHEIGRQAEDVIRHGADAVRGSWQGVPGHNGAWETSGGHGIFGSQGGLGGQGQGNPGGLGTPWVHGYPGNSAGSFGMNPQGAPWGQGGNGGPPNFGTNTQGAVAQPGYGSVRASNQNEGCTNPPPSGSGGGSSNSGGSSTGSSSGNHGGSGGGNGHKPGCEKPGNEARGSGESGIQGQGSSWGSGGGDAVGGVNTVNSETSPGMFNFDTFWKNFKSKLGFINWDAINKNQVPPPSTRALLYFSRLWEDFKQNTPFLNWKAIIEGADASSLQKRAGRDDQPGAGWQEVAAVTSKNYNYNQHAYPTAYGGKYSVKTPAKGGVSPSSSASRVQPGLLQWVKFW

SEQ ID NO: 72570 - DNA, 1350 bp, Artificial Sequence
  derived and/or modified sequence
atgaagtttcaagggccattggcatgtcttctgctggcactctgtctcggcagcggcgaagccggtccactgcaatccggggaagaaagtacaggaacaaacatcggggaagctctcggccacggtttgggtgacgcactgagcgagggtgtgggcaaagcaataggaaaagaagccggaggtgcggcaggctctaaggttagcgaagccctggggcaagggactcgggaagccgtggggactggggtccggcaggtgccaggcttcggcgtggcagatgcacttggtaaccgggtgggggaagctgcccacgctctgggaaatacaggccatgaaatcggaagacaggctgaagatgtcataagacacggcgctgacgccgtgcgcggaagctggcagggagtacctgggcacaacggcgcttgggagacgtcggggggtcatggcatcttcggttcccaaggcggtctagggggacaaggacaggggaatcctggtggcctgggcaccccctgggtacacgggtatccaggaaacagtgcaggaagtttcggaatgaacccccaaggcgcaccatggggacagggcggtaacgggggaccacccaactttggcacgaatacccagggcgcagtggcccagccagggtatggatccgtcagagcctccaatcagaacgaaggatgcaccaatccaccaccttcagggtcaggaggaggctctagtaattctggcggatcaagcacgggaagctcaagtggcaaccacgggggttcaggtgggggtaacggacacaagcctgggtgtgaaaagcctggcaacgaggcacggggatcaggagaatctggcatccagggccagggcagcagctggggatcaggaggaggagatgcggtgggcggagtgaacacggttaacagtgaaacaagtccaggtatgttcaacttcgataccttttggaagaactttaagagcaaactgggtttcatcaattgggacgcaataaacaagaaccaggtcccccctccctccacgcgtgccctgttatacttcagtcgcctgtgggaagacttcaaacaaaacacccccttcctcaactggaaagctatcatcgagggagccgatgcttctagccttcagaagagagctggtcgcgatgaccagcccggagctggatggcaggaggtcgccgcagtgacatctaaaaattataactataatcagcatgcgtacccaacagcctatggcggaaaatacagtgtgaagactcctgcaaaaggcggtgtatcacctagcagctccgcctcccgcgtgcaacctggtctgttacagtgggtgaagttctggtag

SEQ ID NO: 72571 - DNA, 1447 bp, Artificial Sequence
  derived and/or modified sequence
gcagagatgaagttccaggggcccctggcctgcctcctgctggccctctgcctgggcagtggggaggctggccccctgcagagcggagaggaaagcactgggacaaatattggggaggcccttggacatggcctgggagacgccctgagcgaaggggtgggaaaggccattggcaaagaggccggaggggcagctggctctaaagtcagtgaggcccttggccaagggaccagagaagcagttggcactggagtcaggcaggttccaggctttggcgtagcagatgctttgggcaacagggtcggggaagcagcccatgctctgggaaacactgggcacgagattggcagacaggcagaagatgtcattcgacacggagcagatgctgtccgcggctcctggcagggggtgcctggccacaatggtgcttgggaaacttctggaggccatggcatctttggctctcaaggtggccttggaggccagggccagggcaatcctggaggtctggggactccgtgggtccacggataccccggaaactcagcaggcagctttggaatgaatcctcagggagctccctggggtcaaggaggcaatggagggccaccaaactttgggaccaacactcagggagctgtggcccagcctggctatggttcagtgagagccagcaaccagaatgaagggtgcacgaatcccccaccatctggctcaggtggaggctccagcaactctgggggatccagcaccggctcctcctccggcaaccacggtgggagcggcggaggaaatggacataaacccgggtgtgaaaagccagggaatgaagcccgcgggagcggggaatctgggattcaggggcaagggtcgagctggggcagtggaggaggtgacgctgttggtggagtcaatactgtgaactctgagacgtctcctgggatgtttaactttgacactttctggaagaattttaaatccaagctgggtttcatcaactgggatgccataaacaagaaccaggtcccgccccccagcacccgagccctcctctacttcagccgactctgggaggatttcaaacagaacactcctttcctcaactggaaagcaattattgagggtgcggacgcgtcatcactgcagaaacgtgcaggcagagacgatcagccgggtgcaggatggcaggaggtggcagctgtaacttccaagaactacaattacaaccagcatgcgtatcccactgcctatggtgggaagtactcagtcaagacccctgcaaaggggggagtctcaccttcttcctcggcttcccgggtgcaacctggcctgctgcagtgggtgaagttttggtaggcaatttcttgcaaccaccaccgaggccccgaaaagcactggtcgtcagggagctcctccccttggcccccagcctgtgccagccctggcc

SEQ ID NO: 72572 - DNA, 1350 bp, Artificial Sequence
  derived and/or modified sequence
atgaagttccagggaccgctggcttgcttgctgttagccctgtgcttgggatcaggcgaggcaggacccctgcagtcgggggaagagtcaacaggtaccaacataggggaagctcttggccacggattaggcgacgctttgtccgagggagttgggaaggctattggcaaagaggccggcggcgccgcaggatccaaagtgagtgaagctttaggtcagggtacacgcgaagctgtgggcactggcgttcgacaggtgcccggctttggcgttgcagacgctttgggcaatcgcgtcggggaggcagcacacgctctgggcaacactggacacgagattggacgacaggctgaggacgtcatcagacacggggccgacgcggttagagggtcctggcagggcgtccccggacacaacggagcctgggagacttccggaggccatggcatttttgggtcccagggtggcctaggcggacagggacaaggtaatcccggagggctgggaactccgtgggtacatggataccctggtaactcagctggtagcttcggtatgaatcctcagggtgccccgtggggacaggggggcaacggtggcccccccaacttcggcactaatacacaaggcgcagttgcccagccaggctatggctctgtgagggcttcaaatcagaatgagggatgcactaatccccctccctccggaagcgggggtgggtcaagcaatagcggtggctcctctactggatcttcaagcggcaaccacggaggcagtgggggcggcaacggccataaaccaggctgcgaaaaaccgggcaacgaggcaagaggttccggtgaatcaggcatccagggccaaggcagttcttggggaagtggaggcggggacgcagttggaggcgtaaatactgtaaatagcgagacgtcccccgggatgttcaattttgacactttctggaagaatttcaaatctaaactcggattcatcaactgggatgctataaataagaaccaagtcccacctcctagtacgcgcgcacttttatattttagtcgactctgggaagattttaagcagaatacacctttcttaaactggaaagctatcatcgaaggtgccgacgccagctccctgcagaaaagagccgggcgagacgatcagcccggggcgggctggcaagaggttgccgctgtgacgtccaagaactacaattacaatcagcatgcgtaccccaccgcatacggggggaaatactccgtcaagacccctgccaaaggaggcgtgtctccctctagcagtgcttcccgggtgcaaccagggctcttacagtgggtgaagttctggtag

SEQ ID NO: 72573 - DNA, 1350 bp, Artificial Sequence
  derived and/or modified sequence
atgaaatttcagggtccactggcgtgtctgttactcgcgttgtgtctaggctctggagaagccggaccgctgcagtccggggaagagagcacaggaaccaacatcggggaggctcttgggcacggcttaggagacgcgctcagtgagggcgtaggaaaagcaatagggaaggaagctggaggtgctgctggaagcaaagtgtcagaggccttgggccagggcactcgggaagcagttggtacgggagtaaggcaggtgcccggttttggagtggcggacgccctcggaaatcgcgtcggcgaggcagctcacgcactcggaaatactggccatgaaattggaaggcaagcagaggacgttatacggcacggggcagatgctgttagaggtagctggcagggggtacccggacacaacggggcatgggagacctctggcgggcacggaatttttggatctcagggcggtctgggaggacagggccagggaaatcctggcggtctcggcacaccttgggtccacgggtatccgggcaattctgccgggtctttcgggatgaacccacaaggcgctccatggggtcagggtggaaacggaggccctcccaacttcggcaccaatactcaaggcgcagtggcacagcccggatatgggtcagtccgtgcgagcaatcagaacgagggctgtacaaacccacctcccagcgggtcgggcggaggaagctctaatagcggtggcagctcaaccggaagtagcagcggcaatcatggtggatccgggggcggcaatggccataagccaggctgtgaaaaaccaggaaatgaggcaagaggtagtggggagtcagggattcaaggacaaggtagctcatggggatctggcggtggagatgccgttgggggcgtgaacaccgtgaactctgaaacctcccctggcatgttcaacttcgataccttctggaagaatttcaagtccaagcttggttttattaactgggacgccattaacaaaaatcaggtgcctcccccaagtacgagggccttactttattttagccgcttatgggaagattttaaacaaaacacaccatttctcaattggaaagccatcatcgagggcgccgacgcctcaagtctgcaaaaacgcgccggccgtgacgaccagcccggcgcaggttggcaggaagtagcagcagtgaccagcaaaaactacaactacaaccagcacgcgtaccctacagcatacggcggaaaatactcagtcaaaacacctgctaaaggcggagttagccctagttcttccgcctctcgcgttcaacccgggctgcttcaatgggtgaaattttggtag

SEQ ID NO: 72574 - DNA, 1350 bp, Artificial Sequence
  derived and/or modified sequence
atgaagttccagggccccctggcctgcctgctgctggccctgtgcctgggcagcggcgaggccggccccctgcagagcggcgaggagagcaccggcaccaacatcggcgaggccctgggccacggcctgggcgacgccctgagcgagggcgtgggcaaggccatcggcaaggaggccggcggcgccgccggcagcaaggtgagcgaggccctgggccagggcaccagagaggccgtgggcaccggcgtgagacaggtgcccggcttcggcgtggccgacgccctgggcaacagagtgggcgaggccgcccacgccctgggcaacaccggccacgagatcggcagacaggccgaggacgtgatcagacacggcgccgacgccgtgagaggcagctggcagggcgtgcccggccacaacggcgcctgggagaccagcggcggccacggcatcttcggcagccagggcggcctgggcggccagggccagggcaaccccggcggcctgggcaccccctgggtgcacggctaccccggcaacagcgccggcagcttcggcatgaacccccagggcgccccctggggccagggcggcaacggcggcccccccaacttcggcaccaacacccagggcgccgtggcccagcccggctacggcagcgtgagagccagcaaccagaacgagggctgcaccaaccccccccccagcggcagcggcggcggcagcagcaacagcggcggcagcagcaccggcagcagcagcggcaaccacggcggcagcggcggcggcaacggccacaagcccggctgcgagaagcccggcaacgaggccagaggcagcggcgagagcggcatccagggccagggcagcagctggggcagcggcggcggcgacgccgtgggcggcgtgaacaccgtgaacagcgagaccagccccggcatgttcaacttcgacaccttctggaagaacttcaagagcaagctgggcttcatcaactgggacgccatcaacaagaaccaggtgcccccccccagcaccagagccctgctgtacttcagcagactgtgggaggacttcaagcagaacacccccttcctgaactggaaggccatcatcgagggcgccgacgccagcagcctgcagaagagagccggcagagacgaccagcccggcgccggctggcaggaggtggccgccgtgaccagcaagaactacaactacaaccagcacgcctaccccaccgcctacggcggcaagtacagcgtgaagacccccgccaagggcggcgtgagccccagcagcagcgccagcagagtgcagcccggcctgctgcagtgggtgaagttctggtag

SEQ ID NO: 72575 - DNA, 1350 bp, Artificial Sequence
  derived and/or modified sequence
atgaagtttcagggacccctggcttgcctccttctggcgttgtgcctgggctcaggcgaggccgggccattgcaatccggggaggagtccacgggcacaaacatcggagaagctctgggacatggactgggagacgcattatccgagggagtggggaaggccattggcaaggaggcaggcggcgctgctggctctaaggtttccgaggctttgggacagggaacccgggaggctgtgggcacgggagtgaggcaggtcccaggcttcggcgtagctgacgctctgggcaatagagtgggcgaggcagctcacgccctgggaaacaccgggcatgagatcggcaggcaagctgaggatgttatccgacatggggccgatgcagtgagagggtcctggcagggcgtgcccggccataatggagcctgggaaacaagtggcggtcacggaatcttcggaagccaaggaggcctaggcgggcagggccagggtaacccaggaggcttagggactccgtgggtccacgggtatccaggtaactcagccggctctttcgggatgaatcctcagggagcgccgtgggggcagggaggcaacggagggcccccaaacttcggtacaaatactcagggcgcagttgcacagcccggctacggatctgtgcgggccagtaatcagaacgaaggatgtaccaatcccccaccaagtggctcaggaggggggtcttctaattcaggaggctcctcgacaggctcctcctccggtaatcacggtgggtccggcggcggaaatgggcacaaaccggggtgcgaaaaacccggcaacgaagcccgaggcagtggggaaagcggaattcaaggccaagggagctcctggggatctggcggaggggatgccgtgggcggggtcaatacggttaactccgaaacgagccccgggatgtttaacttcgataccttttggaaaaactttaaaagcaagctgggattcattaactgggacgctatcaacaaaaatcaggttccccccccgtccactagagctctgctatatttctccagactctgggaggatttcaagcaaaacactccttttttaaattggaaagctattatcgagggcgccgacgcttcgagtctgcaaaagcgagccgggcgcgacgatcagcctggcgccggctggcaagaggttgctgctgttacgagcaaaaattataactacaaccagcacgcttatcccactgcttatggtgggaagtactccgtcaagacccctgcgaaaggtggagtttccccaagctcttcagcttcccgggtccaacctggactgttgcagtgggtgaagttctggtag

SEQ ID NO: 72576 - DNA, 1350 bp, Artificial Sequence
  derived and/or modified sequence
atgaagttccagggccccctggcctgcctgctgctggccctgtgcctgggcagcggggaggccggccccctgcagagcggggaggagagcacaggcaccaacattggagaggccctgggccacggcctgggagatgccctgtctgagggcgtgggcaaggccatcggcaaggaggccggcggcgctgctggcagcaaggtgtctgaggccctgggccagggcacccgggaggccgtgggcactggagtgcggcaggtgcccggctttggagtggctgatgccctgggcaacagagtgggggaggccgcccacgccctgggcaacacaggccatgaaattggccggcaggccgaggatgtgatcagacatggagcagatgctgtgcggggctcctggcagggcgtgcccggccacaatggagcctgggagaccagcggcggccacggcatcttcggcagccagggcggcctgggcggccagggccagggcaaccctgggggcctgggcaccccctgggtgcacggctacccaggcaacagcgctggcagctttggcatgaacccccagggcgccccctggggccagggcggcaatggaggcccccccaactttggcaccaacacccagggcgctgtggcccagcccggctacggctctgtgcgggccagcaaccagaatgaaggctgcaccaaccccccaccttctggcagcggcggcggcagcagcaacagcggcggcagcagcacaggcagcagcagcggcaaccacggcggcagcggcggcggcaatggccacaagccaggctgtgagaagccaggaaatgaggcccggggcagcggggagagcggcatccagggccagggcagctcctggggcagcggcggcggagatgctgtgggcggcgtgaacacagtgaacagcgagaccagccctggcatgttcaactttgacaccttctggaagaacttcaagagcaagctgggcttcatcaactgggatgccatcaacaagaaccaggtgcccccacccagcacccgggccctgctgtacttcagccggctgtgggaggacttcaagcagaacacccccttcctgaactggaaggccatcattgaaggagcagatgccagcagcctgcagaagagagctggaagagatgaccagcctggagctggctggcaggaggtggccgctgtgaccagcaagaactacaactacaaccagcacgcctaccccacagcctatggaggcaagtacagcgtgaagaccccagccaagggcggcgtgagccccagcagcagcgccagccgggtgcagcccggcctgctgcagtgggtgaagttctggtag

SEQ ID NO: 72577 - DNA, 1350 bp, Artificial Sequence
  derived and/or modified sequence
atgaagttccagggccccctggcctgcctgctgctggccctgtgcttaggttccggcgaagctggtcctctgcagtctggggaagagtcaaccggaacgaacatcggcgaagcattaggccacgggctgggggatgccttatcagagggagtgggaaaggctatcggcaaggaagcaggcggagcggccggttccaaggtgtccgaggcactgggccagggcaccagggaggcggtgggaaccggcgtaaggcaagtgcctgggttcggcgtggccgatgccctgggaaacagggtgggtgaggccgcacacgcccttggcaacactggacatgagataggcaggcaggccgaggatgtgattcgccacggcgctgacgccgtcaggggaagttggcagggagtcccaggccacaatggcgcctgggaaacgagcggcggccacggcatcttcgggagccagggaggacttggaggccaaggacagggcaatccaggtggcttaggaactccctgggtgcatgggtatcccggcaactccgctgggagtttcggcatgaatcctcaaggcgcgccttggggacagggggggaatggaggacctccaaatttcggaacaaatacacaaggtgcggtggcacagcccggatacggcagcgtgcgcgcgagtaaccagaatgaaggctgcaccaaccccccaccatccggaagcggcggcggaagcagcaactccgggggatcatccacgggatccagttctggcaaccacggcggctccggcgggggaaatggacacaaacctggatgtgaaaaacccgggaacgaagcaaggggatccggtgagagtggcatccaggggcagggatcttcttggggttccggcgggggggatgcggtgggcggagtgaataccgtcaactctgaaacaagccccgggatgtttaattttgacaccttttggaagaactttaaatcaaaactggggttcattaattgggatgcaatcaacaaaaaccaggttccccctccaagtacaagagccctgttgtatttcagccggctatgggaagatttcaaacagaacaccccatttctgaactggaaggccatcatagaaggcgccgacgcctcctctctgcagaagcgcgccggcagggatgaccagccaggcgctgggtggcaagaagtcgctgccgtgacatccaagaactacaactataatcagcacgcttacccgaccgcttacggagggaagtacagcgtgaaaacccccgcaaaagggggggtgagtcccagctccagcgcttcgcgcgtgcagcctggactgctgcaatgggttaaattctggtag

SEQ ID NO: 72578 - DNA, 183 bp, Artificial Sequence
  derived and/or modified sequence
atgggcaggccactgctgctccctctgctgctcttattgcagccaccagcatttctacagccaggactctgcgagcccgcactgtctgaattagaccgcggctctggcgagcggctgccccaggacctgaagcctgcagaaggtggccccgtttgcgtctttcttccatctagagctggatag

SEQ ID NO: 72579 - RNA, 1350 nt, Artificial Sequence
  derived and/or modified sequence
augaaguuccagggaccgcuggcuugcuugcuguuagcccugugcuugggaucaggcgaggcaggaccccugcagucgggggaagagucaacagguaccaacauaggggaagcucuuggccacggauuaggcgacgcuuuguccgagggaguugggaaggcuauuggcaaagaggccggcggcgccgcaggauccaaagugagugaagcuuuaggucaggguacacgcgaagcugugggcacuggcguucgacaggugcccggcuuuggcguugcagacgcuuugggcaaucgcgucggggaggcagcacacgcucugggcaacacuggacacgagauuggacgacaggcugaggacgucaucagacacggggccgacgcgguuagaggguccuggcagggcguccccggacacaacggagccugggagacuuccggaggccauggcauuuuugggucccaggguggccuaggcggacagggacaagguaaucccggagggcugggaacuccguggguacauggauacccugguaacucagcugguagcuucgguaugaauccucagggugccccguggggacaggggggcaacgguggcccccccaacuucggcacuaauacacaaggcgcaguugcccagccaggcuauggcucugugagggcuucaaaucagaaugagggaugcacuaaucccccucccuccggaagcgggggugggucaagcaauagcgguggcuccucuacuggaucuucaagcggcaaccacggaggcagugggggcggcaacggccauaaaccaggcugcgaaaaaccgggcaacgaggcaagagguuccggugaaucaggcauccagggccaaggcaguucuuggggaaguggaggcggggacgcaguuggaggcguaaauacuguaaauagcgagacgucccccgggauguucaauuuugacacuuucuggaagaauuucaaaucuaaacucggauucaucaacugggaugcuauaaauaagaaccaagucccaccuccuaguacgcgcgcacuuuuauauuuuagucgacucugggaagauuuuaagcagaauacaccuuucuuaaacuggaaagcuaucaucgaaggugccgacgccagcucccugcagaaaagagccgggcgagacgaucagcccggggcgggcuggcaagagguugccgcugugacguccaagaacuacaauuacaaucagcaugcguaccccaccgcauacggggggaaauacuccgucaagaccccugccaaaggaggcgugucucccucuagcagugcuucccgggugcaaccagggcucuuacagugggugaaguucugguag

SEQ ID NO: 72580 - RNA, 1350 nt, Artificial Sequence
  derived and/or modified sequence
augaaauuucaggguccacuggcgugucuguuacucgcguugugucuaggcucuggagaagccggaccgcugcaguccggggaagagagcacaggaaccaacaucggggaggcucuugggcacggcuuaggagacgcgcucagugagggcguaggaaaagcaauagggaaggaagcuggaggugcugcuggaagcaaagugucagaggccuugggccagggcacucgggaagcaguugguacgggaguaaggcaggugcccgguuuuggaguggcggacgcccucggaaaucgcgucggcgaggcagcucacgcacucggaaauacuggccaugaaauuggaaggcaagcagaggacguuauacggcacggggcagaugcuguuagagguagcuggcaggggguacccggacacaacggggcaugggagaccucuggcgggcacggaauuuuuggaucucagggcggucugggaggacagggccagggaaauccuggcggucucggcacaccuuggguccacggguauccgggcaauucugccgggucuuucgggaugaacccacaaggcgcuccauggggucaggguggaaacggaggcccucccaacuucggcaccaauacucaaggcgcaguggcacagcccggauaugggucaguccgugcgagcaaucagaacgagggcuguacaaacccaccucccagcgggucgggcggaggaagcucuaauagcgguggcagcucaaccggaaguagcagcggcaaucaugguggauccgggggcggcaauggccauaagccaggcugugaaaaaccaggaaaugaggcaagagguaguggggagucagggauucaaggacaagguagcucauggggaucuggcgguggagaugccguugggggcgugaacaccgugaacucugaaaccuccccuggcauguucaacuucgauaccuucuggaagaauuucaaguccaagcuugguuuuauuaacugggacgccauuaacaaaaaucaggugccucccccaaguacgagggccuuacuuuauuuuagccgcuuaugggaagauuuuaaacaaaacacaccauuucucaauuggaaagccaucaucgagggcgccgacgccucaagucugcaaaaacgcgccggccgugacgaccagcccggcgcagguuggcaggaaguagcagcagugaccagcaaaaacuacaacuacaaccagcacgcguacccuacagcauacggcggaaaauacucagucaaaacaccugcuaaaggcggaguuagcccuaguucuuccgccucucgcguucaacccgggcugcuucaaugggugaaauuuugguag

SEQ ID NO: 72581 - protein, 436 aa, Artificial Sequence
  derived and/or modified sequence
MKFQGPLACLLLALCLGSGEAGPLQSGEESTGTNIGEALGHGLGDALSEGVGKAIGKEAGGAAGSKVSEALGQGTREAVGTGVRQVPGFGVADALGNRVGEAAHALGNTGHEIGRQAEDVIRHGADAVRGSWQGVPGHNGAWETSGGHGIFGSQGGLGGQGQGNPGGLGTPWVHGYPGNSAGSFGMNPQGAPWGQGGNGGPPNFGTNTQGAVAQPGYGSVRASNQNEGCTNPPPSGSGGGSSNSGGGSGSQSGSSGSGSNGDNNNGSSSGGSSSGSSSGGSSGGSSGGSSGNSGGSRGDSGSESSWGSSTGSSSGNHGGSGGGNGHKPGCEKPGNEARGSGESGIQGFRGQGVSSNMREISKEGNRLLGGSGDNYRGQGSSWGSGGGDAVGGVNTVNSETSPGMFNFDTFWKNFKSKLGFINWDAINKDQRSSRIP

SEQ ID NO: 72582 - protein, 416 aa, Artificial Sequence
  derived and/or modified sequence
MKFQGPLACLLLALCLGSGEAGPLQSGEESTGTNIGEALGHGLGDALSEGVGKAIGKEAGGAAGSKVSEALGQGTREAVGTGVRQVPGFGVADALGNRVGEAAHALGNTGHEIGRQAEDVIRHGADAVRGSWQGVPGHNGAWETSGGHGIFGSQGGLGGQGQGNPGGLGTPWVHGYPGNSAGSFGMNPQGAPWGQGGNGGPPNFGTNTQGAVAQPGYGSVRASNQNEGCTNPPPSGSGGGSSNSGGGSGSQSGSSGSGSNGDNNNGSSSGGSSSGSSSGGSSGGSSGGSSGNSGGSRGDSGSESSWGSSTGSSSGNHGGSGGGNGHKPGCEKPGNEARGSGESGIQGFRGQGVSSNMREISKEGNRLLGGSGDNYRNSETSPGMFNFDTFWKNFKSKLGFINWDAINKDQRSSRIP

SEQ ID NO: 72583 - protein, 369 aa, Artificial Sequence
  derived and/or modified sequence
MKFQGPLACLLLALCLGSGEAGPLQSGEESTGTNIGEALGHGLGDALSEGVGKAIGKEAGGAAGSKVSEALGQGTREAVGTGVRQVPGFGVADALGNRVGEAAHALGNTGHEIGRQAEDVIRHGADAVRGSWQGVPGHNGAWETSGGHGIFGSQGGLGGQGQGNPGGLGTPWVHGYPGNSAGSFGMNPQGAPWGQGGNGGPPNFGTNTQGAVAQPGYGSVRASNQNEGCTNPPPSGSGGGSSNSGGGSGSQSGSSGSGSNGDNNNGSSSGGSSSGSSSGGSSGGSSGGSSGNSGGSRGDSGSESSWGSSTGSSSGNHGGSGGGNGHKPGNSETSPGMFNFDTFWKNFKSKLGFINWDAINKDQRSSRIP

SEQ ID NO: 72584 - DNA, 1173 bp, Artificial Sequence
  derived and/or modified sequence
atgaaatttcagggccctctggcatgtctgctgctggctctctgcttgggctcgggcgaagccggaccccttcagtctggagaagagtctactggcaccaacatcggagaggcactgggacacggactcggggacgctctgtctgagggggtgggaaaagccataggtaaggaggcaggaggtgccgcaggctccaaagtgtcagaagccctggggcaggggacaagggaagccgttggcacaggggtccgccaggtgcctggatttggagtggcagatgccctgggcaatcgagttggcgaggccgctcacgccttagggaacacgggccacgaaattggccgacaagccgaggatgtaatccggcacggcgcagacgctgtacgcggatcctggcagggtgtgcctgggcacaatggggcttgggagacgtctggtggccatggcatctttggctcgcaagggggtctcggcggacagggccaggggaacccaggcggactgggcacaccgtgggtccatggctaccccggaaactcagctggcagcttcggcatgaatccccagggcgctccatggggccaaggagggaatggcggtcctcccaatttcggaacaaatacccagggcgcagttgcccagccgggttatggctccgtgcgtgcctccaatcagaacgagggatgcacaaatcctccaccctcaggctccggcggaggatcatcaaactcaggtggcggtagcggctcacagtcaggtagtagtggatccggttccaatggggataataataatggctcttcatctgggggatcttcctcaggctcaagctccggcggaagcagtggcggaagctctggtggcagctctggcaacagcgggggaagcaggggagatagcggaagcgaaagttcatggggctcgagcaccggttcttcatccggaaaccacgggggttccgggggaggtaacggtcacaaacccggatgtgaaaagcctgggaacgaggcacggggaagtggcgagtctggtattcagggttttagaggacagggggtgtcatcgaatatgagaaacagtgagactagccctggaatgtttaattttgataccttttggaaaaacttcaagagcaagctggggttcattaactgggacgccattaacaagtag

SEQ ID NO: 72585 - DNA, 1161 bp, Artificial Sequence
  derived and/or modified sequence
atgaagttccaggggcctcttgcctgcctgctgctcgccctttgtctgggctcaggcgaggccggacccttacaaagcggggaagagtccacaggcaccaacatcggagaagcgctgggacatggcctgggcgacgcactgagtgagggagttggaaaagctatcgggaaggaggcgggaggagctgccggtagtaaggtgagtgaggccctcggccagggaacccgcgaagcggtcgggactggtgtgcgacaggttccaggcttcggcgtggccgacgccctggggaatcgagttggcgaggcagcccatgccctgggaaacactggccacgaaattgggcgacaggccgaggacgtcatccggcatggcgcagacgccgttcgcggatcttggcagggagtccccggacataacggcgcatgggaaacatctggcggtcacgggatcttcggttctcagggtgggttgggaggacagggccaggggaatcccggaggactggggacaccttgggtgcacggttatccagggaactctgccggatcatttgggatgaatccccagggggctccgtgggggcaggggggtaacgggggtcctcccaattttggcaccaacacacagggcgctgtcgcgcagcccggatacggaagtgttagagcctctaatcagaatgagggctgtaccaatcctcccccatctggttctgggggtggaagtagcaacagcggcggaggatccggtagccagtcaggctcatcagggagtgggtcaaatggggacaacaataacggctctagctcgggaggcagttcaagcggctcatcctccgggggaagctccggtgggtcaagtggcggatcatctggtaactctggtggctctcggggagactcaggtagtgagagctcttggggctccagtacgggctctagtagtgggaaccatgggggaagtggcggaggcaatggacataagccagggtgcgagaagccaggaaatgaagccagggggtctggagagtcagggatccagaatagcgagacatccccgggtatgtttaatttcgatacgttctggaagaattttaagtccaaactcggatttattaactgggatgccatcaacaaagaccagcggagtagtagaataccttag

SEQ ID NO: 72586 - DNA, 1197 bp, Artificial Sequence
  derived and/or modified sequence
atgaagtttcaaggccctctagcatgcctgcttctggcactttgcctgggatctggagaagctgggccacttcagtccggcgaagagagcacagggacaaatatcggggaagccctggggcacggactcggcgacgcactctctgaaggggttggcaaagctataggaaaagaagctggaggcgctgctggaagtaaagtatccgaggccctggggcaggggactcgagaagcggtagggacgggtgtgagacaggtgccaggcttcggcgtcgccgatgctttgggcaatagggtgggggaggcagcacacgcactgggcaacaccggccatgagatcggtcgtcaggccgaagacgtgatccgacatggcgcagatgcggttcgcggttcctggcagggggtcccgggtcacaacggcgcttgggaaacttccggcggacacgggattttcggatcccaaggaggccttggtggacagggacaaggtaacccagggggactggggaccccttgggttcatggctatcccggtaatagcgccggatcctttggtatgaacccacagggagccccttggggccaaggaggtaatggcggaccacccaactttggaacgaatacacagggagctgttgctcagcctggctatgggagtgtgcgggctagtaatcagaacgaaggttgcaccaacccgcctccaagcggatctggaggcggttcctcaaacagcggcggagggagtggctcccagagtggatcttctgggagcggaagcaatggtgacaataacaacggcagcagctcagggggatcttcttctgggtcctcatcagggggatcctccggcggtagctctggcggatcctccggaaatagcggtggtagtagaggtgattccgggtccgagagcagttggggcagctcaacaggatcttcttcaggtaaccacggcggaagcggaggaggtaacggccataaaccaggatgtgaaaaacctggcaatgaggctaggggatctggcgaaagtgggatacagggctttagaggtcagggtgtgagctcaaacatgagaaattcagagacgtctcctggcatgtttaatttcgacacattctggaaaaactttaaatccaagctgggcttcattaactgggacgctattaataaagaccaaaggtccagccgaatcccttag

SEQ ID NO: 72587 - DNA, 1251 bp, Artificial Sequence
  derived and/or modified sequence
atgaaattccaggggcctctggcttgtctgttgctggccctatgcctcggctcaggggaagcaggcccactccagtctggcgaagagtccacgggcacaaatatcggtgaagcactgggccatggccttggcgacgcgttatcggagggtgtcggaaaagcaattggcaaagaagcaggtggagctgccggaagcaaagtcagcgaggccctgggtcaggggacacgggaagccgttgggacaggcgtccgccaggtcccagggtttggggtggccgacgccctgggcaaccgtgttggggaggccgctcacgcattgggaaacactggccacgagattggcagacaggccgaggatgtcatccgtcacggtgccgatgccgtgaggggttcttggcagggggtccccggtcacaatggggcatgggaaacaagcggagggcacggcatctttggcagccaggggggtctgggcggacaaggacagggtaatcccggaggattgggtactccttgggttcatggatatcccggtaattccgcgggatctttcggaatgaacccccagggtgccccatgggggcaagggggtaatggaggccctccaaattttggaactaacacccagggtgccgttgcacagccaggttatggatccgtccgggctagcaatcaaaacgagggctgtacgaacccgccaccttccgggtcgggcggaggctcatcgaactccggtgggggatcaggctctcagagtggcagtagtggcagcggcagtaacggcgacaacaataacggctcctctagtggaggcagtagttctggtagcagctctggaggatcttccggcggatctagtgggggtagtagcgggaatagcggtgggagcaggggcgactcaggcagcgagagcagttggggctcctccacaggctccagttctggcaatcacggagggtcagggggagggaacgggcataagccaggctgcgaaaagccgggtaacgaggcacgtgggtcaggggagtccggaatacagggctttcggggacagggggtatcctcaaacatgagagaaatctctaaagaaggtaatagactgttaggaggaagcggggataactatcgtaatagtgagacctcacctggaatgtttaattttgataccttttggaagaattttaaaagcaagttgggcttcattaattgggacgccattaacaaggatcagaggtcaagccgaataccttag

SEQ ID NO: 72588 - DNA, 1311 bp, Artificial Sequence
  derived and/or modified sequence
atgaagttccagggaccattggcatgtctcctcttggcgctttgcctcggatccggggaagcgggtcccctgcagtcaggggaagagtctacagggaccaatatcggcgaggctctgggacacggcctgggggatgctctgtcggaaggggtcgggaaggccatcgggaaagaagctggcggagccgcagggtcaaaagttagtgaggctctgggacagggtacgcgagaggcggtgggcacaggagtcaggcaggtgcctgggtttggggtcgccgatgccttgggcaatcgggtcggagaagctgcacatgccctgggcaacactggacatgaaattgggagacaggccgaggatgtgatacgccacggagccgacgccgtccgtggatcctggcaaggcgtgccaggccacaacggagcctgggaaacctctgggggacatggtatctttggtagtcagggcggactggggggacaggggcagggaaaccccggtgggctgggtacaccctgggtccatggatatcctggaaattccgccggtagcttcggcatgaacccacagggtgccccatggggtcagggcggaaatgggggtccaccaaactttggcaccaacacgcagggcgctgtggcccaaccaggctatggttccgtgcgtgcatcaaatcaaaacgagggttgcaccaatccccctccctccgggagtggagggggtagtagcaattcaggcggaggaagcggaagtcagagcgggtcttctgggtctggctccaacggggataacaacaacgggtcaagctcagggggatccagttctggcagttctagcgggggaagcagcggagggtctagcggcggaagctctggcaattccgggggatcaagaggtgattcgggctcggagagtagctgggggtctagcaccggctctagctcaggaaaccacgggggaagtgggggaggaaatggccataagccgggatgtgaaaaacccggtaacgaggctagaggttccggagaaagcgggatccaaggattccgaggtcagggcgtcagttctaatatgagagaaatttcgaaggaaggcaacaggcttctcgggggtagtggagacaactaccggggacagggctcctcgtgggggagtggaggcggagacgccgttggcggagtgaataccgtgaactcggaaacgtcacctggaatgtttaatttcgacactttctggaaaaacttcaaatccaagctgggattcatcaattgggacgccataaacaaagatcagcgttcatcccgaatcccctag

SEQ ID NO: 72589 - DNA, 1110 bp, Artificial Sequence
  derived and/or modified sequence
atgaaatttcagggtccactggcctgcttgctcttggctctgtgcctcggcagcggggaggccggtccgctgcagtcaggagaagagtctacgggaaccaatataggcgaggcactgggtcacggcctgggagacgccctatcagaaggagttggcaaggctataggcaaagaagcgggaggagcagctggctccaaagtctctgaggctctgggtcaggggacacgtgaagcagtgggtaccggggttcgccaggtgcctggcttcggagtggccgacgccttggggaatcgcgtaggcgaggctgcgcatgcacttggcaataccggacatgagattggcagacaagccgaagatgtcattcgtcacggggctgacgccgtgcgcggaagctggcagggtgtaccagggcataacggggcatgggagacttctgggggtcacggaatcttcgggagtcagggcggactcggcggacaggggcaggggaacccaggaggactgggcacgccatgggtgcatggataccctggtaactcagctggctctttcggtatgaacccccagggagccccatggggacagggaggaaacggtggacctcccaatttcggtaccaacactcagggagccgtggcccagcctggttacggctccgtgagagcaagcaatcaaaacgaagggtgcacgaatccgcctccttctggatccggaggcggaagctcaaacagtgggggaggcagtgggagtcagagcggaagctccggttccggctctaatggagacaataacaatgggagctcatccgggggtagcagttcaggctccagctcgggagggagcagcggagggtcctcaggcggatcctccggaaatagcggcggttctagaggggactcggggtcagagtcatcatggggatcctcaactgggagctcatcaggaaatcatggcggaagcgggggaggaaatggccacaagccagggaactcagagacctcacccggaatgtttaacttcgacactttttggaagaattttaagagcaagctcggcttcattaactgggacgcgattaataaagaccagagaagctccagaataccctag

SEQ ID NO: 72590 - DNA, 1257 bp, Artificial Sequence
  derived and/or modified sequence
gcagagatgaagttccaggggcccctggcctgcctcctgctggccctctgcctgggcagtggggaggctggccccctgcagagcggagaggaaagcactgggacaaatattggggaggcccttggacatggcctgggagacgccctgagcgaaggggtgggaaaggccattggcaaagaggccggaggggcagctggctctaaagtcagtgaggcccttggccaagggaccagagaagcagttggcactggagtcaggcaggttccaggctttggcgtagcagatgctttgggcaacagggtcggggaagcagcccatgctctgggaaacactgggcacgagattggcagacaggcagaagatgtcattcgacacggagcagatgctgtccgcggctcctggcagggggtgcctggccacaatggtgcttgggaaacttctggaggccatggcatctttggctctcaaggtggccttggaggccagggccagggcaatcctggaggtctggggactccgtgggtccacggataccccggaaactcagcaggcagctttggaatgaatcctcagggagctccctggggtcaaggaggcaatggagggccaccaaactttgggaccaacactcagggagctgtggcccagcctggctatggttcagtgagagccagcaaccagaatgaagggtgcacgaatcccccaccatctggctcaggtggaggctccagcaactctgggggaggcagcggctcacagtcgggcagcagtggcagtggcagcaatggtgacaacaacaatggcagcagcagtggtggcagcagcagtggcagcagcagtggcggcagcagtggcggcagcagtggtggcagcagtggcaacagtggtggcagcagaggtgacagcggcagtgagtcctcctggggatccagcaccggctcctcctccggcaaccacggtgggagcggcggaggaaatggacataaacccgggtgtgaaaagccagggaatgaagcccgcgggagcggggaatctgggattcagaactctgagacgtctcctgggatgtttaactttgacactttctggaagaattttaaatccaagctgggtttcatcaactgggatgccataaacaaggaccagagaagctctcgcatcccgtgacctccagacaaggagccaccagattggatgggagcccccacactccctccttaaaacaccaccctctcatcactaatctcagcccttgcc

SEQ ID NO: 72591 - DNA, 1293 bp, Artificial Sequence
  derived and/or modified sequence
gcagagatgaagttccaggggcccctggcctgcctcctgctggccctctgcctgggcagtggggaggctggccccctgcagagcggagaggaaagcactgggacaaatattggggaggcccttggacatggcctgggagacgccctgagcgaaggggtgggaaaggccattggcaaagaggccggaggggcagctggctctaaagtcagtgaggcccttggccaagggaccagagaagcagttggcactggagtcaggcaggttccaggctttggcgtagcagatgctttgggcaacagggtcggggaagcagcccatgctctgggaaacactgggcacgagattggcagacaggcagaagatgtcattcgacacggagcagatgctgtccgcggctcctggcagggggtgcctggccacaatggtgcttgggaaacttctggaggccatggcatctttggctctcaaggtggccttggaggccagggccagggcaatcctggaggtctggggactccgtgggtccacggataccccggaaactcagcaggcagctttggaatgaatcctcagggagctccctggggtcaaggaggcaatggagggccaccaaactttgggaccaacactcagggagctgtggcccagcctggctatggttcagtgagagccagcaaccagaatgaagggtgcacgaatcccccaccatctggctcaggtggaggctccagcaactctgggggaggcagcggctcacagtcgggcagcagtggcagtggcagcaatggtgacaacaacaatggcagcagcagtggtggcagcagcagtggcagcagcagtggcggcagcagtggcggcagcagtggtggcagcagtggcaacagtggtggcagcagaggtgacagcggcagtgagtcctcctggggatccagcaccggctcctcctccggcaaccacggtgggagcggcggaggaaatggacataaacccgggtgtgaaaagccagggaatgaagcccgcgggagcggggaatctgggattcagggcttcagaggacagggagtttccagcaacatgaggaactctgagacgtctcctgggatgtttaactttgacactttctggaagaattttaaatccaagctgggtttcatcaactgggatgccataaacaaggaccagagaagctctcgcatcccgtgacctccagacaaggagccaccagattggatgggagcccccacactccctccttaaaacaccaccctctcatcactaatctcagcccttgcc

SEQ ID NO: 72592 - DNA, 1173 bp, Artificial Sequence
  derived and/or modified sequence
atgaagttccagggacctctcgcctgtctgctgctcgctctatgcctgggaagcggggaggcaggaccgctacagtctggggaggaatctacggggactaacattggcgaggccctgggccacggactgggagacgcgctttccgagggagttggcaaagctatagggaaggaggcaggcggcgccgctggcagcaaggtttcagaagctctgggccaggggactcgggaggccgtgggcactggcgtccggcaagtgccagggtttggcgtagcagatgcactcggtaatagggtgggggaagccgcccatgccctgggcaatacaggccatgaaatcggtaggcaggctgaggacgtgattaggcacggtgctgacgccgtcaggggatcgtggcagggcgtccccggccataatggagcatgggaaactagcggcggacacggaatttttggcagccagggcggcttgggaggccagggacaggggaaccccggaggtctgggtaccccatgggtacatggttaccccggcaactcagccggttcatttggaatgaatcctcagggtgcaccgtgggggcagggtgggaatggtggaccaccaaatttcggcactaacactcaaggcgctgttgctcagcccggctacggaagcgtgagagcatcgaatcagaacgaagggtgcacaaatccccctccaagtggctccggagggggcagctcgaatagcgggggcggatccgggtctcagagtgggtcctccggttctgggtccaatggcgataacaataacggcagttcatctgggggaagctccagcgggagttcatctggggggtcttcgggggggagctcaggcggttcgtctggcaacagcggaggctcgcggggagattctggctctgaatcatcttggggaagttcaacaggttcatctagcggcaatcatggtggcagcgggggcggtaacggccacaaacctgggtgcgaaaagccaggcaatgaggctaggggctccggggaaagcggaattcaaggatttcgcggacagggcgtgagcagtaatatgaggaacagcgagacctctccaggcatgttcaacttcgataccttttggaaaaactttaagtcaaaactgggctttatcaattgggacgccattaacaaatag

SEQ ID NO: 72593 - DNA, 1161 bp, Artificial Sequence
  derived and/or modified sequence
atgaagttccaagggccactagcctgccttttgctggcgctgtgtctgggatctggggaggctggaccccttcagtccggggaagaatccactggcactaacatcggagaagcgctcggccatggcctgggcgatgcgctgtccgagggtgtaggcaaagctataggcaaagaagcaggaggagcagcaggctctaaagtcagcgaagcacttggacagggtactagggaagcagttgggactggcgtgcggcaagtgcccggattcggggtggcagatgccctgggtaatcgcgtcggagaggccgcgcacgctctggggaataccgggcatgagatcggaagacaagcagaagatgtcatcagacacggcgccgatgccgtccgtgggagctggcagggcgtgcccgggcacaacggcgcttgggaaacttcaggaggccatggcatatttggttctcagggcggacttggtggtcagggacagggaaatccaggcgggctggggacgccgtgggtgcacgggtaccccgggaacagtgcaggtagttttgggatgaatccccagggagcaccctgggggcagggaggcaacggaggacccccaaacttcggtaccaacacacagggggcagtggcacagccagggtacggctccgtgcgcgccagcaaccagaacgaagggtgtaccaacccccccccctctggttcaggaggcggcagctcgaattctggcggaggatcagggtctcagtctgggtcttctgggagcggctccaatggcgataataacaacgggtctagcagcggtggttccagctccgggagctcttctggcggcagttcaggcggttctagcggaggctcctctggaaattctggcggatcccgaggtgattcggggagcgaatcatcttggggctcttcaactggcagcagtagtggaaaccatggtggctctggaggcggaaacgggcataaaccgggctgtgaaaagccaggcaatgaagccagaggaagcggcgaaagcgggattcagaattccgagaccagtccaggcatgtttaactttgacactttttggaaaaatttcaagagcaaactgggatttattaactgggacgccattaacaaagaccaacggagcagcaggatcccttag

SEQ ID NO: 72594 - DNA, 1197 bp, Artificial Sequence
  derived and/or modified sequence
atgaaattccagggccctcttgcctgtctcctcttggcactctgtctggggagcggggaggctggacccctccaatcaggagaggagtccactggaacaaatattggcgaggcattgggacacgggttaggagacgccctctctgagggagtcgggaaagctatagggaaggaggcagggggagctgcgggtagcaaagtgtctgaggcccttggtcagggaactcgcgaagctgtcggcacaggagtgcgccaagtgccaggttttggcgtagcagacgcgctaggtaatagagtcggagaggctgcccatgccctagggaacaccggacacgagattggacggcaagcagaagacgtcatcagacacggagcagacgctgtaaggggtagctggcaaggggttccaggacacaatggggcatgggagacatctgggggacacgggattttcggttcccagggaggactgggcgggcaaggacaaggtaacccagggggccttggaacaccttgggttcacgggtacccaggtaattcagctggaagtttcggaatgaacccgcagggagctccttggggccagggaggaaacgggggaccaccaaatttcggaaccaatacccaaggggccgttgcgcagcccgggtacggtagtgtgcgcgcaagtaatcaaaacgaaggatgcaccaatcctccccccagcggatccggtggtggatctagcaattcaggcggtggtagtgggagccagagcggatcctcgggatctggcagtaacggggacaataacaatggatctagctccggggggtcctcaagtggctcgagctcagggggatcatccggcgggtcatctggtggttcttccggcaactccggcgggtcaaggggagacagtggctccgaatcctcctggggatcatctacaggctcaagtagcggcaatcacggtggatcaggcggtgggaacggacacaaacctggatgcgaaaaacccggaaacgaagctcgcgggagcggcgagtctggcatccagggtttccgcgggcaaggagtgtccagtaatatgcggaatagcgaaaccagtcctggtatgtttaattttgatactttttggaagaacttcaagagtaagttgggctttattaattgggacgccattaataaggatcagcggtccagtaggatcccatag

SEQ ID NO: 72595 - DNA, 1251 bp, Artificial Sequence
  derived and/or modified sequence
atgaaattccaaggccctcttgcatgcctgttgcttgcactctgcttgggcagcggtgaagcaggacccttacagagtggagaagaatcaacgggcactaacataggcgaagccctagggcacgggctaggggatgccctgtcagaaggggttggaaaggccatcgggaaagaggcagggggcgcagctggaagtaaggtgtctgaagcacttggtcaggggacaagggaggccgtggggaccggagtgcggcaggtgccgggttttggcgtcgctgatgcactgggtaatagggtgggcgaggcagcccatgcgctaggaaatacaggccacgaaatcggaaggcaggccgaggatgtgattcggcacggagctgatgcagtgagaggaagttggcagggtgtgcctggacacaatggcgcctgggagacaagcgggggtcatggcatttttgggagtcagggtgggcttggaggccaggggcagggcaaccccggaggacttggcactccttgggtgcacggctaccctggaaatagtgctggtagttttggaatgaatccgcagggtgccccatggggtcagggaggaaatgggggaccccccaattttggaacaaacacccagggagcagtcgcccagccaggctacggaagtgtgcgtgcctctaatcaaaatgagggctgcacaaatccaccccctagcgggtcggggggggggtctagcaactctggggggggctccggatcccagtcaggcagctctgggagtggctcaaatggtgataataacaacggaagctcgtctgggggaagctcttctgggagctcgtcggggggctctagtggcggcagcagcggcgggagttctgggaatagtggtggcagccgaggcgacagcgggagcgaatcttcttggggtagcagtaccggcagcagcagcggaaaccatggtggcagcggcggaggaaacggtcataaacccggctgtgaaaaacccggcaatgaggccaggggctcgggagagtccggaatacaggggttccggggacagggcgtgtcctcaaacatgcgggaaatttctaaagaggggaatcgcctgttaggcgggtctggagataattaccggaactccgagacgagtcctggaatgttcaattttgatactttctggaaaaatttcaaatctaaactgggcttcattaactgggacgcgataaataaggaccaaagaagtagccgtatcccctag

SEQ ID NO: 72596 - DNA, 1311 bp, Artificial Sequence
  derived and/or modified sequence
atgaagtttcagggacccctggcatgtttactgttagccctctgtttgggctctggcgaggcgggccccctacagtctggcgaagaatccactggaacaaacatcggggaggcccttggacacggattaggcgacgccttgtcagagggagtcggaaaggcgattgggaaggaggcgggcggcgctgctggatcaaaagtcagcgaggccctgggacagggaaccagagaagcggtcgggaccggagttagacaggtgcctggattcggtgttgccgatgcccttgggaacagggtcggcgaggctgcccacgccctgggcaacacaggccatgaaatcggaaggcaagcagaagacgtaatacgccacggtgccgacgcagtgagaggatcatggcagggagtgcctggtcataacggtgcctgggagacttccggtgggcatggtatttttggaagtcagggaggcctcggaggccagggacagggaaacccagggggtctcggtaccccctgggtgcacggctaccccgggaattctgccgggagttttggtatgaaccctcaaggcgctccttgggggcaaggcggaaacgggggacctccaaatttcgggacaaatactcaaggagccgttgcacagccaggctacggatctgtaagagcttctaatcagaacgaagggtgcactaatccaccaccaagcgggtctggcggtgggtcatctaatagcgggggtggctccgggagtcagagcggcagtagtgggtctgggtcgaacggggacaataacaacggtagctcctccggaggctcctcgagcggcagctcaagcggaggcagtagcggcgggtccagcggcgggtcgagcggaaatagcggcggaagtagaggagatagcggatcagagagtagctgggggagcagcacaggcagtagctccgggaaccacggcgggagtggcgggggaaatggccacaagcctggatgcgagaagccagggaacgaggccaggggatccggagagtctggcatccaaggcttccgcggccaaggggtgtcatcgaatatgagggagatctcaaaggaagggaacagactgctaggcggatccggggacaactatagggggcagggaagctcttggggatctggagggggcgatgccgtgggcggcgttaatactgtgaattccgaaacatcacctggcatgtttaactttgacacgttttggaaaaacttcaaatctaagctgggcttcatcaattgggatgcgattaataaggatcagcggagctcaagaataccttag

SEQ ID NO: 72597 - DNA, 1110 bp, Artificial Sequence
  derived and/or modified sequence
atgaaattccagggacccttagcttgcctacttctggccttgtgcttaggatccggagaagccggccctcttcagtctggggaagagagtactggaacaaacatcggggaagcactggggcatggcctgggagacgccttatctgagggagtcggaaaagcaatcggcaaggaggctggtggggcagcgggctccaaggtgagcgaagcacttggtcaggggacacgcgaagccgtcggcactggagtacggcaggtacctggattcggtgtcgcggacgcactgggcaaccgcgtcggggaggcggcacacgcgctgggcaatacgggacacgaaattgggaggcaggctgaagacgtcattaggcacggcgctgacgcagtgcggggcagctggcagggtgtaccaggacacaatggcgcgtgggagaccagcggcggacacggcatttttggaagccaaggcggtctgggtgggcagggccagggcaaccctgggggactggggacaccttgggtgcacggctatccagggaacagtgccggatcttttggtatgaatccgcagggggccccttggggacagggtggaaacggaggtccacctaattttggtaccaatactcagggggctgtcgcacaaccggggtatggctcggttcgggcttcaaatcagaacgaaggctgtacaaatcccccccccagcgggtccggtgggggatccagcaattctggcggcggtagcggctcacagagcgggtctagcggttccgggtctaacggcgacaataacaatgggagttcgtcagggggaagcagcagtggcagctcctcaggaggatcttctggcggaagtagcggcggcagcagtggcaacagtggagggagtagaggcgacagcggcagcgagtcttcatgggggagttcaaccgggtccagttcgggcaatcatggaggcagcggaggcggcaatggacataaaccgggcaattcagagacctctcctggaatgttcaactttgatactttttggaagaacttcaaatcaaagctggggttcatcaactgggatgctataaacaaagaccaaagatctagcaggatcccgtag

SEQ ID NO: 72598 - DNA, 1548 bp, Artificial Sequence
  derived and/or modified sequence
gtggactctgagaagcccaggcagttgaggacaggagagagaaggctgcagacccagagggagggaggacagggagtcggaaggaggaggacagaggagggcacagagacgcagagcaagggcggcaaggaggagaccctggtgggaggaagacactctggagagagagggggctgggcagagatgaagttccaggggcccctggcctgcctcctgctggccctctgcctgggcagtggggaggctggccccctgcagagcggagaggaaagcactgggacaaatattggggaggcccttggacatggcctgggagacgccctgagcgaaggggtgggaaaggccattggcaaagaggccggaggggcagctggctctaaagtcagtgaggcccttggccaagggaccagagaagcagttggcactggagtcaggcaggttccaggctttggcgtagcagatgctttgggcaacagggtcggggaagcagcccatgctctgggaaacactgggcacgagattggcagacaggcagaagatgtcattcgacacggagcagatgctgtccgcggctcctggcagggggtgcctggccacaatggtgcttgggaaacttctggaggccatggcatctttggctctcaaggtggccttggaggccagggccagggcaatcctggaggtctggggactccgtgggtccacggataccccggaaactcagcaggcagctttggaatgaatcctcagggagctccctggggtcaaggaggcaatggagggccaccaaactttgggaccaacactcagggagctgtggcccagcctggctatggttcagtgagagccagcaaccagaatgaagggtgcacgaatcccccaccatctggctcaggtggaggctccagcaactctgggggaggcagcggctcacagtcgggcagcagtggcagtggcagcaatggtgacaacaacaatggcagcagcagtggtggcagcagcagtggcagcagcagtggcggcagcagtggcggcagcagtggtggcagcagtggcaacagtggtggcagcagaggtgacagcggcagtgagtcctcctggggatccagcaccggctcctcctccggcaaccacggtgggagcggcggaggaaatggacataaacccgggtgtgaaaagccagggaatgaagcccgcgggagcggggaatctgggattcagggcttcagaggacagggagtttccagcaacatgagggaaataagcaaagagggcaatcgcctccttggaggctctggagacaattataggaactctgagacgtctcctgggatgtttaactttgacactttctggaagaattttaaatccaagctgggtttcatcaactgggatgccataaacaaggaccagagaagctctcgcatcccgtgacctccagacaaggagccaccagattggatgggagcccccacactccctccttaaaacaccaccctctcatcactaatctcagcccttgcccttgaaataaaccttagctgcccc

SEQ ID NO: 72599 - DNA, 1611 bp, Artificial Sequence
  derived and/or modified sequence
gtggactctgagaagcccaggcagttgaggacaggagagagaaggctgcagacccagagggagggaggacagggagtcggaaggaggaggacagaggagggcacagagacgcagagcaagggcggcaaggaggagaccctggtgggaggaagacactctggagagagagggggctgggcagagatgaagttccaggggcccctggcctgcctcctgctggccctctgcctgggcagtggggaggctggccccctgcagagcggagaggaaagcactgggacaaatattggggaggcccttggacatggcctgggagacgccctgagcgaaggggtgggaaaggccattggcaaagaggccggaggggcagctggctctaaagtcagtgaggcccttggccaagggaccagagaagcagttggcactggagtcaggcaggttccaggctttggcgtagcagatgctttgggcaacagggtcggggaagcagcccatgctctgggaaacactgggcacgagattggcagacaggcagaagatgtcattcgacacggagcagatgctgtccgcggctcctggcagggggtgcctggccacaatggtgcttgggaaacttctggaggccatggcatctttggctctcaaggtggccttggaggccagggccagggcaatcctggaggtctggggactccgtgggtccacggataccccggaaactcagcaggcagctttggaatgaatcctcagggagctccctggggtcaaggaggcaatggagggccaccaaactttgggaccaacactcagggagctgtggcccagcctggctatggttcagtgagagccagcaaccagaatgaagggtgcacgaatcccccaccatctggctcaggtggaggctccagcaactctgggggaggcagcggctcacagtcgggcagcagtggcagtggcagcaatggtgacaacaacaatggcagcagcagtggtggcagcagcagtggcagcagcagtggcggcagcagtggcggcagcagtggtggcagcagtggcaacagtggtggcagcagaggtgacagcggcagtgagtcctcctggggatccagcaccggctcctcctccggcaaccacggtgggagcggcggaggaaatggacataaacccgggtgtgaaaagccagggaatgaagcccgcgggagcggggaatctgggattcagggcttcagaggacagggagtttccagcaacatgagggaaataagcaaagagggcaatcgcctccttggaggctctggagacaattatagggggcaagggtcgagctggggcagtggaggaggtgacgctgttggtggagtcaatactgtgaactctgagacgtctcctgggatgtttaactttgacactttctggaagaattttaaatccaagctgggtttcatcaactgggatgccataaacaaggaccagagaagctctcgcatcccgtgacctccagacaaggagccaccagattggatgggagcccccacactccctccttaaaacaccaccctctcatcactaatctcagcccttgcccttgaaataaaccttagctgccccaca

SEQ ID NO: 72600 - DNA, 1111 bp, Artificial Sequence
  derived and/or modified sequence
atgaagttccaggggcccctggcctgcctcctgctggccctctgcctgggcagtggggaggctggccccctgcagagcggagaggaaagcactgggacaaatattggggaggcccttggacatggcctgggagacgccctgagcgaaggggtgggaaaggccattggcaaagaggccggaggggcagctggctctaaagtcagtgaggcccttggccaagggaccagagaagcagttggcactggagtcaggcaggttccaggctttggcgtagcagatgctttgggcaacagggtcggggaagcagcccatgctctgggaaacactgggcacgagattggcagacaggcagaagatgtcattcgacacggagcagatgctgtccgcggctcctggcagggggtgcctggccacaatggtgcttgggaaacttctggaggccatggcatctttggctctcaaggtggccttggaggccagggccagggcaatcctggaggtctggggactccgtgggtccacggataccccggaaactcagcaggcagctttggaatgaatcctcagggagctccctggggtcaaggaggcaatggagggccaccaaactttgggaccaacactcagggagctgtggcccagcctggctatggttcagtgagagccagcaaccagaatgaagggtgcacgaatcccccaccatctggctcaggtggaggctccagcaactctgggggaggcagcggctcacagtcgggcagcagtggcagtggcagcaatggtgacaacaacaatggcagcagcagtggtggcagcagcagtggcagcagcagtggcggcagcagtggcggcagcagtggtggcagcagtggcaacagtggtggcagcagaggtgacagcggcagtgagtcctcctggggatccagcaccggctcctcctccggcaaccacggtgggagcggcggaggaaatggacataaacccgggaactctgagacgtctcctgggatgtttaactttgacactttctggaagaattttaaatccaagctgggtttcatcaactgggatgccataaacaaggaccagagaagctctcgcatcccgtgac

SEQ ID NO: 72601 - DNA, 1173 bp, Artificial Sequence
  derived and/or modified sequence
atgaagttccagggaccattggcttgtttattgctggccctgtgtctgggtagcggggaagcgggaccacttcaaagtggcgaagaatctacagggacaaatataggcgaggccttaggccacggtctcggagacgctctcagtgagggggtgggaaaagccatcggtaaggaggccggaggagcggctggatcaaaagtgagcgaggcactcggacaggggaccagagaagctgtcggaactggggtgaggcaggtgcctgggtttggcgtcgcggacgcgctggggaatagggtgggcgaggctgcccacgctttggggaatacaggacatgagataggcaggcaggctgaagatgttattcgacacggcgcagatgctgtgcgaggttcatggcagggagtcccaggacacaatggcgcttgggaaaccagcgggggacatggcatttttggctcacagggcggtttagggggacagggacaagggaatccgggaggacttggcaccccatgggtgcatggctatcccggtaactctgctggaagcttcggcatgaatccacaaggagctccgtggggacaaggaggcaacgggggaccacccaattttggaaccaacacacaaggcgccgtggcacaaccaggttacgggtccgtcagagcttcaaaccagaacgaagggtgcaccaacccaccaccgtctggtagcggcgggggttcatccaactcaggcggtggaagcggtagtcaatccggctcaagcggtagcggatctaatggagataacaataatggctcatcaagcgggggttcatcgtccggatcttcttcagggggatcctctggaggctcctccggcgggtctagtgggaatagcggaggtagcaggggagactccggctctgaatcatcttggggaagttcaacaggttcatctagcggcaatcatggtggcagcgggggcggtaacggccacaaacctgggtgcgaaaagccaggcaatgaggctaggggctccggggaaagcggaattcaaggatttcgcggacagggcgtgagcagtaatatgaggaacagcgagacctctccaggcatgttcaacttcgataccttttggaaaaactttaagtcaaaactgggctttatcaattgggacgccattaacaaatag

SEQ ID NO: 72602 - DNA, 1161 bp, Artificial Sequence
  derived and/or modified sequence
atgaagtttcaaggaccactggcatgcttactgttagctctgtgtctgggctcaggtgaagctggacctctacagagcggcgaggagagtacaggaactaatattggggaagccttgggacacggtctgggcgacgccctttccgagggggtggggaaagccatcgggaaggaagcagggggggccgctggcagcaaagtgtctgaagcccttgggcaaggaaccagagaagctgtgggcaccggagtgagacaggtgcccggatttggcgtggccgatgcactgggaaatcgggtgggcgaagccgcacatgctttagggaacaccggccacgagattggtcggcaagccgaagacgtcataagacatggggctgacgcggtgagaggttcctggcagggggtccctggacacaacggggcttgggaaacttcaggaggacacggcatttttggctcccagggaggattaggtggtcagggacaagggaacccaggcgggctcggaacaccgtgggtgcacggatacccaggtaattcagccgggtcttttggaatgaaccctcagggggcgccatggggccaggggggaaatggcgggccccccaacttcgggacgaacacccaaggagcggtagcacagcccggctatgggagtgtgcgtgcatctaatcagaacgaaggatgtacaaatcccccaccatctgggtctgggggcggttctagcaattcaggcggcggcagtgggagtcaaagtggctcatcaggatcagggtccaatggcgataacaacaatggtagttcatcaggcgggtcatcctctggctctagtagcggcgggagcagcgggggatcatctggtggcagcagtggcaactcgggaggatccaggggagactccggatccgaaagttcctggggctcctctactggctcatccagcggaaatcacggaggaagcggcggcggcaatggacacaagcctggctgtgagaaacctggcaatgaagcacgcggaagtggcgagtctggcatacaaaactctgaaacatctccagggatgtttaactttgataccttttggaagaattttaagtctaaactggggttcattaactgggatgcaatcaataaggaccagcgtagttcccgaatcccgtag

SEQ ID NO: 72603 - DNA, 1197 bp, Artificial Sequence
  derived and/or modified sequence
atgaagtttcaggggcccctggcatgtctcctgctcgctctttgtctgggatcaggagaggcggggccactgcagagcggtgaggagagcacaggaacaaacatcggtgaggcactggggcacggtcttggagacgcattgtccgagggggtgggaaaggctattggtaaagaggccggaggagctgccggaagcaaagtgtcagaagcgttggggcaggggactagggaagcagtcgggacaggcgtgagacaagtccctggctttggggtggccgacgcactggggaatagggtgggcgaggctgcccatgccctagggaacaccggacacgagattggacggcaagcagaagacgtcatcagacacggagcagacgctgtaaggggtagctggcaaggggttccaggacacaatggggcatgggagacatctgggggacacgggattttcggttcccagggaggactgggcgggcaaggacaaggtaacccagggggccttggaacaccttgggttcacgggtacccaggtaattcagctggaagtttcggaatgaacccgcagggagctccttggggccagggaggaaacgggggaccaccaaatttcggaaccaatacccaaggggccgttgcgcagcccgggtacggtagtgtgcgcgcaagtaatcaaaacgaaggatgcaccaatcctccccccagcggatccggtggtggatctagcaattcaggcggtggtagtgggagccagagcggatcctcgggatctggcagtaacggggacaataacaatggatctagctccggggggtcctcaagtggctcgagctcagggggatcatccggcgggtcatctggtggttcttccggcaactccggcgggtcaaggggagacagtggctccgagagtagctggggtagctccacgggctctagctctggtaaccacggggggagtggtggaggaaacggccataagcctgggtgcgagaagcctggcaatgaagccagaggtagcggagagagtggcatacagggatttagaggacagggggtaagcagtaatatgcgtaattcagagacctcacccgggatgtttaattttgacactttttggaaaaacttcaaatctaagcttggtttcattaactgggatgcaattaacaaagatcagcgatcatctagaatcccctag

SEQ ID NO: 72604 - DNA, 1251 bp, Artificial Sequence
  derived and/or modified sequence
atgaagtttcagggtccactggcctgcctgttgctcgcattatgcctggggagcggtgaggctggaccactccaaagcggcgaggaaagcacaggaaccaacattggcgaggccctgggacacggactgggggatgcattaagtgaaggggtgggaaaggcaattggcaaagaagcagggggtgccgcaggttccaaggtgtcagaggctctgggacaaggaacccgcgaggcggttgggactggagttcgtcaggtgccaggttttggtgtagctgatgcgctgggaaaccgggttggtgaggcagcccatgcgctaggaaatacaggccacgaaatcggaaggcaggccgaggatgtgattcggcacggagctgatgcagtgagaggaagttggcagggtgtgcctggacacaatggcgcctgggagacaagcgggggtcatggcatttttgggagtcagggtgggcttggaggccaggggcagggcaaccccggaggacttggcactccttgggtgcacggctaccctggaaatagtgctggtagttttggaatgaatccgcagggtgccccatggggtcagggaggaaatgggggacctcccaactttggaacaaatacacagggcgcggtcgctcagcccggttatggtagtgtccgcgccagcaaccaaaatgaggggtgtacaaacccgcctccttccggatctggaggaggctctagcaactcaggaggcggttcagggtcccaatccggttcttcaggctcaggctctaatggcgacaacaataacggtagttctagcggcggctccagtagcggtagctctagtggcgggtcaagtggcggatcttccggcgggtctagcggaaactccggcggttcacgtggtgattccggatctgagtcaagttggggcagcagcactggtagcagcagcgggaaccacggggggagtggcggcggtaatgggcataaaccagggtgtgagaaaccaggcaatgaagcacgtggttcaggggagtccggtattcagggatttcgaggacagggtgtgagcagcaacatgcgtgaaatcagcaaagaagggaaccggctgctgggcggaagtggtgacaattatcgcaattccgaaacctccccaggcatgtttaactttgataccttctggaaaaattttaaaagtaaactgggattcattaactgggacgcaatcaacaaggatcagagatctagccgcataccttag

SEQ ID NO: 72605 - DNA, 1311 bp, Artificial Sequence
  derived and/or modified sequence
atgaagttccagggccctttagcttgtctcctcctagcactttgcctggggagtggggaggccgggcccctccagtccggcgaggagagcactggcacaaacattggcgaagccttgggccatggtttaggcgatgctttgagtgagggagtgggcaaggcaattggcaaggaagctgggggggccgccggatctaaagtgagcgaagcactgggccaaggtacccgagaagcagttggaacaggtgtgcgccaagttcccgggtttggggttgcagacgctttaggtaacagagtaggcgaagctgcacatgccctcggtaatacgggccacgagatcggccggcaggcagaagacgtcattagacatggggcagacgctgtgagaggaagttggcagggtgtgccaggacacaatggagcgtgggaaacgtcaggcggccacggcattttcggatcacaaggaggcctcggtggacagggtcagggcaacccaggaggcctaggcacgccgtgggtgcatggctaccccggaaactccgcaggttcttttggtatgaatccacaaggtgccccttggggtcagggggggaacggcggcccgccaaacttcggcacaaacacccagggtgcagtagctcagcctggatacggctccgtgcgggcatctaatcagaatgaaggctgcacaaatcctcccccgtctggttcaggtggcggatcaagcaattcaggaggcggatcaggctcccagtcgggtagtagtgggtcgggcagtaatggggataataataacggctctagctccgggggttctagttccggatcaagctcaggaggtagttcaggaggttcatccggggggtctagcggtaatagcggcggctccaggggcgattctggaagcgagtccagttgggggtctagcaccggatcatctagtggcaatcatggaggctctggtggggggaatggacacaaacctggatgcgaaaagccaggaaatgaagcaaggggttctggagaaagtggaatacagggttttagagggcagggagtgtcgtccaatatgagggaaatttccaaggagggtaatcgtctgctgggcggcagtggcgataactacagaggacagggttcctcttgggggagtggaggaggagatgcagtgggcggcgtcaacaccgtgaattcagagaccagccccgggatgtttaattttgacaccttctggaaaaactttaagtcaaaacttggatttatcaattgggatgctattaacaaagatcagcgatcatctagaattccttag

SEQ ID NO: 72606 - DNA, 1110 bp, Artificial Sequence
  derived and/or modified sequence
atgaagtttcaggggccactggcatgtctgctgcttgctctgtgcctcggatctggggaagctggacctttacaatccggggaagaatctacgggaacaaatataggagaggcactgggccacggattaggcgacgcattaagcgagggtgtggggaaggctattggtaaggaggcggggggagctgcaggaagtaaggtgagcgaagccctgggtcaggggaccagggaagctgtcggaaccggcgtccgacaggtgcccggatttggagtggccgatgccctcggcaatcgtgtgggagaggctgcgcatgctctcggcaatacggggcatgaaataggtaggcaggcagaggatgtgattaggcatggggctgatgctgttcgggggtcctggcagggagtgcctggccacaacggcgcctgggagacttcaggaggtcatggtatttttggctcccaaggtggcctaggcgggcaaggacaggggaatccaggcggactcggtaccccatgggtgcacggctatccagggaatagcgccgggagctttggaatgaatccacagggtgctccctggggacaaggtggtaacggtggcccacccaacttcggtactaacactcagggagcggtggcccaacctggatacggttcagttagagcctcaaatcaaaatgagggctgtaccaatccccctccaagcggatctggcggcggatcgtctaattcagggggaggatctggctctcagtctggttcaagtggctccggttctaatggggacaataacaacggtagcagcagtggtgggtccagtagcgggagtagtagcggcggatctagcggtgggagcagtggtggctcttctggtaactcaggaggcagtcgtggtgattcgggcagtgaaagctcctggggatcaagtacaggaagtagcagtggcaaccacggtggctcaggaggggggaatggccataaacctgggaacagcgagacatcaccaggcatgtttaatttcgatacattttggaagaatttcaaatccaaactcggtttcattaactgggatgctattaacaaggaccagcgaagttccagaatcccttag

SEQ ID NO: 72607 - DNA, 1173 bp, Artificial Sequence
  derived and/or modified sequence
atgaagttccagggccccctggcctgcctgctgctggccctgtgcctgggcagcggcgaggccggccccctgcagagcggcgaggagagcaccggcaccaacatcggcgaggccctgggccacggcctgggcgacgccctgagcgagggcgtgggcaaggccatcggcaaggaggccggcggcgccgccggcagcaaggtgagcgaggccctgggccagggcaccagagaggccgtgggcaccggcgtgagacaggtgcccggcttcggcgtggccgacgccctgggcaacagagtgggcgaggccgcccacgccctgggcaacaccggccacgagatcggcagacaggccgaggacgtgatcagacacggcgccgacgccgtgagaggcagctggcagggcgtgcccggccacaacggcgcctgggagaccagcggcggccacggcatcttcggcagccagggcggcctgggcggccagggccagggcaaccccggcggcctgggcaccccctgggtgcacggctaccccggcaacagcgccggcagcttcggcatgaacccccagggcgccccctggggccagggcggcaacggcggcccccccaacttcggcaccaacacccagggcgccgtggcccagcccggctacggcagcgtgagagccagcaaccagaacgagggctgcaccaaccccccccccagcggcagcggcggcggcagcagcaacagcggcggcggcagcggcagccagagcggcagcagcggcagcggcagcaacggcgacaacaacaacggcagcagcagcggcggcagcagcagcggcagcagcagcggcggcagcagcggcggcagcagcggcggcagcagcggcaacagcggcggcagcagaggcgacagcggcagcgagagcagctggggcagcagcaccggcagcagcagcggcaaccacggcggcagcggcggcggcaacggccacaagcccggctgcgagaagcccggcaacgaggccagaggcagcggcgagagcggcatccagggcttcagaggccagggcgtgagcagcaacatgagaaacagcgagaccagccccggcatgttcaacttcgacaccttctggaagaacttcaagagcaagctgggcttcatcaactgggacgccatcaacaagtag

SEQ ID NO: 72608 - DNA, 1161 bp, Artificial Sequence
  derived and/or modified sequence
atgaagttccagggccccctggcctgcctgctgctggccctgtgcctgggcagcggcgaggccggccccctgcagagcggcgaggagagcaccggcaccaacatcggcgaggccctgggccacggcctgggcgacgccctgagcgagggcgtgggcaaggccatcggcaaggaggccggcggcgccgccggcagcaaggtgagcgaggccctgggccagggcaccagagaggccgtgggcaccggcgtgagacaggtgcccggcttcggcgtggccgacgccctgggcaacagagtgggcgaggccgcccacgccctgggcaacaccggccacgagatcggcagacaggccgaggacgtgatcagacacggcgccgacgccgtgagaggcagctggcagggcgtgcccggccacaacggcgcctgggagaccagcggcggccacggcatcttcggcagccagggcggcctgggcggccagggccagggcaaccccggcggcctgggcaccccctgggtgcacggctaccccggcaacagcgccggcagcttcggcatgaacccccagggcgccccctggggccagggcggcaacggcggcccccccaacttcggcaccaacacccagggcgccgtggcccagcccggctacggcagcgtgagagccagcaaccagaacgagggctgcaccaaccccccccccagcggcagcggcggcggcagcagcaacagcggcggcggcagcggcagccagagcggcagcagcggcagcggcagcaacggcgacaacaacaacggcagcagcagcggcggcagcagcagcggcagcagcagcggcggcagcagcggcggcagcagcggcggcagcagcggcaacagcggcggcagcagaggcgacagcggcagcgagagcagctggggcagcagcaccggcagcagcagcggcaaccacggcggcagcggcggcggcaacggccacaagcccggctgcgagaagcccggcaacgaggccagaggcagcggcgagagcggcatccagaacagcgagaccagccccggcatgttcaacttcgacaccttctggaagaacttcaagagcaagctgggcttcatcaactgggacgccatcaacaaggaccagagaagcagcagaatcccctag

SEQ ID NO: 72609 - DNA, 1197 bp, Artificial Sequence
  derived and/or modified sequence
atgaagttccagggccccctggcctgcctgctgctggccctgtgcctgggcagcggcgaggccggccccctgcagagcggcgaggagagcaccggcaccaacatcggcgaggccctgggccacggcctgggcgacgccctgagcgagggcgtgggcaaggccatcggcaaggaggccggcggcgccgccggcagcaaggtgagcgaggccctgggccagggcaccagagaggccgtgggcaccggcgtgagacaggtgcccggcttcggcgtggccgacgccctgggcaacagagtgggcgaggccgcccacgccctgggcaacaccggccacgagatcggcagacaggccgaggacgtgatcagacacggcgccgacgccgtgagaggcagctggcagggcgtgcccggccacaacggcgcctgggagaccagcggcggccacggcatcttcggcagccagggcggcctgggcggccagggccagggcaaccccggcggcctgggcaccccctgggtgcacggctaccccggcaacagcgccggcagcttcggcatgaacccccagggcgccccctggggccagggcggcaacggcggcccccccaacttcggcaccaacacccagggcgccgtggcccagcccggctacggcagcgtgagagccagcaaccagaacgagggctgcaccaaccccccccccagcggcagcggcggcggcagcagcaacagcggcggcggcagcggcagccagagcggcagcagcggcagcggcagcaacggcgacaacaacaacggcagcagcagcggcggcagcagcagcggcagcagcagcggcggcagcagcggcggcagcagcggcggcagcagcggcaacagcggcggcagcagaggcgacagcggcagcgagagcagctggggcagcagcaccggcagcagcagcggcaaccacggcggcagcggcggcggcaacggccacaagcccggctgcgagaagcccggcaacgaggccagaggcagcggcgagagcggcatccagggcttcagaggccagggcgtgagcagcaacatgagaaacagcgagaccagccccggcatgttcaacttcgacaccttctggaagaacttcaagagcaagctgggcttcatcaactgggacgccatcaacaaggaccagagaagcagcagaatcccctag

SEQ ID NO: 72610 - DNA, 1251 bp, Artificial Sequence
  derived and/or modified sequence
atgaagttccagggccccctggcctgcctgctgctggccctgtgcctgggcagcggcgaggccggccccctgcagagcggcgaggagagcaccggcaccaacatcggcgaggccctgggccacggcctgggcgacgccctgagcgagggcgtgggcaaggccatcggcaaggaggccggcggcgccgccggcagcaaggtgagcgaggccctgggccagggcaccagagaggccgtgggcaccggcgtgagacaggtgcccggcttcggcgtggccgacgccctgggcaacagagtgggcgaggccgcccacgccctgggcaacaccggccacgagatcggcagacaggccgaggacgtgatcagacacggcgccgacgccgtgagaggcagctggcagggcgtgcccggccacaacggcgcctgggagaccagcggcggccacggcatcttcggcagccagggcggcctgggcggccagggccagggcaaccccggcggcctgggcaccccctgggtgcacggctaccccggcaacagcgccggcagcttcggcatgaacccccagggcgccccctggggccagggcggcaacggcggcccccccaacttcggcaccaacacccagggcgccgtggcccagcccggctacggcagcgtgagagccagcaaccagaacgagggctgcaccaaccccccccccagcggcagcggcggcggcagcagcaacagcggcggcggcagcggcagccagagcggcagcagcggcagcggcagcaacggcgacaacaacaacggcagcagcagcggcggcagcagcagcggcagcagcagcggcggcagcagcggcggcagcagcggcggcagcagcggcaacagcggcggcagcagaggcgacagcggcagcgagagcagctggggcagcagcaccggcagcagcagcggcaaccacggcggcagcggcggcggcaacggccacaagcccggctgcgagaagcccggcaacgaggccagaggcagcggcgagagcggcatccagggcttcagaggccagggcgtgagcagcaacatgagagagatcagcaaggagggcaacagactgctgggcggcagcggcgacaactacagaaacagcgagaccagccccggcatgttcaacttcgacaccttctggaagaacttcaagagcaagctgggcttcatcaactgggacgccatcaacaaggaccagagaagcagcagaatcccctag

SEQ ID NO: 72611 - DNA, 1311 bp, Artificial Sequence
  derived and/or modified sequence
atgaagttccagggccccctggcctgcctgctgctggccctgtgcctgggcagcggcgaggccggccccctgcagagcggcgaggagagcaccggcaccaacatcggcgaggccctgggccacggcctgggcgacgccctgagcgagggcgtgggcaaggccatcggcaaggaggccggcggcgccgccggcagcaaggtgagcgaggccctgggccagggcaccagagaggccgtgggcaccggcgtgagacaggtgcccggcttcggcgtggccgacgccctgggcaacagagtgggcgaggccgcccacgccctgggcaacaccggccacgagatcggcagacaggccgaggacgtgatcagacacggcgccgacgccgtgagaggcagctggcagggcgtgcccggccacaacggcgcctgggagaccagcggcggccacggcatcttcggcagccagggcggcctgggcggccagggccagggcaaccccggcggcctgggcaccccctgggtgcacggctaccccggcaacagcgccggcagcttcggcatgaacccccagggcgccccctggggccagggcggcaacggcggcccccccaacttcggcaccaacacccagggcgccgtggcccagcccggctacggcagcgtgagagccagcaaccagaacgagggctgcaccaaccccccccccagcggcagcggcggcggcagcagcaacagcggcggcggcagcggcagccagagcggcagcagcggcagcggcagcaacggcgacaacaacaacggcagcagcagcggcggcagcagcagcggcagcagcagcggcggcagcagcggcggcagcagcggcggcagcagcggcaacagcggcggcagcagaggcgacagcggcagcgagagcagctggggcagcagcaccggcagcagcagcggcaaccacggcggcagcggcggcggcaacggccacaagcccggctgcgagaagcccggcaacgaggccagaggcagcggcgagagcggcatccagggcttcagaggccagggcgtgagcagcaacatgagagagatcagcaaggagggcaacagactgctgggcggcagcggcgacaactacagaggccagggcagcagctggggcagcggcggcggcgacgccgtgggcggcgtgaacaccgtgaacagcgagaccagccccggcatgttcaacttcgacaccttctggaagaacttcaagagcaagctgggcttcatcaactgggacgccatcaacaaggaccagagaagcagcagaatcccctag

SEQ ID NO: 72612 - DNA, 1110 bp, Artificial Sequence
  derived and/or modified sequence
atgaagttccagggccccctggcctgcctgctgctggccctgtgcctgggcagcggcgaggccggccccctgcagagcggcgaggagagcaccggcaccaacatcggcgaggccctgggccacggcctgggcgacgccctgagcgagggcgtgggcaaggccatcggcaaggaggccggcggcgccgccggcagcaaggtgagcgaggccctgggccagggcaccagagaggccgtgggcaccggcgtgagacaggtgcccggcttcggcgtggccgacgccctgggcaacagagtgggcgaggccgcccacgccctgggcaacaccggccacgagatcggcagacaggccgaggacgtgatcagacacggcgccgacgccgtgagaggcagctggcagggcgtgcccggccacaacggcgcctgggagaccagcggcggccacggcatcttcggcagccagggcggcctgggcggccagggccagggcaaccccggcggcctgggcaccccctgggtgcacggctaccccggcaacagcgccggcagcttcggcatgaacccccagggcgccccctggggccagggcggcaacggcggcccccccaacttcggcaccaacacccagggcgccgtggcccagcccggctacggcagcgtgagagccagcaaccagaacgagggctgcaccaaccccccccccagcggcagcggcggcggcagcagcaacagcggcggcggcagcggcagccagagcggcagcagcggcagcggcagcaacggcgacaacaacaacggcagcagcagcggcggcagcagcagcggcagcagcagcggcggcagcagcggcggcagcagcggcggcagcagcggcaacagcggcggcagcagaggcgacagcggcagcgagagcagctggggcagcagcaccggcagcagcagcggcaaccacggcggcagcggcggcggcaacggccacaagcccggcaacagcgagaccagccccggcatgttcaacttcgacaccttctggaagaacttcaagagcaagctgggcttcatcaactgggacgccatcaacaaggaccagagaagcagcagaatcccctag

SEQ ID NO: 72613 - DNA, 1173 bp, Artificial Sequence
  derived and/or modified sequence
atgaaattccaggggccactggcatgcctgcttctggctctttgtcttgggtctggcgaagctggcccactccaaagcggggaggagtccaccggcaccaacatcggagaggcccttggtcacggcctgggtgatgcactgtcagagggcgtcggcaaggccatcggcaaggaagcaggcggagcagcgggaagtaaggtatccgaggccctgggccagggtacacgagaggccgtcggcaccggggtgcgtcaggttcccgggttcggcgtggccgacgcattgggcaaccgtgttggcgaggccgcccacgctctgggcaatactggccatgagatcggcaggcaggccgaagacgtgatccgccacggcgccgacgcagttcgcggcagctggcagggagttcctggacacaacggagcatgggaaacgagcggtgggcacggtatatttgggtcacagggcggacttggcggccagggacaaggcaatccagggggtctgggcactccttgggtgcatggctaccctggtaattctgcgggcagcttcggtatgaacccccaaggggccccgtggggacaaggggggaacggcggtcccccgaacttcggtacgaatactcagggcgccgttgcccaacccggctacggaagcgtgcgcgcctctaatcagaatgaaggttgtactaacccacccccctctggaagtggaggtggcagctctaactctggcggcggttcgggaagccaatctgggtcgagcggttcaggatctaacggagataataataacgggtcatcttccggggggtctagctccgggagcagttctggaggtagttccggaggttcttctggaggatcgtccggaaattcaggcggctcgcggggtgatagtggctcagagtcctcctggggctcctctacgggctcctcttcaggcaatcatggaggtagtgggggtggtaacggacacaagcctggctgcgagaaacctggcaatgaagccagggggtctggagagtctggaatccaaggattccgagggcagggcgtcagctctaatatgcgcaacagtgagacgtctccaggaatgtttaacttcgatactttctggaagaactttaagtcaaagctgggatttatcaactgggatgccatcaataaatag

SEQ ID NO: 72614 - DNA, 1161 bp, Artificial Sequence
  derived and/or modified sequence
atgaaatttcaaggcccattagcttgcctgctgttggctctgtgtcttggatcaggagaggccgggcccctgcaaagtggcgaggagagtacgggaactaatatcggcgaggctctgggccatgggcttggcgatgctctgagcgaaggcgttgggaaggcaatcggaaaagaggccggaggtgccgccgggagtaaagtctccgaagcccttggacagggcacgagagaagctgtcggcaccggcgtacgacaggtgccgggatttggagtcgcggacgctcttggcaatagagtcggggaggcagcccatgccctaggaaatacggggcacgagatcggacggcaggccgaggacgtgatcagacatggcgccgatgctgtgcgtggcagctggcagggcgtaccagggcataatggggcttgggaaaccagtggaggtcatggcattttcggtagccaaggagggctcgggggccagggccaaggtaaccctggggggctcggcacaccttgggtgcacgggtatcccggtaattcagcaggatctttcggtatgaatccgcagggagcaccttggggccaaggcggtaacggcggccctcccaacttcggcaccaatacccagggcgctgtagctcagcctggatatgggtccgtgcgcgcctctaaccaaaacgagggttgcaccaatccccccccgtccggctcaggaggtggcagctccaactcgggcggggggtcaggttctcagagcggatctagcggctccgggtctaatggagataacaacaacggcagtagttccggtggcagcagctcaggttcatcatccgggggctcatctggcggaagctccggcgggtcatccggcaattccgggggctcgcggggggattcagggagcgagtcttcctggggatcgagcactgggtccagctccggaaatcatggagggagcggcggcggtaatggtcacaaaccaggctgcgaaaagcctggcaacgaagcccgcggtagcggggaatccgggattcaaaattctgagacatcacctggcatgtttaacttcgacacattctggaagaacttcaagtctaaactggggttcattaactgggacgccatcaataaggaccagcggtcttcacgaatcccttag

SEQ ID NO: 72615 - DNA, 1197 bp, Artificial Sequence
  derived and/or modified sequence
atgaagttccagggcccattagcctgtctgttgctggcactgtgcctgggaagtggcgaggccggaccactgcagtctggggaagagtctacgggaaccaatatcggcgaagcactggggcatggtctcggagatgctttgagcgaaggagtaggcaaagctatcggtaaggaagccgggggcgccgcgggctccaaagtttcggaggcactcggacagggcacacgagaagccgtggggaccggagtgaggcaggtccctggattcggagtggccgatgcgctgggtaaccgcgtaggggaggctgcacatgcactcggcaataccgggcatgaaatcgggcgccaggctgaggacgtcatccggcatggagctgatgctgtgagaggttcgtggcaaggggtaccagggcacaatggcgcttgggagacgagtggaggtcacggcatcttcgggagtcagggaggcctaggaggtcagggacagggtaatcctggcggactgggaaccccctgggtgcacggctatccggggaactctgccggcagcttcggaatgaacccccaaggggccccctgggggcagggcggaaacgggggccctcccaattttggaacaaacacccagggcgccgtggctcagcctgggtatggatctgtgcgcgctagcaaccagaatgaaggctgcaccaatccccctccgagtggcagcggaggcggctcgtcaaattcaggaggaggatctgggtctcagtcaggctctagtggatcaggtagcaacggggacaacaataatggttctagctccggtggttctagttctggtagtagctctgggggctcttcaggcgggagctcaggggggtctagtgggaacagcggagggtcccgaggcgattccgggtccgagagctcttggggctccagcactgggagtagtagcggcaatcacggcggctctggcgggggaaacggacacaagcccggatgtgagaaacctggcaacgaggcacgcggttccggggagagcgggatacagggcttccgaggccagggagtcagcagtaatatgagaaatagcgaaacgagtcctggaatgtttaactttgacacattctggaagaatttcaaaagcaaactcggcttcattaactgggacgcgattaacaaggatcagcgcagctcaaggatcccatag

SEQ ID NO: 72616 - DNA, 1251 bp, Artificial Sequence
  derived and/or modified sequence
atgaagtttcagggccccctcgcttgtttgctgctggctttatgcctgggcagcggcgaagcaggaccccttcagtcgggtgaggagagcacaggaacaaatatcggggaagctctgggccacggtctgggggatgccctttcagagggggtaggcaaagccatcggaaaggaggccggcggggcagccggctctaaagtaagcgaggccctgggacaggggacccgggaagctgttgggactggagttcgacaggtgcccgggtttggggtggctgacgcccttggaaatcgtgttggggaggctgcccacgcactgggcaacactggccacgagatagggcggcaggcggaggacgtgatcaggcacggcgcagacgctgtaagagggtcatggcagggggttcccgggcataatggtgcgtgggaaacttccggggggcatggcatttttgggagccagggcggtctcggtggccagggccagggcaatcctggtggcctgggaacgccctgggtacacggatacccggggaattccgcaggaagctttggaatgaatccacaaggagccccttgggggcaggggggaaatggaggacctccaaatttcgggacaaacacacaaggagccgtggcccagcccggatacggttctgtgagggcatcaaatcaaaacgaagggtgtactaatcctccccctagtggatccgggggtgggtcctccaactccggcgggggttcagggagtcagtcaggctccagcggctccggttccaacggcgataataacaacgggtcttctagtggtggttcctcatctggcagcagcagcggcggatcatctggcggcagcagtggcgggagctctggtaatagtgggggatcgcgcggcgactctgggtccgagtcatcttgggggagcagcacagggtcatcgtcaggtaaccacggcggcagtggggggggcaacggtcataaacccggttgtgagaagcctgggaacgaggcccggggctccggcgagagcggcatacaaggcttccggggccaaggagtaagctcaaatatgcgagagatcagcaaggaaggtaaccgtctccttggagggagcggtgacaattaccgcaattcggagacatccccaggcatgtttaattttgacacgttctggaagaacttcaaatcgaagttaggctttatcaattgggatgctattaataaagatcaaaggtctagtcgcatcccttag

SEQ ID NO: 72617 - DNA, 1311 bp, Artificial Sequence
  derived and/or modified sequence
atgaagttccagggacccctcgcctgcctgcttttagccctgtgtttaggctccggcgaagccggccctcttcagtcaggggaggaatccaccgggaccaatattggggaggctctaggtcacggtcttggagacgcgctctccgagggagttgggaaggccatcgggaaggaagcaggcggcgcagccggcagcaaggtctctgaggccctcggccaaggcacccgtgaggctgtggggactggtgtgagacaggtcccaggttttggggtcgctgacgccctcggaaaccgggtaggtgaagctgcacatgccctgggtaacacaggccatgagatagggagacaggctgaggacgtgatccgccatggagcagacgccgtgaggggctcatggcagggagtgcctgggcataatggcgcctgggaaacgtccggaggtcatggcatttttggatcccaggggggcctcggaggtcaggggcaagggaatccgggtggtctcgggactccttgggtacacggctatcccggaaacagcgctgggtcattcggtatgaatccacagggggccccttggggacagggcggcaatggcggaccccctaactttgggaccaacactcaaggagcggtagctcaacctggatatgggtccgtccgtgccagcaatcagaatgagggctgcacaaatcccccaccatctggttctggcggcgggtcgagcaattctggcggtggttcaggttcacagagtggctcctcaggttctgggtcgaacggcgacaataataatgggtccagtagtggcggatcctcctcagggtcgagttcagggggatcaagtgggggttcttcgggcggcagttcgggtaattccgggggctcacgaggtgactcagggtccgagagttcgtgggggagctctaccgggagcagcagtggaaaccacggcggcagtgggggagggaacgggcacaagccaggctgtgagaaacccggaaatgaggccagagggagtggcgagagcggcatccagggctttaggggccagggcgtctcaagcaatatgagggaaattagcaaggaggggaataggctactggggggttccggagataattaccgcgggcagggctcctcctggggttccggtgggggggatgcagtgggcggggtgaacacagtaaacagcgagacctcccccggaatgtttaattttgatacgttctggaagaattttaagagtaaactggggttcataaactgggatgctataaataaggaccagcgctcttcaagaataccctag

SEQ ID NO: 72618 - DNA, 1110 bp, Artificial Sequence
  derived and/or modified sequence
atgaagtttcagggccctctggcttgtctgctcctggctctttgtctggggtcaggtgaggccggaccgctgcaaagcggggaggagtccactggcactaacataggcgaagccctgggccacgggctaggggacgccctgagtgaaggcgtaggaaaggccattggcaaggaagctggtggggcagccggaagcaaagttagcgaagccctcggacagggcaccagggaggccgtgggaacaggagtaagacaggtcccagggttcggtgtggctgatgcgctgggcaatcgcgtgggcgaagctgcacacgccttgggaaacactggccacgaaattggtagacaagccgaggatgtcattaggcatggggccgatgccgtccggggatcatggcagggggtgcctgggcataatggtgcctgggagacatcgggtggccacggaatctttggctcccagggtgggttgggcggtcaaggacaggggaatcctggagggctcggtaccccctgggtgcatggctaccccggaaactccgccggcagtttcggtatgaacccacagggcgctccgtgggggcaaggagggaatgggggtcccccaaattttggcaccaacacccagggcgccgtggctcagccgggatatgggagtgtgagggcctccaatcagaacgaaggttgtacaaacccccccccaagcggctccggaggtggcagcagtaattccggagggggcagtgggagccaatcaggcagctctggttcaggctcaaacggtgataacaataacgggagctccagcggaggctcatcgagcgggagcagttccggagggagctctggcggcagttcaggaggatcttccggtaacagcgggggatctaggggcgattccggctctgaatcatcttgggggtcttccaccggtagcagtagcggcaatcatgggggttccgggggcggaaacgggcataagccaggcaattccgaaaccagcccgggaatgtttaatttcgatacattctggaaaaactttaagtcaaagctgggatttataaattgggacgctattaacaaggaccaacgctcctctcgaattccctag

SEQ ID NO: 72619 - DNA, 1173 bp, Artificial Sequence
  derived and/or modified sequence
atgaagttccagggccccctggcctgcctgctgctggccctgtgcctgggcagcggggaggccggccccctgcagagcggggaggagagcacaggcaccaacattggagaggccctgggccacggcctgggagatgccctgtctgagggcgtgggcaaggccatcggcaaggaggccggcggcgctgctggcagcaaggtgtctgaggccctgggccagggcacccgggaggccgtgggcactggagtgcggcaggtgcccggctttggagtggctgatgccctgggcaacagagtgggggaggccgcccacgccctgggcaacacaggccatgaaattggccggcaggccgaggatgtgatcagacatggagcagatgctgtgcggggctcctggcagggcgtgcccggccacaatggagcctgggagaccagcggcggccacggcatcttcggcagccagggcggcctgggcggccagggccagggcaaccctgggggcctgggcaccccctgggtgcacggctacccaggcaacagcgctggcagctttggcatgaacccccagggcgccccctggggccagggcggcaatggaggcccccccaactttggcaccaacacccagggcgctgtggcccagcccggctacggctctgtgcgggccagcaaccagaatgaaggctgcaccaaccccccaccttctggcagcggcggcggcagcagcaacagcggcggcggcagcggcagccagagcggcagcagcggcagcggcagcaatggagacaacaacaacggcagcagcagcggcggcagcagcagcggcagcagcagcggcggcagcagcggcggcagcagcggcggcagcagcggcaacagcggcggcagcagaggagacagcggcagcgagagctcctggggcagcagcacaggcagcagcagcggcaaccacggcggcagcggcggcggcaatggccacaagccaggctgtgagaagccaggaaatgaggcccggggcagcggggagagcggcatccagggcttccggggccagggcgtgagcagcaacatgaggaacagcgagaccagccctggcatgttcaactttgacaccttctggaagaacttcaagagcaagctgggcttcatcaactgggatgccatcaacaagtag

SEQ ID NO: 72620 - DNA, 1161 bp, Artificial Sequence
  derived and/or modified sequence
atgaagttccagggccccctggcctgcctgctgctggccctgtgcctgggcagcggggaggccggccccctgcagagcggggaggagagcacaggcaccaacattggagaggccctgggccacggcctgggagatgccctgtctgagggcgtgggcaaggccatcggcaaggaggccggcggcgctgctggcagcaaggtgtctgaggccctgggccagggcacccgggaggccgtgggcactggagtgcggcaggtgcccggctttggagtggctgatgccctgggcaacagagtgggggaggccgcccacgccctgggcaacacaggccatgaaattggccggcaggccgaggatgtgatcagacatggagcagatgctgtgcggggctcctggcagggcgtgcccggccacaatggagcctgggagaccagcggcggccacggcatcttcggcagccagggcggcctgggcggccagggccagggcaaccctgggggcctgggcaccccctgggtgcacggctacccaggcaacagcgctggcagctttggcatgaacccccagggcgccccctggggccagggcggcaatggaggcccccccaactttggcaccaacacccagggcgctgtggcccagcccggctacggctctgtgcgggccagcaaccagaatgaaggctgcaccaaccccccaccttctggcagcggcggcggcagcagcaacagcggcggcggcagcggcagccagagcggcagcagcggcagcggcagcaatggagacaacaacaacggcagcagcagcggcggcagcagcagcggcagcagcagcggcggcagcagcggcggcagcagcggcggcagcagcggcaacagcggcggcagcagaggagacagcggcagcgagagctcctggggcagcagcacaggcagcagcagcggcaaccacggcggcagcggcggcggcaatggccacaagccaggctgtgagaagccaggaaatgaggcccggggcagcggggagagcggcatccagaacagcgagaccagccctggcatgttcaactttgacaccttctggaagaacttcaagagcaagctgggcttcatcaactgggatgccatcaacaaggaccagaggagcagccgcatcccctag

SEQ ID NO: 72621 - DNA, 1197 bp, Artificial Sequence
  derived and/or modified sequence
atgaagttccagggccccctggcctgcctgctgctggccctgtgcctgggcagcggggaggccggccccctgcagagcggggaggagagcacaggcaccaacattggagaggccctgggccacggcctgggagatgccctgtctgagggcgtgggcaaggccatcggcaaggaggccggcggcgctgctggcagcaaggtgtctgaggccctgggccagggcacccgggaggccgtgggcactggagtgcggcaggtgcccggctttggagtggctgatgccctgggcaacagagtgggggaggccgcccacgccctgggcaacacaggccatgaaattggccggcaggccgaggatgtgatcagacatggagcagatgctgtgcggggctcctggcagggcgtgcccggccacaatggagcctgggagaccagcggcggccacggcatcttcggcagccagggcggcctgggcggccagggccagggcaaccctgggggcctgggcaccccctgggtgcacggctacccaggcaacagcgctggcagctttggcatgaacccccagggcgccccctggggccagggcggcaatggaggcccccccaactttggcaccaacacccagggcgctgtggcccagcccggctacggctctgtgcgggccagcaaccagaatgaaggctgcaccaaccccccaccttctggcagcggcggcggcagcagcaacagcggcggcggcagcggcagccagagcggcagcagcggcagcggcagcaatggagacaacaacaacggcagcagcagcggcggcagcagcagcggcagcagcagcggcggcagcagcggcggcagcagcggcggcagcagcggcaacagcggcggcagcagaggagacagcggcagcgagagctcctggggcagcagcacaggcagcagcagcggcaaccacggcggcagcggcggcggcaatggccacaagccaggctgtgagaagccaggaaatgaggcccggggcagcggggagagcggcatccagggcttccggggccagggcgtgagcagcaacatgaggaacagcgagaccagccctggcatgttcaactttgacaccttctggaagaacttcaagagcaagctgggcttcatcaactgggatgccatcaacaaggaccagaggagcagccgcatcccctag

SEQ ID NO: 72622 - DNA, 1251 bp, Artificial Sequence
  derived and/or modified sequence
atgaagttccagggccccctggcctgcctgctgctggccctgtgcctgggcagcggggaggccggccccctgcagagcggggaggagagcacaggcaccaacattggagaggccctgggccacggcctgggagatgccctgtctgagggcgtgggcaaggccatcggcaaggaggccggcggcgctgctggcagcaaggtgtctgaggccctgggccagggcacccgggaggccgtgggcactggagtgcggcaggtgcccggctttggagtggctgatgccctgggcaacagagtgggggaggccgcccacgccctgggcaacacaggccatgaaattggccggcaggccgaggatgtgatcagacatggagcagatgctgtgcggggctcctggcagggcgtgcccggccacaatggagcctgggagaccagcggcggccacggcatcttcggcagccagggcggcctgggcggccagggccagggcaaccctgggggcctgggcaccccctgggtgcacggctacccaggcaacagcgctggcagctttggcatgaacccccagggcgccccctggggccagggcggcaatggaggcccccccaactttggcaccaacacccagggcgctgtggcccagcccggctacggctctgtgcgggccagcaaccagaatgaaggctgcaccaaccccccaccttctggcagcggcggcggcagcagcaacagcggcggcggcagcggcagccagagcggcagcagcggcagcggcagcaatggagacaacaacaacggcagcagcagcggcggcagcagcagcggcagcagcagcggcggcagcagcggcggcagcagcggcggcagcagcggcaacagcggcggcagcagaggagacagcggcagcgagagctcctggggcagcagcacaggcagcagcagcggcaaccacggcggcagcggcggcggcaatggccacaagccaggctgtgagaagccaggaaatgaggcccggggcagcggggagagcggcatccagggcttccggggccagggcgtgagcagcaacatgagggagatcagcaaggagggcaaccggctgctgggcggcagcggggacaactacagaaacagcgagaccagccctggcatgttcaactttgacaccttctggaagaacttcaagagcaagctgggcttcatcaactgggatgccatcaacaaggaccagaggagcagccgcatcccctag

SEQ ID NO: 72623 - DNA, 1311 bp, Artificial Sequence
  derived and/or modified sequence
atgaagttccagggccccctggcctgcctgctgctggccctgtgcctgggcagcggggaggccggccccctgcagagcggggaggagagcacaggcaccaacattggagaggccctgggccacggcctgggagatgccctgtctgagggcgtgggcaaggccatcggcaaggaggccggcggcgctgctggcagcaaggtgtctgaggccctgggccagggcacccgggaggccgtgggcactggagtgcggcaggtgcccggctttggagtggctgatgccctgggcaacagagtgggggaggccgcccacgccctgggcaacacaggccatgaaattggccggcaggccgaggatgtgatcagacatggagcagatgctgtgcggggctcctggcagggcgtgcccggccacaatggagcctgggagaccagcggcggccacggcatcttcggcagccagggcggcctgggcggccagggccagggcaaccctgggggcctgggcaccccctgggtgcacggctacccaggcaacagcgctggcagctttggcatgaacccccagggcgccccctggggccagggcggcaatggaggcccccccaactttggcaccaacacccagggcgctgtggcccagcccggctacggctctgtgcgggccagcaaccagaatgaaggctgcaccaaccccccaccttctggcagcggcggcggcagcagcaacagcggcggcggcagcggcagccagagcggcagcagcggcagcggcagcaatggagacaacaacaacggcagcagcagcggcggcagcagcagcggcagcagcagcggcggcagcagcggcggcagcagcggcggcagcagcggcaacagcggcggcagcagaggagacagcggcagcgagagctcctggggcagcagcacaggcagcagcagcggcaaccacggcggcagcggcggcggcaatggccacaagccaggctgtgagaagccaggaaatgaggcccggggcagcggggagagcggcatccagggcttccggggccagggcgtgagcagcaacatgagggagatcagcaaggagggcaaccggctgctgggcggcagcggggacaactaccggggccagggcagctcctggggcagcggcggcggagatgctgtgggcggcgtgaacacagtgaacagcgagaccagccctggcatgttcaactttgacaccttctggaagaacttcaagagcaagctgggcttcatcaactgggatgccatcaacaaggaccagaggagcagccgcatcccctag

SEQ ID NO: 72624 - DNA, 1110 bp, Artificial Sequence
  derived and/or modified sequence
atgaagttccagggccccctggcctgcctgctgctggccctgtgcctgggcagcggggaggccggccccctgcagagcggggaggagagcacaggcaccaacattggagaggccctgggccacggcctgggagatgccctgtctgagggcgtgggcaaggccatcggcaaggaggccggcggcgctgctggcagcaaggtgtctgaggccctgggccagggcacccgggaggccgtgggcactggagtgcggcaggtgcccggctttggagtggctgatgccctgggcaacagagtgggggaggccgcccacgccctgggcaacacaggccatgaaattggccggcaggccgaggatgtgatcagacatggagcagatgctgtgcggggctcctggcagggcgtgcccggccacaatggagcctgggagaccagcggcggccacggcatcttcggcagccagggcggcctgggcggccagggccagggcaaccctgggggcctgggcaccccctgggtgcacggctacccaggcaacagcgctggcagctttggcatgaacccccagggcgccccctggggccagggcggcaatggaggcccccccaactttggcaccaacacccagggcgctgtggcccagcccggctacggctctgtgcgggccagcaaccagaatgaaggctgcaccaaccccccaccttctggcagcggcggcggcagcagcaacagcggcggcggcagcggcagccagagcggcagcagcggcagcggcagcaatggagacaacaacaacggcagcagcagcggcggcagcagcagcggcagcagcagcggcggcagcagcggcggcagcagcggcggcagcagcggcaacagcggcggcagcagaggagacagcggcagcgagagctcctggggcagcagcacaggcagcagcagcggcaaccacggcggcagcggcggcggcaatggccacaagccaggcaacagcgagaccagccctggcatgttcaactttgacaccttctggaagaacttcaagagcaagctgggcttcatcaactgggatgccatcaacaaggaccagaggagcagccgcatcccctag

SEQ ID NO: 72625 - DNA, 1173 bp, Artificial Sequence
  derived and/or modified sequence
atgaagttccagggccccctggcctgcctgctgctggccctgtgcttaggatccggcgaggcaggaccactacaatccggtgaagagtctacaggaacaaatatcggggaggcgctcgggcatggtctgggcgacgctctctccgagggggtgggaaaagccatagggaaagaggccggcggtgcagcaggaagtaaagtgagcgaggccctggggcagggcacacgggaggctgtcggcaccggagtgagacaagtcccaggctttggcgtcgcggacgcgcttggcaatagggtgggagaagccgctcacgctctgggtaatactggtcacgaaatcggaaggcaggccgaagacgtcatacgacatggggctgacgccgtgcgcggtagctggcagggagtgcctggccacaacggtgcctgggagacatccggcggccacggaatctttggctcgcagggaggattgggaggccagggtcaggggaaccctggaggactagggaccccctgggtgcacgggtaccccgggaatagcgctggatcatttgggatgaaccctcagggcgctccctggggccaaggtggtaatggcggaccacccaattttggcaccaacacacagggcgccgtcgctcagccagggtacggcagcgtgcgggcaagcaatcagaacgagggctgcacgaatccaccaccctccggctctgggggtggaagcagcaacagcggcggtgggtctggatcacagtcgggctcgtccgggtctggtagtaatggcgataataacaatggatcctcaagcggtggcagtagtagcggatcatcaagcggcgggtctagcggaggatcgtcgggagggtcctcaggaaactcaggcggctcaaggggagactcgggcagcgagtcctcttgggggtcatcgaccgggtctagtagcggcaatcatggcggcagcgggggaggaaacggccacaagcccggttgcgagaaaccgggcaacgaagctcgcggatctggcgaaagtggaattcagggcttcagggggcagggagttagcagcaatatgcgcaacagcgaaactagcccgggcatgttcaatttcgacactttctggaaaaattttaaaagcaaactcgggtttatcaattgggatgcaatcaacaaatag

SEQ ID NO: 72626 - DNA, 1161 bp, Artificial Sequence
  derived and/or modified sequence
atgaagttccagggccccctggcctgcctgctgctggccctgtgcctcggaagtggagaagcaggaccgctgcagagtggcgaagagagcaccgggacaaatattggcgaggcattaggacatggactcggagatgctttgagtgaaggtgttgggaaggccatcggcaaagaggccggcggcgccgctggcagcaaagtctctgaggcactgggccagggtacccgcgaggcagtcgggacaggagtgagacaggtacctgggtttggcgtggctgacgccttgggcaatagagtaggcgaggccgcccatgccttaggcaatactggccatgagataggcaggcaggctgaggacgtcatacgtcacggtgccgacgctgttagaggatcttggcagggggtccccggccataatggggcatgggaaacttcagggggtcacggtatttttgggagtcaggggggcctaggcggccaggggcagggcaacccaggggggttaggcacaccatgggtgcacggatatcccggcaatagcgccggtagttttggaatgaaccctcagggtgcgccttggggtcagggcggcaacggcggacctccaaactttggtacgaatacgcagggtgccgtggctcagcccgggtatggaagcgtgcgagctagcaatcaaaacgaaggctgcactaacccacctccttcagggtctggcgggggctccagcaactcaggtggaggcagcgggtctcagagcggcagcagcggtagtggcagcaacggagataacaataatggcagttcatcagggggtagttcctctggctcgtcatcgggcggttcatccggcggaagctctggaggctcatccggtaattccggcggctcacggggcgacagcggatccgaatctagctggggctcctccactggttcgagctctggtaaccatggggggagtggaggaggcaacgggcacaaacccggctgtgaaaagccaggaaacgaggcccggggctcaggagagtcaggcatacagaacagtgagaccagtcccggaatgttcaattttgataccttttggaagaattttaagagtaaactgggcttcataaactgggatgcgataaataaggaccaacgctcctccaggattccttag

SEQ ID NO: 72627 - DNA, 1197 bp, Artificial Sequence
  derived and/or modified sequence
atgaagttccagggccccctggcctgcctgctgctggccctgtgcctgggctccggcgaggccgggccactacagtctggcgaagaatccaccgggaccaacatcggtgaggcactagggcacggtctgggggacgccctctctgagggtgtcggcaaagcaattgggaaagaggcgggaggagctgctggtagtaaagtgtccgaggcgcttggtcaggggactagagaggcagtgggaacaggcgttcgccaggttcctgggttcggggtcgcagatgcactggggaatcgtgtcggcgaagccgcccacgcattaggaaacacaggccatgaaatcgggaggcaagctgaagatgtgatccgccacggcgccgacgccgtgcgcggttcctggcagggagttccgggccacaacggcgcatgggagaccagcggcggccatggtatctttgggtcccagggcggactgggtggacagggtcagggcaaccccggcggcctggggaccccttgggtgcatgggtaccctggtaacagcgcgggtagctttggcatgaatcctcaaggcgcaccatggggccaggggggtaatgggggcccaccaaacttcggtactaatacccagggtgcagtggcacaacccggttatggctctgtgcgggctagcaaccagaacgaaggatgtaccaatcccccccctagcgggagcggcgggggttcaagtaactctggcggggggagcggcagccagagcgggagtagcggctcaggatcaaatggcgataacaacaacggatcatcaagtggcgggagtagttccggctcaagctcaggtgggtcttcaggaggcagtagtgggggaagctctggcaacagcggcggcagtcgaggcgattccgggtccgagagctcgtggggaagcagcacaggttcatcatctgggaatcacggcggtagcggcggtggtaacggacacaagcccgggtgtgagaagccaggcaatgaagcacgcgggtcaggggagtctggcatccaagggttccgaggccaaggcgtttcctctaacatgcgtaactccgagacttcccccgggatgttcaattttgatacattctggaaaaacttcaagtctaagctgggcttcatcaactgggacgcaatcaacaaggaccagaggagctctcgaataccctag

SEQ ID NO: 72628 - DNA, 1251 bp, Artificial Sequence
  derived and/or modified sequence
atgaagttccagggccccctggcctgcctgctgctggccctgtgcctgggcagcggggaggcaggacccttgcagagtggagaggagtctaccggtaccaacatcggagaggcattaggccacgggctaggcgacgctctctctgagggcgtcgggaaagcaattggaaaggaagcaggcggagcggcagggtccaaggtgagtgaagcgctcggtcagggcacacgggaggccgtgggtacaggagtacgccaggtccctggcttcggggtggccgacgccctcggcaatcgggtcggcgaggcagcccacgccctgggaaataccggccatgagatcggaagacaggccgaagatgtcattaggcacggcgccgatgccgtgcggggatcatggcagggcgtgcctggacacaatggagcatgggagacgtccggtggacatggaatatttggatctcaggggggactcggaggccaaggccaggggaatcctggcggtctgggtactccatgggtgcacggttaccccggcaacagcgcaggatccttcggcatgaatccacaaggcgccccctggggccagggcgggaatggaggccccccgaactttggtacaaacacacagggcgctgtggcccagcctggatatggaagcgtgagagcttctaaccagaacgaaggctgcactaacccacccccatccgggtccggtggcggatctagcaattctggcgggggctccgggtctcagtccggctcatccggaagtggttccaacggcgacaataacaacggtagctcctctggtggatcgtccagcggctccagcagtggcggctcctcaggtggctcatctggaggctcatccggcaacagcggaggaagtagaggtgattcaggtagtgaatcctcctggggctcttcaacgggatcgagcagcggcaatcacggggggagcggcgggggcaatgggcataagcctggctgtgaaaagccagggaatgaagctcgtgggtctggagaatcgggaattcagggtttcagaggacagggcgtgtccagtaatatgagggaaatctccaaggagggtaatcgcctgctcgggggaagcggtgataattacagaaattctgagacttctcctggaatgtttaacttcgataccttctggaagaacttcaaatcaaagctgggttttatcaattgggacgctatcaataaggaccagcggagcagccgcattccctag

SEQ ID NO: 72629 - DNA, 1311 bp, Artificial Sequence
  derived and/or modified sequence
atgaagttccagggccccctggcctgcctgctgctggccctgtgccttggcagcggggaagctggtcccctccaatcaggcgaggagtccacagggactaatatcggtgaggcactgggccatggcctcggagacgccctatcagagggagtgggaaaggccatcgggaaggaagctggcggggctgcagggagcaaggtgagcgaggccctaggccagggtactagggaggcggtgggcactggcgtcagacaggttccaggcttcggagtcgcagacgcgctggggaatcgcgtcggagaggccgcacacgccctcggcaataccgggcacgaaatcggacgccaggctgaggacgttattcggcatggagcggatgcagtacggggttcctggcagggcgtgcctggacataacggggcttgggaaacgtcaggtggccacgggatcttcggtagccagggcggtctgggtggccaaggccagggaaacccgggagggcttggcactccctgggtgcatgggtaccctgggaattctgcgggcagtttcggaatgaaccctcagggcgctccgtggggccaaggggggaatgggggaccccctaattttggcactaacacccagggcgccgtcgcccagccaggctatggctctgtccgcgcgagcaaccagaacgagggatgcacaaaccccccacctagtggctccggcggcggctccagcaactcaggaggtggttccggttctcagtcaggatcttccgggtccgggagcaacggggacaataacaatgggagttcgagtggcgggtcctcctcagggagtagttccggtggctcctctggtggttcgagcggtgggagcagtgggaattctggcggcagccgcggagacagcgggtcagagagctcatggggaagtagcacaggcagtagctcaggcaatcacggcggctcagggggtggcaacgggcacaagcccggctgcgagaagcctgggaatgaggctcgtgggtcgggggaatccggaattcagggttttcgggggcagggcgtgtcatccaacatgcgcgaaattagcaaggaaggtaaccgcctcctgggcggctcaggcgataactacagaggacaggggtctagctgggggagcggtgggggggacgcggtagggggtgtgaacacagtaaactctgaaacctcacccggcatgttcaatttcgacacattctggaagaatttcaagagcaagttggggtttataaattgggacgcaattaataaagatcagcgctcaagtcgcataccttag

SEQ ID NO: 72630 - DNA, 1110 bp, Artificial Sequence
  derived and/or modified sequence
atgaagttccagggccccctggcctgcctgctgctggccctgtgcttggggagtggcgaggccgggccactacagtctggcgaagaaagcacggggactaacatcggtgaggcactaggtcacggactgggagacgcactctctgaaggcgtcggcaaggctataggcaaagaagccggcggtgctgccggctccaaggtgagtgaggcccttggccaggggacacgggaagccgttgggacaggggtcaggcaggtgcccggattcggcgtagccgatgccctcggaaatagggtgggagaagccgctcatgccctgggcaatacggggcacgagataggcagacaggctgaagatgtcattagacacggcgcggatgcagtgcggggttcatggcagggagtgcctggacacaatggcgcctgggaaacatccggaggacacggaatcttcggtagtcaaggcggactaggcggacagggacaggggaacccgggggggcttgggacgccctgggtccacggttaccctggcaactcagcagggtccttcggaatgaacccccagggtgccccgtggggacagggaggtaacggagggcctcctaacttcggcactaatacccagggcgctgttgcacagcccggctacggcagcgtaagggcctctaatcagaatgaagggtgtacaaatccacctcccagcggtagcggtggcggcagcagtaactctggcggtgggtcgggatctcagagcggatctagcggctctggtagtaatggtgataataacaacggtagcagctccgggggctcgagctctgggtcatccagtgggggttcttcaggcggttcatctgggggctcaagcggaaattcaggggggtcaagaggggacagcggctctgaaagttcttgggggtcttctactggttcaagcagcggaaatcacggggggtcaggtggaggaaatggtcacaagcctggcaatagcgaaacttcacctggcatgtttaattttgacaccttctggaaaaattttaaaagtaagcttgggttcatcaactgggatgcgataaacaaggatcaacgctcttcaagaatcccctag

SEQ ID NO: 72631 - RNA, 1173 nt, Artificial Sequence
  derived and/or modified sequence
augaaguuccagggaccucucgccugucugcugcucgcucuaugccugggaagcggggaggcaggaccgcuacagucuggggaggaaucuacggggacuaacauuggcgaggcccugggccacggacugggagacgcgcuuuccgagggaguuggcaaagcuauagggaaggaggcaggcggcgccgcuggcagcaagguuucagaagcucugggccaggggacucgggaggccgugggcacuggcguccggcaagugccaggguuuggcguagcagaugcacucgguaauagggugggggaagccgcccaugcccugggcaauacaggccaugaaaucgguaggcaggcugaggacgugauuaggcacggugcugacgccgucaggggaucguggcagggcguccccggccauaauggagcaugggaaacuagcggcggacacggaauuuuuggcagccagggcggcuugggaggccagggacaggggaaccccggaggucuggguaccccauggguacaugguuaccccggcaacucagccgguucauuuggaaugaauccucagggugcaccgugggggcagggugggaaugguggaccaccaaauuucggcacuaacacucaaggcgcuguugcucagcccggcuacggaagcgugagagcaucgaaucagaacgaagggugcacaaaucccccuccaaguggcuccggagggggcagcucgaauagcgggggcggauccgggucucagaguggguccuccgguucuggguccaauggcgauaacaauaacggcaguucaucugggggaagcuccagcgggaguucaucuggggggucuucgggggggagcucaggcgguucgucuggcaacagcggaggcucgcggggagauucuggcucugaaucaucuuggggaaguucaacagguucaucuagcggcaaucaugguggcagcgggggcgguaacggccacaaaccugggugcgaaaagccaggcaaugaggcuaggggcuccggggaaagcggaauucaaggauuucgcggacagggcgugagcaguaauaugaggaacagcgagaccucuccaggcauguucaacuucgauaccuuuuggaaaaacuuuaagucaaaacugggcuuuaucaauugggacgccauuaacaaauag

SEQ ID NO: 72632 - RNA, 1161 nt, Artificial Sequence
  derived and/or modified sequence
augaaguuccaagggccacuagccugccuuuugcuggcgcugugucugggaucuggggaggcuggaccccuucaguccggggaagaauccacuggcacuaacaucggagaagcgcucggccauggccugggcgaugcgcuguccgaggguguaggcaaagcuauaggcaaagaagcaggaggagcagcaggcucuaaagucagcgaagcacuuggacaggguacuagggaagcaguugggacuggcgugcggcaagugcccggauucgggguggcagaugcccuggguaaucgcgucggagaggccgcgcacgcucuggggaauaccgggcaugagaucggaagacaagcagaagaugucaucagacacggcgccgaugccguccgugggagcuggcagggcgugcccgggcacaacggcgcuugggaaacuucaggaggccauggcauauuugguucucagggcggacuugguggucagggacagggaaauccaggcgggcuggggacgccgugggugcacggguaccccgggaacagugcagguaguuuugggaugaauccccagggagcacccugggggcagggaggcaacggaggacccccaaacuucgguaccaacacacagggggcaguggcacagccaggguacggcuccgugcgcgccagcaaccagaacgaaggguguaccaaccccccccccucugguucaggaggcggcagcucgaauucuggcggaggaucagggucucagucugggucuucugggagcggcuccaauggcgauaauaacaacgggucuagcagcggugguuccagcuccgggagcucuucuggcggcaguucaggcgguucuagcggaggcuccucuggaaauucuggcggaucccgaggugauucggggagcgaaucaucuuggggcucuucaacuggcagcaguaguggaaaccaugguggcucuggaggcggaaacgggcauaaaccgggcugugaaaagccaggcaaugaagccagaggaagcggcgaaagcgggauucagaauuccgagaccaguccaggcauguuuaacuuugacacuuuuuggaaaaauuucaagagcaaacugggauuuauuaacugggacgccauuaacaaagaccaacggagcagcaggaucccuuag

SEQ ID NO: 72633 - RNA, 1197 nt, Artificial Sequence
  derived and/or modified sequence
augaaauuccagggcccucuugccugucuccucuuggcacucugucuggggagcggggaggcuggaccccuccaaucaggagaggaguccacuggaacaaauauuggcgaggcauugggacacggguuaggagacgcccucucugagggagucgggaaagcuauagggaaggaggcagggggagcugcggguagcaaagugucugaggcccuuggucagggaacucgcgaagcugucggcacaggagugcgccaagugccagguuuuggcguagcagacgcgcuagguaauagagucggagaggcugcccaugcccuagggaacaccggacacgagauuggacggcaagcagaagacgucaucagacacggagcagacgcuguaagggguagcuggcaagggguuccaggacacaauggggcaugggagacaucugggggacacgggauuuucgguucccagggaggacugggcgggcaaggacaagguaacccagggggccuuggaacaccuuggguucacggguacccagguaauucagcuggaaguuucggaaugaacccgcagggagcuccuuggggccagggaggaaacgggggaccaccaaauuucggaaccaauacccaaggggccguugcgcagcccggguacgguagugugcgcgcaaguaaucaaaacgaaggaugcaccaauccuccccccagcggauccggugguggaucuagcaauucaggcggugguagugggagccagagcggauccucgggaucuggcaguaacggggacaauaacaauggaucuagcuccgggggguccucaaguggcucgagcucagggggaucauccggcgggucaucuggugguucuuccggcaacuccggcgggucaaggggagacaguggcuccgaauccuccuggggaucaucuacaggcucaaguagcggcaaucacgguggaucaggcggugggaacggacacaaaccuggaugcgaaaaacccggaaacgaagcucgcgggagcggcgagucuggcauccaggguuuccgcgggcaaggaguguccaguaauaugcggaauagcgaaaccaguccugguauguuuaauuuugauacuuuuuggaagaacuucaagaguaaguugggcuuuauuaauugggacgccauuaauaaggaucagcgguccaguaggaucccauag

SEQ ID NO: 72634 - RNA, 1251 nt, Artificial Sequence
  derived and/or modified sequence
augaaauuccaaggcccucuugcaugccuguugcuugcacucugcuugggcagcggugaagcaggacccuuacagaguggagaagaaucaacgggcacuaacauaggcgaagcccuagggcacgggcuaggggaugcccugucagaagggguuggaaaggccaucgggaaagaggcagggggcgcagcuggaaguaaggugucugaagcacuuggucaggggacaagggaggccguggggaccggagugcggcaggugccggguuuuggcgucgcugaugcacuggguaauagggugggcgaggcagcccaugcgcuaggaaauacaggccacgaaaucggaaggcaggccgaggaugugauucggcacggagcugaugcagugagaggaaguuggcagggugugccuggacacaauggcgccugggagacaagcgggggucauggcauuuuugggagucagggugggcuuggaggccaggggcagggcaaccccggaggacuuggcacuccuugggugcacggcuacccuggaaauagugcugguaguuuuggaaugaauccgcagggugccccauggggucagggaggaaaugggggaccccccaauuuuggaacaaacacccagggagcagucgcccagccaggcuacggaagugugcgugccucuaaucaaaaugagggcugcacaaauccacccccuagcgggucggggggggggucuagcaacucuggggggggcuccggaucccagucaggcagcucugggaguggcucaaauggugauaauaacaacggaagcucgucugggggaagcucuucugggagcucgucggggggcucuaguggcggcagcagcggcgggaguucugggaauagugguggcagccgaggcgacagcgggagcgaaucuucuugggguagcaguaccggcagcagcagcggaaaccaugguggcagcggcggaggaaacggucauaaacccggcugugaaaaacccggcaaugaggccaggggcucgggagaguccggaauacagggguuccggggacagggcguguccucaaacaugcgggaaauuucuaaagaggggaaucgccuguuaggcgggucuggagauaauuaccggaacuccgagacgaguccuggaauguucaauuuugauacuuucuggaaaaauuucaaaucuaaacugggcuucauuaacugggacgcgauaaauaaggaccaaagaaguagccguauccccuag

SEQ ID NO: 72635 - RNA, 1311 nt, Artificial Sequence
  derived and/or modified sequence
augaaguuucagggaccccuggcauguuuacuguuagcccucuguuugggcucuggcgaggcgggcccccuacagucuggcgaagaauccacuggaacaaacaucggggaggcccuuggacacggauuaggcgacgccuugucagagggagucggaaaggcgauugggaaggaggcgggcggcgcugcuggaucaaaagucagcgaggcccugggacagggaaccagagaagcggucgggaccggaguuagacaggugccuggauucgguguugccgaugcccuugggaacagggucggcgaggcugcccacgcccugggcaacacaggccaugaaaucggaaggcaagcagaagacguaauacgccacggugccgacgcagugagaggaucauggcagggagugccuggucauaacggugccugggagacuuccggugggcaugguauuuuuggaagucagggaggccucggaggccagggacagggaaacccagggggucucgguacccccugggugcacggcuaccccgggaauucugccgggaguuuugguaugaacccucaaggcgcuccuugggggcaaggcggaaacgggggaccuccaaauuucgggacaaauacucaaggagccguugcacagccaggcuacggaucuguaagagcuucuaaucagaacgaagggugcacuaauccaccaccaagcgggucuggcggugggucaucuaauagcggggguggcuccgggagucagagcggcaguagugggucugggucgaacggggacaauaacaacgguagcuccuccggaggcuccucgagcggcagcucaagcggaggcaguagcggcggguccagcggcgggucgagcggaaauagcggcggaaguagaggagauagcggaucagagaguagcugggggagcagcacaggcaguagcuccgggaaccacggcgggaguggcgggggaaauggccacaagccuggaugcgagaagccagggaacgaggccaggggauccggagagucuggcauccaaggcuuccgcggccaaggggugucaucgaauaugagggagaucucaaaggaagggaacagacugcuaggcggauccggggacaacuauagggggcagggaagcucuuggggaucuggagggggcgaugccgugggcggcguuaauacugugaauuccgaaacaucaccuggcauguuuaacuuugacacguuuuggaaaaacuucaaaucuaagcugggcuucaucaauugggaugcgauuaauaaggaucagcggagcucaagaauaccuuag

SEQ ID NO: 72636 - RNA, 1110 nt, Artificial Sequence
  derived and/or modified sequence
augaaauuccagggacccuuagcuugccuacuucuggccuugugcuuaggauccggagaagccggcccucuucagucuggggaagagaguacuggaacaaacaucggggaagcacuggggcauggccugggagacgccuuaucugagggagucggaaaagcaaucggcaaggaggcugguggggcagcgggcuccaaggugagcgaagcacuuggucaggggacacgcgaagccgucggcacuggaguacggcagguaccuggauucggugucgcggacgcacugggcaaccgcgucggggaggcggcacacgcgcugggcaauacgggacacgaaauugggaggcaggcugaagacgucauuaggcacggcgcugacgcagugcggggcagcuggcaggguguaccaggacacaauggcgcgugggagaccagcggcggacacggcauuuuuggaagccaaggcggucugggugggcagggccagggcaacccugggggacuggggacaccuugggugcacggcuauccagggaacagugccggaucuuuugguaugaauccgcagggggccccuuggggacaggguggaaacggagguccaccuaauuuugguaccaauacucagggggcugucgcacaaccgggguauggcucgguucgggcuucaaaucagaacgaaggcuguacaaaucccccccccagcggguccggugggggauccagcaauucuggcggcgguagcggcucacagagcgggucuagcgguuccgggucuaacggcgacaauaacaaugggaguucgucagggggaagcagcaguggcagcuccucaggaggaucuucuggcggaaguagcggcggcagcaguggcaacaguggagggaguagaggcgacagcggcagcgagucuucaugggggaguucaaccggguccaguucgggcaaucauggaggcagcggaggcggcaauggacauaaaccgggcaauucagagaccucuccuggaauguucaacuuugauacuuuuuggaagaacuucaaaucaaagcugggguucaucaacugggaugcuauaaacaaagaccaaagaucuagcaggaucccguag

SEQ ID NO: 72637 - RNA, 1173 nt, Artificial Sequence
  derived and/or modified sequence
augaaguuccagggaccauuggcuuguuuauugcuggcccugugucuggguagcggggaagcgggaccacuucaaaguggcgaagaaucuacagggacaaauauaggcgaggccuuaggccacggucucggagacgcucucagugagggggugggaaaagccaucgguaaggaggccggaggagcggcuggaucaaaagugagcgaggcacucggacaggggaccagagaagcugucggaacuggggugaggcaggugccuggguuuggcgucgcggacgcgcuggggaauagggugggcgaggcugcccacgcuuuggggaauacaggacaugagauaggcaggcaggcugaagauguuauucgacacggcgcagaugcugugcgagguucauggcagggagucccaggacacaauggcgcuugggaaaccagcgggggacauggcauuuuuggcucacagggcgguuuagggggacagggacaagggaauccgggaggacuuggcaccccaugggugcauggcuaucccgguaacucugcuggaagcuucggcaugaauccacaaggagcuccguggggacaaggaggcaacgggggaccacccaauuuuggaaccaacacacaaggcgccguggcacaaccagguuacggguccgucagagcuucaaaccagaacgaagggugcaccaacccaccaccgucugguagcggcggggguucauccaacucaggcgguggaagcgguagucaauccggcucaagcgguagcggaucuaauggagauaacaauaauggcucaucaagcggggguucaucguccggaucuucuucagggggauccucuggaggcuccuccggcgggucuagugggaauagcggagguagcaggggagacuccggcucugaaucaucuuggggaaguucaacagguucaucuagcggcaaucaugguggcagcgggggcgguaacggccacaaaccugggugcgaaaagccaggcaaugaggcuaggggcuccggggaaagcggaauucaaggauuucgcggacagggcgugagcaguaauaugaggaacagcgagaccucuccaggcauguucaacuucgauaccuuuuggaaaaacuuuaagucaaaacugggcuuuaucaauugggacgccauuaacaaauag

SEQ ID NO: 72638 - RNA, 1161 nt, Artificial Sequence
  derived and/or modified sequence
augaaguuucaaggaccacuggcaugcuuacuguuagcucugugucugggcucaggugaagcuggaccucuacagagcggcgaggagaguacaggaacuaauauuggggaagccuugggacacggucugggcgacgcccuuuccgaggggguggggaaagccaucgggaaggaagcagggggggccgcuggcagcaaagugucugaagcccuugggcaaggaaccagagaagcugugggcaccggagugagacaggugcccggauuuggcguggccgaugcacugggaaaucgggugggcgaagccgcacaugcuuuagggaacaccggccacgagauuggucggcaagccgaagacgucauaagacauggggcugacgcggugagagguuccuggcagggggucccuggacacaacggggcuugggaaacuucaggaggacacggcauuuuuggcucccagggaggauuagguggucagggacaagggaacccaggcgggcucggaacaccgugggugcacggauacccagguaauucagccgggucuuuuggaaugaacccucagggggcgccauggggccaggggggaaauggcgggccccccaacuucgggacgaacacccaaggagcgguagcacagcccggcuaugggagugugcgugcaucuaaucagaacgaaggauguacaaaucccccaccaucugggucugggggcgguucuagcaauucaggcggcggcagugggagucaaaguggcucaucaggaucaggguccaauggcgauaacaacaaugguaguucaucaggcgggucauccucuggcucuaguagcggcgggagcagcgggggaucaucugguggcagcaguggcaacucgggaggauccaggggagacuccggauccgaaaguuccuggggcuccucuacuggcucauccagcggaaaucacggaggaagcggcggcggcaauggacacaagccuggcugugagaaaccuggcaaugaagcacgcggaaguggcgagucuggcauacaaaacucugaaacaucuccagggauguuuaacuuugauaccuuuuggaagaauuuuaagucuaaacugggguucauuaacugggaugcaaucaauaaggaccagcguaguucccgaaucccguag

SEQ ID NO: 72639 - RNA, 1197 nt, Artificial Sequence
  derived and/or modified sequence
augaaguuucaggggccccuggcaugucuccugcucgcucuuugucugggaucaggagaggcggggccacugcagagcggugaggagagcacaggaacaaacaucggugaggcacuggggcacggucuuggagacgcauuguccgagggggugggaaaggcuauugguaaagaggccggaggagcugccggaagcaaagugucagaagcguuggggcaggggacuagggaagcagucgggacaggcgugagacaagucccuggcuuugggguggccgacgcacuggggaauagggugggcgaggcugcccaugcccuagggaacaccggacacgagauuggacggcaagcagaagacgucaucagacacggagcagacgcuguaagggguagcuggcaagggguuccaggacacaauggggcaugggagacaucugggggacacgggauuuucgguucccagggaggacugggcgggcaaggacaagguaacccagggggccuuggaacaccuuggguucacggguacccagguaauucagcuggaaguuucggaaugaacccgcagggagcuccuuggggccagggaggaaacgggggaccaccaaauuucggaaccaauacccaaggggccguugcgcagcccggguacgguagugugcgcgcaaguaaucaaaacgaaggaugcaccaauccuccccccagcggauccggugguggaucuagcaauucaggcggugguagugggagccagagcggauccucgggaucuggcaguaacggggacaauaacaauggaucuagcuccgggggguccucaaguggcucgagcucagggggaucauccggcgggucaucuggugguucuuccggcaacuccggcgggucaaggggagacaguggcuccgagaguagcugggguagcuccacgggcucuagcucugguaaccacggggggagugguggaggaaacggccauaagccugggugcgagaagccuggcaaugaagccagagguagcggagagaguggcauacagggauuuagaggacaggggguaagcaguaauaugcguaauucagagaccucacccgggauguuuaauuuugacacuuuuuggaaaaacuucaaaucuaagcuugguuucauuaacugggaugcaauuaacaaagaucagcgaucaucuagaauccccuag

SEQ ID NO: 72640 - RNA, 1251 nt, Artificial Sequence
  derived and/or modified sequence
augaaguuucaggguccacuggccugccuguugcucgcauuaugccuggggagcggugaggcuggaccacuccaaagcggcgaggaaagcacaggaaccaacauuggcgaggcccugggacacggacugggggaugcauuaagugaaggggugggaaaggcaauuggcaaagaagcagggggugccgcagguuccaaggugucagaggcucugggacaaggaacccgcgaggcgguugggacuggaguucgucaggugccagguuuugguguagcugaugcgcugggaaaccggguuggugaggcagcccaugcgcuaggaaauacaggccacgaaaucggaaggcaggccgaggaugugauucggcacggagcugaugcagugagaggaaguuggcagggugugccuggacacaauggcgccugggagacaagcgggggucauggcauuuuugggagucagggugggcuuggaggccaggggcagggcaaccccggaggacuuggcacuccuugggugcacggcuacccuggaaauagugcugguaguuuuggaaugaauccgcagggugccccauggggucagggaggaaaugggggaccucccaacuuuggaacaaauacacagggcgcggucgcucagcccgguuaugguaguguccgcgccagcaaccaaaaugagggguguacaaacccgccuccuuccggaucuggaggaggcucuagcaacucaggaggcgguucagggucccaauccgguucuucaggcucaggcucuaauggcgacaacaauaacgguaguucuagcggcggcuccaguagcgguagcucuaguggcgggucaaguggcggaucuuccggcgggucuagcggaaacuccggcgguucacguggugauuccggaucugagucaaguuggggcagcagcacugguagcagcagcgggaaccacggggggaguggcggcgguaaugggcauaaaccagggugugagaaaccaggcaaugaagcacgugguucaggggaguccgguauucagggauuucgaggacagggugugagcagcaacaugcgugaaaucagcaaagaagggaaccggcugcugggcggaaguggugacaauuaucgcaauuccgaaaccuccccaggcauguuuaacuuugauaccuucuggaaaaauuuuaaaaguaaacugggauucauuaacugggacgcaaucaacaaggaucagagaucuagccgcauaccuuag

SEQ ID NO: 72641 - RNA, 1311 nt, Artificial Sequence
  derived and/or modified sequence
augaaguuccagggcccuuuagcuugucuccuccuagcacuuugccuggggaguggggaggccgggccccuccaguccggcgaggagagcacuggcacaaacauuggcgaagccuugggccaugguuuaggcgaugcuuugagugagggagugggcaaggcaauuggcaaggaagcugggggggccgccggaucuaaagugagcgaagcacugggccaagguacccgagaagcaguuggaacaggugugcgccaaguucccggguuugggguugcagacgcuuuagguaacagaguaggcgaagcugcacaugcccucgguaauacgggccacgagaucggccggcaggcagaagacgucauuagacauggggcagacgcugugagaggaaguuggcagggugugccaggacacaauggagcgugggaaacgucaggcggccacggcauuuucggaucacaaggaggccucgguggacagggucagggcaacccaggaggccuaggcacgccgugggugcauggcuaccccggaaacuccgcagguucuuuugguaugaauccacaaggugccccuuggggucagggggggaacggcggcccgccaaacuucggcacaaacacccagggugcaguagcucagccuggauacggcuccgugcgggcaucuaaucagaaugaaggcugcacaaauccucccccgucugguucagguggcggaucaagcaauucaggaggcggaucaggcucccagucggguaguagugggucgggcaguaauggggauaauaauaacggcucuagcuccggggguucuaguuccggaucaagcucaggagguaguucaggagguucauccggggggucuagcgguaauagcggcggcuccaggggcgauucuggaagcgaguccaguugggggucuagcaccggaucaucuaguggcaaucauggaggcucugguggggggaauggacacaaaccuggaugcgaaaagccaggaaaugaagcaagggguucuggagaaaguggaauacaggguuuuagagggcagggagugucguccaauaugagggaaauuuccaaggaggguaaucgucugcugggcggcaguggcgauaacuacagaggacaggguuccucuugggggaguggaggaggagaugcagugggcggcgucaacaccgugaauucagagaccagccccgggauguuuaauuuugacaccuucuggaaaaacuuuaagucaaaacuuggauuuaucaauugggaugcuauuaacaaagaucagcgaucaucuagaauuccuuag

SEQ ID NO: 72642 - RNA, 1110 nt, Artificial Sequence
  derived and/or modified sequence
augaaguuucaggggccacuggcaugucugcugcuugcucugugccucggaucuggggaagcuggaccuuuacaauccggggaagaaucuacgggaacaaauauaggagaggcacugggccacggauuaggcgacgcauuaagcgaggguguggggaaggcuauugguaaggaggcggggggagcugcaggaaguaaggugagcgaagcccugggucaggggaccagggaagcugucggaaccggcguccgacaggugcccggauuuggaguggccgaugcccucggcaaucgugugggagaggcugcgcaugcucucggcaauacggggcaugaaauagguaggcaggcagaggaugugauuaggcauggggcugaugcuguucggggguccuggcagggagugccuggccacaacggcgccugggagacuucaggaggucaugguauuuuuggcucccaagguggccuaggcgggcaaggacaggggaauccaggcggacucgguaccccaugggugcacggcuauccagggaauagcgccgggagcuuuggaaugaauccacagggugcucccuggggacaaggugguaacgguggcccacccaacuucgguacuaacacucagggagcgguggcccaaccuggauacgguucaguuagagccucaaaucaaaaugagggcuguaccaaucccccuccaagcggaucuggcggcggaucgucuaauucagggggaggaucuggcucucagucugguucaaguggcuccgguucuaauggggacaauaacaacgguagcagcagugguggguccaguagcgggaguaguagcggcggaucuagcggugggagcagugguggcucuucugguaacucaggaggcagucguggugauucgggcagugaaagcuccuggggaucaaguacaggaaguagcaguggcaaccacgguggcucaggaggggggaauggccauaaaccugggaacagcgagacaucaccaggcauguuuaauuucgauacauuuuggaagaauuucaaauccaaacucgguuucauuaacugggaugcuauuaacaaggaccagcgaaguuccagaaucccuuag

SEQ ID NO: 72643 - protein, 648 aa, Artificial Sequence
  derived and/or modified sequence
MEKNGNNRKLRVCVATCNRADYSKLAPIMFGIKTEPEFFELDVVVLGSHLIDDYGNTYRMIEQDDFDINTRLHTIVRGEDEAAMVESVGLALVKLPDVLNRLKPDIMIVHGDRFDALALATSAALMNIRILHIEGGEVSGTIDDSIRHAITKLAHYHVCCTRSAEQHLISMCEDHDRILLAGCPSYDKLLSAKNKDYMSIIRMWLGDDVKSKDYIVALQHPVTTDIKHSIKMFELTLDALISFNKRTLVLFPNIDAGSKEMVRVMRKKGIEHHPNFRAVKHVPFDQFIQLVAHAGCMIGNSSCGVREVGAFGTPVINLGTRQIGRETGENVLHVRDADTQDKILQALHLQFGKQYPCSKIYGDGNAVPRILKFLKSIDLQEPLQKKFCFPPVKENISQDIDHILETLSALAVDLGGTNLRVAIVSMKGEIVKKYTQFNPKTYEERINLILQMCVEAAAEAVKLNCRILGVGIGGGIIHQHELIHGSSFCAAELGHLVVSLDGPDCSCGSHGCIEAYASGMALQREAKKLHDEDLLLVEGMSVPKDEAVGALHLIQAAKLGNAKAQSILRTAGTALGLGVVNILHTMNPSLVILSGVLASHYIHIVKDVIRQQALSSVQDVDVVVSDLVDPALLGAASMVLDYTTRRIY

SEQ ID NO: 72644 - DNA, 399 bp, Artificial Sequence
  derived and/or modified sequence
atgttcgagctcaccctcgatgcacttattagtttcaataaaagaaccctggtcctgttccctaacatcgacgcgggatcgaaggagatggtgagagtgatgcggaaaaaaggcatcgagcaccatcccaacttccgtgccgtgaagcacgttcctttcgaccagtttatccagctagtcgcacacgccggttgtatgattggaaattcatcctgcggcgtacgcgaagttggtgctctgactaggttatacacgtacgtctcttgttataaacacacacacacccacacacatacgcacccctccagttctaatcccaaactgagatctcagaaagtgatccagtcagagaataggggcaaatcctaccaggaaggacttaagtacacctttttttag

SEQ ID NO: 72645 - DNA, 1947 bp, Artificial Sequence
  derived and/or modified sequence
atggagaagaatgggaacaaccggaagctgcgcgtatgcgtggcgacctgtaatcgggcagattactccaagctggctcctatcatgttcgggattaaaacggagccagaatttttcgaactagacgtggttgtgctaggctcccacctgattgacgactatgggaatacgtatagaatgatcgaacaagatgactttgacatcaatactcggcttcacacaatagtgcgcggcgaagacgaggccgcaatggtggagtcagttgggttagctttggtgaaattgccagacgtgctaaatcggctcaagcccgacataatgattgttcacggcgataggttcgatgccttggccctggctacatcagctgcgctgatgaacattagaatactgcacatcgagggcggcgaagtaagcggcactatcgatgattctatcagacacgccataaccaaactggcccattatcacgtgtgctgcacacgatccgccgagcaacacttaatttctatgtgtgaggatcacgacagaatactgctggcaggttgcccaagttacgataagctcctgagcgcgaagaataaggactatatgtcgataattagaatgtggctcggggatgacgtgaagagcaaggattacatcgtggcactccaacatccggtgacaacggatataaaacattcaattaagatgtttgagttaaccctggacgcgctgatatcattcaacaagcgcacacttgttctgtttccgaatatcgacgcagggagcaaggagatggtgcgagtcatgagaaaaaaggggatagaacatcaccccaatttccgggccgttaaacacgtgcctttcgaccagttcatacagctggtcgcccatgccggctgcatgatcggcaactcttcttgcggggtgcgcgaggttggagcctttggcacacccgtgattaatctgggaactcgacagattgggagggaaaccggcgagaatgtcctccacgtccgcgatgcggacacacaggacaagatattacaggcactgcatctccaatttgggaagcagtacccctgttctaaaatctatggtgacgggaatgccgtgccgagaatcctgaagtttctcaagtccatcgatttgcaggagcctctgcaaaagaaattttgctttccccctgtgaaggaaaatatttctcaagacatagaccacattctggagactttgtcggccctcgctgtagacctaggaggcaccaaccttcgggtcgcgatagtttccatgaagggggagattgtcaagaaatacacccagttcaaccctaaaacctacgaagagcggatcaatttaattctgcagatgtgtgtggaagccgcagctgaggctgtgaagcttaactgtagaattctgggtgtgggcattggcggcggaattattcatcagcacgagctgatacatggttcgagtttttgtgcagccgagctcggtcacctggtagtgtccctggatgggcctgactgttcttgtggtagccatggatgcatcgaggcctatgctagtggcatggcactgcagcgcgaggctaaaaagctgcacgacgaagacctcttacttgtggagggtatgagcgttcccaaagacgaggcagtgggggccctgcacttgatacaggcagccaaactgggcaacgcaaaagcccaaagcatcctgaggacagccggtaccgcgttaggtctcggagtggtgaacatactccacaccatgaacccttctctggtgatactgtcaggcgtgctagcaagccactatattcatatcgtaaaggacgtgataagacaacaagccttatcttcggtgcaggatgttgacgttgtagttagcgatctcgtggaccctgccctccttggggccgcatctatggtgctagactacactaccaggagaatatactag

SEQ ID NO: 72646 - DNA, 2174 bp, Artificial Sequence
  derived and/or modified sequence
cggcgtctggaactctattttaagaacctctcaaaacgaaacaagcaaatcatggagaagaatggaaataaccgaaagctgcgggtttgtgttgctacttgtaaccgtgcagattattctaaacttgccccgatcatgtttggcattaaaaccgaacctgagttctttgaacttgatgttgtggtacttggctctcacctgatagatgactatggaaatacatatcgaatgattgaacaagatgactttgacattaacaccaggctacacacaattgtgaggggagaagatgaggcagccatggtggagtcagtaggcctggccctagtgaagctgccagatgtccttaatcgcctgaagcctgatatcatgattgttcatggagacaggtttgatgccctggctctggccacatctgctgccttgatgaacatccgaatccttcacattgaaggtggggaagtcagtgggaccattgatgactctatcagacatgccataacaaaactggctcattatcatgtgtgctgcacccgcagtgcagagcagcacctgatatccatgtgtgaggaccatgatcgcatccttttggcaggctgcccttcctatgacaaacttctctcagccaagaacaaagactacatgagcatcattcgcatgtggctaggtgatgatgtaaaatctaaagattacattgttgcactacagcaccctgtgaccactgacattaagcattccataaaaatgtttgaattaacattggatgcacttatctcatttaacaagcggaccctagtcctgtttccaaatattgacgcagggagcaaagagatggttcgagtgatgcggaagaagggcattgagcatcatcccaactttcgtgcagttaaacacgtcccatttgaccagtttatacagttggttgcccatgctggctgtatgattgggaacagcagctgtggggttcgagaagttggagcttttggaacacctgtgatcaacctgggaacacgtcagattggaagagaaacaggggagaatgttcttcatgtccgggatgctgacacccaagacaaaatattgcaagcactgcaccttcagtttggtaaacagtacccttgttcaaagatatatggggatggaaatgctgttccaaggattttgaagtttctcaaatctatcgatcttcaagagccactgcaaaagaaattctgctttcctcctgtgaaggagaatatctctcaagatattgaccatattcttgaaactctaagtgccttggccgttgatcttggcgggacgaacctccgagttgcaatagtcagcatgaagggtgaaatagttaagaagtatactcagttcaatcctaaaacctatgaagagaggattaatttaatcctacagatgtgtgtggaagctgcagcagaagctgtaaaactgaactgcagaattttgggagtaggaatcggtggtggaattatccatcagcatgaattgatccacggaagctccttctgtgctgcagaactgggccaccttgttgtgtctctggatgggcctgattgttcctgtggaagccatgggtgcattgaagcatacgcctctggaatggccttgcagagggaggcaaaaaagctccatgatgaggacctgctcttggtggaagggatgtcagtgccaaaagatgaggctgtgggtgcgctccatctcatccaagctgcgaaacttggcaatgcgaaggcccagagcatcctaagaacagctggaacagctttgggtcttggggttgtgaacatcctccataccatgaatccctcccttgtgatcctctccggagtcctggccagtcactatatccacattgtcaaagacgtcattcgccagcaggccttgtcctccgtgcaggacgtggatgtggtggtttcggatttggttgaccccgccctgctgggtgctgccagcatggttctggactacacaacacgcaggatctactagacctccaggaacagacatggaccttctctccagagctcctgagtggaatcaagttcttgtctttaggatgaccgtttcttaacaatcaaatctggtattgaactgcaggtgactttggcagagaaatgttttcacttttggtctcctcttccagagtcacctttccccactcctat

SEQ ID NO: 72647 - DNA, 399 bp, Artificial Sequence
  derived and/or modified sequence
atgtttgagctgaccctggatgccctgatctccttcaacaagaggaccctggtgctcttccccaacattgatgctggcagcaaggagatggtgcgggtgatgaggaagaagggcatcgagcaccaccccaacttccgggctgtgaagcacgtgccctttgaccagttcatccagctggtggcccatgctggctgcatgattggcaacagcagctgtggggtgcgggaggtgggcgccctgacccggctgtacacctacgtgtcctgctacaagcacacccacacccacacccacacccaccccagcagcagcaaccccaagctgcggagccagaaggtgatccagagtgaaaatagaggcaagagctaccaggagggcctgaagtacaccttcttctag

SEQ ID NO: 72648 - DNA, 1947 bp, Artificial Sequence
  derived and/or modified sequence
atggagaagaatggaaacaacaggaagctgcgggtgtgtgtggccacctgcaacagagctgactacagcaagctggcccccatcatgtttggcatcaagacagagcctgagttctttgagctggatgtggtggtgctgggcagccacctgattgatgattatggcaacacctacaggatgattgagcaggatgactttgacatcaacacccggctgcacaccatcgtgagaggagaagatgaggccgccatggtggagagcgtgggcctggccctggtgaagctgcctgatgtgctgaaccggctgaagccagacatcatgattgtgcacggggacagatttgatgccctggccctggccaccagcgctgccctgatgaacatccgcatcctgcacattgaaggaggagaggtgtctggcaccattgatgacagcatcagacatgccatcaccaagctggcccactaccacgtgtgctgcaccaggtctgctgagcagcacctgatctccatgtgtgaagatcatgaccgcatcctgctggccggctgccccagctatgacaagctgctgagcgccaagaacaaggactacatgagcatcatccgcatgtggctgggagatgatgtgaagagcaaggactacatcgtggccctgcagcaccctgtgaccacagacatcaagcacagcatcaagatgtttgagctgaccctggatgccctgatctccttcaacaagaggaccctggtgctcttccccaacattgatgctggcagcaaggagatggtgcgggtgatgaggaagaagggcatcgagcaccaccccaacttccgggctgtgaagcacgtgccctttgaccagttcatccagctggtggcccacgccggctgcatgattggcaacagcagctgtggggtgcgggaggtgggcgccttcggcacccctgtgatcaacctgggcacccggcagatcggccgggagactggagaaaatgtgctgcacgtgagagatgctgacacccaggacaagatcctgcaggccctgcacctgcagtttgggaagcagtacccctgcagcaagatctatggagatggaaatgctgtgccccgcatcctgaagttcctgaagagcattgacctgcaggagcccctgcagaagaagttctgcttcccccctgtgaaggagaacatcagccaggacatcgaccacatcctggagaccctgagcgccctggccgtggacctgggcggcaccaacctgcgggtggccatcgtgtccatgaagggggagatcgtgaagaagtacacccagttcaaccccaagacctatgaggagcgcatcaacctgatcctgcagatgtgtgtggaggccgctgctgaggccgtgaagctgaactgccgcatcctgggcgtgggcatcggcggcggcatcatccaccagcacgagctgatccacggcagcagcttctgtgccgctgagctgggccacctggtggtgtccctggatggccctgactgcagctgtggcagccacggctgcatcgaggcctatgccagcggcatggccctgcagcgggaggccaagaagctgcatgatgaggacctgctgctggtggagggcatgtctgtgcccaaggatgaagctgtgggcgccctgcacctgatccaggccgccaagctgggcaatgccaaggcccagagcatcctgaggacagctggaacagccctgggcctgggcgtggtgaacatcctgcacaccatgaaccccagcctggtgatcctgagcggcgtgctggccagccactacatccacatcgtgaaggatgtgatccggcagcaggccctgagctctgtgcaggatgtggatgtggtggtgtctgacctggtggaccctgccctgctgggcgccgcctccatggtgctggactacaccacccggcgcatctactag

SEQ ID NO: 72649 - DNA, 399 bp, Artificial Sequence
  derived and/or modified sequence
atgttcgagctgaccctggacgccctgatcagcttcaacaagcggactctggttcttttccctaatattgacgcaggatctaaggaaatggtccgggtcatgcggaaaaaagggatcgaacatcaccccaattttagggcggtgaagcatgtgccatttgaccagtttatccaactggtggcacacgcaggttgcatgatcggaaactctagttgtggagtgcgagaggtcggggccttgacaaggctctatacttatgtgtcttgctataagcatactcatacacatactcacactcacccttcgtcctcaaacccgaagctgcggagccagaaagtcatacaatccgagaacaggggcaagtcctaccaggagggactgaaatatacctttttctag

SEQ ID NO: 72650 - DNA, 1947 bp, Artificial Sequence
  derived and/or modified sequence
atggagaagaacggcaacaaccggaagctgcgggtgtgcgtggccacctgcaaccgggccgattattcaaaattggccccaatcatgttcggtatcaagaccgagccagaatttttcgaactcgatgtcgtggtgctgggctcccacctgatcgatgactacggcaacacgtacaggatgatcgagcaggatgacttcgacattaacactaggctccacactatcgtacgcggggaagacgaagccgcaatggtggagtctgtgggactggccttggtgaagctccctgatgtcctgaatcggctcaagccagatatcatgattgtacacggcgaccggtttgacgctctggcactggctactagtgccgcgttaatgaacatccgtatcttacacatcgaagggggcgaagtgtccggtacaattgacgacagcatcagacacgcgattaccaagctcgctcattaccatgtctgctgtacacggtccgcagagcaacatctgattagtatgtgcgaggatcatgaccggatactcctggctggttgcccatcctacgacaagctgctgtcggccaaaaataaggactacatgagtatcattagaatgtggctgggtgacgacgtgaagagtaaggactatattgttgcgcttcagcaccccgtgacaacggacattaaacactccatcaaaatgtttgaacttacactggacgcgctgattagcttcaataagcgtactctggtcctgtttcccaatattgacgccgggtccaaggaaatggtgagagtcatgcggaagaaaggcatcgagcaccatccgaatttccgcgccgtcaaacacgtacccttcgatcagttcattcaactggtcgcgcatgccggatgtatgatcggcaactctagctgtggcgtgcgcgaggttggcgcattcgggaccccggtaattaacttaggtacaaggcaaatcggtcgcgagacaggtgaaaacgttttacatgtgagagatgctgacactcaagataaaattcttcaagctttgcatctgcagtttggaaaacaatatccctgctccaaaatctacggcgacggaaacgccgtcccacgaatcttgaagttcttaaaatccattgacctgcaggagccgctgcagaagaaattctgcttcccacccgtgaaagagaatatttcacaagatatcgatcatattctcgaaactttgagcgctctggccgtcgatctgggggggaccaacctgagagtggccatcgtgtctatgaagggcgagatcgtgaagaaatacacgcagtttaaccctaaaacgtatgaagagcggatcaacctaattttgcaaatgtgcgtcgaggccgccgctgaggcagtcaaactgaactgccgtatactgggagtgggtattggcggtgggattattcatcagcatgagcttatccacgggagctccttctgtgccgccgagctcggccacctggtggtctctctcgatgggcccgactgctcctgcggcagccacggttgcatagaggcctatgccagtggaatggcactccagcgcgaggcaaaaaagctgcacgatgaggacctacttttagtggaaggcatgtcagtccctaaagacgaagccgtgggagccctacatctcatccaggccgcgaaactgggaaatgcaaaggcacaatctattttgcgtacagccgggaccgctctcggcctcggggtagtgaatatcctgcacacaatgaacccctctcttgtcatcttaagcggagtgcttgctagccactacatccacatagttaaggatgttatccgccaacaggccctcagttctgtccaggatgtcgatgtagttgtgtctgatctggtagaccctgcccttcttggtgccgccagcatggttctcgactatactacacgccggatatactag

SEQ ID NO: 72651 - DNA, 399 bp, Artificial Sequence
  derived and/or modified sequence
atgttcgagttgactctcgacgctcttatcagcttcaataagaggacccttgtgcttttccccaacatagacgccggttcgaaggagatggtgcgtgtgatgagaaagaaaggcatcgaacaccaccctaacttcagagctgtgaagcatgtgcccttcgaccagttcatccagctcgtggcccacgcaggatgcatgatcggaaactcaagctgtggtgtgcgagaggtcggggctctgacgaggctgtacacatacgtgagttgctataaacacacacatacacacacccacacccatccttcttcctctaatcccaaacttcgcagtcagaaagtgatccaatccgaaaaccgcggtaaatcttatcaagagggtctgaaatacaccttcttctag

SEQ ID NO: 72652 - DNA, 1947 bp, Artificial Sequence
  derived and/or modified sequence
atggaaaagaatggaaataatagaaagctccgcgtctgcgtggccacctgtaaccgagccgattacagcaaactcgctccaataatgttcggaattaaaactgaacccgaattcttcgagctcgacgtggtggtcctgggctctcatcttattgatgattatggcaacacctaccgcatgatcgaacaggatgacttcgatatcaacacacggttacacaccatcgtgcgtggggaggacgaggcagctatggtggaaagcgtcgggctggctctggttaagctgcccgacgtgctaaaccgtcttaaaccagatataatgattgtgcatggtgaccgctttgacgccctcgcactcgcaacaagcgctgctctgatgaacattcggattctgcatatcgagggcggagaggtgtccggtactatcgacgactccatccgtcacgccatcaccaagctcgcacactatcatgtttgctgcacccggagcgccgaacagcatctgatctcaatgtgcgaggatcatgaccggatcctgctcgccggatgcccctcttatgataagctcctgagtgctaagaataaggactacatgagtatcatccgcatgtggctcggtgatgacgtgaagtccaaagattatatcgttgcactgcagcatcctgtcactaccgacataaagcatagtatcaagatgttcgaactgaccctcgatgcattgatttcgtttaacaagcgaacgctggtgctctttccaaatattgacgcgggatcgaaggagatggtgagggttatgcgaaagaaaggaatagagcatcaccccaactttcgtgctgttaagcatgtgccattcgaccaattcatccagttggtggcccacgccggatgcatgattggcaacagctcatgtggagtgcgggaggtcggcgctttcggaactcccgtgattaatctgggaacgcgacagataggaagagagaccggggagaatgtcttgcacgtaagggacgcggacacccaggacaagatcctacaggccctgcatttgcagttcggaaagcagtacccttgctctaagatctatggagacggcaatgctgttccaaggattctcaagtttctcaagagtattgatctgcaggagccattacagaaaaagttctgcttcccacccgtgaaagagaacatttcccaagatatcgaccacatcctcgaaaccttaagcgcactggccgtcgaccttggtggcactaacctacgagttgccatagtttccatgaagggcgagatcgtcaagaaatacacccagttcaaccctaaaacatatgaagaaaggattaacctcatattacagatgtgcgttgaagccgctgctgaggccgttaagctcaactgcagaattttaggcgtcggtattggcggagggatcattcatcagcatgaattgatacacggctctagtttctgcgcggctgaacttgggcatttagtagtgagcctggatgggcctgactgctcttgtggtagccacggctgcattgaggcctatgcttccggtatggccctacagcgggaagctaagaaactgcacgatgaggatcttttgctggtggagggcatgagcgtgccgaaagacgaggcagtaggcgcactgcacctgatccaggccgctaaattggggaatgctaaggcacagagtattcttagaaccgccggaacagccctaggcctgggggtagtgaacatcctccacactatgaacccctccctagtgattttgagtggggtgttggcttcacattatatccatattgtgaaagacgtcatcaggcagcaagccttgtccagcgttcaggacgtcgacgtcgtcgtgagtgacctagttgatcctgcattgttaggcgctgcctccatggtcctcgactacaccactagacggatttactag

SEQ ID NO: 72653 - DNA, 399 bp, Artificial Sequence
  derived and/or modified sequence
atgttcgagctgaccctggacgccctgatcagcttcaacaagagaaccctggtgctgttccccaacatcgacgccggcagcaaggagatggtgagagtgatgagaaagaagggcatcgagcaccaccccaacttcagagccgtgaagcacgtgcccttcgaccagttcatccagctggtggcccacgccggctgcatgatcggcaacagcagctgcggcgtgagagaggtgggcgccctgaccagactgtacacctacgtgagctgctacaagcacacccacacccacacccacacccaccccagcagcagcaaccccaagctgagaagccagaaggtgatccagagcgagaacagaggcaagagctaccaggagggcctgaagtacaccttcttctag

SEQ ID NO: 72654 - DNA, 1947 bp, Artificial Sequence
  derived and/or modified sequence
atggagaagaacggcaacaacagaaagctgagagtgtgcgtggccacctgcaacagagccgactacagcaagctggcccccatcatgttcggcatcaagaccgagcccgagttcttcgagctggacgtggtggtgctgggcagccacctgatcgacgactacggcaacacctacagaatgatcgagcaggacgacttcgacatcaacaccagactgcacaccatcgtgagaggcgaggacgaggccgccatggtggagagcgtgggcctggccctggtgaagctgcccgacgtgctgaacagactgaagcccgacatcatgatcgtgcacggcgacagattcgacgccctggccctggccaccagcgccgccctgatgaacatcagaatcctgcacatcgagggcggcgaggtgagcggcaccatcgacgacagcatcagacacgccatcaccaagctggcccactaccacgtgtgctgcaccagaagcgccgagcagcacctgatcagcatgtgcgaggaccacgacagaatcctgctggccggctgccccagctacgacaagctgctgagcgccaagaacaaggactacatgagcatcatcagaatgtggctgggcgacgacgtgaagagcaaggactacatcgtggccctgcagcaccccgtgaccaccgacatcaagcacagcatcaagatgttcgagctgaccctggacgccctgatcagcttcaacaagagaaccctggtgctgttccccaacatcgacgccggcagcaaggagatggtgagagtgatgagaaagaagggcatcgagcaccaccccaacttcagagccgtgaagcacgtgcccttcgaccagttcatccagctggtggcccacgccggctgcatgatcggcaacagcagctgcggcgtgagagaggtgggcgccttcggcacccccgtgatcaacctgggcaccagacagatcggcagagagaccggcgagaacgtgctgcacgtgagagacgccgacacccaggacaagatcctgcaggccctgcacctgcagttcggcaagcagtacccctgcagcaagatctacggcgacggcaacgccgtgcccagaatcctgaagttcctgaagagcatcgacctgcaggagcccctgcagaagaagttctgcttcccccccgtgaaggagaacatcagccaggacatcgaccacatcctggagaccctgagcgccctggccgtggacctgggcggcaccaacctgagagtggccatcgtgagcatgaagggcgagatcgtgaagaagtacacccagttcaaccccaagacctacgaggagagaatcaacctgatcctgcagatgtgcgtggaggccgccgccgaggccgtgaagctgaactgcagaatcctgggcgtgggcatcggcggcggcatcatccaccagcacgagctgatccacggcagcagcttctgcgccgccgagctgggccacctggtggtgagcctggacggccccgactgcagctgcggcagccacggctgcatcgaggcctacgccagcggcatggccctgcagagagaggccaagaagctgcacgacgaggacctgctgctggtggagggcatgagcgtgcccaaggacgaggccgtgggcgccctgcacctgatccaggccgccaagctgggcaacgccaaggcccagagcatcctgagaaccgccggcaccgccctgggcctgggcgtggtgaacatcctgcacaccatgaaccccagcctggtgatcctgagcggcgtgctggccagccactacatccacatcgtgaaggacgtgatcagacagcaggccctgagcagcgtgcaggacgtggacgtggtggtgagcgacctggtggaccccgccctgctgggcgccgccagcatggtgctggactacaccaccagaagaatctactag

SEQ ID NO: 72655 - protein, 717 aa, Artificial Sequence
  derived and/or modified sequence
MPIGDCSVAAKPRKQLLCSLFQTTLGYRARASGWKPMVICRGSHAFKDLINTYRMIEQDDFDINTRLHTIVRGEDEAAMVESVGLALVKLPDVLNRLKPDIMIVHGDRFDALALATSAALMNIRILHIEGGEVSGTIDDSIRHAITKLAHYHVCCTRSAEQHLISMCEDHDRILLAGCPSYDKLLSAKNKDYMSIIRMWLGDDVKSKDYIVALQHPVTTDIKHSIKMFELTLDALISFNKRTLVLFPNIDAGSKEMVRVMRKKGIEHHPNFRAVKHVPFDQFIQLVAHAGCMIGNSSCGVREVGAFGTPVINLGTRQIGRETGENVLHVRDADTQDKILQALHLQFGKQYPCSKIYGDGNAVPRILKFLKSIDLQEPLQKKFCFPPVKENISQDIDHILETLSALAVDLGGTNLRVAIVSMKGEIVKKYTQFNPKTYEERINLILQMCVEAAAEAVKLNCRILGVGISTGGRVNPREGIVLHSTKLIQEWNSVDLRTPLSDTLHLPVWVDNDGNCAALAERKFGQGKGLENFVTLITGTGIGGGIIHQHELIHGSSFCAAELGHLVVSLDGPDCSCGSHGCIEAYASGMALQREAKKLHDEDLLLVEGMSVPKDEAVGALHLIQAAKLGNAKAQSILRTAGTALGLGVVNILHTMNPSLVILSGVLASHYIHIVKDVIRQQALSSVQDVDVVVSDLVDPALLGAASMVLDYTTRRIY

SEQ ID NO: 72656 - protein, 132 aa, Artificial Sequence
  derived and/or modified sequence
MFELTLDALISFNKRTLVLFPNIDAGSKEMVRVMRKKGIEHHPNFRAVKHVPFDQFIQLVAHAGCMIGNSSCGVREVGALTRLYTYVSCYKHTHTHTHTHPSSSNPKLRSQKVIQSENRGKSYQEGLKYTFF

SEQ ID NO: 72657 - DNA, 2154 bp, Artificial Sequence
  derived and/or modified sequence
atgcccatcggcgattgctccgttgcggccaaacctcgtaaacaactcctgtgcagtctctttcagaccactctcggctatcgagcacgggcctctggctggaaaccaatggtaatatgccggggctcccacgccttcaaagacctgatcaatacttaccgaatgattgagcaagatgacttcgacatcaacactagactgcatactatcgttagaggtgaggatgaggccgccatggtggagagcgtcggcttggcgttagtgaaactacccgatgtgctcaacaggctaaagccggatataatgatagtgcacggcgataggttcgatgctttggcgctggccaccagcgcggcactgatgaatatcagaatcctgcatatagaggggggggaagtgtctggcacaattgacgactccatccggcatgcgatcaccaaactggcacattatcacgtctgctgtacaaggagtgcggagcagcacctgatctccatgtgcgaagatcacgatcgcatattactcgcgggctgtccaagctacgacaagctgctgtcggccaaaaataaagattacatgagcattattcgcatgtggttgggtgacgacgtgaagtctaaggactacatcgttgccctgcagcaccccgtgacaaccgatatcaagcactccatcaaaatgttcgaactgacactcgacgcgctgatatctttcaacaagcgaactctagtgctattcccaaacattgatgctgggtccaaagaaatggtgcgggtcatgagaaagaaaggaatagaacaccaccccaattttcgggctgtgaagcacgtgcccttcgatcaattcattcagctggttgcccacgcaggctgtatgattggcaatagttcatgtggcgtgcgagaggtgggcgcttttggcacacccgtcatcaatcttggaacaaggcagatcgggagggaaacaggcgagaatgtgttgcatgtgagagacgccgacactcaggacaagattctgcaggccctgcatctgcaatttggcaaacagtacccctgctcaaagatctacggcgacgggaacgccgtcccgaggatcctgaaatttcttaaaagtattgacctgcaagaaccgctgcagaaaaagttttgcttcccaccagtgaaagagaatattagccaggatattgaccacattctcgagactctaagtgccctggccgtggatttaggcgggacaaaccttagagttgctatcgtctctatgaagggtgagatcgtcaaaaagtacactcagttcaaccccaagacatacgaggaaaggatcaacctcattcttcagatgtgcgtggaggccgcagccgaggcagtcaagctgaactgtcgaatacttggagttggcatttctaccggcggacgggtgaatcctagggagggcatcgtgctacactctaccaagctcattcaggaatggaattctgtggatctaaggacccccttgagcgacactctccacctaccagtgtgggtggataacgatggcaactgtgccgcactggccgaacgcaaatttggccagggtaaagggctggagaattttgtgacccttatcacaggaaccggcattgggggagggatcatccatcagcacgagctgatccatggcagcagcttctgcgccgctgagctcggccatttggttgtctctctggacggtcccgactgttcttgcggatctcatggatgtatagaagcttacgcttcgggaatggcgctgcaaagggaggcaaagaagctccatgatgaggatctcctactcgtggagggtatgtctgtgcctaaggacgaagcagtgggggccttgcacctgatccaggccgctaagttaggaaacgccaaggcacaaagtattttaaggaccgccggaacggccctcggactgggcgtcgtgaatattttgcatactatgaatccaagcctcgtgattctgtctggcgtcctggcgagccactatatccacatcgttaaagacgtgatcagacagcaagccttatcgtccgttcaggatgttgacgttgtcgtgagcgacttggttgacccagccttactaggcgccgcctccatggtgctcgactatacaaccaggcgcatatactag

SEQ ID NO: 72658 - DNA, 5089 bp, Artificial Sequence
  derived and/or modified sequence
agtctggaattcagatgcctattggtgactgctccgtggcagctaaaccaagaaaacagctgctctgctcattatttcaaaccacactagggtacagagctcgtgcttcgggatggaaacctatggttatctgcagagggagtcatgctttcaaggacctcataaatacatatcgaatgattgaacaagatgactttgacattaacaccaggctacacacaattgtgaggggagaagatgaggcagccatggtggagtcagtaggcctggccctagtgaagctgccagatgtccttaatcgcctgaagcctgatatcatgattgttcatggagacaggtttgatgccctggctctggccacatctgctgccttgatgaacatccgaatccttcacattgaaggtggggaagtcagtgggaccattgatgactctatcagacatgccataacaaaactggctcattatcatgtgtgctgcacccgcagtgcagagcagcacctgatatccatgtgtgaggaccatgatcgcatccttttggcaggctgcccttcctatgacaaacttctctcagccaagaacaaagactacatgagcatcattcgcatgtggctaggtgatgatgtaaaatctaaagattacattgttgcactacagcaccctgtgaccactgacattaagcattccataaaaatgtttgaattaacattggatgcacttatctcatttaacaagcggaccctagtcctgtttccaaatattgacgcagggagcaaagagatggttcgagtgatgcggaagaagggcattgagcatcatcccaactttcgtgcagttaaacacgtcccatttgaccagtttatacagttggttgcccatgctggctgtatgattgggaacagcagctgtggggttcgagaagttggagcttttggaacacctgtgatcaacctgggaacacgtcagattggaagagaaacaggggagaatgttcttcatgtccgggatgctgacacccaagacaaaatattgcaagcactgcaccttcagtttggtaaacagtacccttgttcaaagatatatggggatggaaatgctgttccaaggattttgaagtttctcaaatctatcgatcttcaagagccactgcaaaagaaattctgctttcctcctgtgaaggagaatatctctcaagatattgaccatattcttgaaactctaagtgccttggccgttgatcttggcgggacgaacctccgagttgcaatagtcagcatgaagggtgaaatagttaagaagtatactcagttcaatcctaaaacctatgaagagaggattaatttaatcctacagatgtgtgtggaagctgcagcagaagctgtaaaactgaactgcagaattttgggagtaggcatttccacaggtggccgtgtaaatcctcgggaaggaattgtgctgcattcaaccaaactgatccaagagtggaactctgtggaccttaggacccccctttctgacactttgcatctccctgtgtgggtagacaatgatggcaactgtgctgccctggcggaaaggaaatttggccaaggaaagggactggaaaactttgttacacttatcacaggcacaggaatcggtggtggaattatccatcagcatgaattgatccacggaagctccttctgtgctgcagaactgggccaccttgttgtgtctctggatgggcctgattgttcctgtggaagccatgggtgcattgaagcatacgcctctggaatggccttgcagagggaggcaaaaaagctccatgatgaggacctgctcttggtggaagggatgtcagtgccaaaagatgaggctgtgggtgcgctccatctcatccaagctgcgaaacttggcaatgcgaaggcccagagcatcctaagaacagctggaacagctttgggtcttggggttgtgaacatcctccataccatgaatccctcccttgtgatcctctccggagtcctggccagtcactatatccacattgtcaaagacgtcattcgccagcaggccttgtcctccgtgcaggacgtggatgtggtggtttcggatttggttgaccccgccctgctgggtgctgccagcatggttctggactacacaacacgcaggatctactagacctccaggaacagacatggaccttctctccagagctcctgagtggaatcaagttcttgtctttaggatgaccgtttcttaacaatcaaatctggtattgaactgcaggtgactttggcagagaaatgttttcacttttggtctcctcttccagagtcacctttccccactcctatttttgtagatgctattctttctgatgtcttcttactaggggtcattttagctcaaaccctgtaagttacagtcacaattttctgtgccaaagcagctacaataatagagaggaagccttcttagaactctgcttactaatgtattaataccactgagaccttcaggccttgcctgggatatcacttcatcctgaagtttgcattaataatccttccaggccgggcacagtggctcacgcctgtaatcccagcactttgggaggccgaggcgggcggatcacgaggtcaggagatcgagaccgccctggctaacatggtgaaacatggtgaaaccccgtctctactaaaaatacaaaaaattagctgggtgtggtggcgggtcccagctactcgggaggctgaggcaggagaatggcatgaaccagggaggcggagctggcagtgaactgagaccgcaccactgcactccagcctgggtgacagagcaagactccatctcaaaaataataataataaataataataataataataataataataataatccttccagctgggcgcagtggctcacgcctgtaatcccaacattttgggaggccgagatgggcggatcacctgaggtcaggagttcaagaccagcctggccaacatggtgaaaccccatctctactaaaatacaaaaattagccgggcgtggtggcatgtgcctgtagtcccagctactcgggaggctgaggcaggagaattgcttgaacccgggaggcggaggttgcagtgagccgagatcatgccactgcactccaccctgggtgacagagcgagactccgtctacacacacacacacacacacacacacatccttcctcctctaaccccaaactaagatcacagaaggtgatccagtcagagaacagagggaaatcttaccaggaagggcttaagtacacttttttttaaaacagctttattgtttttaaagcctacaatttgataagccttgacatatgtatacctgtgaaagcatcaccacaatcaagacactggacatatctatcactcccccatctcagatatcccccctaatcctggataccatttgttgaaagatgttattactctagctgaacttacaagagactttagaccagggatctaaattacagtggccttagtgaccttgtccttatcttcttaggacagctgagaagccactgggacttagagcctttaaaaggagattaactgtcccaaaaggatctttgctactgaccagcagacacttcttccttcagtagcctttcatactgtgttgagtaacaccctagggtgtccattaaagttttgagttttacctagagcccagagccatgaatcaggattctgtctacatgattcgtgttttcattggtgtcaaaatacaaaagccaaagttctggctatgaattgttaacttggaagaaatactaactgccaccacttattaagtgcctactgtgtgccaggctctgaactaggtgcttcatatacattatcctaaattatctcaacatatgaggtaggtgttttaatttttattttatagaacttggtgtgtttgactgttaagctatggggctagagagagggtttgatcccaggtccctctgtgcttttgctgctgagccacacaacctctcatttcaaaaacactttcaaaatgctaacatattctaattcactctaggccaccaaaaactttaatactaatatctgatttgtaaatgacttaatgtatccttgaccctatcagctgaatttaatgaaatattcctctctgctgtgaaattttaccagtatagtatttggtctagtgacaggtgttctatttttttgagacgggtctcactctgtcacccaggctggagtgcagtggctcaatgcaacctctgccccccaagttcaagtgattctcctgcctcagcctcttgagtagctgggattacaggcacatgcaccacgcccggctgatttttttttgtatttttagtagacagggtttcaccatgttggccaggctggtcttgaactcctgacctcaggtgatccgcccgcctctgcctcccaaagtgctgggattacaggtgtaagccatcacacctggccctagtgacaggtttttatgggtacttttagatgatctaagaaatcatgtgcatatatctttcagatttctattttgggaaaatgaaggtttctacaacatattgtttcagtgttcaaataaactgaaggactcaacattacatttgaactatatccttcctagtgggttagtgtgaaaaagagtttggctgattcctaaaactctgccagccctgcagtaatctccagggcctggttattgttcagacattccatggtgattcctgggaaggaagcttggctgctcagtttctgagtctggggtgagataatgttctgggaagggacatctgttctttggtgtaatctctcatggtgaaatctgctctgtacatcagacaattgcattgctaccaagtttcataccaaatatttgaaaggatggtattgaatctaaaaccaaatattagtttttattaaactcatgggaaggctaatatattccaacgtaaattattacatatggttaagtaattgcatgttaatttattttaatgtaaatatttttgttactgttctgagccaaattctaaagaaaaaataaatacatttccttgttg

SEQ ID NO: 72659 - DNA, 2154 bp, Artificial Sequence
  derived and/or modified sequence
atgcccatcggggactgcagcgtggccgccaagcccaggaagcagctgctgtgcagcctcttccagaccaccctgggctaccgggcccgggccagcggctggaagcccatggtgatctgccggggcagccacgccttcaaggacctgatcaacacctacaggatgattgagcaggatgactttgacatcaacacccggctgcacaccatcgtgcggggggaggatgaagctgccatggtggagagcgtgggcctggccctggtgaagctgcctgatgtgctgaaccggctgaagccagacatcatgattgtgcatggagacagatttgatgccctggccctggccaccagcgctgccctgatgaacatccgcatcctgcacatcgagggcggggaggtgtctggcaccattgatgacagcatcagacatgccatcaccaagctggcccactaccacgtgtgctgcaccaggtctgctgagcagcacctgatctccatgtgtgaggaccatgaccgcatcctgctggccggctgccccagctatgacaagctgctgagcgccaagaacaaggactacatgagcatcatccgcatgtggctgggagatgatgtgaagagcaaggactacatcgtggccctgcagcaccctgtgaccacagacatcaagcacagcatcaagatgtttgagctgaccctggatgccctgatctccttcaacaagaggaccctggtgctcttccccaacattgatgctggcagcaaggagatggtgcgggtgatgaggaagaagggcatcgagcaccaccccaacttccgggctgtgaagcacgtgccctttgaccagttcatccagctggtggcccatgctggctgcatgattggcaacagcagctgtggggtgcgggaggtgggcgccttcggcacccctgtgatcaacctgggcacccggcagatcggccgggagaccggggagaatgtgctgcacgtgagagatgctgacacccaggacaagatcctgcaggccctgcacctgcagtttgggaagcagtacccctgcagcaagatctatggagatggaaatgctgtgccccgcatcctgaagttcctgaagagcattgacctgcaggagcccctgcagaagaagttctgcttcccccctgtgaaggagaacatcagccaggacatcgaccacatcctggagaccctgagcgccctggccgtggacctgggcggcaccaacctgcgggtggccatcgtgtccatgaagggggagatcgtgaagaagtacacccagttcaaccccaagacctatgaggagcgcatcaacctgatcctgcagatgtgtgtggaggccgctgctgaggccgtgaagctgaactgccgcatcctgggcgtgggcatcagcactggaggccgggtgaacccccgggagggcatcgtgctgcacagcaccaagctgatccaggagtggaacagcgtggacctgcggacccccctgagtgacaccctgcacctgcctgtgtgggtggacaatgatggcaactgtgccgccctggccgagaggaagtttggccagggcaagggcctggagaactttgtgaccctcatcactggaactggaattggaggcggcatcatccaccagcacgagctgattcatggcagcagcttctgtgccgctgagctgggccacctggtggtgtccctggatggccctgactgcagctgtggcagccacggctgcatcgaggcctatgccagcggcatggccctgcagcgggaggccaagaagctgcatgatgaggacctgctgctggtggagggcatgtctgtgcccaaggatgaggccgtgggcgccctgcacctgatccaggccgccaagctgggcaatgccaaggcccagagcatcctgaggacagctggaacagccctgggcctgggcgtggtgaacatcctgcacaccatgaaccccagcctggtgatcctgtctggagtgctggccagccactacatccacatcgtgaaggatgtgatccggcagcaggccctgagctctgtgcaggatgtggatgtggtggtgtctgacctggtggaccctgccctgctgggcgccgcctccatggtgctggactacaccacccggcgcatctactag

SEQ ID NO: 72660 - DNA, 2154 bp, Artificial Sequence
  derived and/or modified sequence
atgcccatcggcgactgcagcgtggccgccaagccccggaagcagttactatgctccctgtttcagactacgcttggctatcgagcaagggcaagcggatggaaacccatggttatttgccgtggatcgcatgcatttaaggatctaatcaacacgtaccgaatgattgagcaggatgattttgatattaatacaaggctgcacactatagtgaggggtgaggacgaggctgccatggtggagagcgttggcctggccctagtcaaactgcctgacgtgctgaaccgcctgaagcctgacatcatgatagtacatggggatcgcttcgatgcgctcgctttggcgacttcagccgcgctcatgaatattcggattcttcatatcgaggggggggaggtctctggcaccattgacgactccatccggcatgctataaccaagcttgcccattaccatgtctgttgtacaagatctgcggaacagcacctcatctctatgtgcgaagaccacgacaggatcctgctcgctggctgtccctcttacgataagctgctaagtgctaagaataaagattatatgagcatcatcagaatgtggctcggggatgatgtaaaatctaaagattatatcgtcgctctgcagcatcccgtgaccacagatattaaacacagcattaaaatgttcgaactgacactcgatgcactgatctcattcaataagcgaactcttgtgttgttcccgaatattgatgccggcagcaaagagatggtccgtgttatgcgaaagaagggaattgagcatcaccccaacttccgcgcagtgaaacatgtccctttcgatcagtttattcagctggtggcccatgccggctgtatgattggtaactcatcatgcggagtgagggaggttggagccttcggtaccccagtgatcaacctcggcaccaggcagattggtcgcgagactggtgagaacgtcttgcacgtcagggatgcagacacccaggacaagatcctgcaggccctgcacctgcagtttggaaaacagtacccgtgctccaaaatctatggtgacggcaacgcggttcctaggattctcaagttcctgaaatcaattgacttgcaagagcccctacagaagaagttttgtttcccgcctgtgaaggagaacattagccaggatatcgatcatatcttggaaaccctatccgcgctcgcagtggacttgggaggaaccaacctgcgggttgccatcgtctctatgaagggtgagatcgtcaagaagtatactcagtttaatcccaagacctacgaggagagaatcaatctcatcctccagatgtgtgtagaagccgcagccgaggcagtgaagctcaactgccgtatccttggcgtggggatcagcacgggtggtagagtgaaccccagggaggggatcgtcctccactctaccaagttgatccaagagtggaattcagtcgacctgagaactcctttgtctgacacgctccatctcccagtgtgggtggataacgatggcaattgtgccgctctcgcagagcgtaagttcggacaggggaaaggcctcgagaacttcgttaccttgattacgggaaccggaatcggcggtgggattattcaccagcacgaattgatccatgggtcgtctttctgtgcagctgagctcggtcatttggtggtcagcctagacggccccgactgcagctgcggcagccacggctgcattgaagcctacgctagcggaatggccctgcagagagaagccaaaaagcttcatgatgaggacctcctgttagtggagggcatgagtgttccaaaggatgaagctgtgggcgccttgcaccttatacaagctgctaagttaggcaatgctaaggcccagagtattctgcgcactgctgggacagcgctgggacttggcgtggttaatattcttcacacgatgaatccctccttggtgattttgtcaggagtgctggcttcccactatattcatattgtgaaggacgtgatccggcagcaggccctgtcatcagtccaggacgtggacgtagtcgtttccgatctcgtcgatcctgctctgctgggagcagcttctatggtgctcgattatacaactcggaggatttactag

SEQ ID NO: 72661 - DNA, 2154 bp, Artificial Sequence
  derived and/or modified sequence
atgcccatcggcgactgctcagtcgcagctaaacccagaaaacagctgctttgcagccttttccagaccacactggggtacagggctcgagcctccggatggaagccaatggtaatttgtcggggatcacatgcctttaaagatttgatcaacacatacaggatgatcgagcaggacgacttcgacatcaatacccgtctccataccatagtgcgcggtgaggatgaagcagcaatggttgagtccgtgggactggccttagttaagctaccggacgtattgaatcgcctgaaaccagacataatgatcgtgcacggggataggttcgatgccctggctttagccacttccgctgccctcatgaatattaggatcctccacatcgaggggggtgaagtatccggcaccatagatgactctatacgacatgctataactaagttggcacattaccacgtctgttgcacacgctcagctgaacaacacttaatcagcatgtgcgaagatcatgataggatcctcctggccggttgtccaagttatgacaaactgctatctgccaaaaataaagattatatgtctataatccgtatgtggctgggtgatgacgttaagtccaaagattacatcgtcgcacttcagcaccccgtgacaaccgacatcaagcattctattaagatgttcgagctcacactggacgccctgatttctttcaataaacgcacccttgtgcttttcccaaacatcgacgccggtagcaaagagatggtccgagttatgaggaagaagggaattgagcaccatcccaacttcagagctgtgaagcacgtcccttttgatcagtttatccagttagtggcccacgctgggtgtatgattggtaattcctcgtgtggtgtccgcgaggtaggtgccttcgggacccccgttatcaacctgggcacacggcagattggcagggaaactggggaaaatgtgctgcatgtacgtgacgctgatacccaggacaaaatcctccaggctctccatctccagtttggcaaacagtatccgtgcagcaagatttacggcgatggcaatgccgtgcccaggatactcaagtttctgaagagtatcgatctgcaggagccgctccaaaagaagttttgtttccccccagtgaaggagaatattagtcaggatatagatcacatactcgagaccctatctgcactcgcggtggacctcggagggaccaacctgcgggtggctatcgttagtatgaaaggggaaattgtgaagaaatacacccagtttaatcctaagacttacgaggagcgtataaatctgattctgcagatgtgtgtggaagccgcagcagaagccgtcaaactaaattgtcggatcctcggggtgggcatcagtacggggggaagggtcaatccgagagaaggaattgtgctgcacagcacaaaattgattcaggagtggaatagtgtcgaccttcgcacccccctgtctgataccctacacctcccagtctgggtggataatgacggaaattgtgccgctctggctgagcgtaagttcgggcagggcaaaggactggagaatttcgtaacactgattacagggacaggaattggtgggggtataattcaccaacatgaactgattcacggaagcagcttttgtgcggcagagcttggacatctggtggtgagtttagacggcccagactgctcttgtgggagtcatgggtgcatcgaagcctacgccagtgggatggctctgcagcgggaggctaagaagttgcatgacgaggacttattactggttgagggcatgtccgttcccaaggacgaagccgttggcgctcttcaccttatccaagcagcaaaactggggaatgcaaaagcacagtccatcttgcgaaccgcagggactgctctaggcctcggggtcgtgaacatactccacactatgaacccgagtctggtgatcctgagtggcgtgttggcaagccattatatccacatagtgaaggatgtgatccgtcagcaagcgctgagctctgtgcaggacgtggatgtggtggtgtccgatctagtggaccctgcactccttggcgcagccagcatggtcctggactacaccacgcggaggatatactag

SEQ ID NO: 72662 - DNA, 2154 bp, Artificial Sequence
  derived and/or modified sequence
atgcccatcggcgactgcagcgtggccgccaagcccagaaagcagctgctgtgcagcctgttccagaccaccctgggctacagagccagagccagcggctggaagcccatggtgatctgcagaggcagccacgccttcaaggacctgatcaacacctacagaatgatcgagcaggacgacttcgacatcaacaccagactgcacaccatcgtgagaggcgaggacgaggccgccatggtggagagcgtgggcctggccctggtgaagctgcccgacgtgctgaacagactgaagcccgacatcatgatcgtgcacggcgacagattcgacgccctggccctggccaccagcgccgccctgatgaacatcagaatcctgcacatcgagggcggcgaggtgagcggcaccatcgacgacagcatcagacacgccatcaccaagctggcccactaccacgtgtgctgcaccagaagcgccgagcagcacctgatcagcatgtgcgaggaccacgacagaatcctgctggccggctgccccagctacgacaagctgctgagcgccaagaacaaggactacatgagcatcatcagaatgtggctgggcgacgacgtgaagagcaaggactacatcgtggccctgcagcaccccgtgaccaccgacatcaagcacagcatcaagatgttcgagctgaccctggacgccctgatcagcttcaacaagagaaccctggtgctgttccccaacatcgacgccggcagcaaggagatggtgagagtgatgagaaagaagggcatcgagcaccaccccaacttcagagccgtgaagcacgtgcccttcgaccagttcatccagctggtggcccacgccggctgcatgatcggcaacagcagctgcggcgtgagagaggtgggcgccttcggcacccccgtgatcaacctgggcaccagacagatcggcagagagaccggcgagaacgtgctgcacgtgagagacgccgacacccaggacaagatcctgcaggccctgcacctgcagttcggcaagcagtacccctgcagcaagatctacggcgacggcaacgccgtgcccagaatcctgaagttcctgaagagcatcgacctgcaggagcccctgcagaagaagttctgcttcccccccgtgaaggagaacatcagccaggacatcgaccacatcctggagaccctgagcgccctggccgtggacctgggcggcaccaacctgagagtggccatcgtgagcatgaagggcgagatcgtgaagaagtacacccagttcaaccccaagacctacgaggagagaatcaacctgatcctgcagatgtgcgtggaggccgccgccgaggccgtgaagctgaactgcagaatcctgggcgtgggcatcagcaccggcggcagagtgaaccccagagagggcatcgtgctgcacagcaccaagctgatccaggagtggaacagcgtggacctgagaacccccctgagcgacaccctgcacctgcccgtgtgggtggacaacgacggcaactgcgccgccctggccgagagaaagttcggccagggcaagggcctggagaacttcgtgaccctgatcaccggcaccggcatcggcggcggcatcatccaccagcacgagctgatccacggcagcagcttctgcgccgccgagctgggccacctggtggtgagcctggacggccccgactgcagctgcggcagccacggctgcatcgaggcctacgccagcggcatggccctgcagagagaggccaagaagctgcacgacgaggacctgctgctggtggagggcatgagcgtgcccaaggacgaggccgtgggcgccctgcacctgatccaggccgccaagctgggcaacgccaaggcccagagcatcctgagaaccgccggcaccgccctgggcctgggcgtggtgaacatcctgcacaccatgaaccccagcctggtgatcctgagcggcgtgctggccagccactacatccacatcgtgaaggacgtgatcagacagcaggccctgagcagcgtgcaggacgtggacgtggtggtgagcgacctggtggaccccgccctgctgggcgccgccagcatggtgctggactacaccaccagaagaatctactag

SEQ ID NO: 72663 - protein, 677 aa, Artificial Sequence
  derived and/or modified sequence
MAEEKKLKLSNTVLPSESMKVVAESMGIAQIQEETCQLLTDEVSYRIKEIAQDALKFMHMGKRQKLTTSDIDYALKLKNVEPLYGFHAQEFIPFRFASGGGRELYFYEEKEVDLSDIINTPLPRVPLDVCLKAHWLSIEGCQPAIPENPPPAPKEQQKAEATEPLKSAKPGQEEDGPLKGKGQGATTADGKGKEKKAPPLLEGAPLRLKPRSIHELSVEQQLYYKEITEACVGSCEAKRAEALQSIATDPGLYQMLPRFSTFISEGVRVNVVQNNLALLIYLMRMVKALMDNPTLYLEKYVHELIPAVMTCIVSRQLCLRPDVDNHWALRDFAARLVAQICKHFSTTTNNIQSRITKTFTKSWVDEKTPWTTRYGSIAGLAELGHDVIKTLILPRLQQEGERIRSVLDGPVLSNIDRIGADHVQSLLLKHCAPVLAKLRPPPDNQDAYRAEFGSLGPLLCSQVVKARAQAALQAQQVNRTTLTITQPRPTLTLSQAPQPGPRTPGLLKVPGSIALPVQTLVSARAAAPPQPSPPPTKFIVMSSSSSAPSTQQVLSLSTSAPGSGSTTTSPVTTTVPSVQPIVKLVSTATTAPPSTAPSGPGSVQKYIVVSLPPTGEGKGGPTSHPSPVPPPASSPSPLSGSALCGGKQEAGDSPPPAPGTPKANGSQPNSGSPQPAP

SEQ ID NO: 72664 - protein, 601 aa, Artificial Sequence
  derived and/or modified sequence
MHMGKRQKLTTSDIDYALKLKNVEPLYGFHAQEFIPFRFASGGGRELYFYEEKEVDLSDIINTPLPRVPLDVCLKAPKEQQKAEATEPLKSAKPGQEEDGPLKGKGQGATTADGKGKEKKAPPLLEGAPLRLKPRSIHELSVEQQLYYKEITEACVGSCEAKRAEALQSIATDPGLYQMLPRFSTFISEGVRVNVVQNNLALLIYLMRMVKALMDNPTLYLEKYVHELIPAVMTCIVSRQLCLRPDVDNHWALRDFAARLVAQICKHFSTTTNNIQSRITKTFTKSWVDEKTPWTTRYGSIAGLAELGHDVIKTLILPRLQQEGERIRSVLDGPVLSNIDRIGADHVQSLLLKHCAPVLAKLRPPPDNQDAYRAEFGSLGPLLCSQVVKARAQAALQAQQVNRTTLTITQPRPTLTLSQAPQPGPRTPGLLKVPGSIALPVQTLVSARAAAPPQPSPPPTKFIVMSSSSSAPSTQQVLSLSTSAPGSGSTTTSPVTTTVPSVQPIVKLVSTATTAPPSTAPSGPGSVQKYIVVSLPPTGEGKGGPTSHPSPVPPPASSPSPLSGSALCGGKQEAGDSPPPAPGTPKANGSQPNSGSPQPAP

SEQ ID NO: 72665 - protein, 714 aa, Artificial Sequence
  derived and/or modified sequence
MTKRRLQTITACLQLREGSPSLHRGLHPSREEKRDSRMAEEKKLKLSNTVLPSESMKVVAESMGIAQIQEETCQLLTDEVSYRIKEIAQDALKFMHMGKRQKLTTSDIDYALKLKNVEPLYGFHAQEFIPFRFASGGGRELYFYEEKEVDLSDIINTPLPRVPLDVCLKAHWLSIEGCQPAIPENPPPAPKEQQKAEATEPLKSAKPGQEEDGPLKGKGQGATTADGKGKEKKAPPLLEGAPLRLKPRSIHELSVEQQLYYKEITEACVGSCEAKRAEALQSIATDPGLYQMLPRFSTFISEGVRVNVVQNNLALLIYLMRMVKALMDNPTLYLEKYVHELIPAVMTCIVSRQLCLRPDVDNHWALRDFAARLVAQICKHFSTTTNNIQSRITKTFTKSWVDEKTPWTTRYGSIAGLAELGHDVIKTLILPRLQQEGERIRSVLDGPVLSNIDRIGADHVQSLLLKHCAPVLAKLRPPPDNQDAYRAEFGSLGPLLCSQVVKARAQAALQAQQVNRTTLTITQPRPTLTLSQAPQPGPRTPGLLKVPGSIALPVQTLVSARAAAPPQPSPPPTKFIVMSSSSSAPSTQQVLSLSTSAPGSGSTTTSPVTTTVPSVQPIVKLVSTATTAPPSTAPSGPGSVQKYIVVSLPPTGEGKGGPTSHPSPVPPPASSPSPLSGSALCGGKQEAGDSPPPAPGTPKANGSQPNSGSPQPAP

SEQ ID NO: 72666 - protein, 734 aa, Artificial Sequence
  derived and/or modified sequence
MDIRHSEFLPCLHCPPFVGPLPVSHVSFSSACPVPLPGSPSLHRGLHPSREEKRDSRMAEEKKLKLSNTVLPSESMKVVAESMGIAQIQEETCQLLTDEVSYRIKEIAQDALKFMHMGKRQKLTTSDIDYALKLKNVEPLYGFHAQEFIPFRFASGGGRELYFYEEKEVDLSDIINTPLPRVPLDVCLKAHWLSIEGCQPAIPENPPPAPKEQQKAEATEPLKSAKPGQEEDGPLKGKGQGATTADGKGKEKKAPPLLEGAPLRLKPRSIHELSVEQQLYYKEITEACVGSCEAKRAEALQSIATDPGLYQMLPRFSTFISEGVRVNVVQNNLALLIYLMRMVKALMDNPTLYLEKYVHELIPAVMTCIVSRQLCLRPDVDNHWALRDFAARLVAQICKHFSTTTNNIQSRITKTFTKSWVDEKTPWTTRYGSIAGLAELGHDVIKTLILPRLQQEGERIRSVLDGPVLSNIDRIGADHVQSLLLKHCAPVLAKLRPPPDNQDAYRAEFGSLGPLLCSQVVKARAQAALQAQQVNRTTLTITQPRPTLTLSQAPQPGPRTPGLLKVPGSIALPVQTLVSARAAAPPQPSPPPTKFIVMSSSSSAPSTQQVLSLSTSAPGSGSTTTSPVTTTVPSVQPIVKLVSTATTAPPSTAPSGPGSVQKYIVVSLPPTGEGKGGPTSHPSPVPPPASSPSPLSGSALCGGKQEAGDSPPPAPGTPKANGSQPNSGSPQPAP

SEQ ID NO: 72667 - protein, 255 aa, Artificial Sequence
  derived and/or modified sequence
MAEEKKLKLSNTVLPSESMKVVAESMGIAQIQEETCQLLTDEVSYRIKEIAQDALKFMHMGKRQKLTTSDIDYALKLKNVEPLYGFHAQEFIPFRFASGGGRELYFYEEKEVDLSDIINTPLPRVPLDVCLKAHWLSIEGCQPAIPENPPPAPKEQQKAEATEPLKSAKPGQEEDGPLKGKGQGATTADGKGKEKKAPPLLEGAPLRLKPRSIHELSVEQQLYYKEITEACVGSCEAKRAEALQSIATDPGLYQM

SEQ ID NO: 72668 - DNA, 45 bp, Artificial Sequence
  derived and/or modified sequence
atggccgaggagaagaagctgaagctgagcaacaccgtgctgtag

SEQ ID NO: 72669 - DNA, 2145 bp, Artificial Sequence
  derived and/or modified sequence
atgaccaagagaagactgcagaccatcaccgcctgcctgcagctgagagagggcagccccagcctgcacagaggcctgcaccccagcagagaggagaagagagacagcagaatggccgaggagaagaagctgaagctgagcaacaccgtgctgcccagcgagagcatgaaggtggtggccgagagcatgggcatcgcccagatccaggaggagacctgccagctgctgaccgacgaggtgagctacagaatcaaggagatcgcccaggacgccctgaagttcatgcacatgggcaagagacagaagctgaccaccagcgacatcgactacgccctgaagctgaagaacgtggagcccctgtacggcttccacgcccaggagttcatccccttcagattcgccagcggcggcggcagagagctgtacttctacgaggagaaggaggtggacctgagcgacatcatcaacacccccctgcccagagtgcccctggacgtgtgcctgaaggcccactggctgagcatcgagggctgccagcccgccatccccgagaaccccccccccgcccccaaggagcagcagaaggccgaggccaccgagcccctgaagagcgccaagcccggccaggaggaggacggccccctgaagggcaagggccagggcgccaccaccgccgacggcaagggcaaggagaagaaggccccccccctgctggagggcgcccccctgagactgaagcccagaagcatccacgagctgagcgtggagcagcagctgtactacaaggagatcaccgaggcctgcgtgggcagctgcgaggccaagagagccgaggccctgcagagcatcgccaccgaccccggcctgtaccagatgctgcccagattcagcaccttcatcagcgagggcgtgagagtgaacgtggtgcagaacaacctggccctgctgatctacctgatgagaatggtgaaggccctgatggacaaccccaccctgtacctggagaagtacgtgcacgagctgatccccgccgtgatgacctgcatcgtgagcagacagctgtgcctgagacccgacgtggacaaccactgggccctgagagacttcgccgccagactggtggcccagatctgcaagcacttcagcaccaccaccaacaacatccagagcagaatcaccaagaccttcaccaagagctgggtggacgagaagaccccctggaccaccagatacggcagcatcgccggcctggccgagctgggccacgacgtgatcaagaccctgatcctgcccagactgcagcaggagggcgagagaatcagaagcgtgctggacggccccgtgctgagcaacatcgacagaatcggcgccgaccacgtgcagagcctgctgctgaagcactgcgcccccgtgctggccaagctgagacccccccccgacaaccaggacgcctacagagccgagttcggcagcctgggccccctgctgtgcagccaggtggtgaaggccagagcccaggccgccctgcaggcccagcaggtgaacagaaccaccctgaccatcacccagcccagacccaccctgaccctgagccaggccccccagcccggccccagaacccccggcctgctgaaggtgcccggcagcatcgccctgcccgtgcagaccctggtgagcgccagagccgccgcccccccccagcccagccccccccccaccaagttcatcgtgatgagcagcagcagcagcgcccccagcacccagcaggtgctgagcctgagcaccagcgcccccggcagcggcagcaccaccaccagccccgtgaccaccaccgtgcccagcgtgcagcccatcgtgaagctggtgagcaccgccaccaccgccccccccagcaccgcccccagcggccccggcagcgtgcagaagtacatcgtggtgagcctgccccccaccggcgagggcaagggcggccccaccagccaccccagccccgtgcccccccccgccagcagccccagccccctgagcggcagcgccctgtgcggcggcaagcaggaggccggcgacagccccccccccgcccccggcacccccaaggccaacggcagccagcccaacagcggcagcccccagcccgccccctag

SEQ ID NO: 72670 - DNA, 2205 bp, Artificial Sequence
  derived and/or modified sequence
atggacatcagacacagcgagttcctgccctgcctgcactgcccccccttcgtgggccccctgcccgtgagccacgtgagcttcagcagcgcctgccccgtgcccctgcccggcagccccagcctgcacagaggcctgcaccccagcagagaggagaagagagacagcagaatggccgaggagaagaagctgaagctgagcaacaccgtgctgcccagcgagagcatgaaggtggtggccgagagcatgggcatcgcccagatccaggaggagacctgccagctgctgaccgacgaggtgagctacagaatcaaggagatcgcccaggacgccctgaagttcatgcacatgggcaagagacagaagctgaccaccagcgacatcgactacgccctgaagctgaagaacgtggagcccctgtacggcttccacgcccaggagttcatccccttcagattcgccagcggcggcggcagagagctgtacttctacgaggagaaggaggtggacctgagcgacatcatcaacacccccctgcccagagtgcccctggacgtgtgcctgaaggcccactggctgagcatcgagggctgccagcccgccatccccgagaaccccccccccgcccccaaggagcagcagaaggccgaggccaccgagcccctgaagagcgccaagcccggccaggaggaggacggccccctgaagggcaagggccagggcgccaccaccgccgacggcaagggcaaggagaagaaggccccccccctgctggagggcgcccccctgagactgaagcccagaagcatccacgagctgagcgtggagcagcagctgtactacaaggagatcaccgaggcctgcgtgggcagctgcgaggccaagagagccgaggccctgcagagcatcgccaccgaccccggcctgtaccagatgctgcccagattcagcaccttcatcagcgagggcgtgagagtgaacgtggtgcagaacaacctggccctgctgatctacctgatgagaatggtgaaggccctgatggacaaccccaccctgtacctggagaagtacgtgcacgagctgatccccgccgtgatgacctgcatcgtgagcagacagctgtgcctgagacccgacgtggacaaccactgggccctgagagacttcgccgccagactggtggcccagatctgcaagcacttcagcaccaccaccaacaacatccagagcagaatcaccaagaccttcaccaagagctgggtggacgagaagaccccctggaccaccagatacggcagcatcgccggcctggccgagctgggccacgacgtgatcaagaccctgatcctgcccagactgcagcaggagggcgagagaatcagaagcgtgctggacggccccgtgctgagcaacatcgacagaatcggcgccgaccacgtgcagagcctgctgctgaagcactgcgcccccgtgctggccaagctgagacccccccccgacaaccaggacgcctacagagccgagttcggcagcctgggccccctgctgtgcagccaggtggtgaaggccagagcccaggccgccctgcaggcccagcaggtgaacagaaccaccctgaccatcacccagcccagacccaccctgaccctgagccaggccccccagcccggccccagaacccccggcctgctgaaggtgcccggcagcatcgccctgcccgtgcagaccctggtgagcgccagagccgccgcccccccccagcccagccccccccccaccaagttcatcgtgatgagcagcagcagcagcgcccccagcacccagcaggtgctgagcctgagcaccagcgcccccggcagcggcagcaccaccaccagccccgtgaccaccaccgtgcccagcgtgcagcccatcgtgaagctggtgagcaccgccaccaccgccccccccagcaccgcccccagcggccccggcagcgtgcagaagtacatcgtggtgagcctgccccccaccggcgagggcaagggcggccccaccagccaccccagccccgtgcccccccccgccagcagccccagccccctgagcggcagcgccctgtgcggcggcaagcaggaggccggcgacagccccccccccgcccccggcacccccaaggccaacggcagccagcccaacagcggcagcccccagcccgccccctag

SEQ ID NO: 72671 - DNA, 45 bp, Artificial Sequence
  derived and/or modified sequence
atggccgaagaaaagaagctcaaattgagcaacaccgtactgtag

SEQ ID NO: 72672 - DNA, 2145 bp, Artificial Sequence
  derived and/or modified sequence
atgactaaacgacggctccagactatcaccgcctgcttacagctccgagagggttcgccaagtctgcatagaggcctacatccttctcgagaagaaaaacgggatagcagaatggcggaggagaagaaactcaagttgagcaacactgtgcttccaagtgagagcatgaaggttgtcgccgagagcatgggcattgcacagatacaagaagagacgtgccagcttctgacggacgaggtcagttaccgcatcaaagagattgctcaggacgctctcaagttcatgcacatgggaaagcgtcagaagctcaccacctctgatattgattacgctctgaagctaaaaaacgtggaacctctgtatggctttcacgcccaagagtttattcccttccggtttgcttcagggggaggacgggagctttatttttacgaagagaaagaggtcgacctgtccgatattatcaacactccactgccccgtgttcctttggatgtttgtctcaaagcacactggctgtctattgagggctgccagcctgctatccctgagaatcccccccccgcgcctaaagaacagcagaaggccgaggcaactgaacccctgaagtccgccaagccagggcaggaagaggacggcccactgaaaggcaagggacagggagccacaacagccgatgggaagggaaaggagaaaaaggccccacctttgttggagggagctcccctccgactgaaacctaggtccatccacgaactgtctgttgagcagcagctttactataaagaaattactgaagcatgcgttggcagctgtgaggctaaaagggcagaagctcttcagagtattgccacagatcccggtctgtatcaaatgctaccacgattttcaacgtttatctcggaaggcgtgcgcgtgaacgttgttcagaacaacttagcattgctcatatatctgatgcgtatggtgaaggccttaatggataaccctacactctacctggagaagtacgtgcatgaactgattcctgcagtgatgacttgcatcgtcagccgtcagctgtgtttgagacctgatgttgataaccactgggcgcttcgcgacttcgcggcccggctggtggcgcagatctgcaaacacttttccactaccacgaataacattcagtcaaggattaccaaaacattcactaaatcatgggtggatgagaagactccctggaccacacgatatggttctattgctgggctcgctgaactgggtcacgacgtaatcaaaacactcatcctcccccggctgcagcaggaaggtgaacggattcgctcagtcctggacggtccagttctgagtaatattgaccgcattggagcagaccacgtccaaagtctgttactgaagcactgcgcacctgtgctggccaaacttagaccgccgccagataatcaggacgcctatagagccgagtttggatccttggggccactactgtgttcacaagtggtgaaggcacgggcccaggcagctctgcaagcgcaacaggtcaaccgcaccacactgactattacccagccaagacctacactaaccctgtcccaggctcctcagcccggcccacgcacgcccggcctgctgaaggtgccgggctccattgcactccctgttcagacactcgtatctgcacgcgccgccgcaccccctcagccctctccacccccaaccaagtttattgtaatgtcgagctcatccagtgcgccgagcactcaacaggtgcttagcctcagcacctcggcccccggctccggctcaaccaccaccagccctgtaactacaactgttccttcagttcagccgatcgtaaagctggtgagcacagccactacagcccccccctcaactgccccaagtgggcctggctccgttcagaaatacatagtggtgtctttaccaccaacgggtgaaggaaaggggggacctaccagtcaccccagcccagtcccacctcctgcttctagtccatctccactgtctggctccgcactgtgtgggggcaaacaggaagccggagattccccaccccccgctccagggacgccaaaggccaatgggtctcaacccaactccggatcacctcagcctgccccttag

SEQ ID NO: 72673 - DNA, 2205 bp, Artificial Sequence
  derived and/or modified sequence
atggatattcggcacagcgaattcctgccctgtcttcactgtccccctttcgtgggccctctgcccgtttctcacgtttccttctcctctgcttgccccgtccccctccccggaagcccaagcctgcaccggggcttgcaccccagcagagaggaaaagcgcgacagtagaatggcagaggagaaaaagcttaagttatcaaataccgtcctgcccagcgagagtatgaaagtcgttgccgagtccatgggcattgcccagatccaggaggaaacctgccagcttctgacagacgaggtgtcctaccggatcaaggagattgcacaggacgctctaaaatttatgcacatgggaaagaggcagaaacttacaacctccgacatagactacgccctgaagttaaagaacgtggaaccactttacgggtttcacgcccaggaattcattccctttaggtttgcttctggcggtggtcgggagttgtacttttatgaggaaaaggaagtggatctgtccgacataatcaacacgccacttccgcgcgtccctctggacgtatgcctaaaagcgcattggttgagcattgaaggttgccagccagcaattccagagaacccgccacccgcccccaaagagcagcagaaggctgaggccaccgagcctctgaagtcggccaaacctgggcaagaagaggacggacctcttaaaggcaaaggccagggtgccacaactgccgatggcaagggtaaggaaaagaaagcacccccactgcttgaaggggctccgctccgcctaaaacctcgcagcatccacgagctaagcgtcgaacagcagctgtactataaagagatcaccgaagcttgcgtaggttcttgcgaggctaaaagggccgaagctcttcagtcaattgctacagacccagggctgtatcagatgctgcctcgattcagcactttcatctctgagggtgtacgagtcaatgtggtgcagaacaacctggccctgctaatctatttgatgcgaatggttaaagccctgatggacaaccccacactctatctcgagaagtatgtccatgagctcatccccgctgtcatgacctgtatcgtttcccggcaactgtgcctcaggcccgatgttgataaccactgggcgctaagggattttgccgctcgacttgtagcacagatttgcaaacacttctcaacaaccactaataatattcagagtaggatcaccaaaacattcaccaaaagttgggtcgacgagaagacgccctggactaccaggtacggctccatcgcaggcctggccgaactggggcacgacgtcattaaaacgctgatccttccaagactccagcaggagggagagagaattcggagcgttttggatgggcctgtactgtctaatattgaccgcattggagctgaccatgtgcaatctttgctgctcaaacactgtgcgcccgtgctggcaaagttgagacctcccccagacaaccaggacgcctaccgggcggaatttggtagtctcggacctctgttgtgttctcaggtcgtaaaagcacgggcccaggctgcccttcaagcccaacaggtcaatcgcaccaccctgacaattactcagcccagacctaccctgaccctctcgcaagcccctcagcccggtccacgtacaccaggcttgctcaaggtacctgggtccatcgctctccctgttcagacgctcgtttctgccagggccgcagcacccccacaaccatcacctccacccacgaagtttatcgtaatgagctcttcctcctccgccccatcaacccagcaggttctcagcctttcaactagtgctcccggctccggttccacgaccacgtctcccgttacaaccacagttccttcggttcagccaatcgttaaactagtgtccacagcgactacggcgccaccctctaccgcaccatcaggacccggaagtgtccagaaatatattgtagtctctcttccccccaccggcgaaggcaagggagggccaacaagccatccctctcctgtgccaccaccagcaagtagccccagcccccttagcggcagcgccttgtgtggtgggaaacaggaagcaggagattcccctccacccgcccctggtacccctaaggctaatggcagccagcctaattcaggatcaccccagccagctccatag

SEQ ID NO: 72674 - DNA, 45 bp, Artificial Sequence
  derived and/or modified sequence
atggccgaggagaagaagctgaagctgagcaacacagtgctgtag

SEQ ID NO: 72675 - DNA, 2145 bp, Artificial Sequence
  derived and/or modified sequence
atgaccaagaggcggctgcagaccatcacagcctgcctgcagctgcgggagggcagccccagcctgcaccggggcctgcaccccagccgggaggagaagagggacagcaggatggccgaggagaagaagctgaagctgagcaacacagtgctgcccagcgagagcatgaaggtggtggccgagagcatgggcatcgcccagatccaggaggagacctgccagctgctgacagatgaggtgtcctaccgcatcaaggagatcgcccaggatgccctgaagttcatgcacatgggcaagaggcagaagctgaccaccagtgacatcgactatgccctgaagctgaagaatgtggagcccctgtatggcttccacgcccaggagttcatccccttccgctttgccagcggcggcggccgggagctgtacttctatgaggagaaggaggtggacctgagtgacatcatcaacacccccctgccccgggtgcccctggatgtgtgcctgaaggcccactggctgagcattgagggctgccagcctgccatccctgagaaccccccaccagcccccaaggagcagcagaaggccgaggccacagagcccctgaagagcgccaagccaggccaggaggaggatggccccctgaagggcaagggccagggcgccaccacagcagatggcaagggcaaggagaagaaggccccacccctgctggagggcgcccccctgcggctgaagcccaggagcatccacgagctgtctgtggagcagcagctgtactacaaggagatcacagaggcctgtgtgggcagctgtgaggccaagagagctgaggccctgcagagcatcgccacagatcctggcctgtaccagatgctgccccgcttcagcaccttcatcagcgagggcgtgcgggtgaatgtggtgcagaacaacctggccctgctgatctacctgatgaggatggtgaaggccctgatggacaaccccaccctgtacctggagaagtatgtgcatgagctgatcccagctgtgatgacctgcatcgtgtcccggcagctgtgcctgcggccagatgtggacaaccactgggccctgcgggactttgctgcccggctggtggcccagatctgcaagcacttcagcaccaccaccaacaacatccagagccgcatcaccaagaccttcaccaagtcctgggtggatgagaagaccccctggaccaccaggtatggcagcattgctggcctggccgagctgggccatgatgtgatcaagaccctcatcctgccccggctgcagcaggagggggagcgcatccgctctgtgctggatggccctgtgctgagcaacatcgacagaattggagctgaccacgtgcagagcctgctgctgaagcactgtgcccctgtgctggccaagctgcggcccccaccagacaaccaggatgcctacagagctgagtttggcagcctgggccccctgctgtgcagccaggtggtgaaggcccgggcccaggccgccctgcaggcccagcaggtgaacagaaccaccctgaccatcacccagccccggcccaccctgaccctgagccaggccccccagcccggccccaggaccccaggcctgctgaaggtgcccggcagcatcgccctgcctgtgcagaccctggtgtctgcccgggctgctgccccaccccagcccagccccccacccaccaagttcatcgtgatgagcagcagcagcagcgcccccagcacccagcaggtgctgagcctgagcaccagcgcccctggcagcggcagcaccaccaccagccctgtgaccaccaccgtgcccagcgtgcagcccatcgtgaagctggtgtccacagccaccacagccccacccagcacagcccccagcggccctggctctgtgcagaagtacatcgtggtgtccctgcccccaactggagagggcaaaggaggccccaccagccaccccagccctgtgcccccaccagccagcagccccagccccctgagcggcagcgccctgtgtggcggcaagcaggaggccggggacagccccccaccagcccctggcacccccaaggccaacggcagccagcccaacagcggcagcccccagcctgccccctag

SEQ ID NO: 72676 - DNA, 2205 bp, Artificial Sequence
  derived and/or modified sequence
atggacatccgccacagcgagttcctgccctgcctgcactgccccccatttgtgggccccctgcctgtgagccacgtgtccttcagcagcgcctgccctgtgcccctgcccggcagccccagcctgcaccggggcctgcaccccagccgggaggagaagagggacagcaggatggccgaggagaagaagctgaagctgagcaacacagtgctgcccagcgagagcatgaaggtggtggccgagagcatgggcatcgcccagatccaggaggagacctgccagctgctgacagatgaggtgtcctaccgcatcaaggagatcgcccaggatgccctgaagttcatgcacatgggcaagaggcagaagctgaccaccagtgacatcgactatgccctgaagctgaagaatgtggagcccctgtatggcttccacgcccaggagttcatccccttccgctttgccagcggcggcggccgggagctgtacttctatgaggagaaggaggtggacctgagtgacatcatcaacacccccctgccccgggtgcccctggatgtgtgcctgaaggcccactggctgagcattgagggctgccagcctgccatccctgagaaccccccaccagcccccaaggagcagcagaaggccgaggccacagagcccctgaagagcgccaagccaggccaggaggaggatggccccctgaagggcaagggccagggcgccaccacagcagatggcaagggcaaggagaagaaggccccacccctgctggagggcgcccccctgcggctgaagcccaggagcatccacgagctgtctgtggagcagcagctgtactacaaggagatcacagaggcctgtgtgggcagctgtgaggccaagagagctgaggccctgcagagcatcgccacagatcctggcctgtaccagatgctgccccgcttcagcaccttcatcagcgagggcgtgcgggtgaatgtggtgcagaacaacctggccctgctgatctacctgatgaggatggtgaaggccctgatggacaaccccaccctgtacctggagaagtatgtgcatgagctgatcccagctgtgatgacctgcatcgtgtcccggcagctgtgcctgcggccagatgtggacaaccactgggccctgcgggactttgctgcccggctggtggcccagatctgcaagcacttcagcaccaccaccaacaacatccagagccgcatcaccaagaccttcaccaagtcctgggtggatgagaagaccccctggaccaccaggtatggcagcattgctggcctggccgagctgggccatgatgtgatcaagaccctcatcctgccccggctgcagcaggagggggagcgcatccgctctgtgctggatggccctgtgctgagcaacatcgacagaattggagctgaccacgtgcagagcctgctgctgaagcactgtgcccctgtgctggccaagctgcggcccccaccagacaaccaggatgcctacagagctgagtttggcagcctgggccccctgctgtgcagccaggtggtgaaggcccgggcccaggccgccctgcaggcccagcaggtgaacagaaccaccctgaccatcacccagccccggcccaccctgaccctgagccaggccccccagcccggccccaggaccccaggcctgctgaaggtgcccggcagcatcgccctgcctgtgcagaccctggtgtctgcccgggctgctgccccaccccagcccagccccccacccaccaagttcatcgtgatgagcagcagcagcagcgcccccagcacccagcaggtgctgagcctgagcaccagcgcccctggcagcggcagcaccaccaccagccctgtgaccaccaccgtgcccagcgtgcagcccatcgtgaagctggtgtccacagccaccacagccccacccagcacagcccccagcggccctggctctgtgcagaagtacatcgtggtgtccctgcccccaactggagagggcaaaggaggccccaccagccaccccagccctgtgcccccaccagccagcagccccagccccctgagcggcagcgccctgtgtggcggcaagcaggaggccggggacagccccccaccagcccctggcacccccaaggccaacggcagccagcccaacagcggcagcccccagcctgccccctag

SEQ ID NO: 72677 - DNA, 2145 bp, Artificial Sequence
  derived and/or modified sequence
atgaccaagcggcggctgcagaccatcaccgcctgcctgcagctgcgagaaggatcccccagcctgcataggggcctacaccccagccgagaagaaaagagagacagtcgaatggcggaggagaagaaattgaaactgagcaacaccgtcctcccgtctgaatctatgaaagttgtggccgaaagcatgggaatcgcacagatccaggaagaaacatgtcagctcctgactgacgaagtgtcataccggatcaaagaaatagcccaagatgcactcaagtttatgcatatgggcaagaggcagaagttaaccacttctgacatcgactacgctctgaagttgaagaacgtcgaaccattgtatgggttccacgcgcaggaatttatccccttcagatttgcctccggaggagggagagagctgtacttctatgaggagaaggaggtggacttgagcgatataataaatactcctctcccgagggtccccctggatgtttgtctgaaagctcactggttgtccattgagggctgccagcccgccattcctgagaacccccctccagcccctaaggaacaacagaaggcggaagctactgagccattgaagtcagctaagcccggacaggaggaagatggcccactcaaaggcaaaggccaaggggctacaacagccgatgggaaaggcaaagaaaagaaggctccgcccctgcttgaaggcgcaccactcagactaaagccacgctcaatccacgagctcagcgtagaacagcaactgtattataaagagattacagaagcttgtgtgggttcctgcgaagcgaaaagggctgaggcactgcagtcaatcgccacggaccccggcctttatcaaatgcttccacgctttagtacatttatcagtgaaggcgtacgggtgaacgtagtccagaacaatctagccttacttatttatctcatgcgcatggtcaaggccttgatggataatccaacgctatatctggaaaaatacgtgcatgagctcatccccgccgtaatgacctgcatcgtttcacgtcagctgtgtctgcgccccgacgttgataatcattgggcattaagggactttgcagcccggttggtggctcaaatatgtaagcacttttccaccaccactaataacattcagtccagaatcactaaaacttttaccaaatcgtgggtcgacgagaagactccatggactaccaggtacggctctattgctgggctcgcagagcttggtcacgatgtcattaagactcttatactgcctaggctgcaacaagagggcgagcggatccggtctgttttagatggaccagtactcagtaatatcgataggattggggccgaccatgtccagtccctgctgttgaagcactgtgcaccagttctggccaagctccgccctcctccggataatcaggatgcctaccgcgctgagtttggctccctcgggccactgctgtgcagccaagtcgttaaagcgagagctcaggcagccctacaagcccaacaggttaacagaacaacattaactattactcagccacgtcccactctaaccctgagtcaggcacctcagcctggccccaggactcctggcctgctgaaagttccagggtctatagctctcccggtgcagactctcgtctccgcgagggctgctgctcccccccaacccagtccgccacctactaagttcatcgtcatgtcctcgagcagttctgctccctccactcaacaagttctgtcactatccaccagcgcccccggctctggctctaccacaaccagtcccgtgaccaccaccgtccccagcgtccagcctatcgttaagttggtctccactgccacaacagctccaccttcaacagcaccctccggacccgggagcgtccaaaagtatatcgtggtgagtttgcccccaacgggggagggcaaaggtggccctacatcccacccttcacccgttccccccccagcctcaagcccatctcctctctcaggctcagctttgtgcggggggaagcaggaggcaggagactcccctccgcccgcccctggaacacctaaggccaacggctcccagcccaattctggcagccctcagcccgccccgtag

SEQ ID NO: 72678 - DNA, 2205 bp, Artificial Sequence
  derived and/or modified sequence
atggacatccggcacagcgagttcctgccctgcctgcactgcccccctttcgttgggcccctgcccgtctcgcatgtcagtttctccagcgcctgtcctgtgcctttgcccggatcaccttcactgcaccgtgggctccaccccagccgtgaagaaaaaagggactctcgaatggctgaggaaaaaaagctgaagctgagtaatacagtgctgcctagcgagagtatgaaagtggtcgccgagtcgatggggatcgcccaaatccaagaggaaacctgccagctgctgacagatgaggtttcctaccgcattaaagagatagcccaggatgcactgaaattcatgcatatgggtaaacgccaaaaactcactacatcagatatcgattatgcgctcaagcttaaaaacgtggaacccctgtatgggtttcacgcccaagaatttataccttttaggtttgcgtctggcggaggccgcgaactgtatttctacgaggaaaaggaggtcgatctgtccgacatcatcaacacccctttaccccgcgtgccccttgacgtgtgcttgaaggcacattggctgtccattgagggttgtcagcccgctatccccgagaaccctcctcccgcacccaaggagcagcagaaagccgaggccaccgagccccttaagtcggctaagccaggccaggaggaggatggtcctttaaaaggcaaaggtcagggagccaccacagcagacggcaaaggcaaggaaaagaaggcaccaccgctgttggaaggcgctcctctgcggttaaaaccccgcagcatccacgagctgagtgtggaacagcagctgtattataaggagatcaccgaggcctgcgtggggtcttgcgaggctaaaagggctgaagctttgcagtccatagctacagatcccggtctttaccagatgctgccccggttttcaacgtttatttctgaaggagttcgcgtcaacgtggtgcaaaacaacctggcactactcatctacttgatgcgtatggtgaaagcactcatggacaatcccacgctttatctggagaagtatgttcatgagcttatccccgctgtaatgacatgtatcgtctcgaggcaactgtgtctgaggcccgatgtggacaaccattgggccctgagggattttgcagcacggcttgtcgcgcagatctgcaagcatttttcaacgacaactaacaacatccagagtaggatcacaaaaaccttcaccaagtcatgggtggatgagaaaacaccttggactactcgatacggttcaatcgctgggcttgctgagttgggccacgacgtgataaaaaccctgatcttaccacgtctgcaacaggagggagaacgtatccgtagcgtgttagatggccctgtgttgtcgaacattgatcggataggagccgatcatgttcagagtctactccttaagcattgtgcccccgttctggcaaaactccgcccgcctccagacaatcaagatgcttaccgcgctgagttcgggagcttaggccccctgttatgtagccaggtcgtaaaagcacgggcccaggccgctctgcaggctcagcaggtcaatcgtacgaccctgactatcacacagcctcgacccacactgacactgtctcaggccccacagccaggcccaaggacccctgggctgttaaaggtgcctggaagcattgctctcccagtgcagacacttgtttcggcccgagccgccgcccccccacagccttccccacccccaaccaaatttatcgtcatgtccagctccagttccgccccttccactcaacaggtgctctcactctccacatccgctcctggtagcggctcaaccactacgagcccagtgacaacgactgtgcctagcgtgcagccaattgtgaaattggtctctacagctaccactgcgccaccctccaccgctccatcaggtccaggttctgttcaaaaatacattgtggtctctctgccccccacaggcgaaggcaagggaggcccgacatctcatccctcgccagtgccacctccagctagtagcccgtctccactgagtggatctgccctatgcgggggcaagcaagaggccggagattcgcctccccccgccccgggtacccctaaagccaacggatcacagcctaattccggatctccacagccagctccatag

SEQ ID NO: 72679 - DNA, 45 bp, Artificial Sequence
  derived and/or modified sequence
atggctgaggaaaagaagcttaagctctccaatacggtcttgtag

SEQ ID NO: 72680 - DNA, 2145 bp, Artificial Sequence
  derived and/or modified sequence
atgaccaaacgcagactccagacaataacagcctgtctgcaactacgagagggatcgccaagcttacatcgaggacttcatccatccagggaggagaagcgcgatagcaggatggccgaagaaaagaagctgaagctgtcaaacacggtgttgccatccgagtcaatgaaggtagtggcagaatctatggggattgctcagatccaggaggaaacgtgtcagcttttgaccgacgaagttagctatcgtataaaagaaatagcccaggacgcattaaaatttatgcacatgggcaagcgccagaaactcacgacatcagatatcgattacgctttaaaactgaaaaacgtcgagccactctatggtttccacgcccaagaatttatcccattccgtttcgcttctggtgggggtagagagctatacttctatgaggagaaagaggtggaccttagcgacataatcaacacccctctgcccagagtgccactggacgtgtgcctgaaggcccattggctctctatcgagggctgtcagcccgcaatacctgagaatcctccacccgcacctaaggaacagcagaaggccgaagctaccgagcccctcaaatccgccaagcccggacaggaggaggacggaccactgaagggcaagggacagggagctacaactgcagatggaaaggggaaggaaaagaaggctcctcctctgttggagggcgcacctttgcgactcaaacctcggtctattcatgagttgtccgtggagcaacagctctactacaaggagattactgaggcgtgtgtgggttcctgcgaggccaagagggccgaggctctccagtcaattgcaacggatcctggtctgtaccagatgcttcccagattctccacctttatctccgaaggagtgcgggtgaacgtcgttcagaacaatctcgctttgctgatctatttaatgagaatggttaaggcgctcatggacaacccaacactgtacctggagaagtatgtgcacgaactgatacctgccgtgatgacatgtattgtgagcaggcagctctgtctccggcctgacgttgacaaccattgggccctgcgcgactttgccgcacgcctcgtcgctcagatatgtaaacatttctcaacaacaaccaataatatccaaagtagaatcacaaagactttcactaaatcatgggtcgatgagaagacaccctggaccacgagatatgggagtatcgccggactggccgagctaggccacgatgtaattaagacactcatcctgccgaggctgcagcaggagggggaacgtattaggtccgtgctggatggccctgtgctctcaaatatagacagaatcggtgccgaccacgtacagagcttactcttgaagcattgcgcacctgtgctcgcaaaactcaggcccccaccggacaaccaagatgcttatcgtgccgagttcggaagcctcggaccactgctgtgctcgcaggttgtaaaagccagggcccaggccgctctacaggcacaacaagtgaatcggaccacactgacaattacacagccacgacctactcttaccttatctcaggccccacagcccggaccccgaactcccggactgctcaaggttcctggatctattgcccttcccgtgcagacgcttgtgtcggcacgggctgcggcaccccctcaacccagcccacccccaactaaattcattgtgatgtctagctcgtcctccgccccttccacacagcaggtgctgagcctaagcactagcgccccagggtctggctcgactacaaccagcccggttacaacgactgtacctagtgtgcagcccattgttaaacttgtttctacagctacaactgcccctccatccacggcaccctctggcccaggctccgtccagaaatatattgttgtctcccttccgcctacaggagagggaaagggagggccaacgtcccatccgtctcccgtcccaccccctgcaagtagtccgtctcccctaagtgggtccgcattgtgtgggggtaaacaggaagcaggagactcaccacctcccgcacctggcaccccaaaggctaatggcagtcagccaaactccggctcccctcagccagcgccttag

SEQ ID NO: 72681 - DNA, 2205 bp, Artificial Sequence
  derived and/or modified sequence
atggacattcgccatagcgagtttttaccctgtctgcactgccctccctttgtggggcctttgcccgtgtcccacgtctcgttttcaagtgcctgccccgtgcccctaccgggttctccttctctacataggggactacacccctctcgggaagagaaacgagacagtcggatggcagaagagaagaagctcaaattgagtaacaccgtactaccctctgaatctatgaaagtggttgcagagagcatgggcattgcccagatccaagaggaaacctgccagctgctgactgatgaagttagctatagaattaaggagatcgcacaggatgcactgaaattcatgcacatgggaaagagacagaaactgaccacctcagatatagactatgccttgaaacttaagaacgtagaacctttgtatggtttccacgcccaggaattcattcccttcaggtttgcgagtggagggggtcgtgaactgtatttttacgaagagaaagaagtcgaccttagtgacattatcaacaccccccttcctagagtccccctggacgtttgtctgaaggcacattggttaagcatcgaaggttgtcagcctgcaatcccagaaaacccacctccagcgcctaaggagcaacagaaggcagaagccacggaaccactcaaatccgccaaacctgggcaagaggaggacggtccattgaaaggaaaggggcaaggcgcaacaaccgcggacgggaaaggtaaagagaagaaggctccacccctgctcgaaggcgcacccttgagactgaagcctcgctccatacatgaattaagtgtcgaacagcagctctactacaaagaaatcaccgaggcgtgtgtggggtcttgtgaagctaaaagggccgaggccttgcagtcgattgcgactgatcccggactataccagatgcttccacgtttctcaacctttatctcagagggagtgagggttaatgtggtgcagaacaacctcgctctcctgatctatctgatgagaatggtgaaagccctgatggacaaccccaccctgtacttagagaagtatgtgcatgagcttataccggcagtaatgacctgcatcgtttcccgtcaactctgccttaggcctgatgtggataatcattgggcactgcgggattttgctgccaggctcgtcgctcagatttgtaaacattttagcacaacaaccaacaacatccaatctagaataacgaagacctttaccaaaagctgggtcgacgagaaaacaccctggactacacggtatggatccatcgcaggattagccgagcttggccatgatgtgattaaaaccttaattctcccgaggctccagcaagagggggaaagaatccgtagtgtacttgacggacccgtcttatccaacatagatcgcattggtgctgaccatgttcagtcattactgctcaaacactgcgcgcctgttctcgctaagctccgtccccctcccgacaatcaggatgcctatagggccgaattcgggtccttaggtcctttactgtgcagtcaggtggtcaaggcccgtgcccaagccgctctccaagcccaacaggtaaataggacaaccctaacaatcacacagccgagacccacactgaccttatcgcaggctccacaacctggcccacggacaccagggctgctcaaagtcccgggatctatagcactcccagtacaaactcttgtttccgcgcgagctgccgcacctccacagccatcaccccctcctactaagtttatcgtgatgtcatcctcgtcaagcgcaccctcaacacagcaggttctttcactgtctacctctgcccctgggagcgggtccacaactacctcccccgtaacaactacagttccctcggtacaacccatcgtgaagctcgtatctacggcgaccacagcccctccctcaacagccccaagtgggcctggtagcgtacaaaagtacattgtggtcagcttaccccctacaggcgaaggcaagggtggccctacctcacacccctcacccgtcccccctccagccagctccccgtccccgttatctggttccgcattgtgtggtgggaagcaggaggctggggattcccctccgcctgcccctggaacccctaaggctaatggcagtcagcctaactctggcagtccccaaccagccccttag

SEQ ID NO: 72682 - DNA, 2727 bp, Artificial Sequence
  derived and/or modified sequence
gatggcgccgagcgccgggtgagcagcgtctcggctgccgctagagttttcctgctccccgcgctcgggtggcgggggcgggtctgagtggtaccccggaggagaccctttgaaggtcccttgtggggactggaaagaggacggttggttgtgtgtctgtgctcgtggggaccccgtgtgtgtgcctgcattggagagatgttgcaggagatggggtgggctctctgaacctcctttcgcgctgcccggggatcttcgacctgcttctctgctgggatctcgcttaagttaacccttccctgggacgccttcctgccgcctccactgatctgaggagatcctgtgactgtagcgtgttttatgagcctttactggcagagggtaccgccgggtattgaaggattcgtaggagttcgccagggaagtgggacacgaccccctcttgtaaacccggcgccaggcacagaggtctccgtctctccaccgggggcttcatccttccagggaggagaagagggactccagaatggctgaggagaagaagctgaagcttagcaacactgtgctgccctcggagtccatgaaggtggtggctgaatccatgggcatcgcccagattcaggaggagacctgccagctgctaacggatgaggtcagctaccgcatcaaagagatcgcacaggatgccttgaagttcatgcacatggggaagcggcagaagctcaccaccagtgacattgactacgccttgaagctaaagaatgtcgagccactctatggcttccacgcccaggagttcattcctttccgcttcgcctctggtgggggccgggagctttacttctatgaggagaaggaggttgatctgagcgacatcatcaatacccctctgccccgggtgcccctggacgtctgcctcaaagctcattggctgagcatcgagggctgccagccagctatccccgagaacccgcccccagctcccaaagagcaacagaaggctgaagccacagaacccctgaagtcagccaagccaggccaggaggaagacggacccctgaagggcaaaggtcaaggggccaccacagccgacggcaaagggaaagagaagaaggcgccgcccttgctggagggggcccccttgcgactgaagccccggagcatccacgagttgtctgtggagcagcagctctactacaaggagatcaccgaggcctgcgtgggctcctgcgaggccaagagggcggaagccctgcaaagcattgccacggaccctggactgtatcagatgctgccacggttcagtacctttatctcggagggggtccgtgtgaacgtggttcagaacaacctggccctactcatctacctgatgcgtatggtgaaagcgctgatggacaaccccacgctctatctagaaaaatacgtccatgagctgattccagctgtgatgacctgcatcgtgagcagacagttgtgcctgcgaccagatgtggacaatcactgggcactccgagactttgctgcccgcctggtggcccagatctgcaagcattttagcacaaccactaacaacatccagtcccggatcaccaagaccttcaccaagagctgggtggacgagaagacgccctggacgactcgttatggctccatcgcaggcttggctgagctgggacacgatgttatcaagactctgattctgccccggctgcagcaggaaggggagcggatccgcagtgtgctggacggccctgtgctgagcaacattgaccggattggagcagaccatgtgcagagcctcctgctgaaacactgtgctcctgttctggcaaagctgcgcccaccgcctgacaatcaggacgcctatcgggcagaattcgggtcccttgggcccctcctctgctcccaggtggtcaaggctcgggcccaggctgctctgcaggctcagcaggtcaacaggaccactctgaccatcacgcagccccggcccacgctgaccctctcgcaggccccacagcctggccctcgcacccctggcttgctgaaggttcctggctccatcgcacttcctgtccagacactggtgtctgcacgagcggctgccccaccacagccttcccctcctccaaccaagtttattgtaatgtcatcgtcctccagcgccccatccacccagcaggtcctgtccctcagcacctcggcccccggctcaggttccaccaccacttcgcccgtcaccaccaccgtccccagcgtgcagcccatcgtcaagttggtctccaccgccaccaccgcaccccccagcactgctccctctggtcctgggagtgtccagaagtacatcgtggtctcacttcccccaacaggggagggcaaaggaggccccacctcccatccttctccagttcctcccccggcatcgtccccgtccccactcagcggcagtgccctttgtggggggaagcaggaggctggggacagtccccctccagctccagggactccaaaagccaatggctcccagcccaactccggctcccctcagcctgctccgtgatgctccacctgccagcccccggattcccacacatgcagacatgtacacacgtgcacgtacacacatgcatgctcgctaagcggaaggaagttgtagattgcttccttcatgtcactttctttttagatattgtacagccagtttctcagaataaaagtttggtttgt

SEQ ID NO: 72683 - DNA, 537 bp, Artificial Sequence
  derived and/or modified sequence
aagatggcgccgagcgccgggtgagcagcgtctcggctgccgctagagttttcctgctccccgcgctcgggtggcgggggcgggtctgagtggtaccccggaggagaccctttgaagggtttccgtctgttacccaggctgttgtgcagtggcaccatcttggctcactgcagcctccaactcctcagttcaagcgatcctcctgcctcagcctcctaagtagctgggatgacaggttcacaccaccagggtctccgtctctccaccgggggcttcatccttccagggaggagaagagggactccagaatggctgaggagaagaagctgaagcttagcaacactgtgctgccctcggagtccatgaaggtggtggctgaatccatgggcatcgcccagattcaggaggagacctgccagctgctaacggatgaggtcagctaccgcatcaaagagatcgcacaggatgccttgaagttcatgcacatggggaagcggcagaagctcaccaccagtgacattgactacgccttgaagc

SEQ ID NO: 72684 - DNA, 2680 bp, Artificial Sequence
  derived and/or modified sequence
gcggggccaagatggcgccgagcgccgggtgagcagcgtctcggctgccgctagagttttcctgctccccgcgctcgggtggcgggggcgggtctgagtggtaccccggaggagaccctttgaaggtcccttgtggggactggaaagaggacggttggttgtgtgtctgtgctcgtggggaccccgtgtgtgtgcctgcattggagagatgttgcaggagatggggtgggctctctgaacctcctttcgcgctgcccggggatcttcgacctgcttctctgctgggatctcgcttaagttaacccttccctgggacgccttcctgccgcctccactgatctgaggagatcctgtgactgtagcgtgttttatgagcctttactggcagagggtaccgccgggtattgaaggattcgtaggagttcgccagggaagtgggacacgaccccctcttgtaaacccggcgccaggcacagaggtctccgtctctccaccgggggcttcatccttccagggaggagaagagggactccagaatggctgaggagaagaagctgaagcttagcaacactgtgctgccctcggagtccatgaaggtggtggctgaatccatgggcatcgcccagattcaggaggagacctgccagctgctaacggatgaggtcagctaccgcatcaaagagatcgcacaggatgccttgaagttcatgcacatggggaagcggcagaagctcaccaccagtgacattgactacgccttgaagctaaagaatgtcgagccactctatggcttccacgcccaggagttcattcctttccgcttcgcctctggtgggggccgggagctttacttctatgaggagaaggaggttgatctgagcgacatcatcaatacccctctgccccgggtgcccctggacgtctgcctcaaagctcccaaagagcaacagaaggctgaagccacagaacccctgaagtcagccaagccaggccaggaggaagacggacccctgaagggcaaaggtcaaggggccaccacagccgacggcaaagggaaagagaagaaggcgccgcccttgctggagggggcccccttgcgactgaagccccggagcatccacgagttgtctgtggagcagcagctctactacaaggagatcaccgaggcctgcgtgggctcctgcgaggccaagagggcggaagccctgcaaagcattgccacggaccctggactgtatcagatgctgccacggttcagtacctttatctcggagggggtccgtgtgaacgtggttcagaacaacctggccctactcatctacctgatgcgtatggtgaaagcgctgatggacaaccccacgctctatctagaaaaatacgtccatgagctgattccagctgtgatgacctgcatcgtgagcagacagttgtgcctgcgaccagatgtggacaatcactgggcactccgagactttgctgcccgcctggtggcccagatctgcaagcattttagcacaaccactaacaacatccagtcccggatcaccaagaccttcaccaagagctgggtggacgagaagacgccctggacgactcgttatggctccatcgcaggcttggctgagctgggacacgatgttatcaagactctgattctgccccggctgcagcaggaaggggagcggatccgcagtgtgctggacggccctgtgctgagcaacattgaccggattggagcagaccatgtgcagagcctcctgctgaaacactgtgctcctgttctggcaaagctgcgcccaccgcctgacaatcaggacgcctatcgggcagaattcgggtcccttgggcccctcctctgctcccaggtggtcaaggctcgggcccaggctgctctgcaggctcagcaggtcaacaggaccactctgaccatcacgcagccccggcccacgctgaccctctcgcaggccccacagcctggccctcgcacccctggcttgctgaaggttcctggctccatcgcacttcctgtccagacactggtgtctgcacgagcggctgccccaccacagccttcccctcctccaaccaagtttattgtaatgtcatcgtcctccagcgccccatccacccagcaggtcctgtccctcagcacctcggcccccggctcaggttccaccaccacttcgcccgtcaccaccaccgtccccagcgtgcagcccatcgtcaagttggtctccaccgccaccaccgcaccccccagcactgctccctctggtcctgggagtgtccagaagtacatcgtggtctcacttcccccaacaggggagggcaaaggaggccccacctcccatccttctccagttcctcccccggcatcgtccccgtccccactcagcggcagtgccctttgtggggggaagcaggaggctggggacagtccccctccagctccagggactccaaaagccaatggctcccagcccaactccggctcccctcagcctgctccgtgatgctccacctgccagcccccggattcccacacatgcagacatgtacacacgtgcacgtacacacatgcatgctcgctaagcggaaggaagttgtagattgcttccttcatgtcactttctttttagatattgtacagccagtttctcagaataaaagtttggtttgt

SEQ ID NO: 72685 - DNA, 321 bp, Artificial Sequence
  derived and/or modified sequence
agagttttcctgctccccgcgctcgggtggcgggggcgggtctgagtggtaccccggaggagaccctttgaaggtcccttgtggggactggaaagaggacgaagtcttgctttgttgcccaggctggagtgcaatgacacagatctttgctcactgcaacctccgcctcccgggttcgagtgattcttctgcctcagcctcccgagtagctgtgattacagggtctccgtctctccaccgggggcttcatccttccagggaggagaagagggactccagaatggctgaggagaagaagctgaagcttagcaacactgtgct

SEQ ID NO: 72686 - DNA, 2318 bp, Artificial Sequence
  derived and/or modified sequence
gttctgtgtcatcgtcctcctccttcaacatcccagcccaagcctcgtgcacggccaaaaaaaggaaaagcaatattcccaaccgcacaggtcccatgacaaagcgccgtctacaaacaatcaccgcttgccttcaacttcgggaagggtctccgtctctccaccgggggcttcatccttccagggaggagaagagggactccagaatggctgaggagaagaagctgaagcttagcaacactgtgctgccctcggagtccatgaaggtggtggctgaatccatgggcatcgcccagattcaggaggagacctgccagctgctaacggatgaggtcagctaccgcatcaaagagatcgcacaggatgccttgaagttcatgcacatggggaagcggcagaagctcaccaccagtgacattgactacgccttgaagctaaagaatgtcgagccactctatggcttccacgcccaggagttcattcctttccgcttcgcctctggtgggggccgggagctttacttctatgaggagaaggaggttgatctgagcgacatcatcaatacccctctgccccgggtgcccctggacgtctgcctcaaagctcattggctgagcatcgagggctgccagccagctatccccgagaacccgcccccagctcccaaagagcaacagaaggctgaagccacagaacccctgaagtcagccaagccaggccaggaggaagacggacccctgaagggcaaaggtcaaggggccaccacagccgacggcaaagggaaagagaagaaggcgccgcccttgctggagggggcccccttgcgactgaagccccggagcatccacgagttgtctgtggagcagcagctctactacaaggagatcaccgaggcctgcgtgggctcctgcgaggccaagagggcggaagccctgcaaagcattgccacggaccctggactgtatcagatgctgccacggttcagtacctttatctcggagggggtccgtgtgaacgtggttcagaacaacctggccctactcatctacctgatgcgtatggtgaaagcgctgatggacaaccccacgctctatctagaaaaatacgtccatgagctgattccagctgtgatgacctgcatcgtgagcagacagttgtgcctgcgaccagatgtggacaatcactgggcactccgagactttgctgcccgcctggtggcccagatctgcaagcattttagcacaaccactaacaacatccagtcccggatcaccaagaccttcaccaagagctgggtggacgagaagacgccctggacgactcgttatggctccatcgcaggcttggctgagctgggacacgatgttatcaagactctgattctgccccggctgcagcaggaaggggagcggatccgcagtgtgctggacggccctgtgctgagcaacattgaccggattggagcagaccatgtgcagagcctcctgctgaaacactgtgctcctgttctggcaaagctgcgcccaccgcctgacaatcaggacgcctatcgggcagaattcgggtcccttgggcccctcctctgctcccaggtggtcaaggctcgggcccaggctgctctgcaggctcagcaggtcaacaggaccactctgaccatcacgcagccccggcccacgctgaccctctcgcaggccccacagcctggccctcgcacccctggcttgctgaaggttcctggctccatcgcacttcctgtccagacactggtgtctgcacgagcggctgccccaccacagccttcccctcctccaaccaagtttattgtaatgtcatcgtcctccagcgccccatccacccagcaggtcctgtccctcagcacctcggcccccggctcaggttccaccaccacttcgcccgtcaccaccaccgtccccagcgtgcagcccatcgtcaagttggtctccaccgccaccaccgcaccccccagcactgctccctctggtcctgggagtgtccagaagtacatcgtggtctcacttcccccaacaggggagggcaaaggaggccccacctcccatccttctccagttcctcccccggcatcgtccccgtccccactcagcggcagtgccctttgtggggggaagcaggaggctggggacagtccccctccagctccagggactccaaaagccaatggctcccagcccaactccggctcccctcagcctgctccgtgatgctccacctgccagcccccggattcccacacatgcagacatgtacacacgtgcacgtacacacatgcatgctcgcta

SEQ ID NO: 72687 - DNA, 871 bp, Artificial Sequence
  derived and/or modified sequence
ctcggctgccgctagagttttcctgctccccgcgctcgggtggcgggggcgggtctgagtggtaccccggaggagaccctttgaaggtcccttgtggggactggaaagaggacgggtctccgtctctccaccgggggcttcatccttccagggaggagaagagggactccagaatggctgaggagaagaagctgaagcttagcaacactgtgctgccctcggagtccatgaaggtggtggctgaatccatgggcatcgcccagattcaggaggagacctgccagctgctaacggatgaggtcagctaccgcatcaaagagatcgcacaggatgccttgaagttcatgcacatggggaagcggcagaagctcaccaccagtgacattgactacgccttgaagctaaagaatgtcgagccactctatggcttccacgcccaggagttcattcctttccgcttcgcctctggtgggggccgggagctttacttctatgaggagaaggaggttgatctgagcgacatcatcaatacccctctgccccgggtgcccctggacgtctgcctcaaagctcccaaagagcaacagaaggctgaagccacagaacccctgaagtcagccaagccaggccaggaggaagacggacccctgaagggcaaaggtcaaggggccaccacagccgacggcaaagggaaagagaagaaggcgccgcccttgctggagggggcccccttgcgactgaagccccggagcatccacgagttgtctgtggagcagcagctctactacaaggagatcaccgaggcctgcgtgggctcctgcgaggccaagagggcggaagccctgcaaagcattgccacggaccctggact

SEQ ID NO: 72688 - DNA, 612 bp, Artificial Sequence
  derived and/or modified sequence
gttttgtggcgcctcttgaaggtcctggcagccgggtagtgaaggaataaattgcagtaattacaccaagagggagtgctccttatatatagatgtagaaacaaacttttaaaatataatttcattctgcgagcctagaggacttattctgggtctccgtctctccaccgggggcttcatccttccagggaggagaagagggactccagaatggctgaggagaagaagctgaagcttagcaacactgtgctgccctcggagtccatgaaggtggtggctgaatccatgggcatcgcccagattcaggaggagacctgccagctgctaacggatgaggtcagctaccgcatcaaagagatcgcacaggatgccttgaagttcatgcacatggggaagcggcagaagctcaccaccagtgacattgactacgccttgaagctaaagaatgtcgagccactctatggcttccacgcccaggagttcattcctttccgcttcgcctctggtgggggccgggagctttacttctatgaggagaaggaggttgatctgagcgacatcatcaatacccctctgccccgggtgcccctggacgtctgcctcaaagctcat

SEQ ID NO: 72689 - DNA, 703 bp, Artificial Sequence
  derived and/or modified sequence
ctgctcccacgagggggcggggccaagatggcgccgagcgccgggtgagcagcgtctcggctgccgctagagttttcctgctccccgcgctcgggtggcgggggcgggtctgagtggtaccccggaggagaccctttgaaggtcccttgtggggactggaaagaggacgggtttccgtctgttacccaggctgttgtgcagtggcaccatcttggctcactgcagcctccaactcctcagttcaagcgatcctcctgcctcagcctcctaagtagctgggatgacaggttcacaccaccagggtctccgtctctccaccgggggcttcatccttccagggaggagaagagggactccagaatggctgaggagaagaagctgaagcttagcaacactgtgctgccctcggagtccatgaaggtggtggctgaatccatgggcatcgcccagattcaggaggagacctgccagctgctaacggatgaggtcagctaccgcatcaaagagatcgcacaggatgccttgaagttcatgcacatggggaagcggcagaagctcaccaccagtgacattgactacgccttgaagctaaagaatgtcgagccactctatggcttccacgcccaggagttcattcctttccgcttcgcctctggtgggggccgggagctttacttctatgaggagaaggaggttgatctga

SEQ ID NO: 72690 - DNA, 2297 bp, Artificial Sequence
  derived and/or modified sequence
acgagggggcggggccaagatggcgccgagcgccggggtctccgtctctccaccgggggcttcatccttccagggaggagaagagggactccagaatggctgaggagaagaagctgaagcttagcaacactgtgctgccctcggagtccatgaaggtggtggctgaatccatgggcatcgcccagattcaggaggagacctgccagctgctaacggatgaggtcagctaccgcatcaaagagatcgcacaggatgccttgaagttcatgcacatggggaagcggcagaagctcaccaccagtgacattgactacgccttgaagctaaagaatgtcgagccactctatggcttccacgcccaggagttcattcctttccgcttcgcctctggtgggggccgggagctttacttctatgaggagaaggaggttgatctgagcgacatcatcaatacccctctgccccgggtgcccctggacgtctgcctcaaagctcattggctgagcatcgagggctgccagccagctatccccgagaacccgcccccagctcccaaagagcaacagaaggctgaagccacagaacccctgaagtcagccaagccaggccaggaggaagacggacccctgaagggcaaaggtcaaggggccaccacagccgacggcaaagggaaagagaagaaggcgccgcccttgctggagggggcccccttgcgactgaagccccggagcatccacgagttgtctgtggagcagcagctctactacaaggagatcaccgaggcctgcgtgggctcctgcgaggccaagagggcggaagccctgcaaagcattgccacggaccctggactgtatcagatgctgccacggttcagtacctttatctcggagggggtccgtgtgaacgtggttcagaacaacctggccctactcatctacctgatgcgtatggtgaaagcgctgatggacaaccccacgctctatctagaaaaatacgtccatgagctgattccagctgtgatgacctgcatcgtgagcagacagttgtgcctgcgaccagatgtggacaatcactgggcactccgagactttgctgcccgcctggtggcccagatctgcaagcattttagcacaaccactaacaacatccagtcccggatcaccaagaccttcaccaagagctgggtggacgagaagacgccctggacgactcgttatggctccatcgcaggcttggctgagctgggacacgatgttatcaagactctgattctgccccggctgcagcaggaaggggagcggatccgcagtgtgctggacggccctgtgctgagcaacattgaccggattggagcagaccatgtgcagagcctcctgctgaaacactgtgctcctgttctggcaaagctgcgcccaccgcctgacaatcaggacgcctatcgggcagaattcgggtcccttgggcccctcctctgctcccaggtggtcaaggctcgggcccaggctgctctgcaggctcagcaggtcaacaggaccactctgaccatcacgcagccccggcccacgctgaccctctcgcaggccccacagcctggccctcgcacccctggcttgctgaaggttcctggctccatcgcacttcctgtccagacactggtgtctgcacgagcggctgccccaccacagccttcccctcctccaaccaagtttattgtaatgtcatcgtcctccagcgccccatccacccagcaggtcctgtccctcagcacctcggcccccggctcaggttccaccaccacttcgcccgtcaccaccaccgtccccagcgtgcagcccatcgtcaagttggtctccaccgccaccaccgcaccccccagcactgctccctctggtcctgggagtgtccagaagtacatcgtggtctcacttcccccaacaggggagggcaaaggaggccccacctcccatccttctccagttcctcccccggcatcgtccccgtccccactcagcggcagtgccctttgtggggggaagcaggaggctggggacagtccccctccagctccagggactccaaaagccaatggctcccagcccaactccggctcccctcagcctgctccgtgatgctccacctgccagcccccggattcccacacatgcagacatgtacacacgtgcacgtacacacatgcatgctcgctaagcggaaggaagttgtagattgcttccttcatgtcactttctttttagatattgtacagccagtttctcagaataaaagtttggtttgta

SEQ ID NO: 72691 - DNA, 2464 bp, Artificial Sequence
  derived and/or modified sequence
gacttgctcttaggctctgccaggacctgctcccacgagggggcggggccaagatggcgccgagcgccgggtgagcagcgtctcggctgccgctagagttttcctgctccccgcgctcgggtggcgggggcgggtctgagtggtaccccggaggagaccctttgaaggtcccttgtggggactggaaagaggacgggtctccgtctctccaccgggggcttcatccttccagggaggagaagagggactccagaatggctgaggagaagaagctgaagcttagcaacactgtgctgccctcggagtccatgaaggtggtggctgaatccatgggcatcgcccagattcaggaggagacctgccagctgctaacggatgaggtcagctaccgcatcaaagagatcgcacaggatgccttgaagttcatgcacatggggaagcggcagaagctcaccaccagtgacattgactacgccttgaagctaaagaatgtcgagccactctatggcttccacgcccaggagttcattcctttccgcttcgcctctggtgggggccgggagctttacttctatgaggagaaggaggttgatctgagcgacatcatcaatacccctctgccccgggtgcccctggacgtctgcctcaaagctcattggctgagcatcgagggctgccagccagctatccccgagaacccgcccccagctcccaaagagcaacagaaggctgaagccacagaacccctgaagtcagccaagccaggccaggaggaagacggacccctgaagggcaaaggtcaaggggccaccacagccgacggcaaagggaaagagaagaaggcgccgcccttgctggagggggcccccttgcgactgaagccccggagcatccacgagttgtctgtggagcagcagctctactacaaggagatcaccgaggcctgcgtgggctcctgcgaggccaagagggcggaagccctgcaaagcattgccacggaccctggactgtatcagatgctgccacggttcagtacctttatctcggagggggtccgtgtgaacgtggttcagaacaacctggccctactcatctacctgatgcgtatggtgaaagcgctgatggacaaccccacgctctatctagaaaaatacgtccatgagctgattccagctgtgatgacctgcatcgtgagcagacagttgtgcctgcgaccagatgtggacaatcactgggcactccgagactttgctgcccgcctggtggcccagatctgcaagcattttagcacaaccactaacaacatccagtcccggatcaccaagaccttcaccaagagctgggtggacgagaagacgccctggacgactcgttatggctccatcgcaggcttggctgagctgggacacgatgttatcaagactctgattctgccccggctgcagcaggaaggggagcggatccgcagtgtgctggacggccctgtgctgagcaacattgaccggattggagcagaccatgtgcagagcctcctgctgaaacactgtgctcctgttctggcaaagctgcgcccaccgcctgacaatcaggacgcctatcgggcagaattcgggtcccttgggcccctcctctgctcccaggtggtcaaggctcgggcccaggctgctctgcaggctcagcaggtcaacaggaccactctgaccatcacgcagccccggcccacgctgaccctctcgcaggccccacagcctggccctcgcacccctggcttgctgaaggttcctggctccatcgcacttcctgtccagacactggtgtctgcacgagcggctgccccaccacagccttcccctcctccaaccaagtttattgtaatgtcatcgtcctccagcgccccatccacccagcaggtcctgtccctcagcacctcggcccccggctcaggttccaccaccacttcgcccgtcaccaccaccgtccccagcgtgcagcccatcgtcaagttggtctccaccgccaccaccgcaccccccagcactgctccctctggtcctgggagtgtccagaagtacatcgtggtctcacttcccccaacaggggagggcaaaggaggccccacctcccatccttctccagttcctcccccggcatcgtccccgtccccactcagcggcagtgccctttgtggggggaagcaggaggctggggacagtccccctccagctccagggactccaaaagccaatggctcccagcccaactccggctcccctcagcctgctccgtgatgctccacctgccagcccccggattcccacacatgcagacatgtacacacgtgcacgtacacacatgcatgctcgctaagcggaaggaagttgtagattgcttccttcatgtcactttctttttagatattgtacagccagtttctcagaataaaagtttggtttgtaagttctga

SEQ ID NO: 72692 - DNA, 2551 bp, Artificial Sequence
  derived and/or modified sequence
tagtagagatggggtttctccatgttggccaggctggtctcgaattcctgacctcaagtgatccgcccgcctcgtcctcccaaagtgctggtgggattacaggcgtgagccactgaacctggccccagcccagatttgtatctttctctgttacacctcagggctgactcacgtggggatggacataagacactcggagttcctcccctgtctccactgtcctccctttgttggccctctccctgtgtctcacgtttctttttcttctgcctgccccgttcctctgccagggtctccgtctctccaccgggggcttcatccttccagggaggagaagagggactccagaatggctgaggagaagaagctgaagcttagcaacactgtgctgccctcggagtccatgaaggtggtggctgaatccatgggcatcgcccagattcaggaggagacctgccagctgctaacggatgaggtcagctaccgcatcaaagagatcgcacaggatgccttgaagttcatgcacatggggaagcggcagaagctcaccaccagtgacattgactacgccttgaagctaaagaatgtcgagccactctatggcttccacgcccaggagttcattcctttccgcttcgcctctggtgggggccgggagctttacttctatgaggagaaggaggttgatctgagcgacatcatcaatacccctctgccccgggtgcccctggacgtctgcctcaaagctcattggctgagcatcgagggctgccagccagctatccccgagaacccgcccccagctcccaaagagcaacagaaggctgaagccacagaacccctgaagtcagccaagccaggccaggaggaagacggacccctgaagggcaaaggtcaaggggccaccacagccgacggcaaagggaaagagaagaaggcgccgcccttgctggagggggcccccttgcgactgaagccccggagcatccacgagttgtctgtggagcagcagctctactacaaggagatcaccgaggcctgcgtgggctcctgcgaggccaagagggcggaagccctgcaaagcattgccacggaccctggactgtatcagatgctgccacggttcagtacctttatctcggagggggtccgtgtgaacgtggttcagaacaacctggccctactcatctacctgatgcgtatggtgaaagcgctgatggacaaccccacgctctatctagaaaaatacgtccatgagctgattccagctgtgatgacctgcatcgtgagcagacagttgtgcctgcgaccagatgtggacaatcactgggcactccgagactttgctgcccgcctggtggcccagatctgcaagcattttagcacaaccactaacaacatccagtcccggatcaccaagaccttcaccaagagctgggtggacgagaagacgccctggacgactcgttatggctccatcgcaggcttggctgagctgggacacgatgttatcaagactctgattctgccccggctgcagcaggaaggggagcggatccgcagtgtgctggacggccctgtgctgagcaacattgaccggattggagcagaccatgtgcagagcctcctgctgaaacactgtgctcctgttctggcaaagctgcgcccaccgcctgacaatcaggacgcctatcgggcagaattcgggtcccttgggcccctcctctgctcccaggtggtcaaggctcgggcccaggctgctctgcaggctcagcaggtcaacaggaccactctgaccatcacgcagccccggcccacgctgaccctctcgcaggccccacagcctggccctcgcacccctggcttgctgaaggttcctggctccatcgcacttcctgtccagacactggtgtctgcacgagcggctgccccaccacagccttcccctcctccaaccaagtttattgtaatgtcatcgtcctccagcgccccatccacccagcaggtcctgtccctcagcacctcggcccccggctcaggttccaccaccacttcgcccgtcaccaccaccgtccccagcgtgcagcccatcgtcaagttggtctccaccgccaccaccgcaccccccagcactgctccctctggtcctgggagtgtccagaagtacatcgtggtctcacttcccccaacaggggagggcaaaggaggccccacctcccatccttctccagttcctcccccggcatcgtccccgtccccactcagcggcagtgccctttgtggggggaagcaggaggctggggacagtccccctccagctccagggactccaaaagccaatggctcccagcccaactccggctcccctcagcctgctccgtgatgctccacctgccagcccccggattcccacacatgcagacatgtacacacgtgcacgtacacacatgcatgctcgctaagcggaaggaagttgtagattgcttccttcatgtcactttctttttagatattgtacagccagtttctcagaataaaagtttggtttgta

SEQ ID NO: 72693 - DNA, 934 bp, Artificial Sequence
  derived and/or modified sequence
caagatggcgccgagcgccgggtgagcagcgtctcggctgccgctagagttttcctgctccccgcgctcgggtggcgggggcgggtctgagtggtaccccggaggagaccctttgaaggtcccttgtggggactggaaagaggacgggaggagaagagggactccagaatggctgaggagaagaagctgaagcttagcaacactgtgctgccctcggagtccatgaaggtggtggctgaatccatgggcatcgcccagattcaggaggagacctgccagctgctaacggatgaggtcagctaccgcatcaaagagatcgcacaggatgccttgaagttcatgcacatggggaagcggcagaagctcaccaccagtgacattgactacgccttgaagctaaagaatgtcgagccactctatggcttccacgcccaggagttcattcctttccgcttcgcctctggtgggggccgggagctttacttctatgaggagaaggaggttgatctgagcgacatcatcaatacccctctgccccgggtgcccctggacgtctgcctcaaagctcattggctgagcatcgagggctgccagccagctatccccgagaacccgcccccagctcccaaagagcaacagaaggctgaagccacagaacccctgaagtcagccaagccaggccaggaggaagacggacccctgaagggcaaaggtcaaggggccaccacagccgacggcaaagggaaagagaagaaggcgccgcccttgctggagggggcccccttgcgactgaagccccggagcatccacgagttgtctgtggagcagcagctctactacaaggagatcaccgaggcctgcgtgggctcctgcgaggccaagagggcggaagccctgcaaagcattgccacggaccctggactgtatcagatgc

SEQ ID NO: 72694 - DNA, 1354 bp, Artificial Sequence
  derived and/or modified sequence
agttcacactggctgttgtcagcggcctctgaggtttcaggctcttggcggtgaaggtcagagtgcagacctgagaccactgctcaccgacttcagactccagtttatctgtgccccagcttcctcacttagtctcagaagacttaggctgaggcctcagaaggagatctccatcctttgtccagagcagaacaggatggccatgtcccaggaatcattgaccttcaaggacgtgtttgtggacttcaccctggaggagtggcagcaactggactctgcccagaagaacctctacagggatgtcatgcttgagaactacagccacctggtgtccgtggggtatctagttgcgaagccagatgtgatcttcaggttgggaccaggtgaagagtcctggatggcagatggggggaccccggtacggacctgtgcagaagtctggcaagttgatgagcagatagatcactacaaggaaagccaagacaaacttccttggcaagctgcattcataggcaaggaaacactgaaggatgaaagcggtcaagaatccagaacatgtagaaaaagcatttatctgagcacagaatttgattctgtaaggcaaagactccctaaatattattcgtgggaaaaggcattcaaaacatcatttaaactttcttggtcaaaatggaagctatgtaagaaagaaagatgatggatgtaaagcatattggaaagtatgcttccattataatcttcataaagctcaacctgcagagagattttttgaccctaatcaacgagggaaagccctccaccaaaagcaagcccttagaaaaagtcagagaagtcaaactggggagaaactctacaaatgtactgaatgtggaaaagtgtttatccagaaagcaaacttagttgtacatcaaagaactcacaccggagagaaaccttatgaatgctgcgaatgtgcaaaagccttcagccagaagtcaaccctcatagcacaccagagaactcacacaggggagaagccctatgaatgcagtgaatgtggaaaaacctttatccagaagtcaactctgattaaacataagaaaattcatatggagagagaccctataaatgcagtgtctgtgagaaagccttcagtaggaagtcaactctcattaaacatcagataattcatatgggagaaaccttatgaatgtaataaatgtgggaaatcttttagtgttaaatcaactctcattgtatgtcacagaacataaatgcataagttgcatgctattgtgaatagtgtgatgaaattttgcactgtcctgctctttcctgctcaggatgcaaatcagtgaatctttttttttttttt

SEQ ID NO: 72695 - protein, 914 aa, Artificial Sequence
  derived and/or modified sequence
MSSSGYPPNQGAFSTEQSRYPPHSVQYTFPNTRHQQDPAFGGKHEAPSSPISGQPCGDDQNASPSKLSKEELIQSMDRVDREIAKVEQQILKLKKKQQQLEEEAAKPPEPEKPVSPPPVEQKHRSIVQIIYDENRKKAEEAHKIFEGLGPKVELPLYNQPSDTKVYHENIKTNQVMRKKLILFFKRRNHARKQREQKICQRYDQLMEAWEKKVDRIENNPRRKAKESKTREYYEKQFPEIRKQREQQERFQRVGQRGAGLSATIARSEHEISEIIDGLSEQENNEKQMRQLSVIPPMMFDAEQRRVKFINMNGLMEDPMKVYKDRQFMNVWTDHEKEIFKDKFIQHPKNFGLIASYLERKSVPDCVLYYYLTKKNENYKALVRRNYGKRRGRNQQIARPSQEEKVEEKEEDKAEKTEKKEEEKKDEEEKDEKEDSKENTKEKDKIDGTAEETEEREQATPRGRKTANSQGRRKGRITRSMTNEAAAASAAAAAATEEPPPPLPPPPEPISTEPVETSRWTEEEMEVAKKGLVEHGRNWAAIAKMVGTKSEAQCKNFYFNYKRRHNLDNLLQQHKQKTSRKPREERDVSQCESVASTVSAQEDEDIEASNEEENPEDSEGAENSSDTESAPSPSPVEAVKPSEDSPENATSRGNTEPAVELEPTTETAPSTSPSLAVPSTKPAEDESVETQVNDSISAETAEQMDVDQQEHSAEEGSVCDPPPATKADSVDVEVRVPENHASKVEGDNTKERDLDRASEKVEPRDEDLVVAQQINAQRPEPQSDNDSSATCSADEDVDGEPERQRMFPMDSKPSLLNPTGSILVSSPLKPNPLDLPQLQHRAAVIPPMVSCTPCNIPIGTPVSGYALYQRHIKAMHESALLEEQRQRQEQIDLECRSSTSPCGTSKSPNREWEGR

SEQ ID NO: 72696 - DNA, 2745 bp, Artificial Sequence
  derived and/or modified sequence
atgagcagcagcggctacccccccaaccagggcgccttcagcaccgagcagagcagataccccccccacagcgtgcagtacaccttccccaacaccagacaccagcaggaccccgccttcggcggcaagcacgaggcccccagcagccccatcagcggccagccctgcggcgacgaccagaacgccagccccagcaagctgagcaaggaggagctgatccagagcatggacagagtggacagagagatcgccaaggtggagcagcagatcctgaagctgaagaagaagcagcagcagctggaggaggaggccgccaagccccccgagcccgagaagcccgtgagccccccccccgtggagcagaagcacagaagcatcgtgcagatcatctacgacgagaacagaaagaaggccgaggaggcccacaagatcttcgagggcctgggccccaaggtggagctgcccctgtacaaccagcccagcgacaccaaggtgtaccacgagaacatcaagaccaaccaggtgatgagaaagaagctgatcctgttcttcaagagaagaaaccacgccagaaagcagagagagcagaagatctgccagagatacgaccagctgatggaggcctgggagaagaaggtggacagaatcgagaacaaccccagaagaaaggccaaggagagcaagaccagagagtactacgagaagcagttccccgagatcagaaagcagagagagcagcaggagagattccagagagtgggccagagaggcgccggcctgagcgccaccatcgccagaagcgagcacgagatcagcgagatcatcgacggcctgagcgagcaggagaacaacgagaagcagatgagacagctgagcgtgatcccccccatgatgttcgacgccgagcagagaagagtgaagttcatcaacatgaacggcctgatggaggaccccatgaaggtgtacaaggacagacagttcatgaacgtgtggaccgaccacgagaaggagatcttcaaggacaagttcatccagcaccccaagaacttcggcctgatcgccagctacctggagagaaagagcgtgcccgactgcgtgctgtactactacctgaccaagaagaacgagaactacaaggccctggtgagaagaaactacggcaagagaagaggcagaaaccagcagatcgccagacccagccaggaggagaaggtggaggagaaggaggaggacaaggccgagaagaccgagaagaaggaggaggagaagaaggacgaggaggagaaggacgagaaggaggacagcaaggagaacaccaaggagaaggacaagatcgacggcaccgccgaggagaccgaggagagagagcaggccacccccagaggcagaaagaccgccaacagccagggcagaagaaagggcagaatcaccagaagcatgaccaacgaggccgccgccgccagcgccgccgccgccgccgccaccgaggagccccccccccccctgccccccccccccgagcccatcagcaccgagcccgtggagaccagcagatggaccgaggaggagatggaggtggccaagaagggcctggtggagcacggcagaaactgggccgccatcgccaagatggtgggcaccaagagcgaggcccagtgcaagaacttctacttcaactacaagagaagacacaacctggacaacctgctgcagcagcacaagcagaagaccagcagaaagcccagagaggagagagacgtgagccagtgcgagagcgtggccagcaccgtgagcgcccaggaggacgaggacatcgaggccagcaacgaggaggagaaccccgaggacagcgagggcgccgagaacagcagcgacaccgagagcgcccccagccccagccccgtggaggccgtgaagcccagcgaggacagccccgagaacgccaccagcagaggcaacaccgagcccgccgtggagctggagcccaccaccgagaccgcccccagcaccagccccagcctggccgtgcccagcaccaagcccgccgaggacgagagcgtggagacccaggtgaacgacagcatcagcgccgagaccgccgagcagatggacgtggaccagcaggagcacagcgccgaggagggcagcgtgtgcgaccccccccccgccaccaaggccgacagcgtggacgtggaggtgagagtgcccgagaaccacgccagcaaggtggagggcgacaacaccaaggagagagacctggacagagccagcgagaaggtggagcccagagacgaggacctggtggtggcccagcagatcaacgcccagagacccgagccccagagcgacaacgacagcagcgccacctgcagcgccgacgaggacgtggacggcgagcccgagagacagagaatgttccccatggacagcaagcccagcctgctgaaccccaccggcagcatcctggtgagcagccccctgaagcccaaccccctggacctgccccagctgcagcacagagccgccgtgatcccccccatggtgagctgcaccccctgcaacatccccatcggcacccccgtgagcggctacgccctgtaccagagacacatcaaggccatgcacgagagcgccctgctggaggagcagagacagagacaggagcagatcgacctggagtgcagaagcagcaccagcccctgcggcaccagcaagagccccaacagagagtgggagggcagatag

SEQ ID NO: 72697 - DNA, 2745 bp, Artificial Sequence
  derived and/or modified sequence
atgtcaagcagtggctacccgccaaaccaaggcgccttctccacagagcagagccgttatccacctcacagtgtacaatacacttttcctaacaccaggcatcagcaggacccggcgtttggggggaagcatgaagccccaagtagtccaatttccggacaaccttgcggggatgaccagaacgcctccccatcaaagttatctaaagaggaattgattcaatctatggatcgagtggaccgtgaaattgccaaagttgagcagcaaattctgaagctcaagaaaaagcagcagcagttggaagaagaggctgcaaaaccacccgagcccgagaagccagtttctccacccccagtggagcagaaacacagatcgattgtccagatcatttatgatgagaatcggaaaaaggccgaagaggcccacaagatttttgagggcttgggccccaaggttgagctgcccctctacaaccagccaagcgacaccaaggtttaccacgagaatatcaaaaccaatcaggtcatgagaaaaaaacttattctcttcttcaagcggaggaatcacgctcggaaacagagggagcagaagatatgtcagcgatacgatcagctgatggaggcatgggagaagaaagtggataggatcgaaaacaaccccagaagaaaggccaaagagtcaaagacgcgcgaatactacgagaagcaattccccgagattaggaaacagagagagcagcaggagaggtttcaacgcgtgggccagcgcggtgctggactctccgctaccattgctcggtctgagcatgagatatctgagatcatcgatggcctttcagagcaggagaacaacgaaaagcagatgagacagctgtccgttattcctccaatgatgtttgacgccgaacagcgaagggtgaagtttataaacatgaacggcctcatggaggatcccatgaaggtgtataaggacagacagttcatgaatgtgtggaccgaccacgaaaaggaaatctttaaggacaagtttatacagcaccctaaaaattttggcctcatcgcctcctacctcgagcgtaagtctgtgccagattgcgtgctctattactacttgacaaagaagaatgaaaactacaaggccttggtcaggcggaattatggaaagagaagaggtcgcaatcaacagattgcgcgtccaagccaggaggaaaaagtggaagaaaaagaggaggataaagcggagaaaacagagaagaaggaggaggagaagaaggatgaggaagagaaagacgagaaagaggacagcaaagagaacacgaaggagaaagacaagatcgatggcaccgcggaggagacagaggaaagagagcaggccacaccacgtgggcggaagaccgccaactcccaaggaaggagaaaaggccgaattacccgttctatgaccaacgaagcagccgccgcaagcgcagcagccgctgcagctaccgaagaaccacccccaccgttgcccccacctccggaaccaattagcaccgagccggtggagaccagtaggtggacagaagaagagatggaagtggctaagaaaggcctggttgaacacggtagaaattgggctgctatagctaagatggtgggaacgaagagcgaggcccaatgtaagaatttctatttcaactacaaacgtcggcataatcttgacaatctgctgcaacagcacaaacagaagacctctaggaaacctcgtgaagagcgggacgtgtcacagtgcgagagcgtggctagcacagtgagtgctcaggaagacgaagacattgaggcgtcgaacgaggaggaaaatcctgaggactcagagggcgcagaaaatagcagcgataccgagtccgctcctagccctagtcccgtcgaagccgtcaaaccgtcagaggattctcccgagaacgccacctcccgggggaatactgaaccagcagtggagcttgaaccgactacagagactgccccatctacttccccaagcctggcggtaccgtctactaagccggcggaggatgagtctgtggagacccaggtcaatgacagcatatcagctgagaccgcagagcagatggacgtggaccaacaggaacactcagctgaagaagggagcgtatgtgacccaccccccgccaccaaggcagattctgttgacgttgaggtcagagtccccgaaaaccacgcttctaaagtggaaggagacaacactaaggagcgcgacttggacagggcctcagagaaggtagaacccagagatgaggacttggtagtggctcagcagatcaacgcacagcgcccagaaccacaaagcgacaatgattcttctgcaacttgcagtgcagacgaggacgtcgacggggagcctgagaggcagcgtatgtttcctatggacagcaagccaagtttactaaaccccacaggaagtatcctggtcagttctccactgaagccaaatccactggacctcccccagttacagcaccgcgccgcggtcatcccaccaatggtaagctgtaccccctgcaacatacccatagggactcctgttagcggatatgcgctttaccaaagacacatcaaagctatgcacgaatccgcgctgttggaggagcagcgtcaacggcaagaacagattgatctggaatgccgatcatccacaagcccatgcgggacctcaaaaagtccaaaccgggaatgggagggcaggtag

SEQ ID NO: 72698 - DNA, 2745 bp, Artificial Sequence
  derived and/or modified sequence
atgagcagcagcggctacccacccaaccagggcgccttcagcacagagcagagccgctacccaccccacagcgtgcagtacaccttccccaacaccaggcaccagcaggaccctgccttcggcggcaagcatgaggcccccagcagccccatcagcggccagccctgtggagatgaccagaatgccagccccagcaagctgagcaaggaggagctgatccagagcatggacagagtggaccgggagatcgccaaggtggagcagcagatcctgaagctgaagaagaagcagcagcagctggaggaggaggccgccaagcccccagagcctgagaagcctgtgagccccccacctgtggagcagaagcacaggagcatcgtgcagatcatctatgatgaaaataggaagaaggccgaggaggcccacaagatctttgagggcctgggccccaaggtggagctgcccctgtacaaccagcccagcgacaccaaggtgtaccacgagaacatcaagaccaaccaggtgatgaggaagaagctgatcctcttcttcaagagaagaaatcatgccaggaagcagcgggagcagaagatctgccagagatatgaccagctgatggaggcctgggagaagaaggtggacagaattgagaacaaccccaggaggaaggccaaggagagcaagacccgggagtactatgagaagcagtttcctgagatcaggaagcagcgggagcagcaggagcgcttccagagggtgggccagagaggagctggcctgagcgccaccatcgcccggagtgaacatgagatcagcgagatcattgatggcctgtctgagcaggagaacaatgagaagcagatgaggcagctgagcgtcatcccccccatgatgtttgatgctgagcagaggagagtgaagttcatcaacatgaatggcctgatggaggaccccatgaaggtgtacaaggaccggcagttcatgaatgtgtggacagaccacgagaaggagatcttcaaggacaagttcatccagcaccccaagaactttggcctgattgccagctacctggagaggaagtctgtgcctgactgtgtgctgtactactacctgaccaagaagaatgaaaactacaaggccctggtgagaagaaactacggcaagagaagaggaagaaaccagcagatcgcccggcccagccaggaggagaaggtggaggagaaggaggaggacaaggccgagaagacagagaagaaggaggaggagaagaaggatgaggaggagaaggatgagaaggaggacagcaaagaaaacaccaaggagaaggacaagattgatggaacagctgaggagacagaggagcgggagcaggccaccccccggggcaggaagacagccaacagccagggccgcaggaagggccgcatcaccaggtccatgaccaatgaggccgccgccgccagcgctgctgctgctgctgccacagaggagcccccaccacccctgcccccacctcctgagcccatcagcacagagcctgtggagaccagccgctggacagaggaggagatggaggtggccaagaagggcctggtggagcacggcaggaactgggccgccatcgccaagatggtgggcaccaagtctgaggcccagtgcaagaacttctacttcaactacaagaggaggcacaacctggacaacctgctgcagcagcacaagcagaagaccagcaggaagccccgggaggagagagatgtgtcccagtgtgagagcgtggccagcacagtgtctgcccaggaggatgaagatattgaggccagcaatgaggaggagaacccagaagattctgagggcgctgagaacagcagtgacacagagagcgcccccagccccagccctgtggaggccgtgaagcccagcgaggacagcccagaaaatgccaccagccggggcaacacagagcctgctgtggagctggagcccaccacagaaacagcccccagcaccagccccagcctggccgtgcccagcaccaagccagcagaagatgagagcgtggagacccaggtgaatgacagcatctctgctgagacagctgagcagatggatgtggaccagcaggagcacagcgctgaggagggctctgtgtgtgaccccccaccagccaccaaggctgacagcgtggatgtggaggtgcgggtgcctgaaaatcatgccagcaaggtggagggggacaacaccaaggagcgggacctggaccgggccagcgagaaggtggagcccagagatgaggacctggtggtggcccagcagatcaatgcccagaggcctgagccccagagcgacaatgacagcagcgccacctgcagcgcagatgaagatgtggatggagagcctgagcggcagaggatgttccccatggacagcaagcccagcctgctgaaccccaccggcagcatcctggtgagcagccccctgaagcccaaccccctggacctgccccagctgcagcacagagctgctgtgattcctcccatggtgtcctgcaccccctgcaacatccccatcggcacccctgtgtctggctacgccctgtaccagaggcacatcaaggccatgcatgaaagtgccctgctggaggagcagaggcagaggcaggagcagattgacctggagtgccgcagcagcaccagcccctgtggcaccagcaagagccccaaccgggagtgggagggccgctag

SEQ ID NO: 72699 - DNA, 3106 bp, Artificial Sequence
  derived and/or modified sequence
gtggtttcctagaaacatgattgtttattggcattgatctcacagtctggtgaggacttctttactgataatgtcaagttcaggttatcctcccaaccaaggagcattcagcacagaacaaagtcgttatcctcctcactctgtccagtatacatttcccaacacccgccaccagcaggatccagcattcggaggcaaacatgaagctccatcctctccaatttcggggcaaccatgtggagatgatcaaaatgcttcaccttcaaaactctcaaaggaagagttaatacagagtatggatcgtgtagatcgagaaattgcaaaagtagaacagcagatccttaaactgaaaaagaaacaacaacagcttgaagaagaggcagctaaacctcctgagcctgagaagcccgtgtcccctcctcctgtggagcagaaacaccgcagtattgtccaaattatttatgatgagaatcggaaaaaagcagaagaagctcataaaatttttgaaggtcttggcccaaaagttgaactgccactgtataaccagccatcagataccaaggtgtaccatgagaacatcaagacaaaccaggtgatgaggaaaaaactcattttattttttaaaagaagaaatcatgcaagaaaacaaagggaacaaaaaatctgccagcgttatgatcagctcatggaggcatgggagaaaaaagtggacagaatagaaaataatcctcggaggaaagctaaagaaagcaaaacaagggaatactatgaaaagcagtttccagaaattcgaaaacaaagagaacagcaagaaagatttcagcgagttgggcagaggggagctggtctttcagccaccattgctaggagtgagcatgagatttctgaaattattgatgggctctctgagcaggagaataatgagaaacaaatgcggcagctctctgtgattccacctatgatgtttgatgcagaacaaagacgagtcaagttcattaacatgaatgggcttatggaggaccctatgaaagtgtataaagataggcagtttatgaatgtttggactgaccatgaaaaggagatctttaaggacaagtttatccagcatccaaaaaactttggactaattgcatcatacttggagaggaagagtgttcctgattgtgttttgtattactatttaaccaagaaaaatgagaattataaagccctcgtcagaaggaattatgggaaacgcagaggcagaaaccagcaaattgctcgaccctcgcaagaagaaaaagtagaagaaaaagaagaggataaagcagaaaaaacagaaaaaaaagaagaagaaaagaaagatgaagaggaaaaagatgaaaaagaagactccaaagaaaataccaaggaaaaggacaagatagatggtacagcagaagaaactgaggaaagagagcaagccacaccccgggggcgaaagactgccaacagtcagggccgccgtaagggccggatcaccaggtccatgacaaacgaagctgcagctgccagtgctgcagccgcagcggctactgaagagcccccaccacctctgccaccgccaccagaacccatttctacagagcctgtggagacctctcgatggacagaagaagaaatggaagttgctaaaaaaggtctagtagaacatggtcgtaactgggcagcaattgctaaaatggtgggaacgaaaagtgaagctcaatgtaaaaacttctattttaactataaaaggcgacacaatcttgacaacctcttacagcagcataaacagaaaacttcacgaaaacctcgtgaagagcgagatgtgtctcaatgtgaaagtgtcgcttccactgtttctgctcaggaggatgaagatattgaagcctccaatgaagaagaaaatccagaagacagcgaaggtgcagaaaatagttctgatacagaaagtgctccttctccttcaccagttgaagctgtcaagcccagcgaggacagtcctgaaaatgctacttctcgaggaaacacagaacctgcggttgagcttgagcccaccacggaaactgcacccagtacatctccctccttagcagttccaagtacaaaaccagctgaagatgaaagtgtggagacccaggtgaatgacagcatcagtgctgagacagcagagcagatggatgtagatcagcaggagcacagtgctgaagagggttctgtttgtgatcccccacccgctaccaaagctgactctgtggacgttgaagtgagggtgccagaaaaccatgcatctaaagttgaaggtgataataccaaagaaagagacttggatagagccagtgagaaggtggaacctagagatgaagatttggtggtagctcagcaaataaatgcccaaaggcccgagccccagtcagacaatgattccagtgccacgtgcagcgctgatgaggatgtggatggagagccagagaggcagagaatgtttcctatggactcaaagccttcactgttaaaccccactggatctatactcgtctcatctccgttaaaaccaaatccactggatctgccacagcttcagcatcgagctgctgttatcccaccaatggtatcctgcaccccatgtaacataccaattggaaccccagtgagcggctatgctctctaccagcgacacattaaagcaatgcatgagtcagcactcctggaggagcagcggcagagacaagaacagatagatttggaatgtagaagttctacaagtccatgtggcacatccaagagtccaaacagagagtgggaaggtaggtagatagagctatcaccaagagaacttttatgaagggaaataaagctaaacccaaaagcagtgtccattgtgctttgtaagttgtcagcctcccaactgattattatatttgtcctaacagacacagttccttaaattgaccttaaactatgaagaaatgttagtattattaactactaaaggatgccagtaacatttttaatagcattctagttaatgtgaattttctgatattcatctttgtgctggaagacattataaataaagttatgctttatgttccgttcatctgaa

SEQ ID NO: 72700 - DNA, 2745 bp, Artificial Sequence
  derived and/or modified sequence
atgagcagcagcggctacccccccaaccagggcgccttcagcaccgaacaatcgaggtaccccccgcacagtgtgcaatacacgttcccaaatactcgacaccagcaggaccccgcattcggcggaaaacacgaggccccatcatcacctataagtggtcaaccctgtggtgacgaccagaacgcctctcccagtaagctcagcaaggaggaactgattcaatcaatggacagggtggaccgtgagatcgctaaagtggagcaacaaatcctgaaactgaagaagaagcaacagcagctggaggaggaagccgccaagcctcctgagcccgagaagcctgttagccccccaccagttgagcagaaacatagatcaatcgtgcagatcatatatgatgagaacaggaagaaagcggaggaggcacacaagatctttgaaggcctggggccgaaagtcgagctaccactgtacaatcagccctccgacactaaagtgtatcatgagaacatcaagaccaatcaagtcatgcgtaagaaattgattttgttctttaaaaggcgaaaccacgccagaaagcagagggagcagaagatctgccagcgttatgatcagttaatggaggcttgggaaaaaaaggtcgatcgaatcgaaaacaacccaaggcgcaaggctaaggaaagcaaaacccgagaatactatgagaaacaatttcctgaaatcaggaagcagcgggagcagcaggaacgatttcagagagttggccagaggggagccggactgtctgccacgatagccagatccgaacacgaaatctccgagattatcgatggcctcagcgaacaggaaaacaatgagaagcagatgaggcaactctcagttattccccccatgatgttcgacgcagaacagcgacgggtgaaattcattaatatgaacggccttatggaggaccctatgaaggtgtacaaagataggcagttcatgaacgtttggacagatcatgaaaaggaaatcttcaaagataagttcatccaacacccaaaaaattttgggctcatcgcctcttacttagagagaaagtctgtccccgattgtgtattgtattattatctgaccaagaagaacgagaattataaggcgttggtccgccgaaattacgggaaacggcggggccgcaaccaacagatcgcaaggcccagccaggaggagaaggtcgaggagaaagaagaggataaagcagagaaaacggagaagaaagaagaagaaaaaaaagacgaagaggaaaaggatgaaaaggaggattctaaggagaacacaaaggagaaggataaaattgacggtactgcggaagagactgaagagagagagcaggcaactccccgcggccgcaaaaccgcaaactcacaagggcgacgcaaaggtcggattacacggtccatgacaaacgaggccgccgccgcctctgccgctgctgctgccgccacagaggaacctccacctccactgccccctccccccgagccaatttccactgaacctgtagaaacatctaggtggaccgaagaagaaatggaggttgcgaagaaaggactggtagagcacggacggaactgggctgctattgccaagatggtggggaccaagtccgaggcccagtgcaaaaatttctattttaattacaagagaagacacaaccttgacaatctgctgcagcagcacaaacaaaagactagtcgtaaaccaagggaggagcgagatgtgtcacagtgcgagtccgttgcttcgactgtctccgctcaagaggacgaagacatcgaggccagcaatgaagaagaaaatccagaggacagtgagggagcggagaactcctccgacacagaatctgccccttccccctcccccgtagaggcagtcaaaccaagcgaagacagtcctgagaacgccacttctcgcggtaataccgaacccgccgtggagctggagcccacaactgagacagcccccagcacatccccttccctcgcagtgccgagcacgaagcccgcagaagatgagtctgtggagactcaggtgaatgactccatttcagcagaaaccgcagaacagatggatgtcgatcaacaagagcatagcgccgaagagggcagcgtgtgtgacccccccccagccacaaaagctgattctgtggacgtcgaagtgcgggtccccgagaaccacgcatcaaaggtcgagggtgataacacaaaagaacgggacttggacagagcatccgaaaaggttgaaccacgggacgaggatctcgttgttgcacagcagatcaacgcccaacggcctgagccacagagtgataacgattcgtccgctacttgtagcgctgatgaggacgtggacggtgagcctgaacgccagcgcatgtttccaatggattcaaagcctagtttgctcaatcctaccggctctattttagtcagctctccattaaagcccaacccacttgatctgcctcagctccagcatcgtgctgcagtgattccacctatggtctcctgcactccttgtaatatccccattgggacgcctgtgtctggctatgccctgtatcagagacacatcaaagcaatgcatgagagtgccctactagaggaacagcgtcagcgccaggaacagatcgacttggaatgtcgctctagtacatctccttgtgggacgagtaaaagccctaatcgggaatgggagggcaggtag

SEQ ID NO: 72701 - DNA, 2745 bp, Artificial Sequence
  derived and/or modified sequence
atgagtagctctggatatcctcccaatcagggggcatttagcactgaacagtcccgatatcccccacattcagttcagtatacttttccgaacacccgccaccagcaggaccctgcctttggcggtaagcacgaggctccatctagtccaatctccgggcagccgtgcggcgatgatcagaatgcaagtccgtccaaattgagcaaggaggagctcatccagtctatggatagggttgatagagagatcgctaaggtggaacaacaaatcctgaagctgaagaagaagcagcaacagctagaggaagaggccgctaaacctccagaacctgaaaagcctgtgagtcctccgcctgtggagcaaaaacaccggtccatagtgcaaatcatatatgacgaaaaccggaagaaagcggaggaggctcataagatttttgagggcctggggccaaaagtcgagttgccgctttataaccaaccatctgacactaaagtgtatcatgagaatattaaaaccaatcaggtcatgcgtaagaaactgatccttttcttcaagcgtagaaaccatgccaggaagcagcgtgaacaaaagatctgtcagcgttacgatcagctgatggaggcctgggaaaaaaaggtcgatcgcatcgagaataatcctcgccgtaaggcaaaagaatccaagacaagagagtactatgaaaagcagttccctgaaatcaggaagcaacgtgaacagcaggagaggtttcagagagtagggcagcggggagccggtcttagcgccacaattgccagaagcgagcatgagatctcagaaataattgatggactgagcgagcaggagaataacgagaagcagatgagacaactcagtgtcataccgcctatgatgtttgatgctgaacaacggcgtgtgaagtttatcaacatgaatggcttgatggaggaccctatgaaggtatacaaagacagacaattcatgaacgtctggaccgaccatgaaaaggagatctttaaagacaagttcattcagcatcccaagaatttcggactcattgcaagctatttggagagaaagtcggtgcctgattgtgttctgtactattacctgacaaagaagaacgagaattataaagctcttgtccggagaaattacggtaagagacgaggacgaaatcaacagatagccagaccttcccaagaggaaaaagtggaggagaaagaggaagacaaggcagaaaagactgagaagaaggaggaggagaaaaaagacgaagaggaaaaagatgaaaaagaggatagcaaggagaacaccaaagagaaggacaagatagatggtaccgctgaggaaacggaggaaagggaacaggctaccccgagaggcaggaaaaccgccaactcccagggcagaaggaaaggtcgtataactcgctccatgactaacgaggcagccgctgcttcagctgccgctgctgccgctaccgaagaaccaccacctcctttaccgccaccacctgaaccaataagcactgaaccggttgaaacctcccgctggacagaagaggagatggaggtggcgaaaaaagggttggtcgagcacggtcgtaactgggcggctattgcaaagatggtgggcactaagagcgaagcccagtgcaaaaatttctactttaattataagaggcgacacaatctggacaatctccttcagcagcacaaacagaagacgtccagaaaacccagggaagaacgggatgtgtctcagtgcgagtccgtcgcttctactgtgagtgctcaggaggacgaggatatagaagcgtctaacgaagaggagaacccagaagactcggaaggggcagagaattcctcagacacagagtctgccccaagtccctcccctgtggaagcagttaagccaagcgaagatagccctgagaacgcaacatccagagggaacaccgagcccgcagtagagctggaacccacaaccgagactgctccttctacaagcccctcactcgccgtgccctcaactaagcccgctgaagacgagagtgtggaaactcaagtaaacgactcgatttccgccgaaacagcagaacagatggacgtggatcagcaggagcattccgctgaggaggggtccgtgtgcgacccccctcctgcaactaaggctgattcagtagacgtggaagtacgagtcccagagaaccacgcatcaaaagtagaaggcgataacacaaaagaaagagacctggaccgggcatcagaaaaggtggagcctagagatgaagacttagtggtcgcacaacagatcaacgcccaacgccctgagccccaatcagataacgacagtagcgccacctgctccgccgacgaggacgtggatggggaacctgagcgccagcgtatgtttccaatggactctaaacccagtctgttgaatccaacgggctctatcttggtctcctctccactcaaaccgaacccgcttgatctaccacagctacaacaccgggcagccgtcataccgccaatggtatcttgtacaccttgcaatattccaattggtactccagtcagcggatacgctctctatcaacgccatatcaaggctatgcacgagtccgccctgctggaagagcagcggcaaagacaggaacagattgatctcgagtgtaggagtagcacatccccctgcggtacctctaaatcaccgaacagggaatgggaggggcgatag

SEQ ID NO: 72702 - protein, 2337 aa, Artificial Sequence
  derived and/or modified sequence
MSSSGYPPNQGAFSTEQSRYPPHSVQYTFPNTRHQQEFAVPDYRSSHLEVSQASQLLQQQQQQQLRRRPSLLSEFHPGSDRPQERRTSYEPFHPGPSPVDHDSLESKRPRLEQVSDSHFQRVSAAVLPLVHPLPEGLRASADAKKDPAFGGKHEAPSSPISGQPCGDDQNASPSKLSKEELIQSMDRVDREIAKVEQQILKLKKKQQQLEEEAAKPPEPEKPVSPPPVEQKHRSIVQIIYDENRKKAEEAHKIFEGLGPKVELPLYNQPSDTKVYHENIKTNQVMRKKLILFFKRRNHARKQREQKICQRYDQLMEAWEKKVDRIENNPRRKAKESKTREYYEKQFPEIRKQREQQERFQRVGQRGAGLSATIARSEHEISEIIDGLSEQENNEKQMRQLSVIPPMMFDAEQRRVKFINMNGLMEDPMKVYKDRQFMNVWTDHEKEIFKDKFIQHPKNFGLIASYLERKSVPDCVLYYYLTKKNENYKALVRRNYGKRRGRNQQIARPSQEEKVEEKEEDKAEKTEKKEEEKKDEEEKDEKEDSKENTKEKDKIDGTAEETEEREQATPRGRKTANSQGRRKGRITRSMTNEAAAASAAAAAATEEPPPPLPPPPEPISTEPVETSRWTEEEMEVAKKGLVEHGRNWAAIAKMVGTKSEAQCKNFYFNYKRRHNLDNLLQQHKQKTSRKPREERDVSQCESVASTVSAQEDEDIEASNEEENPEDSEGAENSSDTESAPSPSPVEAVKPSEDSPENATSRGNTEPAVELEPTTETAPSTSPSLAVPSTKPAEDESVETQVNDSISAETAEQMDVDQQEHSAEEGSVCDPPPATKADSVDVEVRVPENHASKVEGDNTKERDLDRASEKVEPRDEDLVVAQQINAQRPEPQSDNDSSATCSADEDVDGEPERQRMFPMDSKPSLLNPTGSILVSSPLKPNPLDLPQLQHRAAVIPPMVSCTPCNIPIGTPVSGYALYQRHIKAMHESALLEEQRQRQEQIDLECRSSTSPCGTSKSPNREWEVLQPAPHQVITNLPEGVRLPTTRPTRPPPPLIPSSKTTVASEKPSFIMGGSISQGTPGTYLTSHNQASYTQETPKPSVGSISLGLPRQQESAKSATLPYIKQEEFSPRSQNSQPEGLLVRAQHEGVVRGTAGAIQEGSITRGTPTSKISVESIPSLRGSITQGTPALPQTGIPTEALVKGSISRMPIEDSSPEKGREEAASKGHVIYEGKSGHILSYDNIKNAREGTRSPRTAHEISLKRSYESVEGNIKQGMSMRESPVSAPLEGLICRALPRGSPHSDLKERTVLSGSIMQGTPRATTESFEDGLKYPKQIKRESPPIRAFEGAITKGKPYDGITTIKEMGRSIHEIPRQDILTQESRKTPEVVQSTRPIIEGSISQGTPIKFDNNSGQSAIKHNVKSLITGPSKLSRGMPPLEIVPENIKVVERGKYEDVKAGETVRSRHTSVVSSGPSVLRSTLHEAPKAQLSPGIYDDTSARRTPVSYQNTMSRGSPMMNRTSDVTISSNKSTNHERKSTLTPTQRESIPAKSPVPGVDPVVSHSPFDPHHRGSTAGEVYRSHLPTHLDPAMPFHRALDPAAAAYLFQRQLSPTPGYPSQYQLYAMENTRQTILNDYITSQQMQVNLRPDVARGLSPREQPLGLPYPATRGIIDLTNMPPTILVPHPGGTSTPPMDRITYIPGTQITFPPRPYNSASMSPGHPTHLAAAASAEREREREREKERERERIAAASSDLYLRPGSEQPGRPGSHGYVRSPSPSVRTQETMLQQRPSVFQGTNGTSVITPLDPTAQLRIMPLPAGGPSISQGLPASRYNTAADALAALVDAAASAPQMDVSKTKEISSHRYETPSDAIEVISPASSPAPPQEKLQTYQPEVVKANQAENDPTRQYEGPLHHYRPQQESPSPQQQLPPSSQAEGMGQVPRTHRLITLADHICQIITQDFARNQVSSQTPQQPPTSTFQNSPSALVSTPVRTKTSNRYSPESQAQSVHHQRPGSRVSPENLVDKSRGSRPGKSPERSHVSSEPYEPISPPQVPVVHEKQDSLLLLSQRGAEPAEQRNDARSPGSISYLPSFFTKLENTSPMVKSKKQEIFRKLNSSGGGDSDMAAAQPGTEIFNLPAVTTSGSVSSRGHSFADPASNLGLEDIIRKALMGSFDDKVEDHGVVMSQPMGVVPGTANTSVVTSGETRREEGDPSPHSGGVCKPKLISKSNSRKSKSPIPGQGYLGTERPSSVSSVHSEGDYHRQTPGWAWEDRPSSTGSTQFPYNPLTMRMLSSTPPTPIACAPSAVNQAAPHQQNRIWEREPAPLLSAQYETLSDSDD

SEQ ID NO: 72703 - DNA, 7014 bp, Artificial Sequence
  derived and/or modified sequence
atgagcagcagcggctacccccccaaccagggcgccttcagcaccgagcagagcagataccccccccacagcgtgcagtacaccttccccaacaccagacaccagcaggagttcgccgtgcccgactacagaagcagccacctggaggtgagccaggccagccagctgctgcagcagcagcagcagcagcagctgagaagaagacccagcctgctgagcgagttccaccccggcagcgacagaccccaggagagaagaaccagctacgagcccttccaccccggccccagccccgtggaccacgacagcctggagagcaagagacccagactggagcaggtgagcgacagccacttccagagagtgagcgccgccgtgctgcccctggtgcaccccctgcccgagggcctgagagccagcgccgacgccaagaaggaccccgccttcggcggcaagcacgaggcccccagcagccccatcagcggccagccctgcggcgacgaccagaacgccagccccagcaagctgagcaaggaggagctgatccagagcatggacagagtggacagagagatcgccaaggtggagcagcagatcctgaagctgaagaagaagcagcagcagctggaggaggaggccgccaagccccccgagcccgagaagcccgtgagccccccccccgtggagcagaagcacagaagcatcgtgcagatcatctacgacgagaacagaaagaaggccgaggaggcccacaagatcttcgagggcctgggccccaaggtggagctgcccctgtacaaccagcccagcgacaccaaggtgtaccacgagaacatcaagaccaaccaggtgatgagaaagaagctgatcctgttcttcaagagaagaaaccacgccagaaagcagagagagcagaagatctgccagagatacgaccagctgatggaggcctgggagaagaaggtggacagaatcgagaacaaccccagaagaaaggccaaggagagcaagaccagagagtactacgagaagcagttccccgagatcagaaagcagagagagcagcaggagagattccagagagtgggccagagaggcgccggcctgagcgccaccatcgccagaagcgagcacgagatcagcgagatcatcgacggcctgagcgagcaggagaacaacgagaagcagatgagacagctgagcgtgatcccccccatgatgttcgacgccgagcagagaagagtgaagttcatcaacatgaacggcctgatggaggaccccatgaaggtgtacaaggacagacagttcatgaacgtgtggaccgaccacgagaaggagatcttcaaggacaagttcatccagcaccccaagaacttcggcctgatcgccagctacctggagagaaagagcgtgcccgactgcgtgctgtactactacctgaccaagaagaacgagaactacaaggccctggtgagaagaaactacggcaagagaagaggcagaaaccagcagatcgccagacccagccaggaggagaaggtggaggagaaggaggaggacaaggccgagaagaccgagaagaaggaggaggagaagaaggacgaggaggagaaggacgagaaggaggacagcaaggagaacaccaaggagaaggacaagatcgacggcaccgccgaggagaccgaggagagagagcaggccacccccagaggcagaaagaccgccaacagccagggcagaagaaagggcagaatcaccagaagcatgaccaacgaggccgccgccgccagcgccgccgccgccgccgccaccgaggagccccccccccccctgccccccccccccgagcccatcagcaccgagcccgtggagaccagcagatggaccgaggaggagatggaggtggccaagaagggcctggtggagcacggcagaaactgggccgccatcgccaagatggtgggcaccaagagcgaggcccagtgcaagaacttctacttcaactacaagagaagacacaacctggacaacctgctgcagcagcacaagcagaagaccagcagaaagcccagagaggagagagacgtgagccagtgcgagagcgtggccagcaccgtgagcgcccaggaggacgaggacatcgaggccagcaacgaggaggagaaccccgaggacagcgagggcgccgagaacagcagcgacaccgagagcgcccccagccccagccccgtggaggccgtgaagcccagcgaggacagccccgagaacgccaccagcagaggcaacaccgagcccgccgtggagctggagcccaccaccgagaccgcccccagcaccagccccagcctggccgtgcccagcaccaagcccgccgaggacgagagcgtggagacccaggtgaacgacagcatcagcgccgagaccgccgagcagatggacgtggaccagcaggagcacagcgccgaggagggcagcgtgtgcgaccccccccccgccaccaaggccgacagcgtggacgtggaggtgagagtgcccgagaaccacgccagcaaggtggagggcgacaacaccaaggagagagacctggacagagccagcgagaaggtggagcccagagacgaggacctggtggtggcccagcagatcaacgcccagagacccgagccccagagcgacaacgacagcagcgccacctgcagcgccgacgaggacgtggacggcgagcccgagagacagagaatgttccccatggacagcaagcccagcctgctgaaccccaccggcagcatcctggtgagcagccccctgaagcccaaccccctggacctgccccagctgcagcacagagccgccgtgatcccccccatggtgagctgcaccccctgcaacatccccatcggcacccccgtgagcggctacgccctgtaccagagacacatcaaggccatgcacgagagcgccctgctggaggagcagagacagagacaggagcagatcgacctggagtgcagaagcagcaccagcccctgcggcaccagcaagagccccaacagagagtgggaggtgctgcagcccgccccccaccaggtgatcaccaacctgcccgagggcgtgagactgcccaccaccagacccaccagaccccccccccccctgatccccagcagcaagaccaccgtggccagcgagaagcccagcttcatcatgggcggcagcatcagccagggcacccccggcacctacctgaccagccacaaccaggccagctacacccaggagacccccaagcccagcgtgggcagcatcagcctgggcctgcccagacagcaggagagcgccaagagcgccaccctgccctacatcaagcaggaggagttcagccccagaagccagaacagccagcccgagggcctgctggtgagagcccagcacgagggcgtggtgagaggcaccgccggcgccatccaggagggcagcatcaccagaggcacccccaccagcaagatcagcgtggagagcatccccagcctgagaggcagcatcacccagggcacccccgccctgccccagaccggcatccccaccgaggccctggtgaagggcagcatcagcagaatgcccatcgaggacagcagccccgagaagggcagagaggaggccgccagcaagggccacgtgatctacgagggcaagagcggccacatcctgagctacgacaacatcaagaacgccagagagggcaccagaagccccagaaccgcccacgagatcagcctgaagagaagctacgagagcgtggagggcaacatcaagcagggcatgagcatgagagagagccccgtgagcgcccccctggagggcctgatctgcagagccctgcccagaggcagcccccacagcgacctgaaggagagaaccgtgctgagcggcagcatcatgcagggcacccccagagccaccaccgagagcttcgaggacggcctgaagtaccccaagcagatcaagagagagagcccccccatcagagccttcgagggcgccatcaccaagggcaagccctacgacggcatcaccaccatcaaggagatgggcagaagcatccacgagatccccagacaggacatcctgacccaggagagcagaaagacccccgaggtggtgcagagcaccagacccatcatcgagggcagcatcagccagggcacccccatcaagttcgacaacaacagcggccagagcgccatcaagcacaacgtgaagagcctgatcaccggccccagcaagctgagcagaggcatgccccccctggagatcgtgcccgagaacatcaaggtggtggagagaggcaagtacgaggacgtgaaggccggcgagaccgtgagaagcagacacaccagcgtggtgagcagcggccccagcgtgctgagaagcaccctgcacgaggcccccaaggcccagctgagccccggcatctacgacgacaccagcgccagaagaacccccgtgagctaccagaacaccatgagcagaggcagccccatgatgaacagaaccagcgacgtgaccatcagcagcaacaagagcaccaaccacgagagaaagagcaccctgacccccacccagagagagagcatccccgccaagagccccgtgcccggcgtggaccccgtggtgagccacagccccttcgacccccaccacagaggcagcaccgccggcgaggtgtacagaagccacctgcccacccacctggaccccgccatgcccttccacagagccctggaccccgccgccgccgcctacctgttccagagacagctgagccccacccccggctaccccagccagtaccagctgtacgccatggagaacaccagacagaccatcctgaacgactacatcaccagccagcagatgcaggtgaacctgagacccgacgtggccagaggcctgagccccagagagcagcccctgggcctgccctaccccgccaccagaggcatcatcgacctgaccaacatgccccccaccatcctggtgccccaccccggcggcaccagcaccccccccatggacagaatcacctacatccccggcacccagatcaccttcccccccagaccctacaacagcgccagcatgagccccggccaccccacccacctggccgccgccgccagcgccgagagagagagagagagagagagagagaaggagagagagagagagagaatcgccgccgccagcagcgacctgtacctgagacccggcagcgagcagcccggcagacccggcagccacggctacgtgagaagccccagccccagcgtgagaacccaggagaccatgctgcagcagagacccagcgtgttccagggcaccaacggcaccagcgtgatcacccccctggaccccaccgcccagctgagaatcatgcccctgcccgccggcggccccagcatcagccagggcctgcccgccagcagatacaacaccgccgccgacgccctggccgccctggtggacgccgccgccagcgccccccagatggacgtgagcaagaccaaggagatcagcagccacagatacgagacccccagcgacgccatcgaggtgatcagccccgccagcagccccgcccccccccaggagaagctgcagacctaccagcccgaggtggtgaaggccaaccaggccgagaacgaccccaccagacagtacgagggccccctgcaccactacagaccccagcaggagagccccagcccccagcagcagctgccccccagcagccaggccgagggcatgggccaggtgcccagaacccacagactgatcaccctggccgaccacatctgccagatcatcacccaggacttcgccagaaaccaggtgagcagccagaccccccagcagccccccaccagcaccttccagaacagccccagcgccctggtgagcacccccgtgagaaccaagaccagcaacagatacagccccgagagccaggcccagagcgtgcaccaccagagacccggcagcagagtgagccccgagaacctggtggacaagagcagaggcagcagacccggcaagagccccgagagaagccacgtgagcagcgagccctacgagcccatcagccccccccaggtgcccgtggtgcacgagaagcaggacagcctgctgctgctgagccagagaggcgccgagcccgccgagcagagaaacgacgccagaagccccggcagcatcagctacctgcccagcttcttcaccaagctggagaacaccagccccatggtgaagagcaagaagcaggagatcttcagaaagctgaacagcagcggcggcggcgacagcgacatggccgccgcccagcccggcaccgagatcttcaacctgcccgccgtgaccaccagcggcagcgtgagcagcagaggccacagcttcgccgaccccgccagcaacctgggcctggaggacatcatcagaaaggccctgatgggcagcttcgacgacaaggtggaggaccacggcgtggtgatgagccagcccatgggcgtggtgcccggcaccgccaacaccagcgtggtgaccagcggcgagaccagaagagaggagggcgaccccagcccccacagcggcggcgtgtgcaagcccaagctgatcagcaagagcaacagcagaaagagcaagagccccatccccggccagggctacctgggcaccgagagacccagcagcgtgagcagcgtgcacagcgagggcgactaccacagacagacccccggctgggcctgggaggacagacccagcagcaccggcagcacccagttcccctacaaccccctgaccatgagaatgctgagcagcaccccccccacccccatcgcctgcgcccccagcgccgtgaaccaggccgccccccaccagcagaacagaatctgggagagagagcccgcccccctgctgagcgcccagtacgagaccctgagcgacagcgacgactag

SEQ ID NO: 72704 - DNA, 7014 bp, Artificial Sequence
  derived and/or modified sequence
atgagctcctctgggtatccacccaatcagggcgctttttcaaccgagcaatccaggtacccacctcattccgtgcaatatacctttcctaatactcgccaccaacaggagtttgccgtgccagattatcggtccagtcacctggaggtgtctcaagcatcccagcttctacaacaacagcagcagcagcagctgcggaggaggccatcccttctgtctgaatttcaccccggctctgaccgccctcaggaaagaagaacatcttacgagccttttcaccccggaccctctcccgtggaccatgattccctggaatcaaaacgcccgagactggaacaggtgtccgacagccatttccagagagtctcggctgcggttctaccgcttgtccatcctctcccagaaggtcttcgagcctcagctgatgcaaaaaaggacccggcctttggaggaaagcatgaggcaccatcttcacccattagcggccagccatgtggggatgaccagaacgcttcaccaagtaagttgtctaaggaggagctcatacagtcaatggaccgagttgacagagaaatcgccaaggtcgagcagcaaatccttaagcttaagaagaagcagcagcaactggaggaagaggccgccaaaccgcccgaacctgagaagcctgtcagcccgcccccggtggagcagaaacatcggtccatcgtccaaatcatttatgacgaaaacaggaaaaaagcagaggaggcacataaaatttttgagggactgggtcccaaggtggagctaccactctacaatcagccttccgatacaaaagtctaccatgagaatattaaaaccaaccaggttatgcgcaagaaattaatcttattcttcaagcggagaaaccatgctcgcaagcaacgggagcagaagatatgccagagatatgaccagctgatggaggcctgggagaagaaggtggatcgcatcgagaataaccctcggcggaaggcgaaagagtcgaagacccgggagtattatgagaaacaattccctgaaatcaggaagcagagggaacagcaggagagatttcagcgtgtcggacagaggggggcgggactcagtgccactattgccagaagtgagcatgaaataagcgagatcatcgatggcctgtccgagcaggaaaacaacgagaaacaaatgcgtcagctgagcgtgatccctccaatgatgtttgatgccgaacagagacgagtgaagtttattaatatgaacggcctcatggaggatcctatgaaggtctataaggataggcagttcatgaacgtgtggacagaccatgaaaaggagattttcaaagataaattcatccagcatccaaagaattttggattgatcgcctcctacctggagagaaagagcgtgccagattgtgttctgtattattatttaaccaaaaagaatgagaattacaaggcactggtgaggcgtaactacggaaagcggaggggacgcaaccagcagattgccaggccctctcaagaggagaaagtcgaagaaaaggaagaagacaaggcggagaaaacagagaaaaaggaggaggagaaaaaggacgaggaggaaaaagacgagaaggaggatagtaaggagaacaccaaagagaaggataagatagatggaacagccgaggagaccgaggagagagaacaggcaaccccccgaggacgcaaaacagccaactcccagggtcgcaggaagggacgcatcacgcggagtatgactaatgaggcagcggccgcctccgccgccgccgccgcggcaacagaagagcctcctcccccactaccccccccacctgaacccatctcgactgaacccgtggagacgagtcgctggacggaggaggaaatggaagttgcgaagaaaggattggtggagcatgggcggaactgggccgcaattgctaagatggttggaaccaagagcgaagcccagtgcaagaacttttacttcaactataagcgcagacataatctggataatcttctgcaacaacacaaacagaagacgtcaagaaagccacgcgaggagagagacgtctcacagtgtgaatctgtcgccagcacggtgagtgcacaagaggacgaggacattgaagcatctaatgaagaggagaatcccgaggacagtgagggtgccgaaaattcatcggataccgagagtgcaccaagtccatcaccggtagaggccgttaagccgagcgaggactccccagaaaacgcaacttcaaggggtaacacagagcccgctgtggaacttgagcccacaaccgagaccgcaccttctaccagcccttctctcgccgtgcccagtacgaagcctgccgaggacgagagcgtcgaaacgcaggtcaatgactcaatttctgctgaaaccgctgaacaaatggacgttgatcagcaggaacactctgccgaggagggctcagtctgcgatcctccgccagccaccaaggcggacagcgtagatgtggaggtacgagtccctgagaaccatgcaagtaaagtcgaaggtgataataccaaagaacgggacctggatagagccagtgagaaggttgagcccagggatgaagatctggtggtggcccagcagatcaatgcccagcgtcctgagcctcagagtgacaatgactcatccgccacatgcagtgccgatgaagacgtcgatggagaacccgagcgtcagcggatgttcccgatggacagcaagccctccttattaaacccgaccggaagcatcttggtgagctctcccctcaaacctaatcctctcgatctgccacagctacagcatcgggccgcagttataccacccatggtttcgtgcaccccttgcaatatccccatagggactcctgtaagtggctatgcactgtaccaaaggcacattaaagccatgcatgaaagtgccctcctggaggaacagcggcagaggcaggagcagatcgatcttgaatgccgtagctctacctctccctgcgggacatctaaaagcccaaatagggagtgggaggtccttcagcccgcaccacaccaggtgattaccaatttaccagagggcgtcagactgccgaccacgagacccaccaggccaccccccccactaataccctcgagtaagacgaccgtggcctcggagaaaccttcattcatcatggggggcagtatttcgcaaggtacccccggcacatacctgacctctcacaaccaggccagctacacacaagaaacacccaaacccagcgtcggctcaatctccctcgggctgcccagacagcaggaaagcgcgaaaagtgctactttaccttacatcaagcaggaggaatttagccccagatctcagaacagccagcctgaaggcctattagtccgcgctcagcacgagggcgttgtgaggggcacggccggggccatccaggaaggaagcatcacccggggtacccctactagtaaaatttcagtggaatcgatccctagtctccgtgggagcatcacgcagggcacaccggcactgccgcagacaggtattccaacggaagcactggtcaaaggctccatttccagaatgcccattgaagacagtagccccgagaaagggagggaagaagctgcttcgaaaggtcacgtcatttatgagggtaagagcgggcatattcttagctacgacaacattaagaatgctagagaaggcacaaggtcgccacgcactgctcacgagataagtctgaaaaggtcatacgaatctgtggagggtaacattaagcagggcatgtcaatgagggaatcgcctgttagcgctcccctggagggactgatctgtagagcactgcccaggggttcacctcacagtgaccttaaagagagaactgtgctgtctggcagcattatgcaaggcacaccgagggccaccactgagagcttcgaagacgggcttaaatatccaaaacagatcaagagagagtcccccccaatccgggccttcgagggtgcgataacgaagggcaagccttatgatgggattactacaatcaaggagatggggaggtctattcacgagataccgaggcaagacatcctcacacaggagtcccgaaagacccccgaagtggtccaaagcactcgacctatcatcgaaggcagcatttctcaaggtacacctatcaaattcgacaataatagcgggcagagtgctattaagcataatgtcaaatcactgattacaggcccttcaaaactttcacggggtatgcctcctctggaaattgtgccagaaaacatcaaggtggttgagagaggcaaatatgaggatgtcaaagccggagagaccgtaagaagccggcatacttctgttgtctccagcgggccttctgttctgagatcgacactgcatgaggccccaaaggcgcaattgtctcctggaatttacgacgacacctccgcgcgaaggactccggttagttaccagaacaccatgagcagggggtcccccatgatgaatcgaactagcgacgtgaccatttcctcaaacaaatcaacaaaccacgaacgtaagagcaccctcacccccacccaacgcgaaagtattcccgccaagtctcctgtgccaggcgtagaccctgtggtgtcgcactcaccctttgatccgcaccatcgtggctctacagcgggtgaggtataccggtcccacctgccaacgcacttggatcctgctatgccattccaccgtgccctagatcctgcagctgctgcttatctcttccaacgccagttatccccaacacctggctaccctagccaataccagctgtatgccatggaaaatacacgccagacaatattgaatgattacatcacaagccagcaaatgcaggtgaatctacggcctgacgtggcccgcggcctgtctccccgtgaacagcccctggggctgccgtatccagcgacaaggggtatcatcgatctcactaacatgcctcctacaatcctagttccgcatcctggaggtaccagcacccccccgatggacagaatcacctatattcccggaacccagattacatttccaccccgcccttacaacagtgcatcaatgagtcctggccaccccacccatctggcggccgcagcctccgccgagcgtgagcgggaacgagagcgcgaaaaagagcgggagcgtgaaagaatcgccgctgcatcatctgatctctatctgaggcctggatccgagcagcccgggcgccccggatctcacggatatgtgcgttctccctcgccatcagtcaggactcaggagaccatgcttcagcagcggccttccgtcttccaggggacaaacggaacttctgttataacccccctagaccccaccgcccagctgagaatcatgccactgcctgccggcgggccatctatctctcagggactgcctgcctctaggtataataccgccgcggacgccctggccgccctcgtggatgctgctgctagcgcaccacaaatggatgttagcaaaaccaaggagatttctagccacaggtatgaaacaccatccgatgctatcgaagtcatttcaccagcctctagtccggcacccccccaagagaaactccaaacataccagccggaagtagtgaaagcaaatcaggccgagaatgaccctactaggcaatatgaaggccccctgcatcattacagaccacagcaggaatccccaagcccacaacagcagttgcctcctagtagtcaggcagagggaatgggccaggtgccacgcacccatcgccttatcaccctggcggaccacatctgccagatcatcactcaggattttgctagaaaccaagtttcaagccagacgccccaacaaccccctactagtaccttccaaaatagcccgtctgcgctagtctctacacccgtgagaacaaaaacctccaaccgctacagtccagaaagccaagcccagtcggtccatcatcaacgacccgggtcgagagtttcccctgagaacctggtggataagtctcgcgggagccggcctggcaagtctccagaacggagccacgtgagcagcgagccttacgaacctatctccccaccacaggtgcccgtcgttcatgagaaacaagattcactgctcctcttgtcccagcgcggcgcggaacctgccgaacagaggaatgacgcaagatcccctgggtcaattagctacttaccaagtttttttacgaaactggaaaatacgtcgcctatggtaaagtctaagaaacaggagatttttcggaagctaaattctagcggcggcggcgacagcgacatggccgcggctcagcctggcaccgagatttttaacctccctgctgtgacaacctcgggatccgtcagcagtagaggacacagcttcgctgaccccgcctcgaacctaggacttgaagatatcatccggaaggccttgatgggtagtttcgacgacaaggtcgaggatcatggagtcgtcatgtcccagccaatgggagtggtccctgggactgctaacacctccgtggtcacatccggtgaaacacgaagagaagaaggggatcctagtccccatagcggaggcgtgtgcaaacccaagcttatatcgaagtccaacagtcgaaaatctaagagtccaatccccggacagggttatttaggaacggagcggccttcatctgtaagctccgtgcactccgaaggcgattaccaccgccagacgcctggttgggcatgggaagaccgaccttccagcacgggctccactcaattcccttataaccctctcactatgcgtatgctcagctcaacgccacctaccccaattgcatgtgcaccaagcgctgtgaatcaggccgcccctcatcagcagaaccggatttgggagcgagagcccgccccactgctttccgcgcagtatgagactctgtccgactctgacgattag

SEQ ID NO: 72705 - DNA, 7014 bp, Artificial Sequence
  derived and/or modified sequence
atgagcagcagcggctacccacccaaccagggcgccttcagcacagagcagagccgctacccaccccacagcgtgcagtacaccttccccaacaccaggcaccagcaggagtttgctgtgcctgactaccgcagcagccacctggaggtgtcccaggccagccagctgctgcagcagcagcagcagcagcagctgcggcggcggcccagcctgctgtctgagttccaccctggcagtgaccggccccaggagaggaggaccagctatgagcccttccaccctggccccagccctgtggaccatgacagcctggagagcaagaggccccggctggagcaggtgtctgacagccacttccagagggtgtctgctgctgtgctgcccctggtgcaccccctgcctgagggcctgcgggccagcgcagatgccaagaaggaccctgcctttggaggcaagcatgaggcccccagcagccccatcagcggccagccctgtggagatgaccagaatgccagccccagcaagctgagcaaggaggagctgatccagagcatggacagagtggaccgggagatcgccaaggtggagcagcagatcctgaagctgaagaagaagcagcagcagctggaggaggaggccgccaagcccccagagcctgagaagcctgtgtccccacctcctgtggagcagaagcacaggagcatcgtgcagatcatctatgatgagaacaggaagaaggccgaggaggcccacaagatctttgagggcctgggccccaaggtggagctgcccctgtacaaccagcccagcgacaccaaggtgtaccacgagaacatcaagaccaaccaggtgatgaggaagaagctgatcctcttcttcaagagaagaaaccacgccaggaagcagcgggagcagaagatctgccagagatatgaccagctgatggaggcctgggagaagaaggtggacagaattgagaacaaccccaggaggaaggccaaggagagcaagacccgggagtactatgagaagcagtttcctgagatcaggaagcagcgggagcagcaggagcgcttccagagggtgggccagagaggagctggcctgagcgccaccatcgcccggtctgagcacgagatcagcgagatcattgatggcctgtctgagcaggagaacaatgagaagcagatgaggcagctgagcgtcatcccccccatgatgtttgatgctgagcagaggagagtgaagttcatcaacatgaatggcctgatggaggaccccatgaaggtgtacaaggaccggcagttcatgaatgtgtggacagaccacgagaaggagatcttcaaggacaagttcatccagcaccccaagaactttggcctcatcgccagctacctggagaggaagtctgtgcctgactgtgtgctgtactactacctgaccaagaagaatgaaaactacaaggccctggtgagaagaaattatggcaagaggcggggcaggaaccagcagatcgcccggcccagccaggaggagaaggtggaggagaaggaggaggacaaggccgagaagacagagaagaaggaggaggagaagaaggatgaggaggagaaggatgagaaggaggacagcaaggagaacaccaaggagaaggacaagattgatggaacagctgaggagacagaggagcgggagcaggccaccccccggggcaggaagacagccaacagccagggccgcaggaagggccgcatcaccaggtccatgaccaatgaagctgctgctgccagcgctgctgctgctgctgccacagaggagcccccaccacccctgcccccacctcctgagcccatcagcacagagcctgtggagaccagccgctggacagaggaggagatggaggtggccaagaagggcctggtggagcacggcaggaactgggccgccatcgccaagatggtgggcaccaagtctgaggcccagtgcaagaacttctacttcaactacaagagaagacacaacctggacaacctgctgcagcagcacaagcagaagaccagcaggaagccccgggaggagagagatgtgtcccagtgtgagagcgtggccagcacagtgtctgcccaggaggatgaggacatcgaggccagcaatgaggaggagaaccctgaggacagcgagggcgctgagaacagcagtgacacagaaagtgcccccagccccagccctgtggaggccgtgaagcccagcgaggacagcccagaaaatgccaccagccggggcaacacagagcctgctgtggagctggagcccaccacagaaacagcccccagcaccagccccagcctggccgtgcccagcaccaagccagcagaagatgaatctgtggagacccaggtgaatgacagcatctctgctgagacagctgagcagatggatgtggaccagcaggagcacagcgctgaggagggctctgtgtgtgaccccccaccagccaccaaggctgacagcgtggatgtggaggtgcgggtgcctgagaaccacgccagcaaggtggagggggacaacaccaaggagcgggacctggaccgggccagcgagaaggtggagcccagagatgaggacctggtggtggcccagcagatcaatgcccagaggcctgagccccagagcgacaatgacagcagcgccacctgcagcgcagatgaagatgtggatggagagcctgagcggcagaggatgttccccatggacagcaagcccagcctgctgaaccccaccggcagcatcctggtgagcagccccctgaagcccaaccccctggacctgccccagctgcagcacagagctgctgtgatcccccccatggtgtcctgcaccccctgcaacatccccatcggcacccctgtgtctggctacgccctgtaccagaggcacatcaaggccatgcatgagagcgccctgctggaggagcagaggcagaggcaggagcagattgacctggagtgccgcagcagcaccagcccctgtggcaccagcaagagccccaaccgggagtgggaggtgctgcagcctgccccccaccaggtgatcaccaacctgcctgagggcgtgcggctgcccaccacccggcccacccggcccccaccacccctcatccccagcagcaagaccaccgtggccagcgagaagcccagcttcatcatgggcggcagcatcagccagggcaccccaggcacctacctgaccagccacaaccaggccagctacacccaggagacccccaagcccagcgtgggcagcatcagcctgggcctgccccggcagcaggagagcgccaagagcgccaccctgccctacatcaagcaggaggagttcagccccaggagccagaacagccagcctgagggcctgctggtgcgggcccagcacgagggcgtggtgcggggcacagctggggccatccaggagggcagcatcacccggggcacccccaccagcaagatctctgtggagagcatccccagcctgcggggcagcatcacccagggcaccccagccctgccccagacaggcatccccacagaggccctggtgaagggcagcatcagcaggatgcccatcgaggacagcagccctgagaagggccgggaggaggccgccagcaaaggacatgtgatctatgagggcaagagcggccacatcctgtcctatgacaacatcaagaatgcccgggagggcaccaggagccccaggacagcccacgagatcagcctgaagaggagctatgaatctgtggagggcaacatcaagcagggcatgtccatgagggagagccctgtgtctgcccccctggagggcctcatctgccgggccctgccccggggcagcccccacagcgacctgaaggagaggacagtgctgagcggcagcatcatgcagggcaccccccgggccaccacagagagctttgaagatggcctgaagtaccccaagcagatcaagcgggagagcccccccatccgggcctttgagggcgccatcaccaagggcaagccctatgatggcatcaccaccatcaaggagatgggccgcagcatccacgagatcccccggcaggacatcctgacccaggagagcaggaagaccccagaggtggtgcagagcacccggcccatcatcgagggcagcatcagccagggcacccccatcaagtttgacaacaacagcggccagagcgccatcaagcacaacgtgaagagcctcatcaccggccccagcaagctgagccggggcatgccacccctggagatcgtgcctgagaacatcaaggtggtggagcggggcaagtatgaagatgtgaaggccggggagaccgtgcgcagccgccacacctctgtggtgagcagcggccccagcgtgctgcggagcaccctgcacgaggcccccaaggcccagctgagccctggcatctatgatgacaccagcgcccggaggacccctgtgtcctaccagaacaccatgagccggggcagccccatgatgaacagaacatctgatgtgaccatcagcagcaacaagagcaccaaccacgagaggaagagcaccctgacccccacccagcgggagagcatcccagccaagagccctgtgcctggggtggaccctgtggtgagccacagcccctttgacccccaccaccggggcagcacagctggggaggtgtaccgcagccacctgcccacccacctggaccctgccatgcccttccaccgggccctggaccctgctgctgctgcctacctgttccagaggcagctgagccccaccccaggctaccccagccagtaccagctgtatgccatggagaacacccggcagaccatcctgaatgactacatcaccagccagcagatgcaggtgaacctgcggccagatgtggcccggggcctgagcccccgggagcagcccctgggcctgccctacccagccacccggggcatcatcgacctgaccaacatgccacccaccatcctggtgccccaccctgggggcaccagcaccccacccatggaccgcatcacctacatccctggcacccagatcaccttccccccccggccctacaacagcgcctccatgagccctggccaccccacccacctggccgctgctgccagcgctgagcgggagcgggagcgggagcgggagaaggagcgggagcgggagagaattgctgctgccagcagtgacctgtacctgcggcccggcagcgagcagcccggccggcccggcagccacggctacgtgcgcagccccagccccagcgtgaggacccaggagaccatgctgcagcagaggccttctgtgttccagggcaccaacggcaccagcgtcatcacccccctggaccccacagcccagctgcgcatcatgcccctgcctgctgggggccccagcatcagccagggcctgcctgccagccgctacaacacagctgctgatgccctggccgccctggtggatgctgctgccagcgccccccagatggatgtgtccaagaccaaggagatcagcagccacagatatgagacccccagtgatgccatcgaggtgatcagccctgccagcagccctgccccaccccaggagaagctgcagacctaccagcctgaggtggtgaaggccaaccaggccgagaatgaccccacccggcagtatgagggccccctgcaccactaccggccccagcaggagagccccagcccccagcagcagctgccccccagcagccaggccgagggcatgggccaggtgcccaggacccacaggctcatcaccctggccgaccacatctgccagatcatcacccaggactttgccaggaaccaggtgagcagccagaccccccagcagccccccaccagcaccttccagaacagccccagcgccctggtgtccacccctgtgaggaccaagaccagcaaccgctacagccctgagagccaggcccagagcgtgcaccaccagaggcctggcagccgggtgtccccagagaacctggtggacaagagccggggcagcaggcctgggaagagccctgagaggagccacgtgtcctctgagccctatgagcccatcagccccccccaggtgcctgtggtgcatgagaagcaggacagcctgctgctgctgagccagagaggagctgagcctgctgagcagagaaatgatgcccggagccctggcagcatctcctacctgcccagcttcttcaccaagctggagaacaccagccccatggtgaagagcaagaagcaggagatcttcaggaagctgaacagcagcggcggcggggacagcgacatggctgctgcccagcccggcacagagatcttcaacctgcctgctgtgaccaccagcggctctgtgagcagccggggccacagctttgctgaccctgccagcaacctgggcctggaggacatcatcaggaaggccctgatgggcagctttgatgacaaggtggaggaccatggagtggtgatgagccagcccatgggcgtggtgcctggaacagccaacacctctgtggtgaccagcggggagacccggcgggaggagggggaccccagcccccacagcggaggagtgtgcaagcccaagctgatcagcaagagcaacagcaggaagagcaagagccccatccctggccagggctacctgggcacagagcggcccagctctgtgtcctctgtgcacagcgagggggactaccaccggcagaccccaggctgggcctgggaggaccggcccagcagcacaggcagcacccagttcccctacaaccccctgaccatgaggatgctgagcagcaccccacccacccccatcgcctgtgcccccagcgctgtgaaccaggccgccccccaccagcagaaccgcatctgggagcgggagcccgcccccctgctgagcgcccagtatgagaccctgagtgacagtgatgactag

SEQ ID NO: 72706 - DNA, 7950 bp, Artificial Sequence
  derived and/or modified sequence
attggcattgatctcacagtctggtgaggacttctttactgataatgtcaagttcaggttatcctcccaaccaaggagcattcagcacagaacaaagtcgttatcctcctcactctgtccagtatacatttcccaacacccgccaccagcaggagttcgcagtccctgattatcgttcctctcatcttgaagtgagtcaggcatcacagcttttgcagcaacagcagcagcaacagcttcgaaggcgaccttccttgctttcagaatttcacccaggttctgacaggcctcaagaaaggagaactagttatgaaccgtttcatccaggcccatccccagtggatcatgattcactggaatcgaagcgaccacgtctggaacaggtttctgattctcattttcagcgtgtcagtgctgcggttttgcctttagtgcacccgctgccagaagggctgagggcttctgcagatgctaagaaggatccagcattcggaggcaaacatgaagctccatcctctccaatttcggggcaaccatgtggagatgatcaaaatgcttcaccttcaaaactctcaaaggaagagttaatacagagtatggatcgtgtagatcgagaaattgcaaaagtagaacagcagatccttaaactgaaaaagaaacaacaacagcttgaagaagaggcagctaaacctcctgagcctgagaagcccgtgtcccctcctcctgtggagcagaaacaccgcagtattgtccaaattatttatgatgagaatcggaaaaaagcagaagaagctcataaaatttttgaaggtcttggcccaaaagttgaactgccactgtataaccagccatcagataccaaggtgtaccatgagaacatcaagacaaaccaggtgatgaggaaaaaactcattttattttttaaaagaagaaatcatgcaagaaaacaaagggaacaaaaaatctgccagcgttatgatcagctcatggaggcatgggagaaaaaagtggacagaatagaaaataatcctcggaggaaagctaaagaaagcaaaacaagggaatactatgaaaagcagtttccagaaattcgaaaacaaagagaacagcaagaaagatttcagcgagttgggcagaggggagctggtctttcagccaccattgctaggagtgagcatgagatttctgaaattattgatgggctctctgagcaggagaataatgagaaacaaatgcggcagctctctgtgattccacctatgatgtttgatgcagaacaaagacgagtcaagttcattaacatgaatgggcttatggaggaccctatgaaagtgtataaagataggcagtttatgaatgtttggactgaccatgaaaaggagatctttaaggacaagtttatccagcatccaaaaaactttggactaattgcatcatacttggagaggaagagtgttcctgattgtgttttgtattactatttaaccaagaaaaatgagaattataaagccctcgtcagaaggaattatgggaaacgcagaggcagaaaccagcaaattgctcgaccctcgcaagaagaaaaagtagaagaaaaagaagaggataaagcagaaaaaacagaaaaaaaagaagaagaaaagaaagatgaagaggaaaaagatgaaaaagaagactccaaagaaaataccaaggaaaaggacaagatagatggtacagcagaagaaactgaggaaagagagcaagccacaccccgggggcgaaagactgccaacagtcagggccgccgtaagggccggatcaccaggtccatgacaaacgaagctgcagctgccagtgctgcagccgcagcggctactgaagagcccccaccacctctgccaccgccaccagaacccatttctacagagcctgtggagacctctcgatggacagaagaagaaatggaagttgctaaaaaaggtctagtagaacatggtcgtaactgggcagcaattgctaaaatggtgggaacgaaaagtgaagctcaatgtaaaaacttctattttaactataaaaggcgacacaatcttgacaacctcttacagcagcataaacagaaaacttcacgaaaacctcgtgaagagcgagatgtgtctcaatgtgaaagtgtcgcttccactgtttctgctcaggaggatgaagatattgaagcctccaatgaagaagaaaatccagaagacagcgaaggtgcagaaaatagttctgatacagaaagtgctccttctccttcaccagttgaagctgtcaagcccagcgaggacagtcctgaaaatgctacttctcgaggaaacacagaacctgcggttgagcttgagcccaccacggaaactgcacccagtacatctccctccttagcagttccaagtacaaaaccagctgaagatgaaagtgtggagacccaggtgaatgacagcatcagtgctgagacagcagagcagatggatgtagatcagcaggagcacagtgctgaagagggttctgtttgtgatcccccacccgctaccaaagctgactctgtggacgttgaagtgagggtgccagaaaaccatgcatctaaagttgaaggtgataataccaaagaaagagacttggatagagccagtgagaaggtggaacctagagatgaagatttggtggtagctcagcaaataaatgcccaaaggcccgagccccagtcagacaatgattccagtgccacgtgcagcgctgatgaggatgtggatggagagccagagaggcagagaatgtttcctatggactcaaagccttcactgttaaaccccactggatctatactcgtctcatctccgttaaaaccaaatccactggatctgccacagcttcagcatcgagctgctgttatcccaccaatggtatcctgcaccccatgtaacataccaattggaaccccagtgagcggctatgctctctaccagcgacacattaaagcaatgcatgagtcagcactcctggaggagcagcggcagagacaagaacagatagatttggaatgtagaagttctacaagtccatgtggcacatccaagagtccaaacagagagtgggaagtccttcagcctgctccacatcaagtgataactaatctccctgaaggcgttcggcttccgacaactcgaccaaccaggccaccgccccctctcatcccgtcatccaaaaccacagtggcttcagaaaaaccatcttttataatgggaggctccatctcacagggaacaccaggcacttatttgacttctcataatcaggcttcctacactcaagaaacacccaagccgtcagtgggatctatctctcttggactgccacggcaacaggaatctgccaaatcagctactttgccctacatcaagcaggaagaattttctccccgaagccaaaactcacaacctgagggtctgttggtcagggcccaacatgaaggtgtagtcagaggtaccgcaggagccatacaagaaggaagtataactcggggaactccaaccagcaaaatttcagtggagagcattccatccctacggggctctatcactcagggcaccccggctctgccccagactggcataccaacagaggctttggtgaaggggtccatttcgagaatgcccattgaagacagcagtcctgagaaaggcagagaggaagctgcatccaaaggccatgttatttatgaaggcaaaagtggacatatcttgtcatatgataatattaagaatgcccgagaagggactaggagtccaagaacagctcatgaaatcagtttaaagagaagctatgaatcagtggaaggaaatataaagcaagggatgtcaatgagggagtctcctgtatcagcaccgttagaggggctgatatgccgagcattacccagggggagtcctcattctgacctcaaagaaaggactgtattgtctggctccataatgcaggggacaccaagagcaacaactgaaagctttgaagatggccttaaatatcccaaacaaattaaaagggaaagtcctcccatacgagcatttgaaggtgccattaccaaaggaaaaccatatgatggcatcaccaccatcaaagaaatggggcgttccattcatgagattccaaggcaagatattttaactcaggaaagtcggaaaactccagaagtggtccagagcacacggccgataattgagggttccatttcccagggcacaccaataaagtttgacaacaactcaggtcaatctgccatcaaacacaatgtcaaatccttaatcacggggcctagcaaactatcccgtggaatgcctccgctggaaattgtgccagagaacataaaagtggtagaacggggaaaatatgaggatgtgaaagcaggcgagaccgtgcgttcccggcacacgtcagtggtaagctctggcccctccgttcttaggtccacactgcatgaagctcccaaagcacaactgagccctgggatttatgatgacaccagtgcacggaggacccctgtgagttatcaaaacaccatgtccagaggctcacccatgatgaacagaacttctgatgttacaatttcttctaacaagtctaccaatcatgaaaggaaatcgacactgacccctacccagagggaaagtatcccagcgaagtctccagtgcctggggtggaccctgtcgtgagccacagtccgtttgatccccatcacagaggcagcactgcaggcgaggtttatcggagccacctgcccacgcacttggatccagccatgccttttcacagggctttggatcctgcagcggctgcttacctgtttcagagacagctttcaccaactccaggttacccaagtcagtatcagctttacgcaatggagaacacaagacagacaatcttaaatgattacattacctcacaacagatgcaagtgaacttgcgtccagatgtggccagaggactctccccaagagagcagccactgggtctcccatacccagcaacgagaggaatcattgacctgaccaatatgcctccaacaattttagtgcctcatccagggggaacaagcactcctcccatggacagaatcacttatattcctggtacacagattactttccctcccaggccgtacaactctgcttccatgtctccaggacacccaacacaccttgcagctgctgcaagtgctgagagggaacgggaacgggagcgggagaaggagcgggagcgggaacggattgctgcagcttcctccgacctctacctgcggccaggctcagaacagcctggccgacctggcagtcatggatatgttcgctccccttccccttcagtaagaactcaggagaccatgttgcaacagagacccagtgttttccaaggaaccaatggaaccagtgtaatcacacctttggatccaactgctcagctacgaatcatgccactgcctgctgggggcccttcaataagccaaggcctgccagcctcccgttacaacactgctgcggatgccctggctgctcttgtggatgctgcagcttctgcaccccagatggatgtgtccaaaacaaaagagatatcttctcacaggtatgaaacacctagcgatgctattgaggtgataagtcctgccagctcacctgcgccaccccaggagaaactgcagacctatcagccagaggttgttaaggcaaatcaagcggaaaatgatcctaccagacaatatgaaggaccattacatcactatcgaccacagcaggaatcaccatctccccaacaacagctgcccccttcttcacaggcagagggaatggggcaagtgcccaggacccatcggctgatcacacttgctgatcacatctgtcaaattatcacacaagattttgctagaaatcaagtttcctcgcagactccccagcagcctcctacttctacattccagaactcaccttctgctttggtatctacacctgtgaggactaaaacatcaaaccgttacagcccagaatcccaggctcagtctgtccatcatcaaagaccaggttcaagggtctctccagaaaatcttgtggacaaatccaggggaagtaggcctggaaaatccccagagaggagtcacgtctcttcggagccctacgagcccatctccccaccccaggttccggttgtgcatgagaaacaggacagcttgctgctcttgtctcagaggggcgcagagcctgcagagcagaggaatgatgcccgctcaccagggagtataagctacttgccttcattcttcaccaagcttgaaaatacatcacccatggttaaatcaaagaagcaggagatttttcgtaagttgaactcctctggtggaggtgactctgatatggcagctgctcagccaggaactgagatctttaatctgccagcagttactacgtcaggctcagttagctctagaggccattcttttgctgatcctgccagtaatcttgggctggaagacattatcaggaaggctctcatgggaagctttgatgacaaagttgaggatcatggagttgtcatgtcccagcctatgggagtagtgcctggtactgccaacacctcagttgtgaccagtggtgagacacgaagagaggaaggggacccatcacctcattcaggaggagtttgcaaaccaaagctgatcagcaagtcaaacagcaggaaatctaagtctcctatacctgggcaaggctacttaggaacggaacggccctcttcagtctcctctgtacattcagaaggggattaccataggcagacgccagggtgggcctgggaagacaggccctcttcaacaggctcaactcagtttccttataaccctctgactatgcggatgctcagcagtactccaccaacaccgattgcatgtgctccctctgcggtgaaccaagcagctcctcaccaacagaacaggatctgggagcgagagcctgccccactgctctcagcacagtacgagaccctgtcggatagtgatgactgaactgcacaaagtgaggggaacagggtgcaggagagggatctctagtttttgtggtttaatttttagtagcaggtcaaaaacctgccctcctgtgacttattccctgagacttttcaggagagccagcccacagatgatgaagaaatgatggaagttcatttggagagtcaaatgggaaaaaaacaaacaaaaaactgcctttgatacaggcaattcagtggactataataatagtggagggttgagatgtagagtttttaaaaagtgaacagttgctgttcttacatctgtaaagaaaaccataatgtctttaaatcactcttctgtaaatagatgacctttttgcagtgtatatccccttgctgtagtatctggtgtacttatgttcaaatcagcgcatcaactttgggggtgatttttaaaaatctttttgtctatctatctttttaaccctagccttctaaacaacctcatacagcccagttacataatgttggctgtcacgggcattgtacttttatctgatattgtttcctctaaattcagctttccagtgatgtttaaaatcttgtgaaaatgtttagatttttaacacagaccctgtcataaaatctgtacattagggtcaaaaggtaaaagtaacaaattctgccatattgtaaatttccagtgcaggctttaatttttttttttcattagtagcactgaaaaaatattactgcatgggtatgttctagttcagtttataaagttttaaaggcttatttgaggcatacctcactgttacgcacactggtaatttaaccatgcccctaagtattccttttctcctgcatttgatgcagcccaacaaagcttttgttttgaaataaatttgactaccctgtccata

SEQ ID NO: 72707 - DNA, 7014 bp, Artificial Sequence
  derived and/or modified sequence
atgagcagcagcggctacccccccaaccagggcgccttcagcaccgagcaatcaagatatcctccgcacagtgttcagtacacctttccaaacacccggcatcaacaggaatttgcagttcccgattaccgctcttctcaccttgaagtttcgcaggcctcacagctgctgcagcaacagcaacaacagcagctaagacgacgtccatcgctattgtctgaatttcatccggggagcgaccgacctcaagagagaagaactagctatgagccgtttcatccaggaccgtctccagtcgatcacgacagtctcgaatcaaagaggcctcgcctcgaacaggtgtctgacagccacttccagcgtgtctcagcagccgtgttacccctggtgcatcccctccccgaaggtctcagggctagcgccgatgctaaaaaggatcctgcattcggaggcaaacacgaagccccgtccagtcccattagtggacagccctgtggcgacgaccagaacgcctcaccgagtaagctcagtaaagaggaattgatacaatccatggaccgcgtcgatcgagagatcgccaaagtggaacaacagatcctcaaattgaagaagaaacagcagcagttagaagaggaggcagcaaagccacccgaaccagaaaagcctgtgtcaccaccgccagtagagcaaaaacaccgcagcatagtgcagattatttacgacgagaataggaagaaggcagaagaggcccacaaaatattcgagggactggggccaaaagtagagctccccctatacaatcagcctagcgacactaaagtgtaccatgagaacatcaaaaccaatcaggttatgagaaagaaattgattctgtttttcaagcgcagaaatcacgcccgcaagcaacgcgaacagaaaatttgtcagaggtatgatcagttgatggaggcctgggaaaaaaaggttgatcggatagagaacaacccccgaaggaaggctaaggagtcaaaaactcgcgaatattatgaaaaacagttccccgagattagaaagcagagagagcagcaggagcggttccagagagtgggtcaacgcggcgccggcttatccgccaccattgcaaggagcgaacacgagatctccgagatcattgacggcctcagcgagcaagaaaataacgaaaagcagatgaggcagctgagcgttatcccacctatgatgttcgacgccgaacagcggagagtgaagtttatcaatatgaatggactcatggaggatcctatgaaggtgtataaggataggcagttcatgaacgtgtggactgaccatgagaaggagatctttaaggataagttcatccaacatccaaagaactttggcctcattgccagctacctggagagaaaatcagtcccggattgtgttctctactactacttgactaagaagaacgaaaattacaaggctctcgtgcggcgcaattacggcaaacggcgcggccgaaatcaacagattgcccgtccaagccaggaggaaaaggtcgaagagaaagaggaagacaaagccgaaaagaccgaaaaaaaagaggaggaaaagaaggacgaagaggagaaagatgagaaagaggacagcaaggagaacacaaaggaaaaagataagattgacggcactgctgaggagaccgaggagcgtgaacaggcaacacccagaggcaggaaaaccgccaacagccagggccggcgcaagggccgcatcaccaggagtatgactaatgaagcggccgctgctagcgctgccgctgcagccgccaccgaggaacccccgccacccctgccccccccacccgagcctatctcaaccgagccagtggagacctcacgctggacagaggaggagatggaagtggcaaaaaaaggcttggtggaacacgggcggaattgggcggccatcgcgaaaatggttggcaccaagagcgaagcgcagtgtaaaaatttttatttcaactacaagcgccggcacaatctcgacaaccttctccagcagcacaaacagaaaaccagcagaaaaccgcgtgaggaacgggacgtatctcaatgtgaaagcgttgctagcactgtgtcggctcaggaagacgaggatatcgaggcttcaaacgaagaagagaacccagaagactccgagggcgctgaaaattcctccgatactgaaagtgcgccatccccaagccccgtcgaggctgtcaagcctagtgaagattcacctgaaaatgcgacgtcaaggggtaacacggagcctgccgtggaactggagccaaccactgaaaccgcaccgagcacttcgccctctctggccgtgccatccactaagcccgccgaagacgagagtgtagagacacaagtcaatgactcaatcagcgccgagacggccgagcaaatggacgtggaccagcaggagcactctgctgaagaaggctcggtctgtgacccccccccagcaaccaaggctgacagcgtggacgtggaagttagggtgcctgagaaccacgcatccaaagtcgagggcgacaatacaaaggaacgggatcttgatcgcgccagtgaaaaggttgagccaagggatgaggacctcgtcgtggctcaacagattaatgcccagcgacctgaaccccaaagtgacaatgacagtagcgccacatgcagcgccgatgaggatgtcgacggggaaccagagcggcaacggatgtttcccatggatagcaagccaagccttctgaatccaactggctcaatactggtgtccagtcccctcaaacccaatccactagacctgcctcagctgcaacacagagcagccgtgataccgcctatggtttcttgtactccttgtaatatcccgattggaacccccgtgtctggctacgccctttaccaaagacatattaaggctatgcacgaaagtgctctcttagaagaacagagacagcgacaggagcagatcgatctcgaatgtaggagtagtaccagtccttgcggcactagcaagagtcccaatcgggaatgggaagtgctccagcctgcgcctcaccaggtgatcactaatcttccagagggggtgcgcctgccaacaactcgtcctactaggccccctcccccacttatcccttcttccaaaaccacagttgccagtgaaaaacctagcttcattatgggtgggtcaatctctcagggtacgccaggcacttatctcacaagccacaaccaggcctcttacacgcaggagacgccaaagccttccgttggcagtatttcgctaggcctccccaggcaacaggagagcgctaagtccgccacactcccctacattaaacaagaggagtttagtcctcgcagtcagaacagtcagccagaaggactgctggtgcgggcccagcatgaaggcgtcgttcgaggtaccgctggcgccatacaggaaggctctatcacaaggggaaccccaacgtccaaaataagcgtggagagcataccaagtctgcgtgggtccatcactcagggcaccccagccctcccccagacagggattcccacagaagctcttgtgaaaggcagcatcagtcggatgcccattgaggactccagccctgaaaagggccgcgaggaggcagcctccaagggtcatgtgatctatgaaggcaagtctgggcatattctttcctatgataacattaaaaatgcacgagagggcacacgcagccctagaaccgcccacgagattagccttaaacgatcttacgaaagcgtcgagggaaacataaaacagggcatgagtatgcgggagtcacctgttagcgctccactggaaggtctgatctgccgggccctcccaaggggcagtccgcactcagacttaaaagagcgaactgtactttccgggtccatcatgcaggggacgcctcgggcaacaacagaatcttttgaagatggcctgaagtatccaaaacagatcaagagggagtctccacctattagagcatttgaaggagccattaccaagggcaagccttacgatgggatcaccaccatcaaagaaatggggcggagcatccacgagataccccgccaggatattctgacccaggagtcccgcaaaaccccagaagtggtacaaagcaccagacccattatcgaaggctccatcagccaaggtacccccattaaatttgataacaattcgggacaatccgccatcaagcacaatgtcaagtccctgattacaggtccatcaaagctctctagaggaatgccgccattggagattgtccctgagaatattaaggtggtagaacgcggtaagtacgaagacgttaaggctggcgagaccgtcagatctcgccacacgtccgttgtgtcctccggcccgtcggtgttaagaagtacgctgcacgaggcgcctaaagcccagctgagcccaggcatctacgatgacaccagcgcccggagaaccccggtcagctatcagaatacgatgagccgcggctcacccatgatgaatcgaacttctgacgtgaccattagcagcaataagtccacaaaccacgagcgaaaatccactctgacccctacccaacgggaatcaattcccgccaaaagcccagtccccggggtcgacccagtggtgtcccactctcctttcgacccgcatcatcgaggaagcacagctggtgaagtctatcgaagccatctgcctacacacctggatcccgctatgcccttccaccgggcgctggatccagctgctgccgcatacttgttccagcgccagctgtccccaacacccggatatcctagtcagtaccagctctacgccatggagaatacacgacagactatattgaatgactacattactagtcagcaaatgcaggtaaatttgcgcccggatgtggcccgtggcttgtcacctcgagaacagcccctgggactcccgtaccctgctactcggggaataattgaccttacaaacatgcccccaacgatcctggtccctcatcctggcggcacgagtactccaccgatggatagaataacctatatccctgggacacagatcacatttccaccacgtccctacaacagcgctagtatgagtccggggcatcctacccacttggccgccgccgcttcagccgaacgagagcgtgagcgcgagcgcgagaaagagcgggagagagagcgtatcgcggcagccagtagcgacctctatctgcggcctggctcggaacaaccagggcggcccggaagccacggttatgtacggtctccatccccaagcgtccgcacgcaggagactatgctgcaacaacgtccctcagttttccagggtactaacggtacatccgtcatcacccctctagatcccaccgcacagttgagaatcatgccactgcctgctgggggccctagtatttcacaggggctccccgcttccagatacaacaccgcggcggatgcactggcagctctggttgatgcggccgcgagcgctcctcagatggacgtgtcaaagacaaaggaaatcagctctcatagatatgagacccccagcgacgctatcgaggtcatctccccggcctcttctcctgcccctcctcaggaaaaacttcagacataccagcctgaggtggtcaaagccaatcaggctgaaaatgatcccactagacagtatgagggaccactacatcactatcgacctcaacaggagagtccttcccctcagcagcaactgcccccttcgagtcaggccgagggaatgggtcaggtaccacggacccatcgcttgatcaccctggcggaccatatatgccaaattattacccaggatttcgcccgtaatcaggtgtctagtcagacaccccagcaacctcccacttccacatttcaaaactctcccagcgccctggtgtccacaccagttcgaactaaaaccagcaaccgatatagcccagaaagccaggcacaatccgtgcaccaccagcgtcctgggagccgggtgagtccagagaacctggtcgacaagtcacgggggtcgagacctggaaagtctccagaaaggtcccacgtgagctccgaaccatacgagcccatctcacctccccaggtacctgtagtgcacgaaaaacaggacagcctcttacttctctctcaacgtggtgccgaacccgcagagcagaggaatgatgcacgttcacctggatctatatcctacctgccctcctttttcaccaagctcgagaacacctctcctatggtcaagtccaaaaaacaggagatctttcggaagctgaactcaagtggggggggtgatagcgacatggctgcggcccagcccggcaccgagatttttaacctgccggctgtgactaccagtggcagcgtttcttctcgaggacactcatttgccgatcccgcaagcaacctcgggctggaagatatcatcagaaaagccttgatgggtagctttgacgataaagtggaggatcatggcgttgtgatgtcccagccaatgggggtggtccctggcaccgctaacacgagcgtcgttacaagtggcgaaaccaggagggaggagggggaccccagccctcattctggcggcgtttgcaagccgaaactgatctccaagtcgaactcccgaaagagcaagtctcctataccaggacagggctacttgggtaccgagagacctagttcagtgagcagcgtccattctgagggggactatcaccgccagactcctggctgggcttgggaggaccgcccatcttctaccggatccacacagttcccttataaccctttgacgatgagaatgctgagttctacccctcccactcctattgcctgcgccccctctgccgtgaaccaggctgctcctcaccaacagaaccgaatctgggagagagaacctgcaccactgctttctgcacaatatgagacactgtctgactccgatgactag

SEQ ID NO: 72708 - DNA, 7013 bp, Artificial Sequence
  derived and/or modified sequence
atgtcaagttctggttatccacctaaccagggagctttctctaccgagcaatcccgataccctcctcacagcgttcagtatacgtttcccaacactagacaccagcaagagtttgcagtgccagactataggtcctctcacctggaggtgtcacaggccagtcagctgttgcagcagcagcagcagcagcagctccgcagacggccttcgttgttgtcagagttccaccccggaagcgaccggcctcaggaacgtcggacaagctatgaaccttttcacccaggccctagccccgtggatcacgactccctggagtccaagagaccccgtctggaacaggtgtccgactcccacttccagcgcgtttcagccgctgtgctgccactggtgcatcctctaccagagggcttacgggcatctgcagacgccaagaaggacccagctttcggagggaaacacgaggcgccttcaagtcccatctccggacagccctgcggcgacgatcagaatgcaagtccatcaaagctgagtaaggaggaactgattcagtctatggatcgcgttgatagagaaatcgctaaagtggagcaacagatcctcaagctgaagaaaaaacaacagcagctagaggaagaagccgcaaagcctcctgaaccagagaagccagtttccccgcctccggtggagcagaaacatcgctctatcgtccagataatctatgacgagaataggaagaaagccgaggaggcccataagattttcgaagggttagggcctaaagtagagctgcctctttacaatcaaccaagtgacacaaaagtttaccacgagaacataaagaccaatcaggtcatgcgtaaaaaactgattctcttcttcaagcgacgcaatcacgccaggaaacagagagaacaaaagatctgccagcgctacgaccagcttatggaggcctgggagaagaaagtcgacagaatcgagaataatccgaggagaaaggctaaagaaagcaagacgcgggagtactacgagaaacagttccctgagattcggaaacaaagggagcagcaggagagattccagcgcgtagggcagcgaggtgccggattgagtgcgacaatcgccagatcagaacatgaaatttccgagattattgatggcctgtccgaacaggaaaacaatgagaagcagatgaggcagctgtccgtaatcccacctatgatgttcgacgcagagcagcggagagttaaatttattaatatgaatggtctcatggaagatcccatgaaggtatacaaagaccggcagtttatgaacgtgtggaccgatcatgaaaaagaaattttcaaggacaagtttattcagcaccctaaaaacttcggcctgatcgcttcctacctggaaaggaagagcgtcccagactgcgtgctatactattaccttactaagaagaacgaaaactacaaggcactcgtgaggagaaactatggtaagcgcagggggagaaatcagcagattgccagacctagccaggaggagaaagtggaagaaaaggaagaggacaaagccgagaagacagagaaaaaagaggaagagaaaaaggatgaggaagagaaggatgagaaggaggacagcaaagaaaacacaaaggagaaggataaaatcgacgggacagccgaagagaccgaagagcgtgaacaggccaccccgcgtggcaggaagaccgctaacagtcagggacgcagaaaagggagaattacgaggtctatgactaatgaggctgcagcagcatccgccgctgccgcagccgcaacagaggaaccaccccctcccctgcctccccctcccgaacctatctcaactgagccagttgagacgtctaggtggacggaagaagagatggaggtagccaagaaaggactcgtagagcacggaaggaattgggccgcaatcgccaagatggtgggcaccaaaagcgaagcacagtgcaagaatttttatttcaattataaaaggagacacaacctggacaacctcctgcagcagcataaacagaaaactagtcggaaaccaagggaggagcgagatgtctcacagtgcgaatccgtcgcctctactgtttcagcacaggaggatgaggatatcgaagcctccaatgaagaagagaatcccgaggactcagaaggggctgagaacagctccgacacagaatccgcgccatctccttctccagtggaagccgtgaagccaagtgaggactcaccagaaaatgccacctctaggggcaataccgagcccgcagtggagctggagccaactacggagaccgcaccctctacaagcccttccctcgccgtgcctagcaccaaaccggctgaggatgagagcgttgagacgcaggtcaacgactccatttcggctgagacggcagaacagatggacgtagaccagcaggagcacagcgccgaggagggctcagtatgcgatccacccccagctacaaaggcagactccgtggatgtggaggtgagagttcctgagaaccacgcgtctaaagtagagggggataatacaaaagagagggacttggaccgggcatctgagaaggtggagcccagagacgaggacctggtcgtagctcagcaaatcaacgcccagcgcccagaaccccagtccgacaatgactcaagcgctacatgttccgccgacgaagacgtggacggcgaacccgaacggcagaggatgttccccatggattccaagccatccctgctgaacccaactggaagtatcctagttagctcccctctgaagcctaatccattagacctaccccagctgcagcacagggccgctgttatcccccctatggtgagctgcaccccatgcaatatcccaataggcacaccagtgtcaggctacgctctgtatcagagacacatcaaggccatgcacgagtcagcactgctcgaggagcagcgccagcgtcaggagcaaatcgatcttgagtgtcgctcctctacctccccctgtggaaccagtaagtctcccaacagagaatgggaagtccttcaacctgcgcctcaccaagtgattaccaacctccctgaaggcgtacgactgccaaccactcgccctacaaggccgccaccacctctcattccgtccagcaagaccactgtcgcctcagagaaaccctctttcatcatgggcggttccatttctcagggcactccgggtacttacctgacctcacataatcaggcaagttatacacaggagacgcctaagccctcagtgggctccatctccctgggactgccccgtcagcaagagtccgctaaatctgccacactgccttacatcaagcaggaagaattcagccccagatctcaaaactcacagcctgagggactcctggttagggcacagcatgagggcgtggtgaggggaaccgcaggcgctatccaggagggaagcatcacaaggggtacccccacatctaaaatttctgtcgagagtattcccagcctgcggggatctataacccagggtacccccgcactccctcagaccggtatccctactgaggccttggtcaagggatctatctctcgcatgccaatagaagactcaagtcctgaaaagggtagggaagaagccgctagcaaggggcatgtgatttacgaaggcaagtctgggcacatcctatcctacgacaatatcaagaatgccagagaaggtacacggagcccaagaactgcacatgagattagcctgaaacgctcttacgagtccgtcgaaggaaacataaagcaaggaatgtccatgcgcgagtctcccgtctctgctcccctcgaaggcctaatctgccgcgctctgccccgtggttcacctcactcagatctcaaagaacggacagtgctcagcgggagtatcatgcaaggcacgcctcgcgctacaacagagtcctttgaggacggcttgaaatatcccaaacagatcaaaagggaatctcctcctatccgcgcatttgaaggagctatcaccaaagggaaaccatacgatggcataacaaccattaaagagatgggacggagcatccacgagattcctagacaggatatccttacccaggagtccaggaagacgcctgaggttgttcaatccacccggcctatcattgaggggtctatatcccagggtactcctattaagttcgacaacaactccggacagtctgccatcaagcataatgttaagagtctgataacaggcccttcaaagttgagtaggggcatgccccctctcgagatcgtccctgagaacattaaggtcgttgaaaggggcaaatacgaggacgttaaagccggagaaactgtgaggagtcggcacacaagcgtggtgtccagcggaccttcggtgcttcgaagcacactgcatgaagcccctaaagcgcagctctcaccaggcatatatgatgatacaagcgcacgacggacccctgtcagttatcagaacacaatgtctagaggatctccgatgatgaacaggactagcgacgtgacaatctcgagcaacaagagtaccaaccatgaaagaaagtccaccttaaccccaactcagagggagtccattccagcaaagtcccccgtccccggagtggatcctgtggtctcacactctccttttgacccccatcaccgcggtagcaccgcaggagaagtgtatcgctcccacttaccgactcatctcgatcccgcaatgccattccatagagcactggacccagctgctgccgcatacttgtttcaacgtcaattaagcccgacgcccggttatcctagtcaataccagctttatgctatggagaatacaaggcagactatccttaacgattacataacctctcaacagatgcaggtgaacctccggccagacgtagcacgaggactgagtcctcgtgaacagccattgggcttgccttacccagcaacacgtggtatcatcgaccttacaaatatgccacctaccatcctggtcccgcatccaggaggtacgtccacccctccaatggatagaatcacctatattccgggtacccagatcacctttcctcctcgaccttataattcagcaagcatgtcccccggacaccccacccatctggccgctgccgcttcggcagaaagggagagagaacgggagcgtgaaaaagagcgtgagcgcgaacggattgcggctgcctcctctgatttgtatctgaggcccggatcggagcagcctgggagaccagggtcccatggttatgtgcggtccccttctcccagtgtgcgaactcaagagaccatgctgcagcagcgcccatccgtcttccaggggacgaacggtacctcggtcataaccccactggatcccactgctcagctgaggataatgcctttgccggctgggggacctagcatcagtcagggcttacccgcaagccggtacaatactgccgctgatgccttggctgcactcgtggatgctgctgcgagtgctccacagatggatgtgagtaaaacgaaggagatcagtagccatcggtacgagaccccatcagatgcaattgaggtcatctctccagctagttcgccagcgcctccccaggagaagcttcagacctatcagcctgaagttgttaaggcaaatcaggcagaaaatgaccctacgagacagtacgagggccctttgcaccactaccggcctcagcaggaatctccaagccctcaacagcagttgcctcctagctcacaggccgaggggatgggacaagtgccacggacacaccggctgattacccttgcagaccatatctgtcagattatcacccaagattttgcaagaaatcaggtgtcttcacagacaccgcaacagcccccaacctccaccttccagaacagcccctctgctcttgtatctacgccggtacggaccaaaaccagcaatcgctatagcccagaatctcaggcccaatctgtgcaccaccagaggcccggatcaagagtgagccctgaaaacctggtagataagagcaggggtagcaggcccggtaaaagccctgagagaagccacgttagttccgagccttacgagcctatctcgccaccccaagttcctgtggtccatgaaaagcaggattccctcctgcttctcagtcagagaggggctgagcccgcagagcaaagaaacgatgccaggagtcccggttcaattagttacttgcctagctttttcacaaaactggaaaacacatctcctatggtgaagtctaaaaagcaagagattttcaggaaactcaatagttcaggcggaggagatagcgacatggccgcagcccaaccgggaaccgaaatcttcaacctgccagccgttactacgagcggcagcgtatcctcacgaggacacagttttgccgatcctgccagtaaccttggtctggaggatattatacgcaaagccctgatggggagctttgacgataaggtggaagatcatggtgttgtcatgtcacagcctatgggtgttgttcctgggaccgccaatactagcgttgttacctccggtgagacccgcagggaagagggagacccttctccacactctggcggtgtatgcaaacccaagttaattagtaaaagtaactcacggaaaagtaaatctcccatcccaggtcaagggtacctggggacagaacgcccttcatccgtgtcctccgttcacagcgaaggtgactaccacaggcagactcccggatgggcttgggaggaccggccttcgtcaaccggttctactcagttcccctacaaccctcttaccatgaggatgctgtctagtacccccccaaccccaatagcttgtgctccgtcggctgtgaatcaagccgcacctcatcagcaaaatcggatttgggaacgcgaacccgcaccactcctgtctgcccagtacgagacactgtcagatagtgatgatta

SEQ ID NO: 72709 - protein, 142 aa, Artificial Sequence
  derived and/or modified sequence
MSFLTVPYKLPVSLSVGSCVIIKGTLIDSSINEPQLQVDFYTEMNEDSEIAFHLRVHLGRRVVMNSREFGIWMLEENLHYVPFEDGKPFDLRIYVCLNEYEVKVNGEYIYAFVHRIPPSYVKMIQVWRDVSLDSVLVNNGRR

SEQ ID NO: 72710 - DNA, 429 bp, Artificial Sequence
  derived and/or modified sequence
atgagcttcctgaccgtgccctacaagctgcccgtgagcctgagcgtgggcagctgcgtgatcatcaagggcaccctgatcgacagcagcatcaacgagccccagctgcaggtggacttctacaccgagatgaacgaggacagcgagatcgccttccacctgagagtgcacctgggcagaagagtggtgatgaacagcagagagttcggcatctggatgctggaggagaacctgcactacgtgcccttcgaggacggcaagcccttcgacctgagaatctacgtgtgcctgaacgagtacgaggtgaaggtgaacggcgagtacatctacgccttcgtgcacagaatcccccccagctacgtgaagatgatccaggtgtggagagacgtgagcctggacagcgtgctggtgaacaacggcagaagatag

SEQ ID NO: 72711 - DNA, 429 bp, Artificial Sequence
  derived and/or modified sequence
atgtcatttctcaccgtcccttataaactgccagtgagccttagcgttggatcttgtgttattatcaaaggaaccttgatcgattcctccatcaatgagccccagctgcaggtagacttctataccgagatgaatgaagactccgagatcgcctttcatctgagagtgcacctgggccgcagggtcgtgatgaatagccgggagttcggcatatggatgctagaggaaaatctgcattacgtgccatttgaagatgggaagccattcgacctgaggatttacgtctgtctcaatgagtatgaggttaaagtaaacggagaatatatttatgcgtttgtgcatcgtataccaccgagttatgttaaaatgatccaagtatggcgggacgtctccctggattctgtcctggtgaataacggaagaaggtag

SEQ ID NO: 72712 - DNA, 429 bp, Artificial Sequence
  derived and/or modified sequence
atgtccttcctgactgtgccctacaagctgcctgtgtccctgtctgtgggcagctgtgtgatcatcaagggcaccctgattgacagcagcatcaatgagccccagctgcaggtggacttctacacagagatgaatgaagacagcgagatcgccttccacctgcgggtgcacctgggccggcgggtggtgatgaacagccgggagtttggcatctggatgctggaggagaacctgcactacgtgccctttgaagatggcaagccctttgacctgcgcatctacgtgtgcctgaatgaatatgaggtgaaggtgaatggagagtacatctatgcctttgtgcaccgcatccccccatcctatgtgaagatgatccaggtgtggagagatgtgtccctggacagcgtgctggtgaacaatggaagaagatag

SEQ ID NO: 72713 - DNA, 600 bp, Artificial Sequence
  derived and/or modified sequence
gaagactggacacaattccgaaggtcgcccagaaggagaggacaatgtcatttctaactgtgccatacaaactgcctgtgtctttgtctgttggttcctgcgtgataatcaaagggacactgatcgactcttctatcaacgaaccacagctgcaggtggatttctacactgagatgaatgaggactcagaaattgccttccatttgcgagtgcacttaggccgtcgtgtggtcatgaacagtcgtgagtttgggatatggatgttggaggagaatttacactatgtgccctttgaggatggcaaaccatttgacttgcgcatctacgtgtgtctcaatgagtatgaggtaaaggtaaatggtgaatacatttatgcctttgtccatcgaatcccgccatcatatgtgaagatgattcaagtgtggagagatgtctccctggactcagtgcttgtcaacaatggacggagatgatcacactcctcattgttgaggaaaccctctttctacctgaccatgggattcctagagcctgctaacagaataatccctcctcaaccccttcccctacacttggtcattaaaacagcaccaaaccgta

SEQ ID NO: 72714 - DNA, 429 bp, Artificial Sequence
  derived and/or modified sequence
atgagcttcctgaccgtgccctacaagctgcccgtgagcctgagcgtggggtcctgtgtcatcatcaagggaacgttgatagactcatcaatcaacgaaccacaactgcaagtggatttctacaccgaaatgaatgaggatagcgaaatcgccttccatttgcgggtacatctggggcgaagggtggtaatgaattcacgagagttcgggatctggatgttagaagagaatcttcactatgtaccatttgaggatgggaagccatttgacctgcgcatctatgtgtgtcttaacgagtatgaagtgaaagtcaatggcgaatacatctatgcctttgttcatcggatccccccaagttatgtgaagatgattcaggtgtggcgtgatgtgtccctggacagcgtgctggtgaacaacggccgaagatag

SEQ ID NO: 72715 - DNA, 429 bp, Artificial Sequence
  derived and/or modified sequence
atgtcttttttgactgtaccgtacaaactacctgtttctttgtccgttggttcctgtgtgataattaaaggtacactgatcgattcttccatcaatgagcctcaactgcaggtggacttctacaccgagatgaatgaggactctgagatcgcattccatctgagggtgcacctcggacgaagagtggtgatgaattcacgcgagttcggaatctggatgctcgaggaaaatctgcattatgtcccatttgaagacggaaaacccttcgatctgcgtatatacgtgtgccttaacgagtatgaagttaaggttaatggcgagtacatatatgcgttcgtgcatagaattcctcccagttatgtcaagatgatacaagtgtggcgcgacgtgtccttagattcagtcctggtgaacaatggcagacgatag

SEQ ID NO: 72716 - protein, 695 aa, Artificial Sequence
  derived and/or modified sequence
MNPTETKAIPVSQQMEGPHLPNKKKHKKQAVKTEPEKKSQSTKLSVVHEKKSQEGKPKEHTEPKSLPKQASDTGSNDAHNKKAVSRSAEQQPSEKSTEPKTKPQDMISAGGESVAGITAISGKPGDKKKEKKSLTPAVPVESKPDKPSGKSGMDAALDDLIDTLGGPEETEEENTTYTGPEVSDPMSSTYIEELGKREVTIPPKYRELLAKPIGPDDAIDALSSDFTCGSPTAAGKKTEKEESTEVLKAQSAGTVRSAAPPQEKKRKVEKDTMSDQALEALSASLGTRQAEPELDLRSIKEVDEAKAKEEKLEKCGEDDETIPSEYRLKPATDKDGKPLLPEPEEKPKPRSESELIDELSEDFDRSECKEKPSKPTEKTEESKAAAPAPVSEAVCRTSMCSIQSAPPEPATLKGTVPDDAVEALADSLGKKEADPEDGKPVMDKVKEKAKEEDREKLGEKEETIPPDYRLEEVKDKDGKPLLPKESKEQLPPMSEDFLLDALSEDFSGPQNASSLKFEDAKLAAAISEVVSQTPASTTQAGAPPRDTSQSDKDLDDALDKLSDSLGQRQPDPDENKPMEDKVKEKAKAEHRDKLGERDDTIPPEYRHLLDDNGQDKPVKPPTKKSEDSKKPADDQDPIDALSGDLDSCPSTTETSQNTAKDKCKKAASSSKAPKNGGKAKDSAKTTEETSKPKDD

SEQ ID NO: 72717 - DNA, 2088 bp, Artificial Sequence
  derived and/or modified sequence
atgaacccaaccgaaactaaggccatccctgtgtcccaacagatggaagggccacatctacccaataaaaaaaaacacaagaagcaggccgtcaaaacggagcccgaaaagaaaagccagtccaccaaactgtccgttgtacacgaaaagaaatctcaggaaggcaagcctaaggagcatacagagcctaagtccctgcccaagcaggcctccgatacgggatccaatgacgctcataacaaaaaggcagtgtcccgatctgctgaacagcagcctagcgaaaaatctacagaacccaaaacaaagccccaggacatgattagtgctggaggggagtctgtggcaggcattacggcaatttccggtaagcctggggataaaaagaaagagaaaaagagcctgacccccgccgttccggtggagtccaagcccgacaagccttctggtaagagcggcatggatgccgcgctcgatgacctaatcgacacactgggtggccctgaggagacagaagaagagaacacaacatatactggccccgaagtgtccgaccccatgtccagcacctacatcgaggagttaggcaaaagggaggtgacaatccctccaaagtatcgcgagctgctggcgaaaccaattgggcccgacgacgcaatcgacgctctctcaagcgatttcacatgtggaagccccaccgccgcaggcaagaagactgagaaggaggaatctactgaagtcctgaaagcccagagtgccggaacagtaagatcagcagctccaccccaggagaaaaaacgaaaggttgagaaggacacaatgtccgatcaggccttggaagccttatctgcgagtctcgggactcggcaggcggagcccgagctcgatttgcgctccataaaggaagtggatgaggccaaggccaaggaagaaaagctggaaaagtgtggcgaggacgatgaaaccattccttccgagtatcgcttaaaacccgccaccgacaaagacggcaaaccgctgctcccggaacctgaggaaaagccaaagccacgcagtgagagcgagctcatcgatgaactgagtgaagacttcgaccgcagtgagtgcaaggagaagcctagtaagcccaccgagaagactgaggaatccaaggccgctgctcctgccccggttagcgaagccgtgtgccggacttctatgtgtagcatccaaagcgctccaccggagcctgctacattgaaaggaaccgtgccggacgacgctgtcgaagccctcgctgattcactggggaagaaggaagctgatcctgaggacgggaagccagtgatggataaagtgaaggagaaggccaaagaagaggaccgcgaaaagttgggggaaaaggaggaaaccatcccacctgattatcgtttagaggaagttaaagataaggatggtaaacccctcttgcctaaggaatcaaaggaacagcttcccccgatgtcggaggatttccttctcgacgcgctgtctgaagacttttctggaccccagaatgcctccagcctaaagttcgaggatgccaagttggctgccgctatctctgaggttgtgtcacagactcccgcttccactactcaagccggagcaccacctcgagacacctcgcagagcgacaaggatctggatgatgccttagataagctctctgatagcctcggccagcgacagccagaccctgacgaaaataaacctatggaagataaggtgaaggaaaaagccaaagcggagcatagagacaagttaggcgaacgtgacgatactattccaccagaataccgccatctgcttgatgacaatggacaggacaagcctgttaaacccccaactaaaaagtccgaggattccaagaagcccgccgatgatcaagatcctattgacgcactcagcggtgacttagactcctgccccagcaccaccgagacctctcagaatactgcaaaagataagtgtaagaaagccgcttcgtcatctaaggccccaaagaacgggggcaaggccaaagacagtgcaaagaccactgaagagactagcaagcccaaagacgattag

SEQ ID NO: 72718 - DNA, 2088 bp, Artificial Sequence
  derived and/or modified sequence
atgaaccccacagagaccaaggccatccctgtgtcccagcagatggagggcccccacctgcccaacaagaagaagcacaagaagcaggccgtgaagacagagcctgagaagaagagccagagcaccaagctgtctgtggtgcatgagaagaagagccaggagggcaagcccaaggagcacacagagcccaagagcctgcccaagcaggccagtgacaccggcagcaatgatgcccacaacaagaaggctgtgagccgctctgctgagcagcagcccagcgagaagagcacagagcccaagaccaagccccaggacatgatctctgctggaggagagagcgtggccggcatcacagccatcagcggcaagccaggggacaagaagaaggagaagaagagcctgaccccagctgtgcctgtggagagcaagccagacaagcccagcggcaagagcggcatggatgctgccctggatgacctgattgacaccctgggcggccctgaggagacagaggaggagaacaccacctacacaggccctgaggtgtctgaccccatgagcagcacctacatcgaggagctgggcaagcgggaggtgaccatcccccccaagtaccgggagctgctggccaagcccatcggcccagatgatgccattgatgccctgagcagtgacttcacctgtggcagccccacagctgctgggaagaagacagagaaggaggagagcacagaggtgctgaaggcccagagcgctggcaccgtgcgctctgctgccccaccccaggagaagaagaggaaggtggagaaggacaccatgtctgaccaggccctggaggccctgagcgccagcctgggcacccggcaggccgagcctgagctggacctgcggagcatcaaggaggtggatgaggccaaggccaaggaggagaagctggagaagtgtggagaagatgatgagaccatccccagcgagtaccgcctgaagccagccacagacaaggatggcaagcccctgctgcctgagcctgaggagaagcccaagcccaggtctgagagcgagctgattgatgagctgtctgaagattttgacagaagtgagtgcaaggagaagcccagcaagcccacagagaagacagaggagagcaaggctgctgccccagcccctgtgtctgaggccgtgtgcaggacctccatgtgcagcatccagagcgcccctcctgagcccgccaccctgaagggcaccgtgcctgatgatgctgtggaggccctggccgacagcctgggcaagaaggaggccgaccctgaagatggcaagcctgtgatggacaaggtgaaggagaaggccaaggaggaggaccgggagaagctgggggagaaggaggagaccatccccccagactaccgcctggaggaggtgaaggacaaggatggcaagcccctgctgcccaaggagagcaaggagcagctgccccccatgtctgaggacttcctgctggatgccctgtctgaggacttcagcggcccccagaatgccagcagcctgaagtttgaagatgccaagctggccgccgccatcagcgaggtggtgtcccagaccccagccagcaccacccaggccggggccccaccccgggacaccagccagagcgacaaggacctggatgatgccctggacaagctgagtgacagcctgggccagaggcagcctgaccctgatgagaacaagcccatggaggacaaggtgaaggagaaggccaaggccgagcaccgggacaagctgggggagagagatgacaccatccccccagagtaccgccacctgctggatgacaatggccaggacaagcctgtgaagccacccaccaagaagtctgaggacagcaagaagccagcagatgaccaggaccccattgatgccctgagcggggacctggacagctgccccagcaccacagagaccagccagaacacagccaaggacaagtgcaagaaggccgccagcagcagcaaggcccccaagaatggaggcaaggccaaggacagcgccaagaccacagaggagaccagcaagcccaaggatgactag

SEQ ID NO: 72719 - DNA, 2088 bp, Artificial Sequence
  derived and/or modified sequence
atgaaccccaccgagaccaaggccatccccgtgagccagcagatggaaggaccacacctcccaaataagaagaagcacaagaagcaggccgtgaagactgagccagagaagaagtcccagtccacgaaactcagtgtggtgcacgagaaaaagtcacaggaaggcaaacctaaggaacacacagaaccaaagtccctgcccaaacaagcctccgataccggctccaacgatgctcacaacaaaaaagctgtctccagatccgccgaacagcaacccagcgagaagtctactgaaccaaaaactaaaccacaggatatgatatccgccggtggtgaatccgttgccggcataactgcaatcagtggcaagccaggagacaaaaaaaaggagaagaaatcgttaactcctgccgtacctgtcgagtccaagcccgataaaccatccgggaagtctggaatggatgcggctctggacgatctcatagacacattaggcggcccagaggagactgaagaagagaacacaacctacacgggccccgaggtgtccgatccgatgagctcaacgtacatcgaggagctgggtaagagagaggttacgataccccccaagtaccgcgagcttctcgcaaaacctataggacccgacgacgccattgacgccttgagtagcgacttcacgtgtggcagtcctactgccgctggcaagaaaacagagaaggaggagtccacagaagtccttaaagcacagagcgccggaaccgtccgatctgctgcaccccctcaggaaaagaagagaaaggtcgagaaggacaccatgtccgatcaggctctggaagcgctttctgcctcactgggaacccggcaggcagaacctgagctcgacctccgaagtattaaagaggtggatgaagccaaagctaaggaagagaaactcgaaaaatgcggggaagacgatgagaccatcccatcggagtacaggttgaaaccagcaaccgacaaggacggaaagccactgttgccggagccggaggaaaaacctaaacctagatccgagagtgaactgatcgacgagctgagcgaggatttcgacaggtccgagtgtaaggagaagccttccaagcccaccgagaagacggaagaatccaaagccgcagcaccagccccagtgtcagaagctgtttgcaggacctccatgtgttcgatccagagtgctcccccggaacccgctaccctgaaaggaacagtgccggacgatgcagtcgaagctttggccgattcccttggcaaaaaagaagccgatccagaggatgggaaaccagtaatggataaggtcaaggaaaaggcaaaagaggaggatagggagaagctgggcgaaaaggaggagaccatcccgccggattatcgcctcgaggaagtgaaggataaagatgggaaaccactgctccctaaggagtccaaggaacaactgcctccgatgtccgaggattttctgctggacgccctgagcgaagatttcagcggcccgcagaatgcctccagtcttaagtttgaggacgccaagctggccgctgctatatcagaggtcgtcagccagacacccgccagcactacacaggcaggagcacctccgagggatacctctcaatctgataaggacctggacgatgccctggataagctttccgacagtctcggacagagacagccagacccagacgaaaacaagcccatggaagataaggtgaaggagaaagcaaaggctgaacaccgggacaaactgggggaacgcgatgacaccattcccccagaataccgccacctcttggatgacaatggtcaggataagcctgtgaaacctccgactaaaaaatccgaggatagtaaaaaacccgctgatgaccaagatcctatcgacgccctcagcggcgatctcgactcatgtccttccacaactgagactagccagaatacggctaaagataaatgcaagaaagcagcatcttcgtccaaagcgcccaagaatggtggaaaagcaaaggactccgctaagacaacagaggagacctccaagccaaaggacgactag

SEQ ID NO: 72720 - DNA, 2088 bp, Artificial Sequence
  derived and/or modified sequence
atgaatcctactgagaccaaagccatcccggtgtcccagcagatggagggtccccatctccccaataagaaaaaacacaaaaaacaagccgtgaagacggagcccgagaagaaaagccagtctacgaagctcagcgtcgtccatgagaagaagagtcaggaaggaaaaccaaaggagcataccgaaccgaaatccctgccaaagcaggctagcgatactggatcgaatgatgcgcacaacaagaaggccgtctccaggagtgccgagcaacagcctagcgaaaagagtactgagcctaaaacgaaaccacaggacatgatcagtgcgggtggggaaagtgttgccggtataacagcaattagcgggaaacctggtgataaaaagaaagagaaaaaaagtctgactccggcagttccagtggaaagcaaacctgacaaaccaagcgggaaatctggcatggatgctgcacttgacgatctaatcgacacattgggcggacccgaggagaccgaggaagaaaacactacatacacaggacccgaggtttcagatccaatgagctcaacctatatagaagagctgggcaagcgagaggttaccattccacccaaataccgcgagctgctggctaagccaatcggccctgatgatgctatagacgccctcagctcagatttcacttgtggctcccccactgccgcagggaaaaagacagagaaagaggagagcacagaagtacttaaagcgcagagtgccggaaccgtccgttcggccgcaccaccccaggagaaaaaaaggaaagtggagaaggataccatgtctgatcaggctctggaggccctgtcagcctcactgggcactagacaagcagagccggagctcgatttgcgctcaattaaggaggtcgatgaggccaaagctaaggaggaaaaactggaaaaatgtggcgaagatgacgaaaccattcccagcgagtatcggctgaaacccgctactgataaggacggtaagccgctgctcccggaacctgaggagaaacccaagcctcggtcagaatctgaacttatagacgagctgtccgaagactttgatcggagcgaatgtaaggaaaagccaagcaagcctacggaaaaaaccgaagaatctaaggcagcagcgccagccccagttagtgaggcagtgtgtcgcacatcaatgtgttcaattcaatccgctcctcccgaacctgcgacccttaagggcaccgtgccagatgatgccgtggaggccctcgcggatagtctcgggaaaaaggaagccgaccccgaggacggcaaacctgttatggacaaagtcaaggagaaagcaaaggaagaagatcgagagaagttgggcgagaaagaagagaccattcccccagactaccggcttgaagaggtcaaagataaggatggtaagcctttactacccaaggaaagcaaggagcaactgccacccatgtctgaagatttcctcctcgacgccctttcggaagacttctctgggcctcaaaacgctagcagcttgaagtttgaagatgccaaactggctgccgctatctcagaggtcgtctcccaaaccccagcctcaacaacccaggccggagcaccccctagagatacatcccagtctgacaaggatctggacgatgcacttgacaagttgtcagactctctggggcagcgtcaacctgatccagacgaaaacaagcccatggaggacaaagtgaaggagaaggctaaggcagagcatagggataagctcggggagcgcgacgatacaattccacccgagtaccggcatctgctcgatgataacggtcaagataagcccgtaaaaccccctaccaaaaagtccgaagactcaaagaaaccagccgatgatcaggatcccatagatgccctcagcggagatcttgacagctgtccttcgaccaccgaaaccagccagaataccgcaaaagataagtgcaaaaaagcagcatcctcctccaaggcccctaagaatgggggtaaagccaaagattcggccaaaaccacagaggaaacgagtaagcccaaggatgattag

SEQ ID NO: 72721 - DNA, 2088 bp, Artificial Sequence
  derived and/or modified sequence
atgaaccccaccgagaccaaggccatccccgtgagccagcagatggagggcccccacctgcccaacaagaagaagcacaagaagcaggccgtgaagaccgagcccgagaagaagagccagagcaccaagctgagcgtggtgcacgagaagaagagccaggagggcaagcccaaggagcacaccgagcccaagagcctgcccaagcaggccagcgacaccggcagcaacgacgcccacaacaagaaggccgtgagcagaagcgccgagcagcagcccagcgagaagagcaccgagcccaagaccaagccccaggacatgatcagcgccggcggcgagagcgtggccggcatcaccgccatcagcggcaagcccggcgacaagaagaaggagaagaagagcctgacccccgccgtgcccgtggagagcaagcccgacaagcccagcggcaagagcggcatggacgccgccctggacgacctgatcgacaccctgggcggccccgaggagaccgaggaggagaacaccacctacaccggccccgaggtgagcgaccccatgagcagcacctacatcgaggagctgggcaagagagaggtgaccatcccccccaagtacagagagctgctggccaagcccatcggccccgacgacgccatcgacgccctgagcagcgacttcacctgcggcagccccaccgccgccggcaagaagaccgagaaggaggagagcaccgaggtgctgaaggcccagagcgccggcaccgtgagaagcgccgcccccccccaggagaagaagagaaaggtggagaaggacaccatgagcgaccaggccctggaggccctgagcgccagcctgggcaccagacaggccgagcccgagctggacctgagaagcatcaaggaggtggacgaggccaaggccaaggaggagaagctggagaagtgcggcgaggacgacgagaccatccccagcgagtacagactgaagcccgccaccgacaaggacggcaagcccctgctgcccgagcccgaggagaagcccaagcccagaagcgagagcgagctgatcgacgagctgagcgaggacttcgacagaagcgagtgcaaggagaagcccagcaagcccaccgagaagaccgaggagagcaaggccgccgcccccgcccccgtgagcgaggccgtgtgcagaaccagcatgtgcagcatccagagcgccccccccgagcccgccaccctgaagggcaccgtgcccgacgacgccgtggaggccctggccgacagcctgggcaagaaggaggccgaccccgaggacggcaagcccgtgatggacaaggtgaaggagaaggccaaggaggaggacagagagaagctgggcgagaaggaggagaccatcccccccgactacagactggaggaggtgaaggacaaggacggcaagcccctgctgcccaaggagagcaaggagcagctgccccccatgagcgaggacttcctgctggacgccctgagcgaggacttcagcggcccccagaacgccagcagcctgaagttcgaggacgccaagctggccgccgccatcagcgaggtggtgagccagacccccgccagcaccacccaggccggcgccccccccagagacaccagccagagcgacaaggacctggacgacgccctggacaagctgagcgacagcctgggccagagacagcccgaccccgacgagaacaagcccatggaggacaaggtgaaggagaaggccaaggccgagcacagagacaagctgggcgagagagacgacaccatcccccccgagtacagacacctgctggacgacaacggccaggacaagcccgtgaagccccccaccaagaagagcgaggacagcaagaagcccgccgacgaccaggaccccatcgacgccctgagcggcgacctggacagctgccccagcaccaccgagaccagccagaacaccgccaaggacaagtgcaagaaggccgccagcagcagcaaggcccccaagaacggcggcaaggccaaggacagcgccaagaccaccgaggagaccagcaagcccaaggacgactag

SEQ ID NO: 72722 - DNA, 1245 bp, Artificial Sequence
  derived and/or modified sequence
atggacatcgaggagcagaaggccgacatctacgagatgggcaagatcgccaaggtgtgcggctgccccctgtactggaaggcccccatgttcagagccgccggcggcgagaagaccggcttcgtgaccgcccagagcttcatcgccatgtggagaaagctgctgaacaaccaccacgacgacgccagcaagttcatctgcctgctggccaagcccaactgcagcagcctggagcaggaggacttcatccccctgctgcaggacgtggtggacacccaccccggcctgaccttcctgaaggacgcccccgagttccacagcagatacatcaccaccgtgatccagagaatcttctacaccgtgaacagaagctggagcggcaagatcaccagcaccgagatcagaaagagcaacttcctgcagaccctggccctgctggaggaggaggaggacatcaaccagatcaccgactacttcagctacgagcacttctacgtgatctactgcaagttctgggagctggacaccgaccacgacctgtacatcagccaggccgacctgagcagatacaacgaccaggccagcagcagcagaatcatcgagagaatcttcagcggcgccgtgaccagaggcaagaccatccagaaggagggcagaatgagctacgccgacttcgtgtggttcctgatcagcgaggaggacaagagaaaccccaccagcatcgagtactggttcagatgcatggacgtggacggcgacggcgtgctgagcatgtacgagctggagtacttctacgaggagcagtgcgagagaatggaggccatgggcatcgagcccctgcccttccacgacctgctgtgccagatgctggacctggtgaagcccgccgtggacggcaagatcaccctgagagacctgaagagatgcagaatggcccacatcttctacgacaccttcttcaacctggagaagtacctggaccacgagcagagagaccccttcgccgtgcagaaggacgtggagaacgacggccccgagcccagcgactgggacagattcgccgccgaggagtacgagaccctggtggccgaggagagcgcccaggcccagttccaggagggcttcgaggactacgagaccgacgagcccgccagccccagcgagttcggcaacaagagcaacaagatcctgagcgccagcctgcccgagaagtgcggcaagctgcagagcgtggacgaggagtag

SEQ ID NO: 72723 - DNA, 1245 bp, Artificial Sequence
  derived and/or modified sequence
atggacattgaggagcagaaggcggatatctatgaaatggggaaaatcgcaaaagtttgtggatgccccctttattggaaagccccgatgtttcgtgccgccggtggcgaaaaaaccggattcgtcacagcccagtcttttatagcaatgtggcgcaaactcctcaataaccaccatgatgacgcctctaagtttatctgcctgctcgctaaaccgaattgcagcagtctcgagcaagaagactttattcccctgttgcaagatgtggttgacactcatcctgggttgaccttcctgaaggacgcgccggaattccactcaagatatataactactgtaatccagcgaatattctataccgtcaaccgatcatggtccggaaagatcacctccacagaaattcgcaagtccaatttcctccagacgctcgctctgctcgaagaggaggaggatatcaaccagataacagattatttctcctacgaacatttttacgtcatctattgtaaattctgggagctcgacaccgatcacgatctgtatatctcgcaagcggatttgtcgcgctacaacgaccaggccagctcatctaggattattgaacgcatcttctcaggtgcagttacaaggggtaagacgatacagaaggaaggcagaatgtcctatgccgactttgtgtggtttcttatatccgaagaagataagcggaatcctacctcgattgagtattggttccggtgcatggatgtcgacggggacggagtgctgtctatgtacgaactggaatacttctacgaagaacagtgcgagaggatggaggccatgggaattgagcctctccccttccatgatttactgtgtcaaatgcttgacctcgttaagccagccgtggacgggaagataacgcttcgtgacctgaaaaggtgcagaatggcacacatcttctacgacactttctttaacttggaaaagtatctggatcatgagcagcgggatcccttcgcagtccaaaaagacgtagagaacgacggtcctgaaccatcagactgggatcgcttcgctgccgaagagtacgagacgctcgttgctgaggaaagcgctcaagcacagttccaagagggatttgaggactacgaaacagatgaacctgcttctccatctgaatttggtaacaagagtaataaaattttaagtgccagcctgcccgaaaaatgtggcaagctgcagagtgttgatgaagagtag

SEQ ID NO: 72724 - DNA, 1245 bp, Artificial Sequence
  derived and/or modified sequence
atggacatcgaggagcagaaggctgacatctatgagatgggcaagatcgccaaggtgtgtggctgccccctgtactggaaggcccccatgttccgggccgccggcggggagaagacaggctttgtgacagcccagagcttcatcgccatgtggaggaagctgctgaacaaccaccatgatgatgccagcaagttcatctgcctgctggccaagcccaactgcagcagcctggagcaggaggacttcatccccctgctgcaggatgtggtggacacccaccctggcctgaccttcctgaaggatgcccctgagttccacagccgctacatcaccaccgtcatccagaggatcttctacacagtgaacagatcctggagcggcaagatcaccagcacagagatcaggaagagcaacttcctgcagaccctggccctgctggaggaggaggaggacatcaaccagatcacagactacttctcctatgagcacttctacgtgatctactgcaagttctgggagctggacacagaccatgacctgtacatcagccaggccgacctgagccgctacaatgaccaggccagcagcagccgcatcatcgagcgcatcttctctggagctgtgacccggggcaagaccatccagaaggagggccgcatgtcctatgctgactttgtgtggttcctgatcagcgaggaggacaagaggaaccccaccagcattgagtactggttccgctgcatggatgtggatggagatggagtgctgtccatgtatgagctggagtacttctatgaggagcagtgtgagaggatggaggccatgggcatcgagcccctgcccttccatgacctgctgtgccagatgctggacctggtgaagccagctgtggatggcaagatcaccctgcgggacctgaagcgctgcaggatggcccacatcttctatgacaccttcttcaacctggagaagtacctggaccacgagcagagggacccctttgctgtgcagaaggatgtggagaatgatggccctgagcccagcgactgggacagatttgctgctgaggagtatgagaccctggtggccgaggagagcgcccaggcccagttccaggagggctttgaggactatgaaacagatgagcccgccagccccagcgagtttggaaacaagagcaacaagatcctgagcgccagcctgcctgagaagtgtgggaagctgcagagcgtggatgaggagtag

SEQ ID NO: 72725 - DNA, 1245 bp, Artificial Sequence
  derived and/or modified sequence
atggacatcgaggagcagaaggccgacatctacgagatgggcaagatagccaaagtctgtggctgccctctctattggaaggctccaatgttcagggccgctggcggtgaaaaaacagggtttgtgactgcacagtcctttattgccatgtggagaaaattactgaacaaccaccacgatgatgcatccaaattcatttgcctcttagccaagcccaattgtagctctcttgaacaagaggacttcatacccctcctccaggacgtggttgatactcatccaggtctgacctttctgaaggatgcccccgaattccacagtaggtacatcacgaccgtgatccagaggatcttttatactgtgaaccgctcctggtcgggtaaaattacaagcacagaaatcaggaaaagtaatttcctccagacgcttgccttactagaggaggaggaagatattaatcaaatcactgactatttttcttacgagcacttctatgtgatctattgtaagttctgggagctcgacaccgaccacgatctatacatatctcaggctgacttgagcagatacaatgaccaggcctcctcctctagaataatcgagagaattttctctggcgccgtgacacggggaaagactatccaaaaggaggggcgaatgagctatgctgactttgtgtggtttctgatttccgaggaggacaaacgtaacccaacgagcatcgagtattggttccgatgcatggatgttgacggggatggagttctgtcaatgtatgagctggagtatttctatgaagaacagtgtgaaaggatggaggctatgggtatcgagcccttaccgtttcatgacctcctgtgtcaaatgctggacctggttaaacccgccgtcgatggaaagattacactacgggatctgaaacgatgcagaatggctcacatcttttacgacactttttttaaccttgaaaagtacttggatcatgaacagcgcgaccccttcgctgttcagaaggacgttgagaatgacggaccggagccgtcggattgggacaggttcgccgctgaggagtacgaaacccttgtggctgaagagtctgcgcaggcccaattccaggagggatttgaggactacgagaccgatgaacctgcctcaccatccgagttcggaaataaaagcaacaagatattatccgcaagccttccagaaaagtgtggaaagctccagagcgttgacgaggagtag

SEQ ID NO: 72726 - DNA, 1245 bp, Artificial Sequence
  derived and/or modified sequence
atggatattgaggagcagaaagccgacatctacgagatggggaaaattgcgaaggtgtgcgggtgccctctttactggaaagctccaatgttcagagcagccggaggcgagaagaccgggttcgtgactgctcagagcttcattgcaatgtggagaaaactcctgaacaatcaccacgatgacgcctcaaagttcatctgtctgttggctaaaccgaactgcagttccctcgaacaagaggacttcattcctctattgcaagatgtggtagacacccacccaggacttacctttctgaaagacgctccggagttccactccagatacatcactacagttattcagcgcattttttacaccgtcaatcgcagctggtcaggcaagatcacaagtacagagatccgcaagagcaactttctgcaaacactagcacttcttgaggaagaagaggatattaatcagatcactgattacttctcttacgagcacttttatgtgatctactgcaagttttgggaactggatacagaccacgatctgtacattagccaggctgatttaagcagatacaatgaccaggcttcttcatccaggattatcgagaggattttctctggcgcagtgaccaggggaaaaactatccaaaaagagggacggatgagctacgcggacttcgtttggtttttgatctccgaagaggataagcgtaatcctacctctattgagtactggtttcggtgtatggacgtggacggcgacggcgtgctgtccatgtatgaactggagtatttctacgaggagcaatgcgagaggatggaggcgatgggaattgaacccctgcctttccacgacctcctttgccaaatgctggacctggtcaagcctgctgtcgacggaaagatcactctgagggacctaaagaggtgtcgtatggctcacattttctacgacactttcttcaatctggaaaaatacctggaccatgaacagcgggatcccttcgccgttcagaaagacgtggaaaatgacggccctgagccgagtgactgggataggtttgcagcagaagagtatgagacactggttgcagaggagagcgcccaggcacagttccaagaaggctttgaagattacgagaccgatgagccagcgtcacccagtgagttcgggaacaagtcgaacaagattctcagcgcctctctgccagaaaagtgtggcaagctccaatccgtagatgaggaatag

SEQ ID NO: 72727 - protein, 531 aa, Artificial Sequence
  derived and/or modified sequence
MRCSPGGVWLALAASLLHGKATASPPSTPPWDPGHIPGASVRPAPGPVSLQGEFQRKLYKELVKNYNPLERPVANDSQPLTVYFSLSLLQIMDVDEKNQVLTTNIWLQMSWTDHYLQWNVSEYPGVKTVRFPDGQIWKPDILLYNSADERFDATFHTNVLVNSSGHCQYLPPGIFKSSCYIDVRWFPFDVQHCKLKFGSWSYGGWSLDLQMQEADISGYIPNGEWDLVGIPGKRSERFYECCKEPYPDVTFTVTMRRRTLYYGLNLLIPCVLISALALLVFLLPADSGEKISLGITVLLSLTVFMLLVAEIMPATSDSVPLIAQYFASTMIIVGLSVVVTVIVLQYHHHDPDGGKMPKWTRVILLNWCAWFLRMKRPGEDKVRPACQHKQRRCSLASVEMSAVAPPPASNGNLLYIGFRGLDGVHCVPTPDSGVVCGRMACSPTHDEHLLHGGQPPEGDPDLAKILEEVRYIANRFRCQDESEAVCSEWKFAACVVDRLCLMAFSVFTIICTIGILMSAPNFVEAVSKDFA

SEQ ID NO: 72728 - DNA, 1596 bp, Artificial Sequence
  derived and/or modified sequence
atgaggtgctcgcctgggggtgtctggctggctctcgctgcaagcctcctgcatggtaaagccaccgcctcccccccatccactcccccctgggatcccgggcatattcctggtgcgtccgtccgtcctgcgcccgggccggtaagccttcaaggcgaatttcagagaaaactttataaagaattggtaaagaactataatcccctggagaggcccgtggctaatgactctcagcccctgactgtttacttttctctttctcttctccagatcatggacgtggatgaaaagaatcaagtcctgaccactaacatctggctccagatgtcttggacagaccactatctgcagtggaacgtgagtgaataccctggggtgaagacagtgagattccccgatggtcagatatggaaacccgatattctgctgtacaatagcgcagacgagagattcgatgcaacattccacacaaatgtgttagtgaactccagcggccattgccagtacttgccacctgggatatttaaatcttcgtgttatattgacgtccgttggttcccatttgacgttcagcactgtaagctgaagttcggcagctggtcgtacggaggatggagccttgacctgcagatgcaggaggccgacatctctgggtatatccctaacggtgagtgggacctggtgggaattcctggaaagcgctctgagcgcttctatgagtgttgcaaagagccctacccagatgtaaccttcactgtgaccatgcgcagacgaaccctgtactatggactaaatttactcatcccatgtgtgctcatcagcgccctcgccttgctggttttcttattgccagctgattccggcgaaaaaatctccctcggaattactgtgctgctctcactgaccgtcttcatgctgttagtggcagaaatcatgcctgccactagtgactcggtgccacttattgcccagtacttcgcctcaaccatgattattgttgggttatctgtagtggtgaccgtgatcgtgctccagtaccatcaccatgaccctgacggaggaaaaatgccgaaatggaccagagtaatcctcttgaattggtgtgcttggttcctcaggatgaaaaggccaggagaagacaaggtgcgtcccgcgtgtcaacacaaacagagacgctgctcactcgcctcagtggagatgtcagctgtggctccccccccagcttcaaacggcaacctgctatacataggcttccggggcttggatggagtgcattgcgtgccgacgccagacagtggcgttgtctgtggccgcatggcctgtagccccacacacgacgagcatctgctccacggcggccagccccccgagggagaccccgacttagccaaaatcttggaagaagttagatatattgcaaacagattccggtgtcaggacgaatccgaggcggtgtgttccgagtggaagtttgcggcatgtgtggtagaccgtctgtgccttatggccttttccgtgttcactataatctgtaccatcgggatccttatgagcgcccccaacttcgtagaagccgtgagcaaagacttcgcttag

SEQ ID NO: 72729 - DNA, 1596 bp, Artificial Sequence
  derived and/or modified sequence
atgcgctgcagccctggaggagtgtggctggccctggccgccagcctgctgcacggcaaggccacagccagcccccccagcaccccaccctgggaccccggccacatccctggggcctctgtgcggcctgcccctggccctgtgtccctgcagggcgagttccagaggaagctgtacaaggagctggtgaagaactacaaccccctggagaggcctgtggccaatgacagccagcccctgactgtgtacttcagcctgagcctgctgcagatcatggatgtggatgagaagaaccaggtgctgaccaccaacatctggctgcagatgtcctggacagaccactacctgcagtggaatgtgtctgagtacccaggagtgaagacagtgcgcttcccagatggccagatctggaagccagacatcctgctgtacaacagcgcagatgaaagatttgatgccaccttccacaccaacgtgctggtgaacagcagcggccactgccagtacctgcccccaggcatcttcaagagcagctgctacattgatgtgcgctggttcccctttgatgtgcagcactgcaagctgaagtttggctcctggagctatggaggctggagcctggacctgcagatgcaggaggccgacatcagcggctacatccccaacggggagtgggacctggtgggcatccctgggaagaggtctgagcgcttctatgagtgctgcaaggagccctacccagatgtgaccttcaccgtgaccatgagaagaaggaccctgtactacggcctgaacctgctgatcccctgtgtgctgatcagcgccctggccctgctggtgttcctgctgcctgctgacagcggggagaagatcagcctgggcatcaccgtgctgctgagcctgaccgtcttcatgctgctggtggccgagatcatgcctgccaccagtgacagcgtgcccctcatcgcccagtactttgccagcaccatgatcatcgtgggcctgtctgtggtggtgaccgtcatcgtgctgcagtaccaccaccacgaccctgatggcggcaagatgcccaagtggaccagggtcatcctgctgaactggtgtgcctggttcctgaggatgaagaggcctggagaggacaaggtgcggcctgcctgccagcacaagcagaggcgctgcagcctggcctctgtggagatgtctgctgtggcccctcctccagccagcaatggaaacctgctgtacatcggcttccggggcctggatggagtgcactgtgtgcccaccccagacagcggcgtggtgtgtggccgcatggcctgcagccccacccatgatgagcacctgctgcatggaggccagcccccagagggggaccctgacctggccaagatcctggaggaggtgcgctacatcgccaaccgcttccgctgccaggatgagagcgaggccgtgtgcagcgagtggaagtttgctgcctgtgtggtggaccggctgtgcctgatggccttctctgtgttcaccatcatctgcaccatcggcatcctgatgtctgcccccaactttgtggaggccgtgtccaaggactttgcctag

SEQ ID NO: 72730 - DNA, 1596 bp, Artificial Sequence
  derived and/or modified sequence
atgcggtgcagccccggcggcgtgtggctggccctggccgccagcctgttgcacggaaaggccactgcaagtcctccatctacacctccatgggatcctggccatatacccggcgcctccgtgagaccagctccgggaccggtctcacttcagggggagttccagcgcaagctgtacaaggagctcgtgaagaattacaatcctctggaacggccagtcgcgaacgatagccagcctctgactgtctatttctctctcagcttattgcaaattatggatgtagacgaaaaaaaccaagttctcactacgaacatttggctgcagatgtcgtggactgatcattatctccagtggaatgtgtccgaatatcctggagtaaaaaccgtacgcttccctgatgggcagatctggaagccagatatacttctctacaacagtgccgacgagcgtttcgatgctacgttccatactaatgtgctggtcaattcttccggacattgccagtatctgcctccagggatatttaagtcctcatgttatattgatgttaggtggttccccttcgacgtgcagcactgtaaattaaaatttggatcatggtcctacggaggctggagcctcgacctgcagatgcaggaagccgacatctccgggtatatccccaatggcgaatgggatctggtggggattcctggtaagagatccgagcgattctacgaatgttgtaaggaaccctaccctgatgtcacattcaccgtgactatgaggagaagaacactgtattacggcttaaatctgttaataccttgtgtacttatcagcgcccttgccctgctggtattcctgctccccgcggacagtggggaaaaaatatcactcgggatcactgttctcctctcattgacagtttttatgctgctggtggccgagatcatgcctgctacctcagattccgtgccactaatcgcccagtattttgccagtactatgatcatcgtagggctcagcgtggtcgtgactgtgatcgttcttcagtatcaccaccacgatcccgacggtggcaaaatgcctaagtggactagagtgatactcctaaactggtgtgcctggttcttgagaatgaaaagaccaggggaggacaaggtccgccccgcttgtcagcacaaacagagacgctgttctctcgcttctgttgaaatgtccgccgttgctcctcctcccgcctccaacggtaatctgttgtatattggctttagaggcctcgacggagttcactgtgtgccaacccctgattcaggcgttgtgtgcggcagaatggcatgtagtccaacccacgatgaacatctgctacacggtggacagcccccagaaggtgacccagacttggctaagattttagaggaggttcgctatatcgccaatcggtttaggtgccaggacgaatcagaggccgtctgtagcgaatggaagtttgcagcctgtgtggtggaccgtttatgcctgatggcgttttcggtcttcaccatcatttgtactattggtatcctgatgagtgcacccaactttgttgaagctgtgtccaaagacttcgcctag

SEQ ID NO: 72731 - DNA, 1596 bp, Artificial Sequence
  derived and/or modified sequence
atgaggtgtagtcccggtggagtgtggcttgctctggccgctagcctgctacatggaaaggccacagctagcccccctagtactcctccctgggatcccggacacatcccaggggctagcgtccgtcccgctccaggacccgttagtttgcagggcgaatttcagagaaagctgtataaagaacttgtgaagaattataacccccttgaaaggcctgtggcaaacgattcgcagccattgacggtgtacttcagtctatcgctcctgcagatcatggacgtggatgaaaaaaatcaggttcttacaaccaacatatggctccagatgtcctggaccgaccattatctccagtggaacgtatcagagtatcccggtgtgaagaccgtacgcttcccagacgggcagatctggaaacccgacattctgctctacaactctgctgacgagaggttcgatgctacctttcacaccaacgttctggttaattcgtctggccactgccagtatctcccccctgggatttttaaaagctcttgctatattgacgttcgatggtttccctttgacgttcagcactgtaagctgaaattcggttcctggagctacgggggatggtcacttgacctgcagatgcaagaggcggacatcagtggttacattccaaacggagagtgggacctggttggaattccaggcaaacgaagcgaacgattctatgagtgctgcaaagaaccgtatcctgacgtcaccttcaccgtgacaatgcgacgaaggaccctgtactacgggctgaacctcctgattccctgcgttctgatttccgcacttgccttgttggtgttccttctccccgctgattctggtgagaaaatctccctcggcatcaccgttttgttaagccttaccgtgttcatgcttttagttgccgagattatgcctgccactagtgacagcgtgccattaattgcccagtatttcgcctcaaccatgataattgtgggcttaagcgtggtggtaaccgtcatagtgctgcagtatcatcatcacgatcctgatggcggtaagatgcccaagtggactcgcgtaatcctcttaaactggtgtgcctggttcctgcggatgaaaaggccgggtgaggataaggtgcggcctgcctgtcagcacaagcagagacgctgctcactggcttcagtggaaatgtcagcggtggccccacccccagcatcaaatggaaacctcctttatattggctttcggggacttgacggcgtccactgtgtgcctaccccagattctggcgtcgtgtgtgggagaatggcctgctcccccactcacgatgagcatctcctccacgggggacagccgcctgaaggtgacccggacctggcaaagatcctagaggaagtccgctacatcgccaatcgatttaggtgtcaggacgagtctgaggccgtgtgctcagagtggaagttcgcagcctgcgtggtggaccgtctttgtctaatggctttttccgtattcacgattatttgcacaatcggcattcttatgtcagcgcctaactttgtggaagctgtgtcaaaagatttcgcctag

SEQ ID NO: 72732 - DNA, 3428 bp, Artificial Sequence
  derived and/or modified sequence
aaaggcgcgcgagccgagcggcgaggtgcctctgtggccgcaggcgcaggcccgggcgacagccgagacgtggagcgcgccggctcgctgcagctccgggactcaacatgcgctgctcgccgggaggcgtctggctggcgctggccgcgtcgctcctgcacggtaaagccactgcctccccgccctccactcctccgtgggatcccgggcacatcccgggcgcctctgtgcgccccgcgcctgggccagtgtccctgcaaggcgagttccagaggaagctttacaaggagctggtcaagaactacaatcccttggagaggcccgtggccaatgactcgcaaccactcaccgtctacttctccctgagcctcctgcagatcatggacgtggatgagaagaaccaagttttaaccaccaacatttggctgcaaatgtcttggacagatcactatttacagtggaatgtgtcagaatatccaggggtgaagactgttcgtttcccagatggccagatttggaaaccagacattcttctctataacagtgctgatgagcgctttgacgccacattccacactaacgtgttggtgaattcttctgggcattgccagtacctgcctccaggcatattcaagagttcctgctacatcgatgtacgctggtttccctttgatgtgcagcactgcaaactgaagtttgggtcctggtcttacggaggctggtccttggatctgcagatgcaggaggcagatatcagtggctatatccccaatggagaatgggacctagtgggaatccccggcaagaggagtgaaaggttctatgagtgctgcaaagagccctaccccgatgtcaccttcacagtgaccatgcgccgcaggacgctctactatggcctcaacctgctgatcccctgtgtgctcatctccgccctcgccctgctggtgttcctgcttcctgcagattccggggagaagatttccctggggataacagtcttactctctcttaccgtcttcatgctgctcgtggctgagatcatgcccgcaacatccgattcggtaccattgatagcccagtacttcgccagcaccatgatcatcgtgggcctctcggtggtggtgacagtgatcgtgctgcagtaccaccaccacgaccccgacgggggcaagatgcccaagtggaccagagtcatccttctgaactggtgcgcgtggttcctgcgaatgaagaggcccggggaggacaaggtgcgcccggcctgccagcacaagcagcggcgctgcagcctggccagtgtggagatgagcgccgtggcgccgccgcccgccagcaacgggaacctgctgtacatcggcttccgcggcctggacggcgtgcactgtgtcccgacccccgactctggggtagtgtgtggccgcatggcctgctcccccacgcacgatgagcacctcctgcacggcgggcaaccccccgagggggacccggacttggccaagatcctggaggaggtccgctacattgccaaccgcttccgctgccaggacgaaagcgaggcggtctgcagcgagtggaagttcgccgcctgtgtggtggaccgcctgtgcctcatggccttctcggtcttcaccatcatctgcaccatcggcatcctgatgtcggctcccaacttcgtggaggccgtgtccaaagactttgcgtaaccacgcctggttctgtacatgtggaaaactcacagatgggcaaggcctttggcttggcgagatttgggggtgctaatccaggacagcattacacgccacaactccagtgttcccttctggctgtcagtcgtgttgcttacggtttctttgttactttaggtagtagaatctcagcactttgtttcatattctcagatgggctgatagatatccttggcacatccgtaccatcggtcagcagggccactgagtagtcattttgcccattagcccactgcctggaaagcccttcggagagctccccatggctcctcaccaccgagacagttggttttgcatgtctgcatgaaggtctacctgaaaattcaacatttgctttttgcttgtgtacaaacccagattgaagctaaaataaaccagactcactaaatcctttccaataattgactggtggaaggaaaacaaaaaacaaaaactaaaaacctcttagcttttctgcaattcaactttttatttttatttttatttctatcaaagacggtagagagaaacagcttgatgctgtttctacattaaaaaaaaaaaaaaaagacagactgttggtcttactaaggatgtttttaccagcctgcctgacttctgcaaacctaccctgtcaaggagatcaaagggacgcaggtttctgtttattctgaacaagggccaggccccgcggagtgtctttggtggatcccagataactcctaggtgctgctctcagacactgaggagttgagcaaatctgttctattctgcagaacccacaggacaaataagagttctactagaattaacagcccaaaagaatagctacagctaagtgaagccacttacgtgggctttaaaaaaataatgtgttagctgattcacatgcactggagttaattagtcttagaaatgtgtgcatccatacaaatgcacaacataaagtgaacatattcctaggccctttctgcctgtgtcagggccaggaagtagaggctgggaactcttctggtccccagtatggcaggcgccagggaggggatggtgtggcccatcccttctctggatacctggccagtggcaggcagcagggaggagctggccgaccctcagtgactgacaagccagcaattctgagttctggcctttgggagtctgcctgctccaagccagtccaccccagctgcagccccaaaagctggctcaaagtccttgggtggattcactggagatgggcaacttaaaacaagagaaactttaatttttaaacctaagtgatgatacagctcttcccttagattatcgcccaggctggagtgcagtggcatgatctcagctcactgcaagctccacctcctgggttcatgccattctcctgcctcagcctccccccgagtaactgggaatacaggcgcccgccaccatgcctggctaattttttgtatttttagtagagatagggtttcatcatgttagccaggatggtctcattcttattctttaatgagatcagagggtaattcaccaagaaagacctctcctgttccattgtgtcatccaacaactgctcagagctcaaaattatagaaggcttctgagcccctagagatttttaatttgcttctaatccctgaggtgggaacatcatgagggaagatttgattttcagagttaaataaattgtatgtgcttttccagcca

SEQ ID NO: 72733 - DNA, 1596 bp, Artificial Sequence
  derived and/or modified sequence
atgagatgcagccccggcggcgtgtggctggccctggccgccagcctgctgcacggcaaggccaccgccagcccccccagcacccccccctgggaccccggccacatccccggcgccagcgtgagacccgcccccggccccgtgagcctgcagggcgagttccagagaaagctgtacaaggagctggtgaagaactacaaccccctggagagacccgtggccaacgacagccagcccctgaccgtgtacttcagcctgagcctgctgcagatcatggacgtggacgagaagaaccaggtgctgaccaccaacatctggctgcagatgagctggaccgaccactacctgcagtggaacgtgagcgagtaccccggcgtgaagaccgtgagattccccgacggccagatctggaagcccgacatcctgctgtacaacagcgccgacgagagattcgacgccaccttccacaccaacgtgctggtgaacagcagcggccactgccagtacctgccccccggcatcttcaagagcagctgctacatcgacgtgagatggttccccttcgacgtgcagcactgcaagctgaagttcggcagctggagctacggcggctggagcctggacctgcagatgcaggaggccgacatcagcggctacatccccaacggcgagtgggacctggtgggcatccccggcaagagaagcgagagattctacgagtgctgcaaggagccctaccccgacgtgaccttcaccgtgaccatgagaagaagaaccctgtactacggcctgaacctgctgatcccctgcgtgctgatcagcgccctggccctgctggtgttcctgctgcccgccgacagcggcgagaagatcagcctgggcatcaccgtgctgctgagcctgaccgtgttcatgctgctggtggccgagatcatgcccgccaccagcgacagcgtgcccctgatcgcccagtacttcgccagcaccatgatcatcgtgggcctgagcgtggtggtgaccgtgatcgtgctgcagtaccaccaccacgaccccgacggcggcaagatgcccaagtggaccagagtgatcctgctgaactggtgcgcctggttcctgagaatgaagagacccggcgaggacaaggtgagacccgcctgccagcacaagcagagaagatgcagcctggccagcgtggagatgagcgccgtggcccccccccccgccagcaacggcaacctgctgtacatcggcttcagaggcctggacggcgtgcactgcgtgcccacccccgacagcggcgtggtgtgcggcagaatggcctgcagccccacccacgacgagcacctgctgcacggcggccagccccccgagggcgaccccgacctggccaagatcctggaggaggtgagatacatcgccaacagattcagatgccaggacgagagcgaggccgtgtgcagcgagtggaagttcgccgcctgcgtggtggacagactgtgcctgatggccttcagcgtgttcaccatcatctgcaccatcggcatcctgatgagcgcccccaacttcgtggaggccgtgagcaaggacttcgcctag

SEQ ID NO: 72734 - DNA, 1428 bp, Artificial Sequence
  derived and/or modified sequence
atgtcttggcgtcctcagtatcgaagctcaaagttcagaaatgtgtacggcaaggttgccaacagagaacattgcttcgacggaatccccatcacgaaaaacgtgcacgacaatcacttctgtgcagtcaacactaggttcctcgcgatcgtcaccgaatccgcagggggggggagtttcctcgtcataccccttgagcagaccggacggatagagcctaattatcctaaggtttgtggacatcaggggaatgtccttgacatcaagtggaatccctttatcgataatattatcgcctcctgtagtgaggatacaagtgtccgaatctgggaaattcctgagggcggacttaagcgaaacatgaccgaagccctgttggaattgcacggccactcaagacgagtcgggttggtcgagtggcaccctactactaataatatcctgttctctgctggatacgactacaaggtcctgatttggaatctggatgttggagaacctgtaaaaatgatagactgccatacagacgtcattctatgcatgtcctttaataccgatgggtccctcttgacaaccacctgcaaggacaaaaagttgcgggtgatcgagccccgatcaggcagagtgcttcaggaggcgaattgtaaaaatcatagagttaacagagtggtgttcctgggcaacatgaaaaggctgctgacaacgggcgtctccaggtggaacacgagacagatagccctttgggaccaggaggacctgtccatgccattgatcgaagaggagatagacggacttagtgggctgctcttccctttctatgatgctgacacacacatgttatatcttgcaggtaagggcgatgggaacatacgttattacgagatatccaccgagaagccttatctatcctatttgatggaattcagatccccagctccacagaaagggctgggagttatgcctaagcacgggttagacgtgtcggcttgtgaggtgtttcgtttctataagctcgtcactctgaagggactcattgagccaatatcaatgatcgtcccacggcggtctgactcctatcaggaggacatttatccaatgacaccaggtaccgaacctgcgcttacacctgacgagtggctcggagggattaatagggaccccgtcttaatgtcactgaaggaagggtacaagaagtccagcaagatggtctttaaggctcccattaaggagaaaaaatccgtggtggtgaacgggattgatctcctagaaaacgtgcccccaaggaccgaaaacgagctgctgagaatgttcttcagacagcaggacgaaatacggcgactgaaggaagaattggcccaaaaggacatcagaatcagacagttacaactggagttgaagaacctgcgaaattcccctaagaactgctag

SEQ ID NO: 72735 - DNA, 1428 bp, Artificial Sequence
  derived and/or modified sequence
atgagctggcgtccacaatatcggtctagcaagtttcgcaatgtatacgggaaggtggccaacagggagcattgtttcgacgggatccccattacaaaaaacgtgcatgataaccatttctgtgctgttaatactcggttcctcgccatagtgaccgagtctgccggaggcggatcttttcttgtgattcccctggaacagacaggcagaattgaacctaactaccccaaagtctgcggccatcagggtaatgtgctggatataaaatggaatccctttattgacaatatcattgcatcatgctcagaggacacatctgtaagaatctgggagatacctgaaggcggattgaaacgaaacatgacagaggccctcctggagcttcatgggcatagcaggcgcgtcggattagtggagtggcacccaactacaaacaacattcttttcagcgccggttatgactataaagtattgatttggaaccttgatgtgggggagcccgtgaagatgatcgattgtcacacggacgtgatactctgcatgtcttttaatacggacgggtctttgttaaccactacctgtaaagacaaaaaattgcgggtgatcgaacctagatccggccgcgtactgcaagaagccaattgcaaaaaccatcgggtgaatcgcgtcgtgtttctgggaaatatgaagcgcctccttaccacgggagtctcaaggtggaacaccaggcaaatagccctgtgggaccaggaagatctcagcatgcctctgattgaggaagaaatcgacggactgtccggccttctctttccattttacgatgccgacactcatatgttatacctggccggtaaaggagatgggaacattaggtactacgaaatctctacagaaaaaccttacctgtcctacctgatggagtttaggtcacccgccccacagaagggacttggggttatgcctaagcacggcctggacgtgtcggcctgtgaggtgttcagattctacaagctcgtaacactgaaagggctgattgaacctattagcatgatagtacctagacgctcagattcttaccaggaagatatatatccaatgacgcctggaaccgaaccagcgctgacacctgacgaatggctgggcggaattaaccgtgacccagtcttgatgagccttaaagaagggtataagaaatccagtaaaatggtgtttaaggcccctattaaagaaaagaaatcagtagtagtgaatggtattgaccttctggagaacgtccccccaaggacagagaatgagttgctcaggatgttctttcggcaacaggacgagattagaaggctaaaggaagagttagcgcagaaggatattcgcatccgccaactacagctcgaacttaaaaacctgcgtaatagtcccaagaactgctag

SEQ ID NO: 72736 - DNA, 1428 bp, Artificial Sequence
  derived and/or modified sequence
atgtcctggaggccccagtaccgcagcagcaagttcagaaatgtgtatggcaaggtggccaaccgggagcactgctttgatggcatccccatcaccaagaatgtgcatgacaaccacttctgtgctgtgaacacccgcttcctggccatcgtgacagagagcgctgggggcggcagcttcctggtgatccccctggagcagacaggaagaattgagcccaactaccccaaggtgtgtggccaccagggcaatgtgctggacatcaagtggaaccccttcatcgacaacatcatcgccagctgcagcgaggacacctctgtgcgcatctgggagatccctgagggcggcctgaagaggaacatgacagaggccctgctggagctgcacggccacagcagaagagtgggcctggtggagtggcaccccaccaccaacaacatcctcttctctgctggctatgactacaaggtgctgatctggaacctggatgtgggggagcctgtgaagatgattgactgccacacagatgtgatcctgtgcatgtccttcaacacagatggcagcctgctgaccaccacctgcaaggacaagaagctgcgggtcatcgagcccaggagcggccgggtgctgcaggaggccaactgcaagaaccaccgggtgaacagagtggtgttcctgggcaacatgaagaggctgctgaccactggagtgagccgctggaacacccggcagatcgccctgtgggaccaggaggacctgtccatgcccctcatcgaggaggagattgatggcctgagcggcctgctcttccccttctatgatgctgacacccacatgctgtacctggccgggaaaggagatggcaacatccgctactatgagatcagcacagagaagccctacctgagctacctgatggagttccgcagccctgccccccagaagggcctgggcgtgatgcccaagcacggcctggatgtgtctgcctgtgaggtgttccgcttctacaagctggtgaccctgaagggcctgattgagcccatctccatgattgtgccccggcggagtgacagctaccaggaggacatctaccccatgaccccaggcacagagcccgccctgaccccagatgagtggctgggcggcatcaacagagatcctgtgctgatgagcctgaaggagggctacaagaagagcagcaagatggtgttcaaggcccccatcaaggagaagaagtctgtggtggtgaatggaattgacctgctggagaatgtgccccccaggacagaaaatgagctgctgaggatgttcttccggcagcaggatgagatccggcggctgaaggaggagctggcccagaaggacatccgcatccggcagctgcagctggagctgaagaacctgaggaacagccccaagaactgctag

SEQ ID NO: 72737 - DNA, 1428 bp, Artificial Sequence
  derived and/or modified sequence
atgagctggcggccccagtaccggagcagcaagttccggaacgtgtatggtaaagtagcaaacagggaacactgttttgatggcattccaattacgaagaatgtgcatgacaatcatttttgcgccgtgaacactagattcctggccatcgttaccgagtcagcgggcggcggaagcttcctcgtgatccccctcgaacagaccggacgcatcgaaccaaactatcccaaagtctgcggccatcaaggcaacgtgctcgacattaagtggaatcccttcatcgataatattatagcaagttgtagcgaggacacgagtgtgcgcatatgggagatccccgaggggggtctcaaaaggaacatgaccgaggccctacttgaattacacggccacagcagaagggtcggcctcgtggaatggcacccaactacaaataacatcctgttcagtgccgggtacgattataaagtgctgatttggaaccttgacgtcggcgaacccgtgaagatgatcgattgccacactgacgttattctctgtatgtcttttaacactgacggctccctgcttaccaccacatgcaaagataagaagctaagggtcatagaaccacggagcggccgggtgttacaggaggccaactgcaaaaaccatcgagtcaacagagtggtgttcctgggtaatatgaaaaggttacttacgactggtgtatcaagatggaacaccaggcagattgctctttgggatcaggaggacttgtctatgcccctgattgaggaggagatcgacggtctctctggcctgcttttcccgttttacgacgccgatacccatatgctctacctcgctgggaaaggcgatggcaatattcggtattacgagatcagtaccgaaaaaccatatctgtcttatttgatggaatttaggagccctgcaccgcagaaaggtctcggagtgatgcctaaacatgggctggacgtgtcagcatgcgaagtcttcagattctataagctggttacgctgaagggtctgatcgaacccatatccatgatcgttcccagaagatcagacagttaccaggaagacatttatcctatgacacccggcaccgaaccagcacttacgcctgacgagtggctcggggggatcaatcgtgacccagtcttaatgtctctgaaagagggctacaagaagtcgagcaagatggtgtttaaggcccctatcaaagagaagaaatccgtagtcgttaacggaattgatctgctggaaaatgtgccacctcgcacggaaaacgaacttctgcgcatgttcttcagacagcaggacgagattcgtcgtctcaaggaagaactggcacagaaagacatccgcatcagacagcttcagctcgagttgaagaacctgagaaattcccccaagaactgttag

SEQ ID NO: 72738 - DNA, 1428 bp, Artificial Sequence
  derived and/or modified sequence
atgagctggcggccccagtaccggagcagcaagttccggaacgtgtatggaaaagtggctaatcgcgagcactgtttcgatggaatccctatcaccaaaaatgtccacgacaaccacttctgtgcagttaatactcgctttttggccatcgtaacagaatcggccggaggcggcagcttcctggtgattcctttagaacagaccggcaggatcgagcccaactatcctaaagtctgtggccatcagggtaacgtcctagacattaaatggaatccgttcatcgacaatattatagcctcatgttctgaggacacctcagtgcgcatctgggaaatacctgaaggcgggctgaagcgaaacatgacggaggccctccttgagctgcacgggcacagccgccgcgtagggctggtcgagtggcatcctacaactaacaacattttattctctgccggttatgattataaagtgctgatctggaatctggatgtgggcgaaccggtgaagatgatagactgccataccgacgtaattctgtgcatgagcttcaatacagacgggtcactgctgacgactacctgtaaggataagaagctcagagtaatcgagcctcgttccggacgcgtgttgcaggaggccaactgtaagaaccaccgcgtgaacagggtcgttttccttgggaacatgaagcgactgctgacaaccggagtgtccaggtggaacacacgccaaatcgccctgtgggatcaagaggacctgtccatgcccctgattgaggaagagattgatgggttgtcgggtcttctgttcccattttatgatgctgacacgcacatgctctacctggccggcaaaggggatggcaacatcaggtactacgagatctccaccgagaaaccctatttgtcttacctgatggagttccgaagtccagcccctcaaaaaggactcggtgtcatgccgaaacatggcctggatgtaagtgcttgcgaggtttttaggttctacaaactggtgactttaaaaggactgattgagcctatctcaatgatcgtacctcgaaggagcgatagttatcaggaagatatttatcctatgactcctggaaccgaacccgccttaacccccgacgaatggttgggagggatcaaccgagatccggtcctcatgtcattgaaagagggatacaagaagtcaagcaagatggtattcaaggccccgatcaaggagaaaaaatccgttgtcgtcaatggcattgatcttctggagaatgtgccaccccgtaccgaaaacgagttactgcggatgttcttcaggcagcaggacgaaatccgacggctgaaggaggaactcgcccagaaggatattcgaatccggcaactgcagttggagctcaaaaatctgcgcaatagcccgaagaattgttag

SEQ ID NO: 72739 - DNA, 1428 bp, Artificial Sequence
  derived and/or modified sequence
atgtcctggaggccgcagtacagatcctctaagtttaggaacgtctatggcaaagtcgctaaccgcgagcactgcttcgatgggatcccaattaccaagaacgttcatgataatcatttttgtgccgtgaacactaggtttttggcaatagtgacagaaagcgctggaggcggatcatttctcgtgatccctctagagcagaccggcagaattgaacccaattatcccaaagtgtgtggtcaccagggtaatgtgctggatatcaagtggaacccattcattgacaacatcatcgcgtcatgttccgaggatacatccgttcgtatatgggagatccctgagggtggactcaagaggaacatgaccgaggctcttcttgaactccatggccacagtcgccgagtggggctcgtggagtggcatcccaccacgaataatattctgttctcggcagggtatgactataaggtgctaatctggaacctagatgtgggcgagcctgtcaagatgatcgattgccataccgatgtcatcttatgtatgagtttcaacactgacggctctctccttaccacaacctgcaaggataagaagcttcgagtcatagagccaaggtctggaagagttcttcaggaggctaattgcaaaaaccaccgggtgaatagagtggtctttttaggcaatatgaagagattactcaccaccggcgtcagtcggtggaacacgcgccaaatcgccctttgggaccaggaagatctgagtatgcctctgatagaggaagagattgatggcctgtccggcctcctgtttccattttacgacgccgatacacatatgctctacttggctgggaagggcgacggcaacatccgatactatgagattagtaccgagaaaccgtatctaagctacctcatggagtttcgaagtcccgctcctcagaaaggcctgggggtgatgccaaaacatgggctggacgtgagcgcttgcgaagtcttcagattttacaaattggttactctgaaggggcttattgaaccgatctccatgatcgtcccccgtaggtctgattcataccaagaagacatctacccaatgacccctggtactgaacctgccttgacacctgacgaatggctgggcggtataaacagagaccctgtgctgatgagcctgaaagaaggatataaaaagagctccaagatggtcttcaaggccccaatcaaagagaagaaatcagtcgtcgtcaacggcatcgacctgctggaaaacgttcccccaaggacggaaaatgaactcttgaggatgttctttcgtcagcaagacgagatcaggagactgaaagaagagttagcccagaaggatatcaggatcagacagctgcagctcgaactcaagaacctcaggaactcccctaagaattgctag

SEQ ID NO: 72740 - DNA, 1428 bp, Artificial Sequence
  derived and/or modified sequence
atgtcatggcggcctcagtataggtcctccaagtttcggaacgtttacggaaaggttgctaatcgcgagcattgtttcgacggtattccaatcacaaaaaatgtccacgataatcatttttgcgccgttaatactaggtttttggcgattgtgacagagtctgccggaggcggaagcttcctcgtgatcccccttgaacagactggcaggatagaaccaaattaccctaaggtgtgcggccaccaggggaacgtgctggacattaagtggaacccctttatagacaatattatcgcgagctgctcagaggacacatctgtgcgaatctgggagattccagaagggggacttaaacgaaatatgaccgaagcattactggaactgcacgggcactcaagaagagtgggactggtcgaatggcatcccacaacaaataacatcctgttctcggctggctacgactacaaggtgttgatctggaacctggatgttggcgagccggtcaaaatgatcgattgccacaccgacgtgatactgtgcatgagctttaatactgatgggagcctgctgacaaccacttgtaaagataagaagctcagggttatagagccaaggtccggtcgagtgttgcaggaggccaattgcaaaaatcaccgggtgaatagagtggtgtttcttggcaatatgaagcgtctcttgacgaccggcgtcagtcggtggaacacacgccagattgccttgtgggatcaagaagacctttcaatgcctttgattgaagaagagattgacggtctatccggacttctgtttccgttctatgatgctgacacccacatgctgtaccttgccggaaagggggacggcaatattcgttattatgagatttccacagaaaaaccttacctaagctacctgatggaatttcggtccccggctcctcaaaaggggctaggggtgatgccaaaacatgggctcgacgtctctgcttgcgaggtgttccggttctacaagttggtgactctcaagggcctgatagagcccatttctatgatcgtgcctcgtcgcagtgattcttaccaggaagacatataccccatgaccccaggaactgaaccagccctgacccctgatgagtggctcggtggcataaaccgcgacccagtcctcatgtctttgaaggagggttacaagaagagctctaagatggtctttaaagctcccatcaaagagaagaaatctgtggttgtcaatggcatagatctgctagagaacgtccctccacggaccgagaacgagcttctgaggatgttcttccgccagcaagacgaaatccgccgtctcaaggaggagttggctcagaaggatattagaatccgccagctgcaactggaacttaaaaacctgcgcaattcccccaaaaattgttag

SEQ ID NO: 72741 - DNA, 3332 bp, Artificial Sequence
  derived and/or modified sequence
attcaaaccgcctgctgggtgccgtgggccattgtgcaagtcttccaggccgcggtcgaatgattctgacaagcgatgtcctggcgtccgcaataccgtagctccaagttccggaatgtctacgggaaggtggccaaccgggagcactgcttcgatgggatccccatcaccaagaatgtgcacgacaaccacttctgtgccgtcaacacccgcttcctggccatcgtcaccgagagcgcagggggcggctccttcctcgtcatccccctggagcagacaggcaggattgaacccaactaccccaaggtctgcggccaccagggcaatgtgctggatatcaaatggaaccccttcatcgacaacatcattgcctcgtgctcggaggacacgtcggtgcggatctgggagatccccgagggcgggctgaagcggaacatgacggaggcgctcctggagctgcacgggcacagccggcgtgtggggctggtcgagtggcaccccaccaccaacaacatcctgttcagcgctggctacgactacaaggtcctcatctggaacctggatgtgggtgagccggtgaagatgattgactgccacacggatgtgatcctctgcatgtccttcaacacggacggcagcctgctcaccaccacgtgcaaggacaagaagctgcgtgtgattgagccccgctctggccgtgttctgcaggaggccaactgcaaaaaccacagagtgaaccgggtggtgttcctggggaacatgaagcggctcctcacgacaggggtctccaggtggaacacaagacagattgccctctgggaccaggaggacctctccatgcccctgatcgaagaggaaattgatgggctctctggcctcctgttccccttctatgatgctgacacccacatgctctacctggctggaaagggtgatggaaacatccggtactacgagatcagcactgagaagccctacctgagttacctcatggagttccgctccccagccccgcagaaaggcctaggggtcatgcccaagcacgggctggatgtgtcagcctgcgaggtgttccgcttctacaagctggtgactctcaagggcctgatcgagcccatctccatgatcgtgccccggaggtcagattcctaccaggaagacatttacccaatgacaccaggcacggagccagcactgaccccggatgaatggctgggaggcatcaaccgagatcccgtgctgatgtctttgaaagaaggctataagaagtcctcaaaaatggtatttaaggctcccatcaaagaaaagaagagtgttgtggtcaacggaatagatttattagaaaatgtcccacccaggacagagaatgagctccttcgaatgttcttccggcagcaggatgagattcgacggttgaaagaggagctggcccagaaggacatccgcattcggcagctccagctggaactgaaaaacttgcgcaacagccccaagaactgttagctccccagctgggctgttttctaagccgatctctccgtcgtttctactcatcccttaacttctcccttaccagtgaccccagagacagagccaggacaggagtgggggccagcctgaggacccccgcctaccacctcgagaactggaagccaacctctaacctcctgacctcatgctaataaaagtccccagcttctggagaccccctgccggcagcccctttccctgccaccccaggagccaggcttcccctcagctgggtgaagactacagactccctggggttggcaggggctccatctcagtggaccaggaagcaagaggggaagcgggatcccagctagacttagaacttggacttttcccctgtgaagggggctgccaggacatctcagcactcccgcctggagctctcagcatcactgaaggtaccacagtgtaagtgctggactgcaggctgcagtgatccctctttcgtcccaccccctcttccctcagcagccccggaagcctgcctcacccgacgaggacagcgagcggcccggctcctttctgtctcttcccttcccaccctcttgtcttcagggaattcagaggattgctctccaaggccataatgaccccttgccttccccatgattctctacaaagctcttgcacacccttttcccattcaatttgtgagccaggcagggtagggattagtgtccccctttgacaaatgacagaactgagggttgcaatggggaaatgacttataaagtcacccagcaggtcaacaatgggcccacgaccaagaccctgggtgttcagaccccaaggccagggcctttcccgctgcatcaagatgccaatccctttgtgggcttcaccagtgcccaagtctctatggagaatgagaactggaagccactgctaccgtctacccagcaccagtagtgccgatgtgccacactgcccagttgaggcccctcacgctctgtgcccctagatccttcaggtccccaccctcagctgtcaccaccaccctccccaggggactccatctgagatgaggcctcgtcctcctggaagctgaggctgagaagggtggagcttggccctggggaaggcagaccagggtctgatggcttctagggatgctctgcgtgtgtctcagcaccgctatctcagccactttcagccttatgcacgtagaatgaccacagccactcgcatccgtatagcactttaaagtttctgcagtcctttgacacataggatctcatggagcctcacgtctactcccttctgcagatgaggaaaccgagagaagtggcccaaggtcacgcaactctgagatgccacatttcatttgatcttgtacacattttcttttattccttcttttttcctcctttcatttcccactacgcacaaagagtttataaacactgttctcagaagagtcacagtttggggtgagatctggaaatcaagaaatgggtgtccactcttttctttcattagctaggatctactagatgcattatactccatacctgcttttcccatggccgccctacggaaaatcccatccacagaggccagggctacccaagcccctccaggtgagctgggcctttcctttatgaacctccatcctcccagccagctacagtagggcctcctcaccccgtaccccacagctagacagtgtcagcactcatctcctcctcccacatttctggagcttttttttttccttccccattgacctttgtggtcttctgtgattatttatgctgcctcccaaggatagaattgaaataaaatgttttcaacttatc

SEQ ID NO: 72742 - DNA, 1428 bp, Artificial Sequence
  derived and/or modified sequence
atgagctggagaccccagtacagaagcagcaagttcagaaacgtgtacggcaaggtggccaacagagagcactgcttcgacggcatccccatcaccaagaacgtgcacgacaaccacttctgcgccgtgaacaccagattcctggccatcgtgaccgagagcgccggcggcggcagcttcctggtgatccccctggagcagaccggcagaatcgagcccaactaccccaaggtgtgcggccaccagggcaacgtgctggacatcaagtggaaccccttcatcgacaacatcatcgccagctgcagcgaggacaccagcgtgagaatctgggagatccccgagggcggcctgaagagaaacatgaccgaggccctgctggagctgcacggccacagcagaagagtgggcctggtggagtggcaccccaccaccaacaacatcctgttcagcgccggctacgactacaaggtgctgatctggaacctggacgtgggcgagcccgtgaagatgatcgactgccacaccgacgtgatcctgtgcatgagcttcaacaccgacggcagcctgctgaccaccacctgcaaggacaagaagctgagagtgatcgagcccagaagcggcagagtgctgcaggaggccaactgcaagaaccacagagtgaacagagtggtgttcctgggcaacatgaagagactgctgaccaccggcgtgagcagatggaacaccagacagatcgccctgtgggaccaggaggacctgagcatgcccctgatcgaggaggagatcgacggcctgagcggcctgctgttccccttctacgacgccgacacccacatgctgtacctggccggcaagggcgacggcaacatcagatactacgagatcagcaccgagaagccctacctgagctacctgatggagttcagaagccccgccccccagaagggcctgggcgtgatgcccaagcacggcctggacgtgagcgcctgcgaggtgttcagattctacaagctggtgaccctgaagggcctgatcgagcccatcagcatgatcgtgcccagaagaagcgacagctaccaggaggacatctaccccatgacccccggcaccgagcccgccctgacccccgacgagtggctgggcggcatcaacagagaccccgtgctgatgagcctgaaggagggctacaagaagagcagcaagatggtgttcaaggcccccatcaaggagaagaagagcgtggtggtgaacggcatcgacctgctggagaacgtgccccccagaaccgagaacgagctgctgagaatgttcttcagacagcaggacgagatcagaagactgaaggaggagctggcccagaaggacatcagaatcagacagctgcagctggagctgaagaacctgagaaacagccccaagaactgctag

SEQ ID NO: 72743 - protein, 211 aa, Artificial Sequence
  derived and/or modified sequence
MKLWDVVAVCLVLLHTASAFPLPAGKRPPEAPAEDRSLGRRRAPFALSSDSNMPEDYPDQFDDVMDFIQATIKRLKRSPDKQMAVLPRRERNRQAAAANPENSRGKGRRGQRGKNRGCVLTAIHLNVTDLGLGYETKEELIFRYCSGSCDAAETTYDKILKNLSRNRRLVSDKVGQACCRPIAFDDDLSFLDDNLVYHILRKHSAKRCGCI

SEQ ID NO: 72744 - protein, 228 aa, Artificial Sequence
  derived and/or modified sequence
MQSLPNSNGAAAGRDFKMKLWDVVAVCLVLLHTASAFPLPAGKRPPEAPAEDRSLGRRRAPFALSSDSNMPEDYPDQFDDVMDFIQATIKRLKRSPDKQMAVLPRRERNRQAAAANPENSRGKGRRGQRGKNRGCVLTAIHLNVTDLGLGYETKEELIFRYCSGSCDAAETTYDKILKNLSRNRRLVSDKVGQACCRPIAFDDDLSFLDDNLVYHILRKHSAKRCGCI

SEQ ID NO: 72745 - DNA, 687 bp, Artificial Sequence
  derived and/or modified sequence
atgcagagcctgcccaacagcaacggcgccgccgccggcagagacttcaagatgaagctgtgggacgtggtggccgtgtgcctggtgctgctgcacaccgccagcgccttccccctgcccgccggcaagagaccccccgaggcccccgccgaggacagaagcctgggcagaagaagagcccccttcgccctgagcagcgacagcaacatgcccgaggactaccccgaccagttcgacgacgtgatggacttcatccaggccaccatcaagagactgaagagaagccccgacaagcagatggccgtgctgcccagaagagagagaaacagacaggccgccgccgccaaccccgagaacagcagaggcaagggcagaagaggccagagaggcaagaacagaggctgcgtgctgaccgccatccacctgaacgtgaccgacctgggcctgggctacgagaccaaggaggagctgatcttcagatactgcagcggcagctgcgacgccgccgagaccacctacgacaagatcctgaagaacctgagcagaaacagaagactggtgagcgacaaggtgggccaggcctgctgcagacccatcgccttcgacgacgacctgagcttcctggacgacaacctggtgtaccacatcctgagaaagcacagcgccaagagatgcggctgcatctag

SEQ ID NO: 72746 - DNA, 687 bp, Artificial Sequence
  derived and/or modified sequence
atgcagtcccttcctaactctaatggagctgccgccggcagagattttaagatgaaactgtgggacgtggtcgccgtgtgtctggtgttactacataccgcaagcgctttccccctgcctgcaggcaagcgacccccagaggcacctgccgaggatcgatccctggggcgtaggcgagcgccttttgccttgtctagcgactccaatatgcctgaagactatccagaccagtttgacgatgtcatggatttcattcaggcaaccatcaagcggttgaagaggagcccagacaaacaaatggctgtcttgccacgtagggagcggaacaggcaggccgccgccgcaaacccggaaaattcacgaggaaagggaaggagggggcagcgtggtaagaaccgcggctgcgtgctcaccgcgatacacctgaacgtgacagatctcggtttagggtatgagacaaaggaggagctgatattccggtattgctccggcagctgcgatgcggcagagactacttatgacaagatcctcaagaacctctcacggaaccggaggctcgtgtctgacaaagtcggtcaagcatgttgccgccccatcgcattcgatgatgatttaagcttcctcgatgacaacttagtgtaccatatcctgcgtaagcatagcgcgaagcggtgtggctgcatctag

SEQ ID NO: 72747 - DNA, 687 bp, Artificial Sequence
  derived and/or modified sequence
atgcagagcctgcccaacagcaatggagctgctgctggccgggacttcaagatgaagctgtgggatgtggtggccgtgtgcctggtgctgctgcacacagccagcgccttccccctgcctgctgggaagaggcctcctgaggccccagcagaagatagaagcctgggcagaagaagagccccctttgccctgagcagtgacagcaacatgcctgaggactacccagaccagtttgatgatgtgatggacttcatccaggccaccatcaagaggctgaagaggagcccagacaagcagatggctgtgctgccccggcgggagaggaaccggcaggccgccgccgccaaccctgagaacagccggggcaaaggaagaagaggccagaggggcaagaacagaggctgtgtgctgacagccatccacctgaatgtgacagacctgggcctgggctatgagaccaaggaggagctgatcttccgctactgcagcggcagctgtgatgctgctgagaccacctatgacaagatcctgaagaacctgagcaggaacagaaggctggtgtctgacaaggtgggccaggcctgctgccggcccatcgcctttgatgatgacctgtccttcctggatgacaacctggtgtaccacatcctgaggaagcacagcgccaagagatgtggctgcatctag

SEQ ID NO: 72748 - DNA, 687 bp, Artificial Sequence
  derived and/or modified sequence
atgcagagcctgcccaacagcaacggcgccgccgccggccgggacttcaaaatgaagctgtgggacgttgtggcggtatgtttagtcctgctgcacacagcctccgcttttcctcttcctgctggaaaacgaccacctgaggcgcccgcagaggatcggagcctggggcgccgacgggcaccctttgcactttctagtgattctaacatgccggaggactaccctgaccagtttgacgatgtgatggatttcatccaagcgacaataaagaggttgaagagatcaccagacaagcagatggcagtgctacccaggagggagcgcaatcggcaggccgctgctgcgaatccagagaacagtcgcggaaaaggaagacgggggcagaggggaaagaacagagggtgtgttctgacagctattcatttgaacgtaacagatctggggcttggttacgagaccaaagaagagcttatattcaggtattgctcgggctcttgtgacgctgctgaaactacctacgataaaattctgaaaaatttatctagaaataggcggttagtgtccgacaaagtgggacaggcgtgttgccgaccaattgcattcgatgatgacctgagtttcctggacgacaacctagtgtaccatattctcaggaagcattcagcaaagcggtgcggttgtatatag

SEQ ID NO: 72749 - DNA, 3810 bp, Artificial Sequence
  derived and/or modified sequence
ccgcctccagcgcgcccttgctgccccgcgcgaccccaggattgcgaactcttgcccctgacctgttgggcggggctccgcgctccagccatcagcccggatgggtctcctggctgggacttggggcacctggagttaatgtccaacctagggtctgcggagacccgatccgaggtgccgccgccggacgggactttaagatgaagttatgggatgtcgtggctgtctgcctggtgctgctccacaccgcgtccgccttcccgctgcccgccggtaagaggcctcccgaggcgcccgccgaagaccgctccctcggccgccgccgcgcgcccttcgcgctgagcagtgactcaaatatgccagaggattatcctgatcagttcgatgatgtcatggattttattcaagccaccattaaaagactgaaaaggtcaccagataaacaaatggcagtgcttcctagaagagagcggaatcggcaggctgcagctgccaacccagagaattccagaggaaaaggtcggagaggccagaggggcaaaaaccggggttgtgtcttaactgcaatacatttaaatgtcactgacttgggtctgggctatgaaaccaaggaggaactgatttttaggtactgcagcggctcttgcgatgcagctgagacaacgtacgacaaaatattgaaaaacttatccagaaatagaaggctggtgagtgacaaagtagggcaggcatgttgcagacccatcgcctttgatgatgacctgtcgtttttagatgataacctggtttaccatattctaagaaagcattccgctaaaaggtgtggatgtatctgactccggctccagagactgctgtgtattgcattcctgctacagtgcaaagaaagggaccaaggttcccaggaaatgtttgcccagaatggaagatgaggaccaaggaggcggaggaggaggaagaagaagaggaggaggaggaggaggaggaggaggaggaggaaggcagccatcatgggagcctggtagagggagatccagctacagacaactggacaggagagagagaaaacagccctctggattctccaggatggcagccgatgtcactagaagctcagggctgatgttcctggttggctattgccaccatttcagctgatacagtccaccatcactgattaccggcgcggttgcggtggatgcacttgaaccaaaccagtgtatctcctgtgatttgttttcatgtgtccgaagacaccagggaaacagagatcctggtgttgttccttgttattacgttttactgctgaaagtaagaggtttatttttctgtcactcagtggagacataccctggaaaggagaggggaaaaaaaaagcaaagatacaagagataatcacctttgcatttgaaagttgaggcccgaggtttactacaaccagcatttttgccaacggttggtgattgatttccatcacggtgtgtggggtgggaagaagttggctaggaaccaaaaaggctgtgctcatgattaaacacaaacctgaaggtatttcctttatgtccttggaaacaggaaacgagttgtggttttcgccagcattcttgtaggagagaatcggggaaggccccgaactgcccccgggcagggagagcccctcaggcctgttggtttacagagagacagatgttacataaccagctccgttgatgcgtggtcaccagtgaccagagaagctactcgatgcaatgcatctgtttcagatacagaaatatagagaagatatttattgaaatttaagttattgttatttattaccgttcactaatgaatttctcttttttcccttatttattaaagtttcttttcaaaggtgccaaagtatatgtgctcgcaaaatgcaaagaaaggtgacaaaaggaaatttgaattgggaacaagggtccatgcttttcaaagtattaaaaagttttttgccaggcaaaaatcacttactttacctttttaagaaaatttgtcattaattttccccagatttcagcatttttcccaatttttatttgtggagcatctcaggcaagccccctttcctggagcagcgtgcagagaccactggcacttgactttatttcttccttgctccattgctgaacagaaatgtcgtgggctccacttcctgttgtctttaagctcttagtcccctccacgtatacctatctgtactatgcataaccatatgtagaaaaggttcagttccttttagtaggtagtcctggatttaatgctgacctaaaagtaatgtcgacaatgctgtcaggtagctgccgttctaccgactccctccatccctgcccacccactgccctcccgagaatatgctggctgcccagtgcagcccgggagacacaggggccttccagaggtagggtctaccaggtcctgtacaacccctgggctgtcaccgggggtcaacagctgctgctcctatatacccaaacacctgacagctccctggggagcagatggctgagaagggtgctgaggaagccatattgggaccagccacagccacacacatggagcctcatacttaggagcgtgctgcctttaaatgaaggtggtcggggccagtgcagcggctcacacccataatcccaacactttggaaagccaaggtgggaggatctcttgaacccaggagtttgagaccagcttgggcaacatagggagaccctgtctctacagaaactttaaaaattaggcaggcatgatggtgcacacctgtggtcccagctactcaagaggctgaaggaggatcacttgagtccagaaggtcgaggctgcagtgagctgtgatcatgccactgcactccagcctaagtgacagtgcggtaccctgtctcaaaaaaaaaaaaaaaaaaaaaaagaggttggagcaggaggaagcataggggcgggaacagccacctcctccatgccctagattgtgaatttatcgggcagccaacacatgtatgacacactaggccctgtattacagcttgttacgcatttcataaaagggattttcattaaggagataatctattactacctaccttagtggctactagtataaaactatgacagatttagcaattaaatgaaatactggcctccatcaaataatcatagtaacaagaagcagcagttaccagacatctgatccccttcccccaaaatacccaaattcttcatggttctgcccttctctgtcctttctgctccccttgctcgcctgggaaatggaggaaaggccttccctctcacactgtcttgggatcttgctgagaattcagactgctcgaaacagtgacaaaccccagccatccagtcattcgtggagcacaatttggatgtggccccaggggcatctgtcccattcagagaaccttggcagtgcgatggccactgttcccaggcttcaacctcagtgaccccccccaacaactccccatggagagtccctgcccaaaaaagctgtaggatccaaggggtgtcaatagctcgttcccggcatcacctacacaccacaagcaggttttaatggaagcaagttgctccaccaaatccacaaaagggtaaagtttgtgatttttctttatcattgcgatcaccatctgataccgtaaggagtgcacttgtttggaagttctgacttctctgatctgtcttggtcgtttgtgttataaaaccaaagttctctacagactttatttttgtacaatatcattttgtaactttttacaaataaaaactcatttctattgc

SEQ ID NO: 72750 - DNA, 856 bp, Artificial Sequence
  derived and/or modified sequence
ccaaagcgtccgagactgggtacagtcgtccaggcgtgacgggggcgcggggagccagtgactcctctgggaggggaagggattagggccagaatctctcaaaggtgcaaaaatccagtcaagagagggttttcgggtataccacggaggattaaaactttcaagacaaatgcagtctttgcctaacagcaatggtgccgccgccggacgggactttaagatgaagttatgggatgtcgtggctgtctgcctggtgctgctccacaccgcgtccgccttcccgctgcccgccggtaagaggcctcccgaggcgcccgccgaagaccgctccctcggccgccgccgcgcgcccttcgcgctgagcagtgactcaaatatgccagaggattatcctgatcagttcgatgatgtcatggattttattcaagccaccattaaaagactgaaaaggtcaccagataaacaaatggcagtgcttcctagaagagagcggaatcggcaggctgcagctgccaacccagagaattccagaggaaaaggtcggagaggccagaggggcaaaaaccggggttgtgtcttaactgcaatacatttaaatgtcactgacttgggtctgggctatgaaaccaaggaggaactgatttttaggtactgcagcggctcttgcgatgcagctgagacaacgtacgacaaaatattgaaaaacttatccagaaatagaaggctggtgagtgacaaagtagggcaggcatgttgcagacccatcgcctttgatgatgacctgtcgtttttagatgataacctggtttaccatattctaagaaagcattccgctaaaaggtgtggatgtatctga

SEQ ID NO: 72751 - DNA, 687 bp, Artificial Sequence
  derived and/or modified sequence
atgcaaagtcttcccaactcgaatggcgctgctgctgggcgagactttaagatgaaactgtgggacgtggtggcagtttgcctggtgctgctccatactgcgagcgcctttcccctcccagccggaaagagaccaccggaagccccagctgaggatcgatccttggggcgtcgccgtgcgccatttgcgctgtcttcagattctaacatgcccgaggactaccccgaccagttcgatgacgtcatggattttatacaggccactatcaaacggctgaagcgttctccagataaacagatggccgttctccctaggcgcgagcgaaacagacaggcagcagcagccaatccggagaactcaaggggcaagggcaggcgcggacagcgtggaaaaaaccgcggatgtgttttaaccgccatccacttgaacgttaccgaccttggcttggggtatgagacaaaggaggagcttattttccggtactgttccgggtcttgcgacgccgcagaaaccacgtatgacaagattttgaagaacctcagccgcaatagaagactggtgagcgataaggtggggcaggcctgttgcaggcccattgcattcgacgacgacctcagctttctggacgataatctggtataccatattcttaggaagcattccgcaaaaagatgtggctgtatttag

SEQ ID NO: 72752 - DNA, 687 bp, Artificial Sequence
  derived and/or modified sequence
atgcagtcactgccaaacagcaacggagcagctgctggaagagacttcaagatgaagctgtgggatgtggtcgctgtatgtctggtattgttacacacagctagcgccttccccttgccggccggaaagcggccacctgaagcacctgctgaggacagaagcctcggacgcaggagagctccctttgctctttctagcgacagcaatatgccagaggactacccagatcaattcgacgacgttatggacttcatccaggctaccattaaacggttgaaacgctccccagacaagcagatggccgtccttccgagaagagagcgcaatcgccaagccgcagccgctaatccagagaattccagaggaaagggccgacgtggccagcgcggcaaaaatagaggatgtgtgctgacagccatccacctcaacgtaacagacctcggcctggggtatgagacaaaggaagagttaatctttcgctattgcagcgggtcgtgcgatgctgccgaaaccacttacgacaaaatactaaaaaacctcagccgcaaccgaaggctggtgtctgacaaggtgggacaggcctgctgcagaccgatagcgttcgatgacgatttatcattcctggacgataacctcgtgtaccatattctccgtaagcactctgccaagcgttgcggatgcatctag

SEQ ID NO: 72753 - DNA, 687 bp, Artificial Sequence
  derived and/or modified sequence
atgcaaagcctcccaaactcaaacggagcagccgccgggagagattttaagatgaaactttgggatgtggttgctgtctgcctcgtgctactgcacactgcatcagcattcccccttcctgccggtaaacggcctccagaagctcctgcggaggatcgaagcttgggacgccgccgagccccctttgctctgtcttccgattctaatatgccagaggattatcctgatcagttcgatgacgtaatggacttcatccaagcaacgattaagagactcaaacgctcccctgacaaacagatggctgtattaccgaggagggagagaaatcgccaagccgccgcggcaaaccccgaaaactccagaggcaaggggaggcgtggacaaagaggaaagaaccggggatgtgtgctgacagctattcacctcaatgtgactgatttaggactgggatacgagacaaaggaagagctgattttccgctactgctccggctcgtgcgatgctgcagaaactacctacgacaagatcctgaagaacctctcacggaatcgcagactggtgtctgacaaggtcggtcaagcatgctgccgccccatcgcttttgatgacgatctctccttcctagatgacaaccttgtttaccatattctccgaaagcactccgcaaagcgctgtgggtgtatttag

SEQ ID NO: 72754 - RNA, 687 nt, Artificial Sequence
  derived and/or modified sequence
augcagucacugccaaacagcaacggagcagcugcuggaagagacuucaagaugaagcugugggauguggucgcuguaugucugguauuguuacacacagcuagcgccuuccccuugccggccggaaagcggccaccugaagcaccugcugaggacagaagccucggacgcaggagagcucccuuugcucuuucuagcgacagcaauaugccagaggacuacccagaucaauucgacgacguuauggacuucauccaggcuaccauuaaacgguugaaacgcuccccagacaagcagauggccguccuuccgagaagagagcgcaaucgccaagccgcagccgcuaauccagagaauuccagaggaaagggccgacguggccagcgcggcaaaaauagaggaugugugcugacagccauccaccucaacguaacagaccucggccugggguaugagacaaaggaagaguuaaucuuucgcuauugcagcgggucgugcgaugcugccgaaaccacuuacgacaaaauacuaaaaaaccucagccgcaaccgaaggcuggugucugacaaggugggacaggccugcugcagaccgauagcguucgaugacgauuuaucauuccuggacgauaaccucguguaccauauucuccguaagcacucugccaagcguugcggaugcaucuag

SEQ ID NO: 72755 - RNA, 687 nt, Artificial Sequence
  derived and/or modified sequence
augcaaagccucccaaacucaaacggagcagccgccgggagagauuuuaagaugaaacuuugggaugugguugcugucugccucgugcuacugcacacugcaucagcauucccccuuccugccgguaaacggccuccagaagcuccugcggaggaucgaagcuugggacgccgccgagcccccuuugcucugucuuccgauucuaauaugccagaggauuauccugaucaguucgaugacguaauggacuucauccaagcaacgauuaagagacucaaacgcuccccugacaaacagauggcuguauuaccgaggagggagagaaaucgccaagccgccgcggcaaaccccgaaaacuccagaggcaaggggaggcguggacaaagaggaaagaaccggggaugugugcugacagcuauucaccucaaugugacugauuuaggacugggauacgagacaaaggaagagcugauuuuccgcuacugcuccggcucgugcgaugcugcagaaacuaccuacgacaagauccugaagaaccucucacggaaucgcagacuggugucugacaaggucggucaagcaugcugccgccccaucgcuuuugaugacgaucucuccuuccuagaugacaaccuuguuuaccauauucuccgaaagcacuccgcaaagcgcuguggguguauuuag

SEQ ID NO: 72756 - protein, 185 aa, Artificial Sequence
  derived and/or modified sequence
MKLWDVVAVCLVLLHTASAFPLPAANMPEDYPDQFDDVMDFIQATIKRLKRSPDKQMAVLPRRERNRQAAAANPENSRGKGRRGQRGKNRGCVLTAIHLNVTDLGLGYETKEELIFRYCSGSCDAAETTYDKILKNLSRNRRLVSDKVGQACCRPIAFDDDLSFLDDNLVYHILRKHSAKRCGCI

SEQ ID NO: 72757 - protein, 61 aa, Artificial Sequence
  derived and/or modified sequence
MKLWDVVAVCLVLLHTASAFPLPAANMPEDYPDQFDDVMDFIQATIKRLKRSPDKQMAVLP

SEQ ID NO: 72758 - protein, 202 aa, Artificial Sequence
  derived and/or modified sequence
MQSLPNSNGAAAGRDFKMKLWDVVAVCLVLLHTASAFPLPAANMPEDYPDQFDDVMDFIQATIKRLKRSPDKQMAVLPRRERNRQAAAANPENSRGKGRRGQRGKNRGCVLTAIHLNVTDLGLGYETKEELIFRYCSGSCDAAETTYDKILKNLSRNRRLVSDKVGQACCRPIAFDDDLSFLDDNLVYHILRKHSAKRCGCI

SEQ ID NO: 72759 - DNA, 609 bp, Artificial Sequence
  derived and/or modified sequence
atgcagagcctgcccaacagcaacggcgccgccgccggcagagacttcaagatgaagctgtgggacgtggtggccgtgtgcctggtgctgctgcacaccgccagcgccttccccctgcccgccgccaacatgcccgaggactaccccgaccagttcgacgacgtgatggacttcatccaggccaccatcaagagactgaagagaagccccgacaagcagatggccgtgctgcccagaagagagagaaacagacaggccgccgccgccaaccccgagaacagcagaggcaagggcagaagaggccagagaggcaagaacagaggctgcgtgctgaccgccatccacctgaacgtgaccgacctgggcctgggctacgagaccaaggaggagctgatcttcagatactgcagcggcagctgcgacgccgccgagaccacctacgacaagatcctgaagaacctgagcagaaacagaagactggtgagcgacaaggtgggccaggcctgctgcagacccatcgccttcgacgacgacctgagcttcctggacgacaacctggtgtaccacatcctgagaaagcacagcgccaagagatgcggctgcatctag

SEQ ID NO: 72760 - DNA, 609 bp, Artificial Sequence
  derived and/or modified sequence
atgcagtcacttcctaactcgaatggcgcagcagccggccgtgacttcaaaatgaaactatgggacgtggtggcggtttgcttggtgctcctccacacagcctcagcatttccactgcctgccgctaacatgccagaagactaccctgatcagttcgacgatgtcatggacttcatccaggcgacgatcaagcggctgaagcgctcccctgacaaacagatggcagtcttgccccgtcgggaacggaacaggcaggccgccgccgcgaatccggagaattctcgcggcaagggaagacgtggtcaacggggcaagaaccgaggctgtgtactgactgccatccacttaaatgtcacagacctgggactcggatacgagacaaaagaggagttgatcttccgctattgcagcggttcatgtgacgccgccgagaccacatacgataaaatcctgaagaacctgagtcgcaaccgacgcttagtgtcagataaagtgggccaggcctgctgtaggcccatagcttttgatgatgacctgtccttcctggatgataatttagtctaccatatcctgagaaaacattcagcaaaaaggtgcgggtgcatctag

SEQ ID NO: 72761 - DNA, 609 bp, Artificial Sequence
  derived and/or modified sequence
atgcagagcctgcccaacagcaatggagctgctgctggccgggacttcaagatgaagctgtgggatgtggtggccgtgtgcctggtgctgctgcacacagccagcgccttccccctgcctgctgccaacatgcctgaggactacccagaccagtttgatgatgtgatggacttcatccaggccaccatcaagaggctgaagaggagcccagacaagcagatggctgtgctgccccggcgggagaggaaccggcaggccgccgccgccaaccctgagaacagccggggcaaaggaagaagaggccagaggggcaagaacagaggctgtgtgctgacagccatccacctgaatgtgacagacctgggcctgggctatgagaccaaggaggagctgatcttccgctactgcagcggcagctgtgatgctgctgagaccacctatgacaagatcctgaagaacctgagcaggaacagaaggctggtgtctgacaaggtgggccaggcctgctgccggcccatcgcctttgatgatgacctgtccttcctggatgacaacctggtgtaccacatcctgaggaagcacagcgccaagagatgtggctgcatctag

SEQ ID NO: 72762 - DNA, 609 bp, Artificial Sequence
  derived and/or modified sequence
atgcagagcctgcccaacagcaacggcgccgccgccggccgggactttaagatgaagttgtgggacgtggtagccgtgtgtctggtgttactgcatacagcaagcgcattcccacttccagctgccaacatgcccgaggactatcccgatcagtttgacgacgtgatggatttcatccaagcaacgatcaagcggctgaagcgctcccccgataaacagatggcagtgctgccaaggcgggaaagaaaccgccaggccgccgctgcaaacccagaaaactccaggggaaaaggtaggagagggcagagggggaagaatcgagggtgtgtgctgaccgctattcacctgaatgtgactgatttgggcctcggttacgaaacaaaagaagaactaatttttcgttactgctcaggctcctgtgacgctgccgaaacaacttacgataaaatccttaaaaatctctcaaggaatcgtcggctggtctccgataaagtcggccaggcctgctgccgcccgattgcatttgatgacgatctatcttttctcgacgataacctagtgtaccatatcttgcgtaaacactcagccaagagatgtggatgtatctag

SEQ ID NO: 72763 - DNA, 3655 bp, Artificial Sequence
  derived and/or modified sequence
catacaggccaaaagtctccaagtccctgctaacttcttgctctcgcaacagaatacctatttaggtgggaagaatgaggtgtgggcggcaggctgggtgccgccgccggacgggactttaagatgaagttatgggatgtcgtggctgtctgcctggtgctgctccacaccgcgtccgccttcccgctgcccgccgcaaatatgccagaggattatcctgatcagttcgatgatgtcatggattttattcaagccaccattaaaagactgaaaaggtcaccagataaacaaatggcagtgcttcctagaagagagcggaatcggcaggctgcagctgccaacccagagaattccagaggaaaaggtcggagaggccagaggggcaaaaaccggggttgtgtcttaactgcaatacatttaaatgtcactgacttgggtctgggctatgaaaccaaggaggaactgatttttaggtactgcagcggctcttgcgatgcagctgagacaacgtacgacaaaatattgaaaaacttatccagaaatagaaggctggtgagtgacaaagtagggcaggcatgttgcagacccatcgcctttgatgatgacctgtcgtttttagatgataacctggtttaccatattctaagaaagcattccgctaaaaggtgtggatgtatctgactccggctccagagactgctgtgtattgcattcctgctacagtgcaaagaaagggaccaaggttcccaggaaatgtttgcccagaatggaagatgaggaccaaggaggcggaggaggaggaagaagaagaggaggaggaggaggaggaggaggaggaggaggaaggcagccatcatgggagcctggtagagggagatccagctacagacaactggacaggagagagagaaaacagccctctggattctccaggatggcagccgatgtcactagaagctcagggctgatgttcctggttggctattgccaccatttcagctgatacagtccaccatcactgattaccggcgcggttgcggtggatgcacttgaaccaaaccagtgtatctcctgtgatttgttttcatgtgtccgaagacaccagggaaacagagatcctggtgttgttccttgttattacgttttactgctgaaagtaagaggtttatttttctgtcactcagtggagacataccctggaaaggagaggggaaaaaaaaagcaaagatacaagagataatcacctttgcatttgaaagttgaggcccgaggtttactacaaccagcatttttgccaacggttggtgattgatttccatcacggtgtgtggggtgggaagaagttggctaggaaccaaaaaggctgtgctcatgattaaacacaaacctgaaggtatttcctttatgtccttggaaacaggaaacgagttgtggttttcgccagcattcttgtaggagagaatcggggaaggccccgaactgcccccgggcagggagagcccctcaggcctgttggtttacagagagacagatgttacataaccagctccgttgatgcgtggtcaccagtgaccagagaagctactcgatgcaatgcatctgtttcagatacagaaatatagagaagatatttattgaaatttaagttattgttatttattaccgttcactaatgaatttctcttttttcccttatttattaaagtttcttttcaaaggtgccaaagtatatgtgctcgcaaaatgcaaagaaaggtgacaaaaggaaatttgaattgggaacaagggtccatgcttttcaaagtattaaaaagttttttgccaggcaaaaatcacttactttacctttttaagaaaatttgtcattaattttccccagatttcagcatttttcccaatttttatttgtggagcatctcaggcaagccccctttcctggagcagcgtgcagagaccactggcacttgactttatttcttccttgctccattgctgaacagaaatgtcgtgggctccacttcctgttgtctttaagctcttagtcccctccacgtatacctatctgtactatgcataaccatatgtagaaaaggttcagttccttttagtaggtagtcctggatttaatgctgacctaaaagtaatgtcgacaatgctgtcaggtagctgccgttctaccgactccctccatccctgcccacccactgccctcccgagaatatgctggctgcccagtgcagcccgggagacacaggggccttccagaggtagggtctaccaggtcctgtacaacccctgggctgtcaccgggggtcaacagctgctgctcctatatacccaaacacctgacagctccctggggagcagatggctgagaagggtgctgaggaagccatattgggaccagccacagccacacacatggagcctcatacttaggagcgtgctgcctttaaatgaaggtggtcggggccagtgcagcggctcacacccataatcccaacactttggaaagccaaggtgggaggatctcttgaacccaggagtttgagaccagcttgggcaacatagggagaccctgtctctacagaaactttaaaaattaggcaggcatgatggtgcacacctgtggtcccagctactcaagaggctgaaggaggatcacttgagtccagaaggtcgaggctgcagtgagctgtgatcatgccactgcactccagcctaagtgacagtgcggtaccctgtctcaaaaaaaaaaaaaaaaaaaaaaagaggttggagcaggaggaagcataggggcgggaacagccacctcctccatgccctagattgtgaatttatcgggcagccaacacatgtatgacacactaggccctgtattacagcttgttacgcatttcataaaagggattttcattaaggagataatctattactacctaccttagtggctactagtataaaactatgacagatttagcaattaaatgaaatactggcctccatcaaataatcatagtaacaagaagcagcagttaccagacatctgatccccttcccccaaaatacccaaattcttcatggttctgcccttctctgtcctttctgctccccttgctcgcctgggaaatggaggaaaggccttccctctcacactgtcttgggatcttgctgagaattcagactgctcgaaacagtgacaaaccccagccatccagtcattcgtggagcacaatttggatgtggccccaggggcatctgtcccattcagagaaccttggcagtgcgatggccactgttcccaggcttcaacctcagtgaccccccccaacaactccccatggagagtccctgcccaaaaaagctgtaggatccaaggggtgtcaatagctcgttcccggcatcacctacacaccacaagcaggttttaatggaagcaagttgctccaccaaatccacaaaagggtaaagtttgtgatttttctttatcattgcgatcaccatctgataccgtaaggagtgcacttgtttggaagttctgacttctctgatctgtcttggtcgtttgtgttataaaaccaaagttctctacagactttatttttgtacaatatcattttgtaactttttacaaataaaaactcatttctattgc

SEQ ID NO: 72764 - DNA, 306 bp, Artificial Sequence
  derived and/or modified sequence
catacaggccaaaagtctccaagtccctgctaacttcttgctctcgcaacagaatacctatttaggtgggaagaatgaggtgtgggcggcaggctgggtgccgccgccggacgggactttaagatgaagttatgggatgtcgtggctgtctgcctggtgctgctccacaccgcgtccgccttcccgctgcccgccgcaaatatgccagaggattatcctgatcagttcgatgatgtcatggattttattcaagccaccattaaaagactgaaaaggtcaccagataaacaaatggcagtgcttcct

SEQ ID NO: 72765 - DNA, 295 bp, Artificial Sequence
  derived and/or modified sequence
tggagaggggcgcagggacccgcagggagcccaggcttaacgtgcattctgcggttctctcccccacctcccgcctgcccgcgcaggtgccgccgccggacgggactttaagatgaagttatgggatgtcgtggctgtctgcctggtgctgctccacaccgcgtccgccttcccgctgcccgccgcaaatatgccagaggattatcctgatcagttcgatgatgtcatggattttattcaagccaccattaaaagactgaaaaggtcaccagataaacaaatggcagtgcttcct

SEQ ID NO: 72766 - DNA, 764 bp, Artificial Sequence
  derived and/or modified sequence
tggccgccgcctccagcgcgcccttgctgccccgcgcgaccccaggattgcgaactcttgcccctgacctgttgggcggggctccgcgctccagccatcagcccggatgggtctcctggctgggacttggggcacctggagttaatgtccaacctagggtctgcggagacccgatccgaggtgccgccgccggacgggactttaagatgaagttatgggatgtcgtggctgtctgcctggtgctgctccacaccgcgtccgccttcccgctgcccgccgcaaatatgccagaggattatcctgatcagttcgatgatgtcatggattttattcaagccaccattaaaagactgaaaaggtcaccagataaacaaatggcagtgcttcctagaagagagcggaatcggcaggctgcagctgccaacccagagaattccagaggaaaaggtcggagaggccagaggggcaaaaaccggggttgtgtcttaactgcaatacatttaaatgtcactgacttgggtctgggctatgaaaccaaggaggaactgatttttaggtactgcagcggctcttgcgatgcagctgagacaacgtacgacaaaatattgaaaaacttatccagaaatagaaggctggtgagtgacaaagtagggcaggcatgttgcagacccatcgcctttgatgatgacctgtcgtttttagatgataacctggtttaccatattctaagaaagcattccgctaaaaggtgtggatgtatctga

SEQ ID NO: 72767 - DNA, 778 bp, Artificial Sequence
  derived and/or modified sequence
ccaaagcgtccgagactgggtacagtcgtccaggcgtgacgggggcgcggggagccagtgactcctctgggaggggaagggattagggccagaatctctcaaaggtgcaaaaatccagtcaagagagggttttcgggtataccacggaggattaaaactttcaagacaaatgcagtctttgcctaacagcaatggtgccgccgccggacgggactttaagatgaagttatgggatgtcgtggctgtctgcctggtgctgctccacaccgcgtccgccttcccgctgcccgccgcaaatatgccagaggattatcctgatcagttcgatgatgtcatggattttattcaagccaccattaaaagactgaaaaggtcaccagataaacaaatggcagtgcttcctagaagagagcggaatcggcaggctgcagctgccaacccagagaattccagaggaaaaggtcggagaggccagaggggcaaaaaccggggttgtgtcttaactgcaatacatttaaatgtcactgacttgggtctgggctatgaaaccaaggaggaactgatttttaggtactgcagcggctcttgcgatgcagctgagacaacgtacgacaaaatattgaaaaacttatccagaaatagaaggctggtgagtgacaaagtagggcaggcatgttgcagacccatcgcctttgatgatgacctgtcgtttttagatgataacctggtttaccatattctaagaaagcattccgctaaaaggtgtggatgtatctga

SEQ ID NO: 72768 - DNA, 609 bp, Artificial Sequence
  derived and/or modified sequence
atgcaatccttgccaaactccaatggcgctgccgctggacgagacttcaaaatgaagctgtgggacgtagttgccgtctgcctggtcctgctgcatacggcctcggcatttcccctgcccgctgccaacatgcctgaagactatcctgatcagttcgatgacgttatggacttcattcaagctacaattaaaagattgaagagatcccccgacaaacagatggccgtgctgcccagacgcgagcgaaaccggcaggccgcagccgcaaaccccgagaatagtaggggtaagggacgacggggtcagagaggtaagaaccgtggctgtgttctgaccgcaatacatttgaatgtgactgatctgggactaggctatgagactaaagaagagttgatcttccggtattgtagcggttcttgtgatgccgctgagaccacttacgacaagatcttgaaaaatctttcacggaaccgaagacttgtcagcgacaaggtgggacaggcgtgctgccgcccaatagcttttgacgatgatctgtcttttctagatgataacctagtttatcatatactccgcaagcattctgcgaagcgttgtggatgtatctag

SEQ ID NO: 72769 - DNA, 609 bp, Artificial Sequence
  derived and/or modified sequence
atgcagagccttcctaattccaacggagcagccgcaggcagggatttcaagatgaaactgtgggatgtcgtagccgtgtgtctggtcctgttacacaccgcctcagctttcccacttccagccgcgaatatgccagaagattaccccgatcaatttgacgatgtgatggatttcatacaggcgaccatcaagaggttgaagaggtctccagacaaacagatggctgtgttacctagacgcgaacgcaaccgtcaagccgctgcagcaaatcccgaaaattcccggggtaagggcagacgcgggcagcgtggaaaaaatagaggctgcgtgctgacagccatccacctgaatgtaacggatctgggcctgggctatgaaaccaaagaagagttgatatttcgctactgttctgggagttgtgacgctgccgaaacgacatacgacaaaatcctgaagaatctgagtcgtaaccgtcgacttgtgtcagataaagtgggtcaggcatgttgccgcccaatcgcctttgatgatgatctctctttcttagacgacaatttggtttatcatatacttcgtaaacattctgcaaagcgctgcggctgtatctag

SEQ ID NO: 72770 - DNA, 609 bp, Artificial Sequence
  derived and/or modified sequence
atgcaaagcttacccaactctaatggtgcagccgctggccgagatttcaagatgaaactttgggatgtggtggcagtctgcttagtcttacttcataccgctagcgcctttcccctgcccgcagctaatatgcccgaggactaccccgatcagtttgatgacgttatggattttattcaggcaactattaaacgtttaaagcgtagccccgataagcagatggcagtgctgccaaggagggagcgaaaccggcaggccgcggccgctaaccccgagaattcacgcgggaagggacgtaggggtcagagagggaagaatagagggtgtgtgctgaccgctatccatttaaatgtgactgacctgggattggggtacgaaactaaagaggagttaatctttcgctattgctcgggctcctgcgacgccgctgaaaccacttatgataaaatactgaaaaacttgtcccgcaacagaagactggtgtcagacaaagtaggtcaagcctgctgtagaccaattgcatttgacgatgatctgtcttttttggatgacaacctggtgtaccatatattaagaaaacactccgcgaagcggtgtgggtgcatttag

SEQ ID NO: 72771 - RNA, 609 nt, Artificial Sequence
  derived and/or modified sequence
augcagagccuuccuaauuccaacggagcagccgcaggcagggauuucaagaugaaacugugggaugucguagccgugugucugguccuguuacacaccgccucagcuuucccacuuccagccgcgaauaugccagaagauuaccccgaucaauuugacgaugugauggauuucauacaggcgaccaucaagagguugaagaggucuccagacaaacagauggcuguguuaccuagacgcgaacgcaaccgucaagccgcugcagcaaaucccgaaaauucccgggguaagggcagacgcgggcagcguggaaaaaauagaggcugcgugcugacagccauccaccugaauguaacggaucugggccugggcuaugaaaccaaagaagaguugauauuucgcuacuguucugggaguugugacgcugccgaaacgacauacgacaaaauccugaagaaucugagucguaaccgucgacuugugucagauaaagugggucaggcauguugccgcccaaucgccuuugaugaugaucucucuuucuuagacgacaauuugguuuaucauauacuucguaaacauucugcaaagcgcugcggcuguaucuag

SEQ ID NO: 72772 - RNA, 609 nt, Artificial Sequence
  derived and/or modified sequence
augcaaagcuuacccaacucuaauggugcagccgcuggccgagauuucaagaugaaacuuugggaugugguggcagucugcuuagucuuacuucauaccgcuagcgccuuuccccugcccgcagcuaauaugcccgaggacuaccccgaucaguuugaugacguuauggauuuuauucaggcaacuauuaaacguuuaaagcguagccccgauaagcagauggcagugcugccaaggagggagcgaaaccggcaggccgcggccgcuaaccccgagaauucacgcgggaagggacguaggggucagagagggaagaauagagggugugugcugaccgcuauccauuuaaaugugacugaccugggauugggguacgaaacuaaagaggaguuaaucuuucgcuauugcucgggcuccugcgacgccgcugaaaccacuuaugauaaaauacugaaaaacuugucccgcaacagaagacuggugucagacaaaguaggucaagccugcuguagaccaauugcauuugacgaugaucugucuuuuuuggaugacaaccugguguaccauauauuaagaaaacacuccgcgaagcggugugggugcauuuag

SEQ ID NO: 72773 - protein, 690 aa, Artificial Sequence
  derived and/or modified sequence
MGWGSRCCCPGRLDLLCVLALLGGCLLPVCRTRVYTNHWAVKIAGGFPEANRIASKYGFINIGQIGALKDYYHFYHSRTIKRSVISSRGTHSFISMEPKVEWIQQQVVKKRTKRDYDFSRAQSTYFNDPKWPSMWYMHCSDNTHPCQSDMNIEGAWKRGYTGKNIVVTILDDGIERTHPDLMQNYDALASCDVNGNDLDPMPRYDASNENKHGTRCAGEVAAAANNSHCTVGIAFNAKIGGVRMLDGDVTDMVEAKSVSFNPQHVHIYSASWGPDDDGKTVDGPAPLTRQAFENGVRMGRRGLGSVFVWASGNGGRSKDHCSCDGYTNSIYTISISSTAESGKKPWYLEECSSTLATTYSSGESYDKKIITTDLRQRCTDNHTGTSASAPMAAGIIALALEANPFLTWRDVQHVIVRTSRAGHLNANDWKTNAAGFKVSHLYGFGLMDAEAMVMEAEKWTTVPRQHVCVESTDRQIKTIRPNSAVRSIYKASGCSDNPNRHVNYLEHVVVRITITHPRRGDLAIYLTSPSGTRSQLLANRLFDHSMEGFKNWEFMTIHCWGERAAGDWVLEVYDTPSQLRNFKTPGKLKEWSLVLYGTSVQPYSPTNEFPKVERFRYSRVEDPTDDYGTEDYAGELASSGTQAKKRQLMHHPTTWENRMEWNGMKWNGMKWNGMEWNGMEWNRIESNRIE

SEQ ID NO: 72774 - protein, 690 aa, Artificial Sequence
  derived and/or modified sequence
MGWGSRCCCPGRLDLLCVLALLGGCLLPVCRTRVYTNHWAVKIAGGFPEANRIASKYGFINIGQIGALKDYYHFYHSRTIKRSVISSRGTHSFISMEPKVEWIQQQVVKKRTKRDYDFSRAQSTYFNDPKWPSMWYMHCSDNTHPCQSDMNIEGAWKRGYTGKNIVVTILDDGIERTHPDLMQNYDALASCDVNGNDLDPMPRYDASNENKHGTRCAGEVAAAANNSHCTVGIAFNAKIGGVRMLDGDVTDMVEAKSVSFNPQHVHIYSASWGPDDDGKTVDGPAPLTRQAFENGVRMGRRGLGSVFVWASGNGGRSKDHCSCDGYTNSIYTISISSTAESGKKPWYLEECSSTLATTYSSGESYDKKIITTDLRQRCTDNHTGTSASAPMAAGIIALALEANPFLTWRDVQHVIVRTSRAGHLNANDWKTNAAGFKVSHLYGFGLMDAEAMVMEAEKWTTVPRQHVCVESTDRQIKTIRPNSAVRSIYKASGCSDNPNRHVNYLEHVVVRITITHPRRGDLAIYLTSPSGTRSQLLANRLFDHSMEGFKNWEFMTIHCWGERAAGDWVLEVYDTPSQLRNFKTPGKLKEWSLVLYGTSVQPYSPTNEFPKVERFRYSRVEDPTDDYGTEDYAGELASSGTQAKKRQLMHHPTTWENRMEWNGMKWNGMEWNGMEWNGMESNRIESNRIE

SEQ ID NO: 72775 - protein, 1860 aa, Artificial Sequence
  derived and/or modified sequence
MGWGSRCCCPGRLDLLCVLALLGGCLLPVCRTRVYTNHWAVKIAGGFPEANRIASKYGFINIGQIGALKDYYHFYHSRTIKRSVISSRGTHSFISMEPKVEWIQQQVVKKRTKRDYDFSRAQSTYFNDPKWPSMWYMHCSDNTHPCQSDMNIEGAWKRGYTGKNIVVTILDDGIERTHPDLMQNYDALASCDVNGNDLDPMPRYDASNENKHGTRCAGEVAAAANNSHCTVGIAFNAKIGGVRMLDGDVTDMVEAKSVSFNPQHVHIYSASWGPDDDGKTVDGPAPLTRQAFENGVRMGRRGLGSVFVWASGNGGRSKDHCSCDGYTNSIYTISISSTAESGKKPWYLEECSSTLATTYSSGESYDKKIITTDLRQRCTDNHTGTSASAPMAAGIIALALEANPFLTWRDVQHVIVRTSRAGHLNANDWKTNAAGFKVSHLYGFGLMDAEAMVMEAEKWTTVPRQHVCVESTDRQIKTIRPNSAVRSIYKASGCSDNPNRHVNYLEHVVVRITITHPRRGDLAIYLTSPSGTRSQLLANRLFDHSMEGFKNWEFMTIHCWGERAAGDWVLEVYDTPSQLRNFKTPGKLKEWSLVLYGTSVQPYSPTNEFPKVERFRYSRVEDPTDDYGTEDYAGPCDPECSEVGCDGPGPDHCNDCLHYYYKLKNNTRICVSSCPPGHYHADKKRCRKCAPNCESCFGSHGDQCMSCKYGYFLNEETNSCVTHCPDGSYQDTKKNLCRKCSENCKTCTEFHNCTECRDGLSLQGSRCSVSCEDGRYFNGQDCQPCHRFCATCAGAGADGCINCTEGYFMEDGRCVQSCSISYYFDHSSENGYKSCKKCDISCLTCNGPGFKNCTSCPSGYLLDLGMCQMGAICKDGEYVDEHGHCQTCEASCAKCQGPTQEDCTTCPMTRIFDDGRCVSNCPSWKFEFENQCHPCHHTCQRCQGSGPTHCTSCGADNYGREHFLYQGECGDSCPEGHYATEGNTCLPCPDNCELCHSVHVCTRCMKGYFIAPTNHTCQKLECGQGEVQDPDYEECVPCEEGCLGCSLDDPGTCTSCAMGYYRFDHHCYKTCPEKTYSEEVECKACDSNCGSCDQNGCYWCEEGFFLLGGSCVRKCGPGFYGDQEMGECESCHRACETCTGPGHDECSSCQEGLQLLRGMCVHATKTQEEGKFWNDILRKLQPCHSSCKTCNGSATLCTSCPKGAYLLAQACVSSCPQGTWPSVRSGSCENCTEACAICSGADLCKKCQMQPGHPLFLHEGRCYSKCPEGSYAEDGICERCSSPCRTCEGNATNCHSCEGGHVLHHGVCQENCPERHVAVKGVCKHCPEMCQDCIHEKTCKECTPEFFLHDDMCHQSCPRGFYADSRHCVPCHKDCLECSGPKADDCELCLESSWVLYDGLCLEECPAGTYYEKETKECRDCHKSCLTCSSSGTCTTCQKGLIMNPRGSCMANEKCSPSEYWDEDAPGCKPCHVKCFHCMGPAEDQCQTCPMNSLLLNTTCVKDCPEGYYADEDSNRCAHCHSSCRTCEGRHSRQCHSCRPGWFQLGKECLLQCREGYYADNSTGRCERCNRSCKGCQGPRPTDCLSCDRFFFLLRSKGECHRSCPDHYYVEQSTQTCERCHPTCDQCKGKGALNCLSCVWSYHLMGGICTSDCLVGEYRVGEGEKFNCEKCHESCMECKGPGAKNCTLCPANLVLHMDDSHCLHCCNTSDPPSAQECCDCQDTTDECILRTSKVRPATEHFKTALFITSSMMLVLLLGAAVVVWKKSRGRVQPAAKAGYEKLADPNKSYSSYKSSYRESTSFEEDQVIEYRDRDYDEDDDDDIVYMGQDGTVYRKFKYGLLDDDDIDELEYDDESYSYYQ

SEQ ID NO: 72776 - DNA, 5583 bp, Artificial Sequence
  derived and/or modified sequence
atgggatgggggtctcggtgttgctgtcccggaaggttagaccttctgtgcgtactggccttactcggcggctgcctcctcccagtctgtcgtacacgggtatacacaaatcactgggccgtgaagattgctggcggctttcccgaggccaatcggatcgcaagtaagtacggctttattaatatagggcagataggagctctaaaagactattatcatttctatcattctcggacaataaagcggtccgtgatctcctcaagaggcacacacagcttcatctcaatggagccaaaggtggaatggattcaacagcaggtcgtgaagaagcgcactaagagagactacgatttcagtagggctcagagtacttattttaacgaccctaagtggccctccatgtggtacatgcactgcagtgataacacccatccttgccagagcgacatgaatatcgaaggggcttggaaacggggctacacaggcaaaaatatcgtcgtgacaattctcgatgacgggattgaaaggacccaccctgacctgatgcaaaactacgacgcactggccagctgcgacgtcaacggcaatgatctagatccgatgcctcgctacgatgctagtaacgaaaacaaacatggaacccgctgtgctggagaagtggccgcagccgcaaacaatagtcactgcacagtgggcatcgcgttcaacgccaaaatcggtggcgtgcggatgctcgatggggacgttacagatatggtggaagcaaagtctgtgtcttttaatccccaacacgttcatatttatagtgcatcatggggccccgatgatgacgggaagacagtcgatgggcctgctcctctcactcggcaggcattcgagaacggtgtgcggatgggcaggcggggattaggatccgtctttgtgtgggcatcaggcaacggtggccgttccaaggatcactgttcgtgcgatggatacaccaactcaatttatactatttcaattagtagcacagcggagtccgggaagaagccatggtatttggaggagtgtagtagcacgcttgcaacgacttactcctccggcgaatcatacgataagaaaatcatcactacggatttaagacaaaggtgcacggacaaccacacaggcacatccgcgagtgccccgatggccgctggaattatcgcccttgccctggaggctaatccgtttttgacttggagagatgtccagcatgttattgtgagaacctcgagggcgggccatctgaatgctaacgattggaagacaaatgcagcaggcttcaaggttagccatctgtacggcttcggactcatggatgcagaagctatggtgatggaggcggagaagtggacgacagtgccccggcagcacgtctgcgtggaatcaactgatcgccagattaaaaccataaggcctaatagcgcagtaaggtctatctacaaagcatctggttgctctgataaccccaatcgacacgtgaactacctcgaacacgtggtggtgcgcatcactataacccaccctcgtcgcggcgatctagctatctatctgaccagtccgtctggtactcggtcccagctgctggccaatcgattgtttgatcattccatggagggctttaaaaactgggaattcatgactattcattgttggggagaacgagcagcaggcgactgggtgctcgaggtgtacgacaccccctcccagctgcgcaactttaagacaccagggaaacttaaggaatggtctctggtgctctatggcacctccgttcagccttactctccgaccaatgaatttccaaaggtcgagcgtttccggtacagccgagtagaagaccctactgatgactacgggactgaggattacgccggaccatgtgatccagagtgttctgaggtgggttgcgatgggcccggcccagaccattgtaatgactgcctacattactactataagcttaagaataatactcgaatctgtgtgtccagttgtccacccggccactaccacgccgataaaaaacggtgtcgcaagtgtgcccccaactgtgagtcatgtttcggatcgcatggagaccagtgtatgagttgcaaatacggttacttcctaaatgaagaaactaatagctgcgttacacactgcccagacggctcgtaccaggacaccaagaaaaatttgtgcagaaagtgcagcgagaattgcaaaacctgtacggagttccacaattgtactgaatgcagggatgggctcagtctgcagggctcacggtgctcagtaagctgtgaggatgggcgctactttaacggccaggactgtcagccctgtcaccggttctgcgcgacatgcgcgggagctggagccgatggctgtatcaattgcacagaaggttattttatggaggacgggagatgtgtgcagtcctgttctatctcctattattttgaccattctagcgagaatgggtataaatcttgcaaaaagtgcgatattagttgtctcacttgcaacggtcctggcttcaaaaactgtacctcctgtccttctggatacttgctggacctgggcatgtgtcagatgggcgctatctgtaaagacggagagtacgtagacgagcacggacattgtcagacatgtgaggcctcatgtgccaagtgccagggccctacccaggaggattgcaccacatgccctatgactagaatcttcgacgacggccggtgcgttagtaactgccctagctggaagttcgaattcgagaaccaatgccacccatgccatcacacctgtcagcgatgtcaggggtcagggccgactcactgtaccagctgtggggcggataactacggtcgggaacacttcctgtaccaaggcgaatgcggcgatagttgccctgagggccactatgccactgagggcaacacatgcctcccatgccccgacaactgtgaattgtgccattccgtgcacgtgtgtactcgatgtatgaaaggctacttcatcgcacccactaatcacacctgccagaaattggagtgtggccagggtgaagtccaggaccccgactacgaggagtgcgtcccttgcgaggaaggctgtctggggtgctccttggatgacccagggacatgcactagctgtgcaatggggtactacaggtttgaccatcactgctacaagacttgccccgagaaaacatacagtgaggaggtggagtgcaaggcttgtgactcaaattgtggctcatgcgatcaaaacggttgttactggtgcgaagagggtttctttctcctgggtggatcgtgtgtgaggaagtgcgggcccggattctatggcgatcaggagatgggagagtgcgagagttgccaccgggcctgcgaaacatgcaccgggcctggacatgacgaatgcagtagttgtcaggaagggctgcagctgctgcggggtatgtgcgtgcacgccactaagacccaggaagaaggcaagttctggaacgatatactcagaaagcttcaaccttgtcactccagttgcaagacctgtaatgggtccgccacactatgtacatcgtgccccaagggtgcataccttctcgcccaagcttgcgtgagcagctgtcctcagggaacatggccctctgtacggagtgggagttgcgaaaactgtaccgaggcgtgtgccatctgttcaggggctgacctttgcaagaagtgccagatgcaaccaggtcaccccctcttcctccacgagggcagatgttattcgaaatgtccagaggggtcctatgctgaggacggaatctgcgagagatgctcctcaccatgtagaacctgtgagggtaatgcaaccaactgccacagctgtgaaggggggcatgtattgcatcatggcgtgtgtcaggaaaattgtcccgagcggcacgtagcggttaaaggcgtgtgtaagcactgtcccgagatgtgtcaagactgcatacatgagaaaacctgtaaagaatgcacacccgagttctttctgcacgacgatatgtgtcatcagtcatgccctagaggcttttacgccgattccagacactgtgtgccatgccacaaagactgtctagagtgcagtggccccaaagctgatgattgcgagctctgtctggagtcatcttgggtcctctatgacggtctgtgtttggaggagtgtccagccggaacctactacgagaaagagacaaaggaatgccgggattgtcacaagtcatgtttaacttgctcaagcagcggcacctgtactacatgccagaagggacttatcatgaaccccagggggtcctgtatggcaaatgagaagtgttcgccaagcgaatattgggacgaggacgcccccggttgtaaaccctgccacgttaagtgctttcactgcatgggtcctgccgaggaccaatgtcagacctgtcctatgaattccctcctgttgaacaccacctgcgtgaaggactgccctgaggggtactacgctgacgaagattccaaccgatgtgcccactgccatagctcctgtaggacctgcgagggtagacattccaggcagtgtcacagctgcaggcccgggtggttccagttgggtaaggaatgcctcttacaatgtagggaggggtactatgccgacaactccacgggcaggtgtgaaagatgcaaccggtcctgcaagggatgtcaagggccccggcctacagattgtttgtcttgcgacagattttttttcctcttgagatcaaaaggtgaatgtcatcgctcatgtccagaccactattacgtggagcagtccactcagacttgcgagcgctgtcatcccacatgcgatcagtgcaaaggcaagggcgcgttgaattgcctttcttgcgtgtggtcgtaccatctcatgggaggcatctgcacgtccgattgccttgtcggagaatatagagtgggcgagggagaaaagttcaactgcgaaaaatgtcacgagagctgcatggagtgcaagggaccaggagctaagaattgcaccctgtgtccggcaaatctggtgctgcacatggacgattctcattgtctgcattgttgcaatacaagcgatcccccgagcgcccaggagtgctgcgactgccaagacactacagacgaatgcatactgcgtaccagcaaagtgcgcccagcaaccgagcacttcaagactgctctttttatcacctcttcaatgatgctggtgctcctcctgggcgctgccgtggtggtttggaaaaagtctcgcgggagggtgcagcctgccgccaaagcaggttacgagaaacttgccgatccaaataagtcctactcctcttacaaaagctcctatagggaaagcactagtttcgaagaagatcaggtaattgagtaccgggacagggactatgacgaagacgacgacgatgacatcgtttacatgggacaggatggcacggtctatagaaaattcaaatatggcctccttgacgatgacgatatcgacgaactggagtatgatgatgagtcgtactcctactaccagtag

SEQ ID NO: 72777 - DNA, 5583 bp, Artificial Sequence
  derived and/or modified sequence
atgggctggggcagccgctgctgctgccccggccgcctggacctgctgtgtgtgctggccctgctgggcggctgcctgctgcctgtgtgcaggaccagggtgtacaccaaccactgggccgtgaagattgctgggggcttccctgaggccaacagaattgccagcaaatatggcttcatcaacatcggccagattggagccctgaaggactactaccacttctaccacagcaggaccatcaagaggagcgtcatcagcagccggggcacccacagcttcatctccatggagcccaaggtggagtggatccagcagcaggtggtgaagaagaggaccaagagggactatgacttcagccgggcccagagcacctacttcaatgaccccaagtggcccagcatgtggtacatgcactgcagcgacaacacccacccctgccagagcgacatgaacatcgagggcgcctggaagaggggctacacaggcaagaacatcgtggtgaccatcctggatgatggcatcgagaggacccacccagacctgatgcagaactatgatgccctggccagctgtgatgtgaatggaaatgacctggaccccatgcccaggtatgatgccagcaatgaaaacaagcacggcacccgctgtgccggggaggtggccgctgctgccaacaacagccactgcaccgtgggcatcgccttcaatgccaagattggaggagtgaggatgctggatggagatgtgacagacatggtggaggccaagtctgtgtccttcaacccccagcacgtgcacatctacagcgcctcctggggcccagatgatgatggcaagacagtggatggccctgcccccctgacccggcaggcctttgaaaatggagtgaggatgggccggcggggcctgggctctgtgtttgtgtgggccagcggaaatggaggccgcagcaaggaccactgcagctgtgatggctacaccaacagcatctacaccatcagcatcagcagcacagctgagagcggcaagaagccctggtacctggaggagtgcagcagcaccctggccaccacctacagcagtggagagagctatgacaagaagatcatcaccacagacctgcggcagcgctgcacagacaaccacacaggcaccagcgccagcgcccccatggctgctggcatcatcgccctggccctggaggccaaccccttcctgacctggagagatgtgcagcacgtgattgtgaggaccagcagagctggccacctgaatgccaatgactggaagaccaatgctgctggcttcaaggtgagccacctgtatggcttcggcctgatggatgctgaggccatggtgatggaggccgagaagtggaccaccgtgccccggcagcacgtgtgtgtggagagcacagaccggcagatcaagaccatccggcccaacagcgctgtgcgcagcatctacaaggccagcggctgcagcgacaaccccaacagacatgtgaactacctggagcacgtggtggtgcgcatcaccatcacccacccccggcggggggacctggccatctacctgaccagccccagcggcaccaggagccagctgctggccaacagactctttgaccacagcatggagggcttcaagaactgggagttcatgaccatccactgctggggcgagagagctgctggggactgggtgctggaggtgtatgacacccccagccagctgaggaacttcaagaccccaggcaagctgaaggagtggagcctggtgctgtatggcacctctgtgcagccctacagccccaccaatgagttccccaaggtggagcgcttccgctacagccgggtggaggaccccacagatgattatggaacagaggactatgccggcccctgtgaccctgaatgttctgaggtgggctgtgatggccctggccctgaccactgcaatgactgcctgcactactactacaagctgaagaacaacacccgcatctgtgtgagcagctgccccccaggccactaccacgccgacaagaagcgctgcaggaaatgtgcccccaactgtgagagctgcttcggcagccacggggaccagtgcatgagctgcaagtatggctacttcctgaatgaggagaccaacagctgtgtgacccactgcccagatggcagctaccaggacaccaagaagaacctgtgcaggaaatgttctgagaactgcaagacctgcacagagttccacaactgcacagaatgtagagatggcctgagcctgcagggcagccgctgcagcgtgtcctgtgaagatggccgctacttcaacggccaggactgccagccctgccaccgcttctgtgccacctgtgccggggccggggctgatggctgcatcaactgcacagagggctacttcatggaggatggccgctgtgtgcagagctgcagcatctcctactactttgaccacagcagtgaaaatggctacaagagctgcaagaagtgtgacatcagctgcctgacctgcaatggacctggcttcaagaactgcaccagctgccccagcggctacctgctggacctgggcatgtgccagatgggcgccatctgcaaggatggagaatatgtggatgagcacggccactgccagacctgtgaggccagctgtgccaagtgccagggccccacccaggaggactgcaccacctgccccatgacccgcatctttgatgatggccgctgtgtgagcaactgccccagctggaagtttgaatttgagaaccagtgccacccctgccaccacacctgccagcgctgccagggcagcggccccacccactgcaccagctgtggggctgacaactacggccgggagcacttcctgtaccagggagaatgtggggacagctgcccagagggccactacgccacagagggcaacacctgcctgccctgcccagacaactgtgagctgtgccacagcgtgcacgtgtgcacccgctgcatgaagggctacttcatcgcccccaccaaccacacctgccagaagctggagtgtggccagggcgaggtgcaggaccctgactatgaggagtgtgtgccctgtgaggagggctgcctgggctgcagcctggatgaccccggcacctgcaccagctgtgccatgggctactacagatttgaccaccactgctacaagacctgcccagagaagacctacagcgaggaggtggagtgcaaggcctgtgacagcaactgtggcagctgtgaccagaatggctgctactggtgtgaggagggcttcttcctgctgggcggcagctgtgtgaggaaatgtggccctggcttctacggggaccaggagatgggagaatgtgagagctgccaccgggcctgtgagacctgcaccggccctggccatgatgaatgtagcagctgccaggagggcctgcagctgctgcggggcatgtgtgtgcacgccaccaagacccaggaggagggcaagttctggaatgacatcctgaggaagctgcagccctgccacagcagctgcaagacctgcaatggaagtgccaccctgtgcaccagctgccccaagggggcctacctgctggcccaggcctgtgtgagcagctgcccccagggcacctggcccagcgtgcgcagcggcagctgtgagaactgcacagaggcctgtgccatctgcagcggggctgacctgtgcaagaagtgccagatgcagcccggccaccccctcttcctgcacgagggccgctgctacagcaaatgtcctgagggcagctatgcagaagatggcatctgtgagcgctgcagcagcccctgcaggacctgtgagggcaatgccaccaactgccacagctgtgagggcggccacgtgctgcaccacggcgtgtgccaggagaactgcccagagcggcacgtggccgtgaagggcgtgtgcaagcactgcccagagatgtgccaggactgcatccacgagaagacctgcaaggaatgtaccccagagttcttcctgcatgatgacatgtgccaccagagctgcccccggggcttctatgctgacagccgccactgtgtgccctgccacaaggactgcctggagtgcagcggccccaaggcagatgactgtgagctgtgcctggagagctcctgggtgctgtatgatggcctgtgcctggaggagtgcccagctggcacctactatgagaaggagaccaaggaatgtcgggactgccacaagagctgcctgacctgcagcagcagcggcacctgcaccacctgccagaagggcctcatcatgaacccccggggcagctgcatggccaatgagaagtgcagccccagcgagtactgggatgaagatgcccctggctgcaagccctgccacgtgaagtgcttccactgcatgggccctgctgaggaccagtgccagacctgccccatgaacagcctgctgctgaacaccacctgtgtgaaggactgcccagagggctactatgcagatgaggacagcaacagatgtgcccactgccacagcagctgcaggacctgtgagggccgccacagccggcagtgccacagctgccggcccggctggttccagctgggcaaggagtgcctgctgcagtgccgggagggctactatgctgacaacagcacaggccgctgtgagcgctgcaacagaagctgcaagggctgccagggcccccggcccacagactgcctgagctgtgaccgcttcttcttcctgctgcggagcaaaggagagtgccacaggagctgcccagaccactactacgtggagcagagcacccagacctgtgagcgctgccaccccacctgtgaccagtgcaagggcaagggggccctgaactgcctgagctgtgtgtggagctaccacctgatgggcggcatctgcaccagtgactgcctggtgggggagtacagagtgggggagggggagaagttcaactgtgagaagtgccacgagagctgcatggagtgcaagggccctggggccaagaactgcaccctgtgcccagccaacctggtgctgcacatggatgacagccactgcctgcactgctgcaacaccagtgaccccccatctgcccaggagtgctgtgactgccaggacaccacagatgagtgcatcctgcggaccagcaaggtgcggcctgccacagagcacttcaagacagccctcttcatcaccagctccatgatgctggtgctgctgctgggcgctgctgtggtggtgtggaagaagagccggggccgggtgcagcctgctgccaaggccggctatgagaagctggccgaccccaacaagagctacagcagctacaagagcagctaccgggagagcaccagctttgaggaggaccaggtgattgagtacagagaccgggactatgatgaagatgatgatgatgacatcgtgtacatgggccaggacggcaccgtgtacaggaagttcaagtatggcctgctggatgatgatgacattgatgagctggagtatgatgatgagagctacagctactaccagtag

SEQ ID NO: 72778 - DNA, 5583 bp, Artificial Sequence
  derived and/or modified sequence
atgggctggggcagccggtgctgctgccccggccggctggacctgctgtgtgtcttagctctcttggggggctgcttgctgcctgtatgtcgcacacgtgtatatacgaaccactgggcagtgaagatcgcagggggcttcccagaagccaaccgaatcgcttctaaatacgggttcattaacatcgggcaaataggcgctttaaaagattactaccatttttatcatagtcggaccattaagagaagcgtcatcagcagcaggggaacgcactccttcatctcaatggagcctaaagtagagtggattcagcaacaggtggtgaagaaacggactaaacgcgactacgacttcagtagggcacaatctacctacttcaatgatcctaaatggcccagtatgtggtacatgcattgtagtgataacactcatccctgtcagtccgatatgaatattgaaggtgcttggaaaagaggctacacgggcaagaacatcgtggtgaccatccttgacgacggcattgaaaggacacacccggatctgatgcagaattacgacgctttggcctcttgcgatgttaacggcaacgatctggacccaatgcctaggtacgatgccagtaatgagaataaacacggcacacggtgtgccggagaggttgcagcagctgcgaataactcacattgcactgtggggattgccttcaatgctaaaattggaggtgtgaggatgctggatggggatgttacagatatggtcgaggcaaaatctgtctcctttaatccccaacacgtccacatttactccgcatcttggggccctgacgacgatggtaagactgtggacggtcccgcccccctgaccagacaggccttcgaaaatggggtcagaatggggagacgaggtcttggcagtgtgttcgtttgggctagcggcaatggcggacgctccaaagaccattgttcctgcgatggctatacgaattcaatatacacgattagtatttccagtacagcagaatctggcaagaagccttggtacctggaagagtgctcatccaccctcgccaccacctacagcagcggcgaaagctatgataagaaaataattacaaccgacctgcggcaacgttgcaccgataaccatacaggtacctctgcaagcgcccctatggcggccgggattatcgcactggccttggaggcgaatcctttcctgacgtggagagatgttcaacacgtgattgtgcgcactagccgtgccgggcacctgaacgccaatgattggaaaacaaacgcggcaggcttcaaggtgagccacctgtacggtttcggtctgatggacgcagaggccatggttatggaagctgaaaagtggacgacagtgccacgtcagcacgtgtgtgttgaatcaaccgacaggcagatcaagaccataaggcccaacagtgctgtacggagtatctataaagcctctggatgctctgacaaccccaatagacatgtgaactacctggagcatgttgtagtcagaatcactatcacccatccacgccgcggagacctggctatttacctcacttccccctctggcacacggtctcagctgttggctaatagattgttcgaccactccatggagggtttcaaaaactgggagtttatgaccattcattgctggggggagcgtgctgcaggtgattgggtgcttgaggtctatgatactccatcacagctgcggaatttcaaaacccccgggaagctgaaggaatggtcgctggtgctgtatgggacttcagtgcagccatacagccccacgaatgagtttcccaaggttgaacgctttagatattccagagtggaggaccctacagatgattatgggaccgaggactacgccggtccttgtgatccagagtgcagcgaagtcggctgcgacggcccaggccccgatcattgcaacgactgcctacattattactacaaactgaagaacaatactcggatatgcgtgagctcttgtcctcctgggcattaccatgccgacaagaagcgctgtcgtaagtgcgctcctaactgtgagtcctgctttgggtctcacggcgaccagtgcatgagttgcaagtacggatatttcctaaatgaagagacaaactcatgtgtgactcactgtcctgacgggtcttaccaggacaccaagaaaaatctgtgtcgaaagtgctccgaaaactgtaaaacatgtacagagttccacaactgcacagagtgccgcgacggtttatcactccagggaagtaggtgctctgttagttgtgaagatggacgttacttcaacggacaggattgccagccatgtcataggttttgcgctacttgtgctggagccggagctgacggctgcattaattgcacggaggggtactttatggaagatggccggtgcgtccaatcttgctcaatttcatattactttgatcactcaagcgagaatgggtacaaaagttgtaagaagtgtgatattagctgcctgacatgtaacggaccggggttcaaaaactgtacctcctgcccctccgggtacctccttgacctcggaatgtgtcagatgggtgcgatttgtaaggatggagagtacgtggacgagcatggtcactgtcagacttgtgaggccagttgcgcaaaatgtcagggcccaacccaggaggactgtaccacctgccctatgactagaatcttcgacgacgggcggtgtgtgagcaattgcccatcctggaaattcgaattcgaaaaccagtgtcacccttgtcaccatacgtgccagcgatgtcaggggtccggaccgactcattgcacatcttgcggcgccgataactacggacgggagcattttctgtaccagggcgagtgtggagattcctgtccggaggggcattacgcaacagaggggaatacctgcctgccttgtccagataattgcgaactctgccattccgttcacgtgtgcacacggtgcatgaaaggttatttcattgcacctactaatcacacctgccagaaactggagtgtgggcaaggtgaggtgcaggatcctgactacgaggaatgcgtgccctgcgaagaaggctgtttaggctgcagtcttgatgacccagggacctgtacctcttgtgccatggggtattaccgctttgaccaccactgctacaaaacgtgccccgagaaaacatacagtgaggaggtcgaatgcaaagcctgtgactctaactgtggcagctgcgatcagaatggatgctactggtgcgaagaaggctttttccttctgggaggtagctgcgtgcgcaagtgtggaccgggtttttacggcgaccaggagatgggtgaatgcgaaagctgtcatagagcttgtgaaacgtgtaccggtcccggccacgacgagtgcagtagctgccaggaggggctgcaactccttcggggcatgtgcgttcatgccactaaaacccaggaggaagggaaattctggaacgacattttgcggaagctacaaccctgccatagtagctgcaagacctgcaacgggagcgccactctgtgcacgtcttgtcccaagggtgcttatctgctggctcaggcttgcgtatcgagctgcccacagggcacttggcctagtgtgaggtccggatcctgcgagaactgcacagaagcttgtgccatctgtagcggtgctgatctatgtaaaaagtgccagatgcagcctggacacccgctgtttctccacgagggtagatgttacagtaaatgtcctgagggctcctacgccgaagacggcatttgcgagcgttgcagttctccctgcagaacttgcgaagggaatgcgaccaattgccacagctgcgagggtggccatgtgctgcatcacggcgtctgtcaggagaactgccctgagagacacgttgcagttaagggagtgtgtaaacactgccccgaaatgtgccaagactgcatccacgaaaaaacttgtaaggagtgtactcccgaatttttcttgcacgatgatatgtgtcatcagagttgtccccgggggttctatgccgacagcagacactgcgtgccatgtcataaagattgtctggagtgtagcggcccgaaagctgacgactgtgagctgtgtctcgagagctcctgggtcctctacgatgggctctgcctggaagaatgccctgccgggacctactacgagaaagagacaaaggagtgccgggattgtcataagagctgcctcacatgttccagcagcgggacatgcactacgtgccagaagggcttgataatgaatcctagaggcagttgcatggccaatgaaaaatgttctccgagcgagtactgggacgaggacgcccctggctgcaagccctgccatgttaaatgttttcattgtatggggcctgcagaagatcagtgccagacctgcccaatgaactcactgttgttaaataccacatgtgtcaaggactgtccagaggggtactatgccgacgaagactccaaccgctgcgctcactgccactcctcatgtcgaacctgcgaaggaaggcactcgcgccagtgccattcctgcaggccaggatggtttcagttgggcaaggagtgcctgttgcaatgtcgtgagggctattatgcggataacagcactggacggtgcgagagatgtaatcgttcttgtaaggggtgccaaggcccgcgccccaccgattgcctttcatgcgaccgattcttcttcctgttgcgctccaaaggagaatgccataggagctgccccgatcactattacgtggagcagagtacccaaacgtgtgaacggtgccaccctacatgtgatcagtgcaagggaaaaggagccttgaactgcctttcgtgcgtgtggtcatatcacttaatgggcggaatttgcacaagcgactgtttggtgggggaatatcgggtgggcgaaggtgaaaaattcaactgcgagaagtgccatgagtcatgtatggagtgtaaggggcccggtgccaagaattgtacactctgtccagcaaacctcgtgttgcatatggacgattcacactgtcttcactgttgtaacacctcagaccctccatcagctcaggagtgttgcgattgtcaggacacaaccgacgaatgcatcttgaggactagcaaagtgaggcctgcaacagaacatttcaagaccgcccttttcatcacttctagtatgatgctagtgcttctattgggggccgcggtcgtggtgtggaaaaagtcccgcggtcgtgtgcaaccagccgcaaaggcaggctatgagaagctggcagatcctaacaagtcgtattcaagctataagtcttcatatcgcgaatctactagcttcgaggaggaccaggtgatcgaatacagggaccgagattacgacgaggacgacgacgatgacatcgtgtacatgggacaagacggcaccgtatatcgcaagtttaagtatggccttcttgacgatgacgacatcgacgagctggaatacgatgacgagtcctatagctactatcagtag

SEQ ID NO: 72779 - DNA, 5582 bp, Artificial Sequence
  derived and/or modified sequence
atgggatggggcagtcggtgctgctgtccaggcagactcgatctgctgtgcgtactcgcgctcctcggaggttgcctgcttcctgtgtgcagaactagagtgtataccaatcattgggccgttaagatcgccggagggttcccagaggcgaataggattgcatcaaagtatggcttcattaacatcgggcagatcggagcactgaaggattactaccacttttaccacagcagaaccattaagcgatctgtgatctcatcaaggggcacccactcctttataagcatggaacctaaagtcgaatggattcagcagcaggttgtgaagaaacggaccaagagagactacgatttctcacgcgctcaaagcacgtattttaatgatccgaagtggccctccatgtggtacatgcactgctccgataatacccacccatgccagagcgacatgaatatcgagggcgcatggaaacgaggatataccggtaagaatatcgtcgtaactatcctggatgacggaatcgagcgaacacatccagacctgatgcaaaactatgatgctctagcaagttgcgacgttaacggcaacgatctcgatcccatgcctcgctacgatgccagtaacgagaacaagcatggaaccaggtgcgccggagaagtggctgcagccgcaaacaatagccactgcacagtgggaatagcctttaacgccaagatcggcggtgtgagaatgctcgacggggacgttaccgacatggttgaagccaaaagcgtctcttttaacccccagcacgtgcatatctactcggcctcctggggtcccgacgatgacgggaagacggtcgacgggccagccccactcacaagacaggcttttgaaaacggcgtacgtatggggaggagaggtctcggttcagtcttcgtctgggcctctggcaatggcggaagatctaaagaccactgcagttgcgatggttacacgaattcgatttacactatctccatctcgagtactgccgaatcagggaagaagccctggtatctggaggaatgcagtagcacactggctaccacttactccagtggagaatcgtacgacaaaaaaatcatcactaccgatctgagacagagatgcacggacaatcacacgggaactagcgccagtgcaccgatggccgcaggaattatcgcactcgccctcgaggcgaaccctttcctgacgtggagggatgtgcagcacgtgatcgtgagaacatcacgcgctgggcacctgaatgcaaacgactggaaaacaaatgcggctggctttaaagtgtcccacctgtatgggtttggcctgatggatgcagaggctatggtcatggaggccgaaaagtggactaccgtccctagacaacatgtatgcgtggagtcaacagacagacagataaaaactatcagacctaattccgctgtgcggagcatctataaggccagcgggtgtagtgataacccaaacagacacgtcaattatctcgaacacgtcgtggtcagaatcaccatcactcatccacggcgaggagatctggcaatctatttaactagtccttcaggtactcggagccaactactcgcaaacagactttttgatcattctatggaaggctttaaaaattgggaattcatgactatacactgctggggtgagcgagccgctggagactgggtgctggaggtatacgatacccctagtcaactgcgcaactttaaaacacccggtaagttgaaagaatggagtcttgtgctgtacggtacgtctgtacaaccatactcacccaccaatgagttccccaaagttgaaaggttcaggtattcacgggttgaggaccctacagatgactatggaacagaagattacgccggtccgtgtgaccccgagtgttctgaagtgggatgtgacggcccagggcctgaccactgtaatgactgcctacactactattataagctgaagaataatacaaggatctgtgtgtccagctgcccaccaggacattaccatgcagacaaaaagcggtgcaggaagtgcgcccctaactgtgagagctgtttcgggtctcatggggaccagtgtatgtcttgcaagtatggatactttctgaatgaagaaaccaacagttgtgtaacacattgtcccgacggaagctaccaggataccaaaaagaatctctgtagaaagtgttcagagaactgcaagacctgtaccgagtttcacaattgcacagaatgcagggacggtttgtcccttcagggaagtaggtgctccgtgtcttgtgaagacggccgttactttaatggccaggattgtcagccctgccatcggttctgcgctacttgcgccggagcaggtgccgatgggtgtatcaattgcactgagggctacttcatggaggatggcagatgtgttcagtcttgcagcatatcttactattttgaccacagcagcgagaacggatataaatcgtgtaagaagtgcgatatttcctgcctgacgtgcaatggacccggattcaaaaattgtaccagttgcccgtcgggttatctgctggatcttggtatgtgccaaatgggggcaatctgtaaagatggagagtacgtggatgagcacggtcactgccagacttgtgaggcctcctgcgcaaagtgtcaaggccctactcaagaggactgtacgacatgtccgatgacccgaattttcgacgacggacgatgtgtttctaattgccctagctggaagttcgaattcgaaaaccagtgtcacccttgtcaccacacctgtcagcgctgccagggatctgggcctactcattgcacttcatgcggcgcagacaattatggtcgagaacatttcctgtatcagggcgagtgcggggattcatgcccagaaggccactatgccacagaaggcaacacctgcttgccttgccctgacaattgtgaattgtgccatagcgtgcacgtgtgcactcggtgcatgaagggctatttcatcgcccctacgaaccacacctgtcagaaattggagtgcggacagggcgaggtccaagatcctgactacgaggaatgcgtgccttgtgaagaggggtgtttagggtgtagtttggacgatccaggtacttgtacaagctgtgctatgggctactacagatttgaccaccattgctacaaaacctgtccggaaaaaacatacagtgaagaggttgaatgtaaagcctgcgactcaaattgtggctcatgtgatcagaatggctgctattggtgtgaggaaggcttttttcttctcggcggtagctgtgttcgcaaatgcggtccgggattctatggggatcaggagatgggcgagtgcgagtcctgccacagagcctgcgagacgtgcactggaccgggacacgatgagtgttctagctgccaggaggggctccagttattgaggggtatgtgcgtgcacgcaacgaagacgcaggaggaaggcaaattttggaatgatatcctgagaaagctgcaaccatgccacagttcttgtaagacgtgtaacgggtccgctacgctgtgcacaagctgcccgaaaggagcgtatctgctggcccaggcatgtgtttcctcctgtccacaagggacctggcccagtgtccgctcaggctcctgcgaaaactgtacagaggcttgcgcaatttgttccggtgccgacctgtgcaagaagtgccagatgcaacctgggcatcctctgtttctgcatgaaggaagatgttattcgaaatgcccagaaggctcctacgctgaggacgggatatgtgagaggtgttcctcaccctgccgcacttgcgagggtaatgccaccaactgtcatagctgtgagggtgggcatgtactacaccatggtgtgtgccaagagaactgccctgagcgacacgtcgcggtcaaaggtgtctgtaaacactgtcctgaaatgtgccaggactgcatccacgagaagacttgcaaagaatgtacacccgaattctttctgcatgacgacatgtgccatcaaagttgtccgagggggttttacgccgattccaggcactgtgtgccttgccataaggactgcctggagtgcagtggacctaaagccgatgattgtgagttgtgtcttgaatccagctgggtgctgtacgatggactgtgcctggaggagtgcccagcaggaacctactatgaaaaagaaactaaggagtgccgggactgtcataagtcatgcctgacctgcagcagcagtgggacatgcaccacctgtcaaaaaggcctgatcatgaacccgaggggtagctgcatggctaatgaaaagtgttccccctctgagtattgggatgaagacgccccaggctgtaagccttgccacgtcaaatgtttccactgcatgggcccagccgaggatcagtgtcagacttgtcccatgaactccctgctgctgaatacaacctgcgtgaaggattgcccagagggatactacgccgacgaagactctaatcgatgtgcccactgtcattctagctgcagaacatgtgagggcagacattcccggcagtgccatagctgtaggccgggttggttccaattggggaaggagtgtctcctgcagtgccgagagggttactatgccgacaactctacaggacggtgcgagcgctgcaaccgaagttgtaaaggctgccagggaccacgtcccacggattgtcttagctgcgaccgcttttttttcttactccggagcaagggagaatgtcacaggtcctgccccgatcattattatgtcgagcagagcacccagacctgcgagaggtgccatccaacatgtgaccagtgtaagggaaagggagctcttaattgtctgtcatgcgtgtggagctatcacctgatgggaggaatttgtaccagtgactgtctggtaggcgaataccgtgtgggcgagggcgagaagtttaattgtgaaaaatgccatgagagctgtatggagtgcaaaggccctggggcaaaaaattgcacactctgccctgcaaatttggtgcttcacatggatgattctcactgtctgcattgctgcaacactagtgatccccctagtgctcaagaatgctgtgattgtcaggacaccactgatgaatgtatcctgaggacgtccaaggtccgacctgccactgagcacttcaaaacagcactgttcatcacttccagcatgatgctggtcctcctcctgggggctgctgtggtggtgtggaagaaatccaggggaagggtccaacccgctgctaaggccggttacgaaaaactggcagatcccaataaatcttactccagctacaaatccagctatagagagtccacctcttttgaggaagaccaggtgatagagtatagagaccgggattacgatgaagatgatgacgatgacatcgtttacatggggcaagacggaaccgtgtacagaaagttcaaatatggcctcctagacgacgatgatatagacgaactggagtacgatgacgagtcatattcctactatcagta

SEQ ID NO: 72780 - DNA, 9538 bp, Artificial Sequence
  derived and/or modified sequence
atttatgcagagcaggagctgctgccattgccactcagaatcctcgcgcgctgctcggagccggagggagcgctgggagcgagcaagcgagcgtttggagcccgggccagcagagggggcgcccggtcgctgcctgtaccgctcccgctggtcatctccgccgcgctcgggggccccgggaggagcgagaccgagtcggagagtccgggagccaagccgggcgaaacccaactgcggaggacgcccgccccactcagcctcctcctgcgtccgagccggggagcatcgccgagcgccccacgggccggagagctgggagcacaggtcccggcagccccagggatggtctaggagccggcgtaaggctcgctgctctgctccctgccggggctagccgcctcctgccgatcgcccggggctgcgagctgcggcggcccggggctgctcgccgggcggcgcaggccggagaagttagttgtgcgcgcccttagtgcgcggaaccagccagcgagcgagggagcagcgaggcgccgggaccatgggctgggggagccgctgctgctgcccgggacgtttggacctgctgtgcgtgctggcgctgctcgggggctgcctgctccccgtgtgtcggacgcgcgtctacaccaaccactgggcagtcaaaatcgccgggggcttcccggaggccaaccgtatcgccagcaagtacggattcatcaacataggacagataggggccctgaaggactactaccacttctaccatagcaggacgattaaaaggtcagttatctcgagcagagggacccacagtttcatttcaatggaaccaaaggtggaatggatccaacagcaagtggtaaaaaagcggacaaagagggattatgacttcagtcgtgcccagtctacctatttcaatgatcccaagtggcccagcatgtggtatatgcactgcagtgacaatacacatccctgccagtctgacatgaatatcgaaggagcctggaagagaggctacacgggaaagaacattgtggtcactatcctggatgacggaattgagagaacccatccagatctgatgcaaaactacgatgctctggcaagttgcgacgtgaatgggaatgacttggacccaatgcctcgttatgatgcaagcaacgagaacaagcatgggactcgctgtgctggagaagtggcagccgctgcaaacaattcgcactgcacagtcggaattgctttcaacgccaagatcggaggagtgcgaatgctggacggagatgtcacggacatggttgaagcaaaatcagttagcttcaacccccagcacgtgcacatttacagcgccagctggggcccggatgatgatggcaagactgtggacggaccagcccccctcacccggcaagcctttgaaaacggcgttagaatggggcggagaggcctcggctctgtgtttgtttgggcatctggaaatggtggaaggagcaaagaccactgctcctgtgatggctacaccaacagcatctacaccatctccatcagcagcactgcagaaagcggaaagaaaccttggtacctggaagagtgttcatccacgctggccacaacctacagcagcggggagtcctacgataagaaaatcatcactacagatctgaggcagcgttgcacggacaaccacactgggacgtcagcctcagcccccatggctgcaggcatcattgcgctggccctggaagccaatccgtttctgacctggagagacgtacagcatgttattgtcaggacttcccgtgcgggacatttgaacgctaatgactggaaaaccaatgctgctggttttaaggtgagccatctttatggatttggactgatggacgcagaagccatggtgatggaggcagagaagtggaccaccgttccccggcagcacgtgtgtgtggagagcacagaccgacaaatcaagacaatccgccctaacagtgcagtgcgctccatctacaaagcttcaggctgctcggataaccccaaccgccatgtcaactacctggagcacgtcgttgtgcgcatcaccatcacccaccccaggagaggagacctggccatctacctgacctcgccctctggaactaggtctcagcttttggccaacaggctatttgatcactccatggaaggattcaaaaactgggagttcatgaccattcattgctggggagaaagagctgctggtgactgggtccttgaagtttatgatactccctctcagctaaggaactttaagactccaggtaaattgaaagaatggtctttggtcctctacggcacctccgtgcagccatattcaccaaccaatgaatttccgaaagtggaacggttccgctatagccgagttgaagaccccacagacgactatggcacagaggattatgcaggtccctgcgaccctgagtgcagtgaggttggctgtgacgggccaggaccagaccactgcaatgactgtttgcactactactacaagctgaaaaacaataccaggatctgtgtctccagctgcccccctggccactaccacgccgacaagaagcgctgcaggaagtgtgcccccaactgtgagtcctgctttgggagccatggtgaccaatgcatgtcctgcaaatatggatactttctgaatgaagaaaccaacagctgtgttactcactgccctgatgggtcatatcaggataccaagaaaaatctttgccggaaatgcagtgaaaactgcaagacatgtactgaattccataactgtacagaatgtagggatgggttaagcctgcagggatcccggtgctctgtctcctgtgaagatggacggtatttcaacggccaggactgccagccctgccaccgcttctgcgccacttgtgctggggcaggagctgatgggtgcattaactgcacagagggctacttcatggaggatgggagatgcgtgcagagctgtagtatcagctattactttgaccactcttcagagaatggatacaaatcctgcaaaaaatgtgatatcagttgtttgacgtgcaatggcccaggattcaagaactgtacaagctgccctagtgggtatctcttagacttaggaatgtgtcaaatgggagccatttgcaaggatggagaatatgttgatgagcatggccactgccagacctgtgaggcctcatgtgccaagtgccagggaccaacccaggaagactgcactacctgccccatgacaaggatttttgatgatggccgctgtgtttcgaactgcccctcatggaaatttgaatttgagaaccaatgccatccatgccaccacacctgccagagatgccaaggaagtggccctacccactgcacctcctgtggagcagacaactatggccgagagcacttcctgtaccagggagagtgtggagatagctgcccagagggccactatgccactgaggggaacacctgcctgccctgcccagacaactgtgagctttgccacagcgtgcatgtctgcacaagatgcatgaagggctacttcatagcgcccaccaaccacacatgccagaagttagagtgtggacaaggtgaagtccaagacccagactatgaagaatgtgtcccttgtgaagaaggatgtctgggatgcagcttggatgatccaggaacatgtacatcttgcgctatggggtattacaggtttgatcaccattgttataaaacctgtcctgagaagacctacagtgaggaagtggaatgcaaggcgtgtgatagtaactgtggcagctgtgaccagaatgggtgttactggtgtgaagagggcttctttctcttaggtggcagttgtgtgaggaaatgtggtcctggattctatggtgaccaagaaatgggagaatgtgagtcctgccaccgagcatgcgaaacctgcacaggccctggtcatgacgagtgcagcagctgccaggaaggactgcagctgctgcgtgggatgtgcgtgcatgccaccaagacccaggaggagggcaaattctggaatgatattttgagaaaactccagccttgtcattcttcttgtaaaacctgcaatggatctgcaactctgtgcacttcatgtcccaaaggtgcatatcttctggctcaggcctgtgtttcctcctgtccccaaggcacatggccttccgtaaggagtgggagctgcgagaactgtacggaggcctgtgccatctgctctggagccgatctttgcaaaaaatgccagatgcagccgggccaccctctcttcctccatgaaggcaggtgctactccaagtgcccggagggctcttatgcagaagacggcatatgtgaacgctgtagctctccttgcagaacatgtgaaggaaacgccaccaactgccattcttgtgaaggaggccacgtcctgcaccacggagtgtgccaggaaaactgccccgagaggcacgtggctgtgaagggggtatgcaagcattgcccagagatgtgtcaggactgcatccatgagaaaacatgcaaagagtgcacgcctgagttcttcctgcacgatgatatgtgccaccagtcctgtccccgtggcttctatgcagactcgcgccactgtgtcccctgccataaagactgtctggagtgcagtggccccaaagccgacgactgcgagctctgtcttgagagttcctgggtcctctatgatggactgtgcttggaggagtgtccagcaggaacctattatgaaaaggagactaaggagtgcagagattgccacaagtcctgcttgacctgctcatcatctgggacctgcaccacctgtcagaaaggcctgatcatgaaccctcgtgggagctgcatggccaacgagaagtgctcaccctccgagtactgggatgaggatgctcccgggtgcaagccctgccatgttaagtgcttccactgcatggggccggcggaggaccagtgtcaaacatgccccatgaacagccttcttctcaacacaacctgtgtgaaggactgcccagagggctattatgccgatgaggacagcaaccggtgtgcccactgccacagctcttgcaggacatgtgaagggagacacagcaggcagtgccactcctgccgaccgggctggttccagctaggaaaagagtgcctgctccagtgcagggaaggatattacgcagacaactccactggccggtgtgagaggtgcaacaggagctgcaaggggtgccagggcccacggcccacagactgcctgtcttgcgatagatttttctttctgctccgctccaaaggagagtgtcatcgctcctgcccagaccattactatgtagagcaaagcacacagacctgtgagagatgccatccgacttgtgatcaatgcaaaggaaaaggagcgttgaattgtttatcctgtgtgtggagttaccacctcatgggagggatctgcacctcggactgtcttgtgggggaatacagagtgggagagggagagaagtttaactgtgaaaaatgccacgagagctgcatggaatgcaagggaccaggggccaagaactgcaccttgtgccctgccaacctggtgctgcacatggacgacagccactgcctccactgctgcaacacctctgatccccccagtgcccaggagtgctgtgactgccaggacaccacggacgaatgcatccttcgaacaagcaaggttaggcctgcaactgagcatttcaagacagctctgttcatcacctcctccatgatgctggtgcttctgctcggggcagctgtggtagtgtggaagaaatctcgtggccgagtccagccagcagcaaaggccggctatgaaaaactggccgaccccaacaagtcttactcctcctataagagcagctatagagagagcaccagctttgaagaggatcaggtgattgagtacagggatcgggactatgatgaggatgatgatgatgacatcgtctacatgggccaggatggcacagtctaccggaaatttaaatatgggctgctggatgacgatgacatagatgagctggaatatgatgacgagagttactcctactaccagtaaacaggcactcccccaccaacaccaccattccactctcaggcatgcctgtgagcatcactgtttttggttttatccccacaccaggctgatgtgtgagtttttctatttgtcttctttaaccatgagtccaaccagaatatgtaagaatgatgaaatactttgttcttcttttgagtggctaaactcaattaacagttcctgttcaaccgtaattgaagagcaaggataaaattcagaggcattttcctcaaaataatgtgttaagacacaaaaatgaaggaagtgaaaacaaatgagatttgtacaaactcttctatgtgattttaaaaaaaggacagcagatctatagaaattctgtttccgagctgcattgtggaggtgtctgctgcctcctggtattctaatttttctttatctaattttggggataatggaggtacaaaggagttgttggtttggtggtgtttttcttccctttagctgtctttaggcagaaatttgttttgtaagggccaagaaaagagggctcttatcaattgactccaggccacccctggtgagcagaagagaccacctgggctgggctgctcaggacctacttgagataagggaagaaaagagaaggtgcatcatagctgaggagccatgaggtcaccccaggccctagttcctccgcaggaatccagagtcacaacaattctaaaggcagagcaagcccagcgagaaagaaataactgaatttccaggaactgcactctcatgattttctgggtacttttcgcctgggagacatcagctaagacatcgaataataaaagaaaaatggcagtgttaacctaacataaaatggaataaaatgacaaacacttcatccgctctaaaaaattcagagctttccttcatcaacaacccatcacaaaaccgtggactctcaatagaaagagttggaatagagtctaacatggaaaaaaaaaaatcccaatatgctgctcacaagctgtactctagctgctgaccagccttccagcactgctcatcactatgatttttgtttctagacttcctaggcttccttttttccattcttctgtcaagtgtattcttggattcatgcaactgaggacagtttttgtccagattgtaacacagagaagggctcttgctatgcaaaatgatgttggcagggtcttacagatttccttgtcaaaatagaccttacaggcagtactagaaatggagcaccagaaagcaaaaatgacattttcagagaatgatgataattataatctattgcacacctactaccagataacaagctaagtaattcccccccaaaaatgccccacttatccattttggtacttaccatactcccatgaggttggtattgctattattctgttcttgtaggaaacctgaggcttacaagaggttaggtaactagtccaaggtcatgcaaagctcaacaaaattcaagaaaaaagaatgatcaccctaaagcgtgtgttcttataactatgctactgaaataaggtgggaaaataagcatcctaaatataattaaagtcatgcctattgttttagtctataatatcaatgttatctttactaaattcatggattttctttttttaacataatgtatcactgacacagaaaatctttatgaagaagtcttcagtttactaaaggcttgtgcttctttagaggaaagctcttaaaacagggttgacaaacagtctctggaaagagccagctagtaagtacattaggctttcttggccagaaagtctctgtcataaccactcagctctgctattatagcatgaatgcagctggtacataacggatgggtgagctgtgcttcaataaaaccttatttatggacactgacatttgaaattcaggtaattttcacatattataaaattttattcttcttttgatttttttcaaccttttaaaatttaaaaatgcaaaagctattctcagttcacagcattacaagaacaggtggtgggtcagatttggccaacaggctgtactttgctgactttatctttaaaacagttttcagagatcatacatgtacatgtatgatatgcctccaaaaattttgatcatttaaaattatctccttggccaggcgtggtggctcatacctctaatcctagcactttgggagactgaggcaggcagatcacctgaagtcaggagtttgataccagcttagccaacatggtgaaaccccatttctactaaaaatacaataaaaatctgggcatgttggtgcacacctgtaatcccagctactcaggaggctgaggcaggcaaatcacttgagcccgggaggcagaggttgcagtgagcggagatggcaccattgcactccagcctgggtgacagagcaagactccatctcaaaaaataagtaactaactaactaactaaataaataaataaataaaattatctccttgccaggactgctggctcatgcctgtaatcccagcactctgggaggctaaggcaggaggattgctgacccaccacctgttcttgagcccaggagttcgacatcagccttggacaacatagtgagactcccgtgtctacaaaaaatttaaaaattagccaggcatggtggcaagtgtctgtagtctcagctactcaggaggctaaggtggaaggatcacttgaacccgggaggtcgaggctgcagtgagctgtgatcttgctattgcacttcagcctgaatgacagagctaagaccctgactcaaaataaataaataacattatctcttcaaaatgtatctgaagccctgatagttctactttcaattcttagaaacatataaaaatatatgcatgatagccatcatatcaatggaagactttctcacctctgtggttgcagttagcttacaaaaacgagcaattttgcttatactgtgttgttcatcttccttgttaattctaaagctctgatagactgagtttgacatttctttctgtaaactggaaattgttttctatgaaaaaaaaactctatgatacacagttaaagattggttgaggttgagatgaacttcaatactaagaaaaattgtggtgttcctctgtgtggcctgcaatgaaaagaaggctcatgcttgtgtattgaggtttgacatctttccttctttgtttttagtcatgcaacgtcattcttagatggcttttgaatactatgctaatgactatctaaatagataaatatgtgattggaaaacaaagtcaccttttagttttctacttggaaatattaagagaatccttgtagactggaaacacaccaaaaggctgggtaaagcatgggaggttccagttaatagaaagtaattttaaaattggaaataaaattaaatcaagacca

SEQ ID NO: 72781 - DNA, 5583 bp, Artificial Sequence
  derived and/or modified sequence
atgggctggggcagcagatgctgctgccccggcagactggacctgctgtgcgtgctggccctgctgggcggctgcctgctgcccgtgtgcagaaccagagtgtacaccaaccactgggccgtgaagatcgccggcggcttccccgaggccaacagaatcgccagcaagtacggcttcatcaacatcggccagatcggcgccctgaaggactactaccacttctaccacagcagaaccatcaagagaagcgtgatcagcagcagaggcacccacagcttcatcagcatggagcccaaggtggagtggatccagcagcaggtggtgaagaagagaaccaagagagactacgacttcagcagagcccagagcacctacttcaacgaccccaagtggcccagcatgtggtacatgcactgcagcgacaacacccacccctgccagagcgacatgaacatcgagggcgcctggaagagaggctacaccggcaagaacatcgtggtgaccatcctggacgacggcatcgagagaacccaccccgacctgatgcagaactacgacgccctggccagctgcgacgtgaacggcaacgacctggaccccatgcccagatacgacgccagcaacgagaacaagcacggcaccagatgcgccggcgaggtggccgccgccgccaacaacagccactgcaccgtgggcatcgccttcaacgccaagatcggcggcgtgagaatgctggacggcgacgtgaccgacatggtggaggccaagagcgtgagcttcaacccccagcacgtgcacatctacagcgccagctggggccccgacgacgacggcaagaccgtggacggccccgcccccctgaccagacaggccttcgagaacggcgtgagaatgggcagaagaggcctgggcagcgtgttcgtgtgggccagcggcaacggcggcagaagcaaggaccactgcagctgcgacggctacaccaacagcatctacaccatcagcatcagcagcaccgccgagagcggcaagaagccctggtacctggaggagtgcagcagcaccctggccaccacctacagcagcggcgagagctacgacaagaagatcatcaccaccgacctgagacagagatgcaccgacaaccacaccggcaccagcgccagcgcccccatggccgccggcatcatcgccctggccctggaggccaaccccttcctgacctggagagacgtgcagcacgtgatcgtgagaaccagcagagccggccacctgaacgccaacgactggaagaccaacgccgccggcttcaaggtgagccacctgtacggcttcggcctgatggacgccgaggccatggtgatggaggccgagaagtggaccaccgtgcccagacagcacgtgtgcgtggagagcaccgacagacagatcaagaccatcagacccaacagcgccgtgagaagcatctacaaggccagcggctgcagcgacaaccccaacagacacgtgaactacctggagcacgtggtggtgagaatcaccatcacccaccccagaagaggcgacctggccatctacctgaccagccccagcggcaccagaagccagctgctggccaacagactgttcgaccacagcatggagggcttcaagaactgggagttcatgaccatccactgctggggcgagagagccgccggcgactgggtgctggaggtgtacgacacccccagccagctgagaaacttcaagacccccggcaagctgaaggagtggagcctggtgctgtacggcaccagcgtgcagccctacagccccaccaacgagttccccaaggtggagagattcagatacagcagagtggaggaccccaccgacgactacggcaccgaggactacgccggcccctgcgaccccgagtgcagcgaggtgggctgcgacggccccggccccgaccactgcaacgactgcctgcactactactacaagctgaagaacaacaccagaatctgcgtgagcagctgcccccccggccactaccacgccgacaagaagagatgcagaaagtgcgcccccaactgcgagagctgcttcggcagccacggcgaccagtgcatgagctgcaagtacggctacttcctgaacgaggagaccaacagctgcgtgacccactgccccgacggcagctaccaggacaccaagaagaacctgtgcagaaagtgcagcgagaactgcaagacctgcaccgagttccacaactgcaccgagtgcagagacggcctgagcctgcagggcagcagatgcagcgtgagctgcgaggacggcagatacttcaacggccaggactgccagccctgccacagattctgcgccacctgcgccggcgccggcgccgacggctgcatcaactgcaccgagggctacttcatggaggacggcagatgcgtgcagagctgcagcatcagctactacttcgaccacagcagcgagaacggctacaagagctgcaagaagtgcgacatcagctgcctgacctgcaacggccccggcttcaagaactgcaccagctgccccagcggctacctgctggacctgggcatgtgccagatgggcgccatctgcaaggacggcgagtacgtggacgagcacggccactgccagacctgcgaggccagctgcgccaagtgccagggccccacccaggaggactgcaccacctgccccatgaccagaatcttcgacgacggcagatgcgtgagcaactgccccagctggaagttcgagttcgagaaccagtgccacccctgccaccacacctgccagagatgccagggcagcggccccacccactgcaccagctgcggcgccgacaactacggcagagagcacttcctgtaccagggcgagtgcggcgacagctgccccgagggccactacgccaccgagggcaacacctgcctgccctgccccgacaactgcgagctgtgccacagcgtgcacgtgtgcaccagatgcatgaagggctacttcatcgcccccaccaaccacacctgccagaagctggagtgcggccagggcgaggtgcaggaccccgactacgaggagtgcgtgccctgcgaggagggctgcctgggctgcagcctggacgaccccggcacctgcaccagctgcgccatgggctactacagattcgaccaccactgctacaagacctgccccgagaagacctacagcgaggaggtggagtgcaaggcctgcgacagcaactgcggcagctgcgaccagaacggctgctactggtgcgaggagggcttcttcctgctgggcggcagctgcgtgagaaagtgcggccccggcttctacggcgaccaggagatgggcgagtgcgagagctgccacagagcctgcgagacctgcaccggccccggccacgacgagtgcagcagctgccaggagggcctgcagctgctgagaggcatgtgcgtgcacgccaccaagacccaggaggagggcaagttctggaacgacatcctgagaaagctgcagccctgccacagcagctgcaagacctgcaacggcagcgccaccctgtgcaccagctgccccaagggcgcctacctgctggcccaggcctgcgtgagcagctgcccccagggcacctggcccagcgtgagaagcggcagctgcgagaactgcaccgaggcctgcgccatctgcagcggcgccgacctgtgcaagaagtgccagatgcagcccggccaccccctgttcctgcacgagggcagatgctacagcaagtgccccgagggcagctacgccgaggacggcatctgcgagagatgcagcagcccctgcagaacctgcgagggcaacgccaccaactgccacagctgcgagggcggccacgtgctgcaccacggcgtgtgccaggagaactgccccgagagacacgtggccgtgaagggcgtgtgcaagcactgccccgagatgtgccaggactgcatccacgagaagacctgcaaggagtgcacccccgagttcttcctgcacgacgacatgtgccaccagagctgccccagaggcttctacgccgacagcagacactgcgtgccctgccacaaggactgcctggagtgcagcggccccaaggccgacgactgcgagctgtgcctggagagcagctgggtgctgtacgacggcctgtgcctggaggagtgccccgccggcacctactacgagaaggagaccaaggagtgcagagactgccacaagagctgcctgacctgcagcagcagcggcacctgcaccacctgccagaagggcctgatcatgaaccccagaggcagctgcatggccaacgagaagtgcagccccagcgagtactgggacgaggacgcccccggctgcaagccctgccacgtgaagtgcttccactgcatgggccccgccgaggaccagtgccagacctgccccatgaacagcctgctgctgaacaccacctgcgtgaaggactgccccgagggctactacgccgacgaggacagcaacagatgcgcccactgccacagcagctgcagaacctgcgagggcagacacagcagacagtgccacagctgcagacccggctggttccagctgggcaaggagtgcctgctgcagtgcagagagggctactacgccgacaacagcaccggcagatgcgagagatgcaacagaagctgcaagggctgccagggccccagacccaccgactgcctgagctgcgacagattcttcttcctgctgagaagcaagggcgagtgccacagaagctgccccgaccactactacgtggagcagagcacccagacctgcgagagatgccaccccacctgcgaccagtgcaagggcaagggcgccctgaactgcctgagctgcgtgtggagctaccacctgatgggcggcatctgcaccagcgactgcctggtgggcgagtacagagtgggcgagggcgagaagttcaactgcgagaagtgccacgagagctgcatggagtgcaagggccccggcgccaagaactgcaccctgtgccccgccaacctggtgctgcacatggacgacagccactgcctgcactgctgcaacaccagcgacccccccagcgcccaggagtgctgcgactgccaggacaccaccgacgagtgcatcctgagaaccagcaaggtgagacccgccaccgagcacttcaagaccgccctgttcatcaccagcagcatgatgctggtgctgctgctgggcgccgccgtggtggtgtggaagaagagcagaggcagagtgcagcccgccgccaaggccggctacgagaagctggccgaccccaacaagagctacagcagctacaagagcagctacagagagagcaccagcttcgaggaggaccaggtgatcgagtacagagacagagactacgacgaggacgacgacgacgacatcgtgtacatgggccaggacggcaccgtgtacagaaagttcaagtacggcctgctggacgacgacgacatcgacgagctggagtacgacgacgagagctacagctactaccagtag

SEQ ID NO: 72782 - protein, 140 aa, Artificial Sequence
  derived and/or modified sequence
MDLIPNLAVETWLLLAVSLVLLYLYGTRTHGLFKRLGIPGPTPLPLLGNVLSYRQGLWKFDTECYKKYGKMWGTYEGQLPVLAITDPDVIRTVLVKECYSVFTNRRICATTSTIKMQTHSVTMWLPPAVLQSQHGVCLFL

SEQ ID NO: 72783 - DNA, 423 bp, Artificial Sequence
  derived and/or modified sequence
atggatctaatccctaatctggctgttgagacttggttacttctggcagtgtctctggtactgctttatttgtacggtacaagaacccacgggctgtttaaaagattaggaattccaggtccaacccccctgcctcttctgggcaatgtcctgagctacaggcaaggattgtggaaatttgataccgaatgctacaaaaagtatggcaagatgtggggaacctatgaaggtcaactgcccgtgctggccattaccgatccagatgtaatccgcacagtgctggtgaaagaatgctactctgtttttactaataggcgcatttgcgccaccaccagcactataaaaatgcagacccattcagtcactatgtggctcccaccagccgttctccagtctcaacacggagtttgtttatttttatag

SEQ ID NO: 72784 - DNA, 120 bp, Artificial Sequence
  derived and/or modified sequence
atggatctcatccctaacttggcggtggagacatggctattacttgccgtcagccttgtcctgctgtatctgatgagagtgcctaagtcagccaagagtcctttaaccaagcaaacttag

SEQ ID NO: 72785 - DNA, 423 bp, Artificial Sequence
  derived and/or modified sequence
atggacctgatccccaacctggccgtggagacctggctgctgctggccgtgtccctggtgctgctgtacctgtatggcaccaggacccacggcctcttcaagaggctgggcatccctggccccacccccctgcccctgctgggcaatgtgctgagctaccggcagggcctgtggaagtttgacacagagtgctacaagaagtatggcaagatgtggggcacctatgagggccagctgcctgtgctggccatcacagatcctgatgtgatcagaacagtgctggtgaaggagtgctacagcgtcttcaccaacagacgcatctgtgccaccaccagcaccatcaagatgcagacccacagcgtgaccatgtggctgcccccagctgtgctgcagagccagcacggcgtgtgcctcttcctgtag

SEQ ID NO: 72786 - DNA, 120 bp, Artificial Sequence
  derived and/or modified sequence
atggacctgatccccaacctggccgtggagacctggctgctgctggccgtgtccctggtgctgctgtacctgatgagggtgcccaagagcgccaagagccccctgaccaagcagacctag

SEQ ID NO: 72787 - DNA, 423 bp, Artificial Sequence
  derived and/or modified sequence
atggacctgatccccaacctggccgtggagacctggctgctgctggccgttagtctcgtgctgttgtacctgtatggaacacgtacccatgggctctttaaacggctagggattcccgggcccacccctctccctttgctcggcaatgttctgagctatcggcaagggctgtggaaattcgatacggagtgttataagaagtatggcaagatgtgggggacttatgagggacagttgccagtcctggctatcaccgaccccgatgtcattagaaccgtgttagtgaaagagtgttattccgtcttcaccaatcgaagaatctgcgcaactactagtacaatcaaaatgcagacacattctgtcaccatgtggctacccccagctgttttgcaatcccagcatggcgtttgcttgttcctgtag

SEQ ID NO: 72788 - DNA, 423 bp, Artificial Sequence
  derived and/or modified sequence
atggacttaatccccaacttggcagtggaaacctggcttcttttggctgtgtcccttgttctactctacttatacggaactcggactcatggattgtttaaacgcctcggaatccccggacctaccccactcccactcctgggtaatgtcttgtcctatcgccagggactgtggaagtttgataccgaatgctacaagaagtacggaaagatgtggggtacatacgagggccagttgcccgtcttggcaatcacagacccggacgtcatacggactgttttggtaaaagagtgctactctgtcttcacaaatagaagaatctgtgcaacaacctcaaccatcaaaatgcagacgcactccgtgacaatgtggctcccccctgctgtgttgcagtcccagcacggggtttgcctctttctgtag

SEQ ID NO: 72789 - DNA, 120 bp, Artificial Sequence
  derived and/or modified sequence
atggatctcatacctaacctcgctgtcgagacctggttgcttctagccgtgtcactcgtgctgctctacttgatgcgggtccccaaaagcgctaaaagccctctgactaagcaaacttag

SEQ ID NO: 72790 - DNA, 1075 bp, Artificial Sequence
  derived and/or modified sequence
gctgtgcagggcagggaagctccaggcaaacagcccagcaaacagcagcactcagctaaaaggaagactcacagaacacagttgaagaaggaaagtggcgatggacctcatcccaaatttggcggtggaaacctggcttctcctggctgtcagcctggtgctcctctatctatatgggacccgtacacatggactttttaagagactgggaattccagggcccacacctctgcctttgttgggaaatgttttgtcctatcgtcagggtctctggaaatttgacacagagtgctataaaaagtatggaaaaatgtggggaacgtatgaaggtcaactccctgtgctggccatcacagatcccgacgtgatcagaacagtgctagtgaaagaatgttattctgtcttcacaaatcgaaggatttgtgcaacgaccagcaccatcaagatgcagacccattccgtcaccatgtggctccctcctgctgtcctacagtcacaacatggagtttgtctttttctctgacaggttctatatcagagcaaacttttatttatttgaggaggccaatgtattaatatttccttttatggattgttcttttggtgttaagtctgaaaatcctttgcttagccctccttcctacattgctttttctaagagttatatagtttaacactttacaaaatgtaactctattacccattttgtgttaatatttgcataagttatgagatttagatcaaggttcattttctgtggactatggctgtccaaatgttccaacaccattttggaaaggtaggcatattgtcaaaactcagctgagtatattttgtgaatctatttcttattgtttactcctccactaataccacactgtggtgactctagtagctgtacagtaactcttaacatcatatagggcaattctttccactttattgatttatattttcagaatggctttagcttttcttgtcccttgcctttccataaaaattcagaataagcttgtaagtgtctacaaacaaacctgccataattttgataagaattaaagcagaggtgtccaat

SEQ ID NO: 72791 - DNA, 423 bp, Artificial Sequence
  derived and/or modified sequence
atggacctgatccccaacctggccgtggagacctggctgctgctggccgtgagcctggtgctgctgtacctgtacggcaccagaacccacggcctgttcaagagactgggcatccccggccccacccccctgcccctgctgggcaacgtgctgagctacagacagggcctgtggaagttcgacaccgagtgctacaagaagtacggcaagatgtggggcacctacgagggccagctgcccgtgctggccatcaccgaccccgacgtgatcagaaccgtgctggtgaaggagtgctacagcgtgttcaccaacagaagaatctgcgccaccaccagcaccatcaagatgcagacccacagcgtgaccatgtggctgccccccgccgtgctgcagagccagcacggcgtgtgcctgttcctgtag

SEQ ID NO: 72792 - protein, 24 aa, Artificial Sequence
  derived and/or modified sequence
MATGGFGCLLLLIREIDLSVKRQI

SEQ ID NO: 72793 - DNA, 75 bp, Artificial Sequence
  derived and/or modified sequence
atggccaccggcggcttcggctgcctgctgctgctgatcagagagatcgacctgagcgtgaagagacagatctag

SEQ ID NO: 72794 - DNA, 75 bp, Artificial Sequence
  derived and/or modified sequence
atggccactggagggtttggctgcctgttgctacttatccgggaaatcgacctcagcgtgaagagacagatctag

SEQ ID NO: 72795 - DNA, 75 bp, Artificial Sequence
  derived and/or modified sequence
atggccactggaggcttcggctgcctgctgctgctgatccgggagattgacctgtctgtgaagaggcagatctag

SEQ ID NO: 72796 - DNA, 75 bp, Artificial Sequence
  derived and/or modified sequence
atggccaccggcggcttcggctgcctgctgctgctgatccgggagatcgatttgtcggttaaacgccagatctag

SEQ ID NO: 72797 - DNA, 1494 bp, Artificial Sequence
  derived and/or modified sequence
gtataggtgatagaaatttttagcctggcacaatagacttagtacagtaagggaaagatgaaagaactgtatcaagcactgaaaagcaaagacaagcccttatgccttctgcataatgtattaaccagaaataactttacacagagaactatagccaagtcccccaaaaccagccaagctacccaagaacagctgaaagagcacactcacctatgtggcaagatagtgggaagattcatgagtagaagtgacaaggctatggagcctggtgatagctggttgtccaagatagactcctagttcaactttaagcttatacacagaattacttaacctccctgtaagtttaactgttagtctaaagagggacagctctttagaccctaggaaacaaccttcctacagaaaataaaaaatattaccaccacagttggcccaaaagcagccaccaattaagaacatgtttaagttcaacatctatcttaaattctaatcactctactgaactcctaacatcacactggactaatctattacttaatagacacaataatgttagtataagtaacatgaagacattctccattgcataagcttacatcagaccagaataatccactgacagttaacagcctaatattaataaacaatataataaacaccctattatttacactgttaacccaacacaggtatgctctaaggaaagattacaaaaagtaaaaggaactcggcaaatcatactctgcctgtttaccaaaaacacacctctagcattaccagtatttgaggcactgcctgcccagtgacatttgttcaacagccacagtatcctgaccatgcaaaagtagcataatcacttgttccctaaatagggacttgtatgaatggccacaggagggttcggctgcctcttacttttaatcagggaaattgacctatccgtgaagaggcagatataaacaaataagatgagaagctccctatggagctttaattcattaatgcaaattaaaactcaaacaagcctacaggctctagcctactattcttgcattaaaaattttggttggggtgaccttggagcataattcaacctctgaacaacctacactaagactgcactagtctaagtgagttaatacatatggacccaataatttgatcaacagagtaaggtaccctagggataacagcacaatccattctacagttcatattgacaatagggtttatgaccttgatgttagatcaggacatcctaatggtgtaaccactgttaaggattcatttattcaatgattaaagtcaattaatgtgatctgagttcagactggagtaatccaggttggtttctatctatttaacatttctccaagtatgaaaggacaagagaaatagagtccctttcataaagtgccctcacttcatagaggatgctatctcaatctaaaaaatcatcaccaccctacccaagaacagggtttgttaaga

SEQ ID NO: 72798 - DNA, 75 bp, Artificial Sequence
  derived and/or modified sequence
atggcaacaggaggatttggttgcttgctcttactgatccgcgagatagatctctccgtcaaaaggcagatctag

SEQ ID NO: 72799 - protein, 953 aa, Artificial Sequence
  derived and/or modified sequence
MCNPEEAALLRLEEVFSATLAHVNSLVLQPLLPAAPDPSDPWGRECLRLLQQLHKSSQQLWEVTEESLHSLQERLRYPDSTGLESLLLLRGADRVLQAHIEYIESYTSCMVVQAFQKAAKRRSEYWRGQRKALRQLLSGVSSEGSVGASLGQALHQPLAHHVQQYVLLLLSLGDTIGEHHPTRELVVNAVTLFGNLQSFMKQELDQAVATQALWHTLRGRLRDVLCTPAHRLLQDSQDVPVTVAPLRAERVLLFDDALVLLQGHNVHTFDLKLVWVDPGQDGCTFHLLTPEEEFSFCAKDSQGQAVWQWKVTWAVHQALHGKKDFPVLGAGLEPSQPPDCRCAEYTFQAEGRLCQATYEGEWCRGRPHGKGTLKWPDGRNHVGNFCQGLEHGFGIRLLPQASEDKFDCYKCHWREGSMCGYGICEYSTDEVYKGYFQEGLRHGFGVLESGPQAPQPFRYTGHWERGQRSGYGIEEDGDRGERYIGMWQAGQRHGPGVMVTQAGVCYQGTFQADKTVGPGILLSEDDSLYEGTFTRDLTLMGKGKVTFPNGFTLEGSFGSGAGRGLHTQGVLDTAALPPDPSSTCKRQLGVGAFPVESRWQGVYSPFRDFVCAGCPRDLQEALLGFDVQSSRELRRSQDYLSCERTHPEDSVGSMEDILEELLQHREPKALQLYLRKALSNSLHPLGKLLRTLMLTFQATYAGVGANKHLQELAQEEVKQHAQELWAAYRGLLRVALERKGQALEEDEDTETRDLQVHGLVLPLMLPSFYSELFTLYLLLHEREDSFYSQGIANLSLFPDTQLLEFLDVQKHLWPLKDLTLTSNQRYSLVRDKCFLSATECLQKIMTTVDPREKLEVLERTYGEIEGTVSRVLGREYKLPMDDLLPLLIYVVSRARIQHLGAEIHLIRDMMDPNHTGGLYDFLLTALESCYEHIQKEDMRLHRLPGHWHSRELW

SEQ ID NO: 72800 - DNA, 2862 bp, Artificial Sequence
  derived and/or modified sequence
atgtgcaatcctgaggaggcagctctcttgaggcttgaagaggttttttctgctacgctggcccacgtcaattcactagtgttacagccgctcctcccagctgcgcctgatccctcggatccttgggggcgcgagtgcctgcggctgcttcagcagctgcacaaatcatctcaacagctgtgggaagtgactgaagagagcttacacagcctgcaagaacggctgaggtaccctgatagcaccggcttagaatccctgttgttactccgcggcgcagaccgcgtgctgcaagcccacatcgaatatattgagagttatacgagctgtatggtcgtccaagcattccagaaagcagctaaaaggcgctctgaatattggcgggggcaaaggaaagccctgaggcagttgttgagcggagtctcatcggaggggtccgttggggcgtctctgggccaggctctgcaccagcccttggctcaccacgttcagcagtatgtgttattactgctgagcctgggagatacaattggcgagcaccaccccacccgcgagttagtggttaacgcggtcaccctgtttggcaatctgcaatcctttatgaaacaagaactggatcaggcggtcgccacacaggctctttggcacacactcaggggtagactgcgggatgtactgtgtacccctgcccaccggcttcttcaggatagccaagacgtaccagtcacagtggctccgctccgcgcggagcgcgtgctattgtttgatgacgcgttggttcttctgcagggtcataatgtgcatacattcgacctcaaactcgtgtgggtggatccgggacaggacggctgcacctttcatctactgacccccgaggaggagttttctttctgcgccaaagacagccaggggcaggctgtgtggcaatggaaagtcacctgggccgtacaccaggcacttcacggcaagaaggattttccggtgttgggggcgggacttgagccctcccagcctcctgactgcaggtgtgccgagtacacttttcaggcagaggggcgactatgtcaggctacatacgagggcgagtggtgtcgcgggcgaccacacggcaaggggaccctgaaatggcctgacggcagaaaccacgtgggcaacttctgtcaaggcttggaacatggctttggaatccgcctccttccacaggcaagcgaggataagtttgactgttacaaatgccattggagagaaggatccatgtgcggatacggaatctgtgagtattcaacggacgaggtctacaagggatatttccaagagggactgcggcacggttttggcgtactggaatctgggcctcaggctcctcagcctttcagatatacgggacattgggaaagggggcagcgcagcggctatggtattgaggaagacggcgatcggggagagaggtacataggaatgtggcaggccggccagcgccacgggccgggagtgatggttacacaggccggcgtgtgttatcagggcacattccaggccgacaaaactgttgggcctggcatcttgctgtctgaggatgattctctgtatgagggcacgttcacccgtgacctgacattgatgggcaaagggaaggtgacttttccaaacgggttcactctggagggttcattcggttccggtgcaggtcgaggcctgcacacacagggggtcctggacactgctgccctgccacctgatccttcctcaacatgcaagagacagttgggcgtcggcgctttccctgtggaaagcagatggcagggggtttattcaccattccgagacttcgtctgcgctggttgccctcgtgacctgcaggaggctctgcttggcttcgacgtgcagagtagtagagaactacgaagatctcaggactacctcagttgtgaacggactcatccagaagatagtgtcggatccatggaggatatactcgaagagctgctgcagcacagggaaccgaaggccctgcagctgtatctcagaaaggccctctctaattctctgcatcccctgggaaaactgttgcgtaccttgatgttgacattccaggctacctacgccggtgttggtgcaaataagcatttgcaggagctggctcaagaggaggttaaacagcacgcccaggagttgtgggccgcataccgaggactgctgcgggtcgccttagaacgcaagggtcaggctctggaagaggacgaagatacagagacgcgggacctccaggtgcacgggctggtcttgccccttatgttgccctccttttactctgagctgttcacgctctatctgcttctacacgagagagaggacagcttttatagtcaaggcatcgccaatcttagcctctttcctgacacacagttactggagtttttagatgtccagaaacatttatggcctttgaaagacttaacactgacatctaaccaacggtattcactggtgcgggataaatgtttcctgtctgcaactgagtgtctgcaaaagattatgaccaccgtggacccgcgagaaaaattggaagtgctggaacgaacatatggggaaatcgagggaacggtttcaagagtgttggggagggagtacaaactgcccatggatgaccttctccctttattgatatatgtcgtgtccagagcaaggattcagcacctgggcgcagagatacatctgattcgggacatgatggatccaaatcacaccgggggcctgtatgactttctgctgacggcgctggaatcctgctacgagcacattcagaaggaagatatgaggctccatcgcctgcccggccattggcactccagggagctgtggtag

SEQ ID NO: 72801 - DNA, 2862 bp, Artificial Sequence
  derived and/or modified sequence
atgtgtaaccctgaagaagctgctttgctacgactcgaggaggtcttctccgccactctggctcatgttaactcgcttgtccttcagcccctcttgcctgcggccccggacccctcagacccctggggccgggagtgtttgcgcctgctccaacagctgcataaatctagccagcaactgtgggaggtcacagaagagagtctccattctctgcaggagcgcctgcggtatcctgactctacgggactggagagcctgctgttactgcggggagccgatcgggtgctccaggcccacatagagtacatcgagagctatacatcctgtatggtggttcaagctttccaaaaggcagcgaaacgtcgctcagaatattggcgagggcagaggaaagcccttcggcaattgctctcaggcgtaagctccgaaggttccgtgggcgcatcattggggcaggcactgcaccaacctttggcccaccacgtgcagcagtatgttctgctgctgctcagcctgggagacaccattggtgagcaccatccaacaagagagcttgtcgtgaacgcagttacgttgtttggaaatctgcagtcatttatgaagcaggagctggaccaggccgtggcaactcaggcgttgtggcacaccctgaggggtcgcctaagagatgtgctctgtacacctgctcacaggctgctgcaggatagccaggacgtgcccgtcacggtggctccattgagagccgagcgcgtgcttctctttgatgacgctctagtgctgctccagggacacaacgtccacacatttgacctcaagctggtttgggtcgaccctggacaagatgggtgtacctttcacctcctgacgcccgaagaagagttttccttttgcgctaaagacagtcaaggccaggcggtgtggcaatggaaggtgacctgggctgttcatcaggcccttcatggaaagaaggattttcctgtgctgggagcaggattggagccctcacagcctcctgactgcagatgtgctgaatatacttttcaggccgagggacggctgtgtcaggccacatatgaaggcgaatggtgtcgagggcgcccacacggcaagggaactttgaaatggcccgacgggagaaaccatgtgggtaacttctgccaggggctagagcatgggttcggaattagattgctgccccaagcctctgaagataagttcgactgttacaaatgccactggagagagggctccatgtgtggatatggtatttgtgaatattccaccgacgaagtttataagggctacttccaagaaggccttcgccacgggttcggagtcctcgaatcaggccctcaggccccgcagccattccgctatacaggacactgggagcgcggtcagagatccggctacgggattgaggaagacggagaccgcggggaacgttacataggaatgtggcaggcaggacagagacacggccctggcgtcatggttacacaggccggggtgtgttatcagggaactttccaggccgataagactgtgggtcccggaatcctgctcagcgaagacgactccctgtatgagggaacctttactcgggacctgacactgatggggaaaggaaaggtgacctttcccaacgggttcacattggaagggtctttcgggtccggagcagggaggggactgcacacccagggagtgctcgacacggctgctctcccaccggatccttcttccacctgtaagaggcagctgggtgtaggcgcatttccggtagaatcccggtggcagggagtgtactctcctttccgggactttgtgtgtgctgggtgtcccagggacctgcaggaagctctcctgggttttgacgtgcagagcagcagggagctgcggaggtcacaggattatctgagctgcgaaagaacccacccagaagattcagtggggtcaatggaagacatcctagaggagttgcttcagcacagagagccgaaggctcttcagctgtatttgcgaaaggccctgagtaactccctgcaccccttaggaaagctattgcgaacccttatgctgacctttcaagcaacttatgcgggggtgggagctaataagcacctacaggaactggcacaggaggaggtcaaacagcacgctcaagagctttgggcggcctaccgtgggctgcttcgtgtggccttggaacgtaagggccaggcattggaggaggatgaggataccgagaccagggacctccaagtgcatggtctggtgttgcccctgatgttaccatctttctattccgaattgtttactttataccttctcctacacgagagggaagatagtttttactcccaaggaattgctaacttatctttgttccctgacacccaacttctcgaattcctagacgtacaaaagcacctctggcccctgaaagatttaaccctgactagcaatcagcgctatagtctcgtgcgtgacaaatgcttcttgagcgctactgagtgtcttcagaaaataatgacaaccgtcgatcctcgggagaagctggaggtgctagagaggacctacggtgaaattgaggggaccgtgagccgggtgttgggtagagaatataagctgcccatggacgacctcctgcctctgctgatttacgtagtgagtcgcgctcgcatccagcatctcggcgcagaaattcacttgatccgtgatatgatggaccccaaccatactggtggcctgtacgactttctgttaacggccctagagtcttgctacgagcacatccagaaggaagacatgaggctccatagacttccgggacactggcatagcagagaactatggtag

SEQ ID NO: 72802 - DNA, 2862 bp, Artificial Sequence
  derived and/or modified sequence
atgtgcaaccctgaggaggccgccctgctgcggctggaggaggtgttttctgccaccctggcccacgtgaacagcctggtgctgcagcccctgctgcctgctgccccagaccccagcgacccctggggcagagaatgtctgcggctgctgcagcagctgcacaagagcagccagcagctgtgggaggtgacagaggagagcctgcacagcctgcaggagcggctgcgctacccagacagcacaggcctggagagcctgctgctgctgcggggagctgacagagtgctgcaggcccacatcgagtacatcgagagctacaccagctgcatggtggtgcaggccttccagaaggccgccaagagaagaagtgagtactggaggggccagaggaaggccctgcggcagctgctgagcggcgtgagcagcgagggctctgtgggcgccagcctgggccaggccctgcaccagcccctggcccaccacgtgcagcagtatgtgctgctgctgctgagcctgggggacaccatcggggagcaccaccccacccgggagctggtggtgaatgctgtgaccctgtttggaaacctgcagagcttcatgaagcaggagctggaccaggccgtggccacccaggccctgtggcacaccctgcggggccgcctgagagatgtgctgtgcaccccagcccaccggctgctgcaggacagccaggatgtgcctgtgacagtggcccccctgcgggcagagcgggtgctgctgtttgatgatgccctggtgctgctgcagggccacaacgtgcacacctttgacctgaagctggtgtgggtggaccccggccaggacggctgcaccttccacctgctgaccccagaggaggagttctccttctgtgccaaggacagccagggccaggccgtgtggcagtggaaggtgacctgggccgtgcaccaggccctgcacggcaagaaggacttccctgtgctgggcgccggcctggagcccagccagcccccagactgccgctgtgccgagtacaccttccaggccgagggccgcctgtgccaggccacctatgaaggagagtggtgccggggccggccccacggcaagggcaccctgaagtggccagatggaagaaatcatgtgggcaacttctgccagggcctggagcacggcttcggcatccggctgctgccccaggccagcgaggacaagtttgactgctacaagtgccactggagggagggctccatgtgtggctacggcatctgtgagtacagcacagatgaggtgtacaagggctacttccaggagggcctgcggcacggcttcggcgtgctggagagcggcccccaggccccccagcccttccgctacacaggccactgggagcggggccagaggagcggctatggaattgaagaagatggagacagaggagagcgctacatcggcatgtggcaggccggccagagacatggccctggggtgatggtgacccaggccggcgtgtgctaccagggcaccttccaggccgacaagacagtgggccctggcatcctgctgtctgaagatgacagcctgtatgagggcaccttcacccgggacctgaccctgatgggcaagggcaaggtgaccttccccaacggcttcaccctggagggcagctttggaagtggagctggccggggcctgcacacccagggcgtgctggacacagctgccctgcccccagaccccagcagcacctgcaagaggcagctgggcgtgggcgccttccctgtggagagccgctggcagggcgtgtacagccccttccgggactttgtgtgtgccggctgcccccgggacctgcaggaggccctgctgggctttgatgtgcagagcagccgggagctgcggcgcagccaggactacctgagctgtgagaggacccaccctgaggacagcgtgggctccatggaggacatcctggaggagctgctgcagcaccgggagcccaaggccctgcagctgtacctgaggaaggccctgagcaacagcctgcaccccctgggcaagctgctgcggaccctgatgctgaccttccaggccacctacgccggcgtgggcgccaacaagcacctgcaggagctggcccaggaggaggtgaagcagcacgcccaggagctgtgggccgcctaccggggcctgctgcgggtggccctggagaggaagggccaggccctggaggaggatgaggacacagagacccgggacctgcaggtgcacggcctggtgctgcccctgatgctgcccagcttctacagcgagctgttcaccctgtacctgctgctgcacgagagagaagattccttctacagccagggcatcgccaacctgagcctcttcccagacacccagctgctggagttcctggatgtgcagaagcacctgtggcccctgaaggacctgaccctgaccagcaaccagcgctacagcctggtgcgggacaagtgcttcctgagcgccacagaatgtctgcagaagatcatgaccaccgtggacccccgggagaagctggaggtgctggagaggacctatggagaaattgagggcaccgtgtcccgggtgctgggccgggagtacaagctgcccatggatgacctgctgcccctgctgatctacgtggtgtcccgggcccgcatccagcacctgggcgctgagatccacctgatccgggacatgatggaccccaaccacactggaggcctgtatgacttcctgctgacagccctggagagctgctatgagcacatccagaaggaggacatgaggctgcaccggctgcccggccactggcacagccgggagctgtggtag

SEQ ID NO: 72803 - DNA, 4741 bp, Artificial Sequence
  derived and/or modified sequence
gggggtgcgagcgaggagccgcacaggcagtcccggcgcggggcaaccacagcgctcaggaggccctgagtccggcacctggccatgtgcaaccctgaggaggcagctctgctgcggctggaggaggtcttctcagccaccctcgcccatgtcaacagccttgtcctccagcccctgctcccagccgccccagatccctcggatccctggggcagagagtgcctgcggctcttgcaacagctgcacaagagctcccagcaactctgggaggtgacggaggaaagcctgcactcactgcaggagaggctgcgttacccggactccaccggtctggagtccctgctgctgctgcgaggtgctgaccgtgtactgcaggcccacatagagtacattgagtcctacacaagctgcatggtggtgcaggccttccagaaggcagcaaagaggagaagcgagtactggcggggccagcggaaggcgctgcggcagctgctttcaggtgtgagctcagagggctcggtgggcgcatcgctgggccaggccctccaccagccactcgcccatcacgtgcaacagtacgtgctcctcctgctgagcctcggggacaccattggggagcatcacccaacccgggagctggtggtgaacgcagtcaccctctttgggaacctgcagtccttcatgaagcaggagttggaccaggctgtggccacacaggctctctggcacaccctgagaggccggctgagggatgtgctctgcacccctgctcacagactccttcaggacagccaggacgtacccgtgacggtcgcaccgttgcgggctgagcgtgtgctgctctttgatgatgccctcgtcctgctgcagggccacaatgtccacacctttgatctgaagctggtgtgggtggatcctgggcaggacgggtgcacgtttcacctcctcacgcccgaagaagagttctccttttgtgccaaggactcccagggccaggcagtctggcagtggaaggtgacctgggctgttcaccaggccctgcatgggaagaaggacttccccgtgctgggggctggcctggagccctcccagcctcccgactgccgctgcgcagaatataccttccaggcagagggccggctctgccaggccacctacgagggcgagtggtgcaggggccggccccacggcaagggaaccctgaaatggccggatgggcggaatcacgtggggaatttctgccagggcctggagcatggcttcggcatccgcctgctgccccaggcctctgaggacaagttcgactgttacaagtgtcactggcgagaaggcagcatgtgtggctacggcatctgtgagtacagcaccgacgaggtgtacaagggctacttccaggagggcctgcggcacggatttggggtccttgagagtggtccgcaggccccccagcccttcaggtacacgggccactgggagaggggccagaggagcggctatggcattgaggaggatggtgacagaggtgagcgctacattggcatgtggcaggctggtcagcgccacggcccaggggtcatggtcacccaggcaggtgtctgctaccagggcaccttccaggcggacaagacggtgggcccgggcatcctcctctctgaagacgactccctgtatgagggcaccttcaccagggacctgaccctcatggggaagggcaaggtcaccttccccaatggcttcaccctggagggctcgttcggcagtggggcagggagaggactgcacacacagggtgtgctggacacggctgccctcccaccagacccgagcagtacctgcaagaggcagctgggcgtgggtgccttccccgtggaaagccgctggcagggagtctacagccccttccgggactttgtgtgtgctggctgccccagggacctgcaggaggccctgctgggcttcgacgtgcagagctccagggagctgcgtaggtctcaggattacctgtcctgcgagaggacccaccctgaggacagtgtgggcagtatggaagacatcctggaggagctgctgcagcaccgggagcccaaggccctgcagctgtacctcaggaaggctctgagcaactcactgcaccccctgggaaagctgctccggacactgatgctgaccttccaggctacctacgcaggtgtcggggccaacaagcacctgcaggagctggcccaggaggaggtgaagcagcatgcccaggaactctgggctgcctacaggggtctgctgcgagttgccttagagcgcaagggccaggccctggaggaggatgaagacacagagacaagggacctccaggtgcatggattggtgctgcccctcatgctgcccagcttctactcagagctcttcacgctctacctgctgcttcatgagcgggaggacagcttctacagccagggcattgccaacttgagcctctttcctgatacccaactgctcgagttcctggatgtgcagaagcacttgtggcccctcaaggacctcacgctgacgagcaatcagaggtactccctggtcagggacaagtgtttcctgtcagccaccgagtgcctgcagaagatcatgaccacggtggacccacgggagaagctggaggtgctggagaggacatacggggaaattgagggcacggtgtcgagggtattgggccgggagtacaagctgcccatggacgacctgctgccacttctcatctacgtggtgtcgcgcgcccgaattcagcacctgggagccgagatccacctgatccgtgacatgatggaccccaaccacacaggaggcctgtatgacttcctgctcacagccctggagtcctgttacgagcacatccagaaagaagacatgaggctgcaccgcttacctggccactggcactccagggagctctggtagcctggcctttcctggacagactgaagagctgagcagggcactgccagcctgtccctcattacccaaggcaaggggcaggacaggccctcagaagcagctcttggaggagatgagcattttgttttgcacaggaagatgctgctgctgccctgactgggatgagggtgaggggtgacgggtgtggccctggatgtggtggttttcccttggccactagcccatcttcaatgaccccttaatctgcagcagctcacaggctgggggtgaggagtccctggcttctcttagcctgagcctttctcccaagttccagagcctctccgggcctcagtgctgccatctgtacaatggtggagtgagtacgctgtaaaggaccttccattcattttgctgaattccagagtccttttggaaaactgactttagtctgctgggctgtattgacctctggcaggctcgaagcctcactgggtatgcagtcaacaggatgggcctggagatccgtgaactgcaggccacgtacccatgacgtaaacggcggcactggagcaagctggggcggggggtgggtaaaccctcactgccagcaggccccaagtggcttgtaaatcattctcctgtgatgtctgtgggcctgcgtggggacaacaggggcacatgacatctgcctgggccctgaccaataaaccctcagacccaggacccaggaccctgctgtagttggggagcaggagtacctttgggaggggaggactttatttaaacagtggttctagtgtgggaccaagagaggcaggagctgggtcttggggcagctttattcctgttgggcctcagtttctcttccccacacagtttatcttccgtcacattgtgccgggtgacgtgcacggtctccctctgccctagccggagatgcatgatgacaggcagtgtgatgtgttctgaaagtgtccagggcaaagcgtagggagagggtggatttgtgcagggtgcagctctggagaagaagctggatcactcttggtcccattccctaggccctgagcaagtcaggctcctggctctgggtgtggctcccccaaacgaagtactgacttcagcctgtgaggggagggttgagggaggctctggaaagcccagccacacctgagtccctggcagtagccttggggcagagggcacccgcagagtcccagagatgatgtgggcagtgggcagagagagccttggcgcctctgtttgccaccacttccccaggaaggagggacagcatttctctggctggttccactaaatgtgccagcccaaatgcagggcatgggctctggttctgccaggagcctgtgacacccccaggaagggggtggaactgaggaagagcgaggatatgcaggcactcatgcttaccgggactggggcagctcactaggattctatcctttccaatcggcatcagccagctcttgtcccctgataagtgaggacagcctgaccctggcctcaaatgcagccatccctgagttcatgcgatgctgacgggaccccagcacacttccctgcctcctttgagatctgcgagcccttgctgcagttcagattcaacaaggccctctgcccaccctctcactaggcctcacccaacaccagtggaactggagcctctggctgggcacagtggctcactttgggaggctgaggcaggaaggctgctggaaactgagagttcaagaccagcctgggcaacatagtgagaccctgtctctacaaatacaaaataaaataattagctggg

SEQ ID NO: 72804 - DNA, 3471 bp, Artificial Sequence
  derived and/or modified sequence
acagcgctcaggtaagggcgcgacgaagggcgcgcgtctgcggacgggtgtctgcgctccacgcttagctcgtccaggtgggggctcccgcctcctcggctgctgcggtccccgcccagctccttggtcccggcggcagtcatcccccggccgtccgagtccctcgaggccctgagtccggcacctggccatgtgcaaccctgaggaggcagctctgctgcggctggaggaggtcttctcagccaccctcgcccatgtcaacagccttgtcctccagcccctgctcccagccgccccagatccctcggatccctggggcagagagtgcctgcggctcttgcaacagctgcacaagagctcccagcaactctgggaggtgacggaggaaagcctgcactcactgcaggagaggctgcgttacccggactccaccggtctggagtccctgctgctgctgcgaggtgctgaccgtgtactgcaggcccacatagagtacattgagtcctacacaagctgcatggtggtgcaggccttccagaaggcagcaaagaggagaagcgagtactggcggggccagcggaaggcgctgcggcagctgctttcaggtgtgagctcagagggctcggtgggcgcatcgctgggccaggccctccaccagccactcgcccatcacgtgcaacagtacgtgctcctcctgctgagcctcggggacaccattggggagcatcacccaacccgggagctggtggtgaacgcagtcaccctctttgggaacctgcagtccttcatgaagcaggagttggaccaggctgtggccacacaggctctctggcacaccctgagaggccggctgagggatgtgctctgcacccctgctcacagactccttcaggacagccaggacgtacccgtgacggtcgcaccgttgcgggctgagcgtgtgctgctctttgatgatgccctcgtcctgctgcagggccacaatgtccacacctttgatctgaagctggtgtgggtggatcctgggcaggacgggtgcacgtttcacctcctcacgcccgaagaagagttctccttttgtgccaaggactcccagggccaggcagtctggcagtggaaggtgacctgggctgttcaccaggccctgcatgggaagaaggacttccccgtgctgggggctggcctggagccctcccagcctcccgactgccgctgcgcagaatataccttccaggcagagggccggctctgccaggccacctacgagggcgagtggtgcaggggccggccccacggcaagggaaccctgaaatggccggatgggcggaatcacgtggggaatttctgccagggcctggagcatggcttcggcatccgcctgctgccccaggcctctgaggacaagttcgactgttacaagtgtcactggcgagaaggcagcatgtgtggctacggcatctgtgagtacagcaccgacgaggtgtacaagggctacttccaggagggcctgcggcacggatttggggtccttgagagtggtccgcaggccccccagcccttcaggtacacgggccactgggagaggggccagaggagcggctatggcattgaggaggatggtgacagaggtgagcgctacattggcatgtggcaggctggtcagcgccacggcccaggggtcatggtcacccaggcaggtgtctgctaccagggcaccttccaggcggacaagacggtgggcccgggcatcctcctctctgaagacgactccctgtatgagggcaccttcaccagggacctgaccctcatggggaagggcaaggtcaccttccccaatggcttcaccctggagggctcgttcggcagtggggcagggagaggactgcacacacagggtgtgctggacacggctgccctcccaccagacccgagcagtacctgcaagaggcagctgggcgtgggtgccttccccgtggaaagccgctggcagggagtctacagccccttccgggactttgtgtgtgctggctgccccagggacctgcaggaggccctgctgggcttcgacgtgcagagctccagggagctgcgtaggtctcaggattacctgtcctgcgagaggacccaccctgaggacagtgtgggcagtatggaagacatcctggaggagctgctgcagcaccgggagcccaaggccctgcagctgtacctcaggaaggctctgagcaactcactgcaccccctgggaaagctgctccggacactgatgctgaccttccaggctacctacgcaggtgtcggggccaacaagcacctgcaggagctggcccaggaggaggtgaagcagcatgcccaggaactctgggctgcctacaggggtctgctgcgagttgccttagagcgcaagggccaggccctggaggaggatgaagacacagagacaagggacctccaggtgcatggattggtgctgcccctcatgctgcccagcttctactcagagctcttcacgctctacctgctgcttcatgagcgggaggacagcttctacagccagggcattgccaacttgagcctctttcctgatacccaactgctcgagttcctggatgtgcagaagcacttgtggcccctcaaggacctcacgctgacgagcaatcagaggtactccctggtcagggacaagtgtttcctgtcagccaccgagtgcctgcagaagatcatgaccacggtggacccacgggagaagctggaggtgctggagaggacatacggggaaattgagggcacggtgtcgagggtattgggccgggagtacaagctgcccatggacgacctgctgccacttctcatctacgtggtgtcgcgcgcccgaattcagcacctgggagccgagatccacctgatccgtgacatgatggaccccaaccacacaggaggcctgtatgacttcctgctcacagccctggagtcctgttacgagcacatccagaaagaagacatgaggctgcaccgcttacctggccactggcactccagggagctctggtagcctggcctttcctggacagactgaagagctgagcagggcactgccagcctgtccctcattacccaaggcaaggggcaggacaggccctcagaagcagctcttggaggagatgagcattttgttttgcacaggaagatgctgctgctgccctgactgggatgagggtgaggggtgacgggtgtggccctggatgtggtggttttcccttggccactagcccatcttcaatgaccccttaatctgcagcagctcacaggctgggggtgaggagtccctggcttctcttagcctgagcctttctcccaagttccagagcctctccgggcctcagtgctgccatctgtacaatggtggagtgagtacgctgtaaaggaccttccattcattttgctgaattccagagtccttttggaaaactg

SEQ ID NO: 72805 - DNA, 2862 bp, Artificial Sequence
  derived and/or modified sequence
atgtgcaaccccgaggaggccgccctgctgcggctggaggaggtgttttctgcaacattggcgcatgtgaactcgctcgtgctacagccactgctgcccgcagccccggacccatctgacccttggggccgggagtgcttacgcctcttgcagcaactgcacaagagctcgcagcagttgtgggaggtcaccgaagaatctctacatagcctccaggagcgccttcgctaccccgactcaaccgggctagagtcgcttctgcttctgcggggagcggatagggtgctccaggcacacattgaatatatcgaaagctatacctcttgcatggttgtccaggctttccagaaagcggctaagcggcggtccgagtactggagaggccaaaggaaggctctgcggcagctccttagcggggtctcgagtgaaggcagtgtgggcgcctccctgggtcaggcgcttcatcagcccctggcccaccatgtgcaacagtatgtgctgctgctcctctcactaggagatacaatcggggagcatcaccctactcgggagctggtggtaaacgcagtgaccttatttggaaacctgcagtcatttatgaagcaggagctcgatcaagcagtggccacacaggctctgtggcatactctgagggggcgcctgcgggacgtgctgtgcacgcctgcacaccggttactccaggactctcaagatgttccagttactgtagctcccctgagagccgagagagtgctgttattcgacgatgccctggtcctgctgcaggggcacaacgttcatactttcgatttaaaactggtgtgggtcgatcccgggcaggacgggtgcacgttccacctgctgacacctgaggaagaattttcgttctgcgccaaggacagccagggccaggccgtatggcagtggaaggtgacttgggcagtgcatcaggcccttcacggtaagaaagactttccagtgctcggagccgggttagagccttcccagcctcccgactgtcgctgcgccgagtatactttccaagctgagggccgtttgtgtcaggcaacatacgagggcgagtggtgtagaggtcggcctcatggtaaggggactctgaaatggcccgacggacgtaatcatgtcggtaacttttgtcagggtctggagcacggatttgggattaggctgctcccccaggcaagtgaggacaagtttgactgctataagtgccattggagggagggatccatgtgtggctacggtatctgcgagtactcaactgacgaggtgtataaaggctatttccaggaaggcctaagacacggttttggagtgctcgagtctgggcctcaggcacctcagcctttccgctacacaggccactgggaacgtggtcagcgctcaggttatggaatcgaggaggatggggataggggggagcgatatatcggtatgtggcaagccggccaacggcacggccccggggttatggtgacccaggcaggagtatgttatcagggtacgttccaggctgataagacagtgggcccgggtatcctcttgtccgaagatgattccctctacgaaggtaccttcacacgtgacctgaccctgatgggcaagggaaaagtaaccttcccgaatgggttcacgttagaggggtcattcggctctggcgccggcagagggcttcacactcagggcgtgctcgacactgcggctctgccccctgatccttcatctacatgcaagagacagttaggagtgggcgcgtttcccgttgagtcacggtggcagggagtgtacagcccctttcgggatttcgtatgcgcaggctgtcctagagacttacaggaagccctgttgggcttcgatgttcagtcctctcgtgaactgaggcggtcacaggattacctgagttgcgagcgcacccaccctgaggatagcgtggggtcaatggaggacatcctggaggaactcctgcagcaccgagagccaaaggccctgcagctctacctgcgcaaagcgttgagtaactctcttcatcccctgggcaagctgctgaggacgcttatgttgacttttcaggctacctacgcgggggtgggtgccaataaacacctgcaagagctcgcgcaagaagaggttaaacagcatgcgcaagagttgtgggccgcttacaggggtttgctgagggtggcgctggaacggaaaggccaggccctcgaggaagacgaggatacggagactcgcgacctgcaggtccacggtcttgttctgccgcttatgttaccatctttttacagcgagctcttcaccctttatttacttctgcatgagcgtgaggattcattctactcccaggggattgcaaatctgagcttgtttcctgacacccagcttctggagtttctggacgtgcaaaagcacctttggcctctcaaagatctcacgctgaccagtaaccagcgctatagtcttgtaagggacaagtgttttctgagtgccacggagtgtctacaaaagatcatgaccacagtcgacccaagggaaaaactggaagttctggagcgcacttacggcgaaattgaaggtacagtttccagggtgcttggtcgggagtataagctcccaatggacgatctgttgccccttctcatatatgtcgtttcacgcgcgaggatccagcatcttggagccgaaattcatctcattagggacatgatggaccccaatcatacagggggactgtacgacttcttacttaccgctcttgagtcttgctatgagcatatccaaaaggaggatatgaggctccaccggctccccggtcattggcatagcagagaattatggtag

SEQ ID NO: 72806 - DNA, 2862 bp, Artificial Sequence
  derived and/or modified sequence
atgtgcaaccccgaggaggccgccctgctgcggctggaggaggtgtttagcgcgacattagcccacgtcaacagtttggtcctgcaaccactgctcccagctgcccctgaccctagtgacccatggggcagagagtgcctgcgcttgctacagcagctccacaaatcctcccagcaattatgggaggtgacagaggagagtcttcattccctacaggagcgcctgagatacccggattcaaccgggcttgagtctcttctccttctgcgcggcgcggaccgagtgctgcaggctcacatcgaatatatagagtcgtatacgtcgtgcatggtagtacaggcatttcagaaggccgccaagcgacggtcagagtattggagaggacagcgaaaagctctaaggcagctcttatcaggcgtgtccagtgaaggcagcgtgggtgcttcgctcggacaggcactgcatcagccactggcacaccacgtgcagcaatatgtcctcctcttgttgtcactcggggacactattggcgagcatcatccgacgcgggagctggtcgttaatgctgtaacactttttggtaaccttcagagcttcatgaagcaggagctcgatcaggccgttgccactcaggccctctggcataccctccggggccggcttcgggacgtgctatgtacgcccgcacaccggcttcttcaggactcacaggatgtgccagtaactgtcgctccactgcgcgcggaaagggtactgttattcgacgatgctctcgttctcttgcaggggcataatgtgcatacatttgacttaaagctggtctgggtagaccccggtcaggacggttgcacctttcacttgctaacgcctgaggaggagttctccttttgtgccaaagactcccaagggcaggctgtgtggcagtggaaagtgacctgggccgtgcatcaggcattacatggcaaaaaagactttccagtgctaggcgccggcctcgagcctagccaaccacctgattgcagatgtgctgagtatacctttcaggctgaggggcgactgtgccaggcgacgtacgagggcgagtggtgccgcggaaggccgcatggtaagggcacactaaagtggcctgatggccggaaccatgttggaaacttctgtcagggtttggaacacggattcggcatcagacttctgccacaggcttctgaagacaagttcgactgttacaagtgccactggagagaaggaagcatgtgcggatacggtatctgcgaatatagcactgacgaagtctacaagggctatttccaggagggacttcgacacggttttggggttttagagagcggcccccaagctccgcagccattccggtacactggccattgggagcggggacagcgtagcgggtatggaattgaagaggacggcgatcgaggcgagaggtacattggaatgtggcaggctggtcagcgacacggcccaggcgtcatggttacacaagcaggggtgtgctaccagggaacctttcaggcggacaaaactgtgggtcccggaatacttttgtccgaagatgattcactgtacgaggggacatttactcgggatctcacactgatggggaaaggaaaggttacatttcccaacggtttcaccctggaaggctccttcgggagtggagccggccggggacttcatacacagggggtgctcgatactgctgcactgccccctgatccatcttcaacttgtaagcgacagctgggcgtcggagccttcccagtggaatctcggtggcaaggtgtgtacagccccttccgggattttgtttgcgctggctgccctcgggatctgcaagaagccctgctgggattcgacgttcagagctcacgagagctgaggagatcacaggattacctaagttgcgaacgcacccatcctgaagacagcgtggggtcgatggaggacattttggaggaattgttgcagcaccgggaacccaaggccctgcaattgtatctgagaaaggccttatcgaatagtcttcatccattaggcaaactcctgcggacattaatgcttacattccaggccacttatgcaggagttggagcaaataaacacctgcaggagctggctcaggaagaagtcaaacagcacgcccaggagctgtgggctgcataccgaggtctgctgcgagttgcgctcgagcgcaaaggccaggcgctcgaagaggacgaagatactgaaacaagggatctccaggttcatggtctcgtgctgcctttgatgctcccttccttctactcagagctgttcacgctgtacttactcctgcacgagagggaggactccttttacagccagggaatagccaatttaagtcttttccccgacacacagctgctcgaatttctggacgtgcagaagcatctctggcctttaaaggatttaactttgacttctaatcagcggtactccctcgtccgggacaagtgcttcctgtctgcgaccgagtgcctgcaaaagatcatgacgaccgtggatcctcgggaaaaattggaggtgctggaacgtacttatggtgaaatcgagggaacagtgagtagagtgcttggccgagaatacaagctgccaatggacgacctacttcccctgctgatttacgtggtaagtagggctagaatccagcacctgggagcagagattcatctgatcagagatatgatggaccctaatcacacaggggggctgtacgacttcctcctgaccgccctggagtcatgctacgagcacattcagaaagaggacatgagactgcaccgactgcccggacactggcactcacgagagttgtggtag

SEQ ID NO: 72807 - DNA, 2862 bp, Artificial Sequence
  derived and/or modified sequence
atgtgtaacccagaagaggctgccctgttgcggctagaggaagtgttttccgccaccttagcccatgtcaattcgctcgtgcttcagcctctgctcccagctgcgccagatcccagtgatccttgggggagagagtgcctccggctcctgcaacagttacacaagagctcacagcagttatgggaggtcacggaagaaagcttgcactctctccaggaacggctgcgctatccggattccaccggcctggagtctctgctcttgctgcggggagcggatagggtattacaggcccacattgaatacatcgaaagttatacttcctgtatggtggtacaggctttccagaaggcagctaaacgcaggtcagaatactggcggggacaacggaaagcactcaggcaattactcagcggagtatcttccgaggggtctgtgggtgcttccttgggccaagccctccaccagcccctggcgcatcatgtccagcagtatgtgctgctgcttctgtcgttgggggacaccataggggaacaccaccctacaagggagttggtagtcaatgccgtgacactgttcggtaatttacagagctttatgaagcaagagttggaccaggccgtcgcgacccaggccctctggcacacacttcgagggcgtctgcgggatgtactctgcactcctgcccataggctgttgcaggatagccaggatgtacccgtgactgtggcacccctgagagctgagagggtgttattgtttgatgacgctttagtgcttctacagggacacaatgtccacacgtttgacctgaaactggtctgggttgacccaggtcaagatgggtgcacattccaccttcttaccccagaggaggagttcagcttctgcgccaaagattctcagggccaagctgtgtggcagtggaaagttacatgggctgtccatcaggctctccacggaaagaaggacttccccgtgctgggcgctggcctggaaccctctcaaccccctgactgtcgctgtgctgagtataccttccaggcggagggcagactatgccaggcaacttacgaaggcgagtggtgccgtggcaggccacacgggaaggggactctcaagtggccggatggacggaatcacgtgggaaatttctgtcaaggtttggagcacgggttcggaattcgcctcctgccccaagcgtcggaggataaatttgattgttacaagtgtcattggagagaggggagcatgtgcggttacggcatctgcgagtattccacggacgaggtgtacaagggatacttccaggaaggactccgccacggttttggggtactagaaagcggccctcaggcaccacagccgtttaggtacactggacattgggagaggggacaacgcagcggctatggcatcgaagaagatggagataggggggaaagatacattggcatgtggcaggccggtcaacgacatggccctggagtcatggtcacccaggcaggggtgtgttaccaaggtaccttccaggctgacaagaccgtgggccctggtatacttctgtcagaggatgactccttatatgaaggaaccttcacacgcgacttgaccctgatggggaagggcaaggttactttcccaaatgggtttaccctggaagggagctttggaagcggggcaggacgcggactgcacacccagggggtcttagataccgcagcacttcccccagatcccagcagcacatgcaagcgtcaactcggagttggtgcctttccagtcgaatccagatggcagggcgtctacagtcctttccgggacttcgtgtgtgctggctgtccacgggatctgcaggaggccttgctggggtttgacgtccagagttcccgggagctacgccgatcacaggattatctgagctgcgagagaacccaccctgaggattcagtcggctcaatggaggacattctggaggagctgttacagcacagggagcccaaagccttgcagttgtacttaaggaaggctctgtctaactctctgcacccgctaggcaagttactgcgcaccttgatgctcacattccaggccacttatgctggagtgggagctaataaacacctccaggagcttgcgcaagaagaagtcaagcaacatgctcaggagttgtgggccgcttatcgaggtcttttgagggtcgctctggagcgaaaaggccaggcactggaggaggatgaagataccgaaacacgagacctgcaggtccatggcctcgtactcccacttatgctaccctctttttactccgagttgtttaccctctatctccttctgcacgagcgcgaagacagtttttattcccagggtattgccaacctatccctgttccctgacactcagctcctcgaatttctagacgttcagaagcatttatggccccttaaggacctcactcttacgtctaatcagaggtactcgctggttagagataagtgcttcttatcagccaccgagtgcctgcagaagattatgacaacagtggaccccagggaaaaactggaggtgctcgaacggacatacggagaaatcgagggaacggtgtcccgtgtgctcgggagagaatataagctccccatggatgacctactgcccctgctgatttatgtggttagtcgggctagaatccagcatttaggggctgaaatccacctgataagggacatgatggacccgaaccatacaggtggtctgtacgactttctgctgactgcacttgagtcatgctatgagcatatccagaaggaagatatgcgactgcatagactgcctgggcattggcactcacgagaactgtggtag

SEQ ID NO: 72808 - DNA, 2862 bp, Artificial Sequence
  derived and/or modified sequence
atgtgcaatcccgaggaagcagcactccttaggttggaggaggtgttcagtgcaacactagcacatgtgaactctctcgtcctccagccgttgttacccgctgcaccagaccctagtgatccgtggggccgtgagtgtctaagactcctgcagcagttacataagtcctcacaacaactgtgggaggttacagaggaaagcctccactccctgcaggaaaggttaagatatccagacagcactgggttagaaagcttgctcctcctcaggggcgctgacagagtcctgcaggcccatatcgaatacattgagtcctacacctcttgtatggtcgtgcaggctttccagaaagctgccaagcgtcgatctgaatattggaggggccaaaggaaagccttacggcaactgctgagcggcgtttcgtcggaaggtagcgtgggcgcttcactgggacaagcgctgcaccagcctttagcacaccatgtgcagcagtatgtcttgcttctgctttctcttggagatactataggggagcaccatcctacacgagaactggtcgtcaatgcagtgaccctgttcgggaacctacagagtttcatgaagcaggagctggaccaggcggtagcaactcaagcgctgtggcatacacttcgcggacgcctccgggacgttctatgtacgcccgcacataggctcttgcaggacagtcaggatgtgcccgtcaccgtcgcacctctcagagccgaaagagtactccttttcgacgatgccctggtgctcctccaaggacacaacgtgcacacattcgatctgaaactcgtgtgggttgacccagggcaggatgggtgtactttccacctcctcactccagaagaagaattttcgttttgcgctaaggattcgcagggccaagctgtgtggcagtggaaggtgacgtgggctgttcatcaagctctgcacggaaagaaagattttcccgttctgggcgcaggactcgagccctctcagccacctgactgcaggtgcgccgagtacaccttccaggctgagggaaggctgtgccaggccacgtacgaaggagaatggtgtcgcggacggccacatgggaaggggacactgaagtggccagacggccgaaatcacgtcggaaacttctgccaggggctggagcacggattcggtatccgactgctgccccaggccagtgaggataaattcgattgctacaagtgccactggagggaaggaagcatgtgcggttatggtatttgtgagtactccacggacgaagtgtacaaaggctatttccaagagggcctaagacacggattcggtgtgctggaaagtggcccacaggcaccccagccctttcgctacactgggcactgggaaagaggccagaggagtggatacggtattgaggaggatggtgatcgcggtgagcgatatataggtatgtggcaggccggacaaaggcatggccctggcgtgatggtgacacaggcaggtgtatgctaccaagggaccttccaggccgacaagaccgtgggtccaggcatactgctgagcgaggacgattccctttatgaggggactttcacccgggacctgactttaatgggaaaggggaaggtgacatttcctaacggcttcaccttggagggtagttttggctcgggcgcaggaaggggcttgcatactcagggcgtcctcgacacagccgctctcccaccagacccctcatcaacgtgtaaacgccaactgggggtgggagcctttccggtggagtcaaggtggcagggggtttatagcccctttcgggacttcgtgtgcgccggttgtcctagggacctgcaggaggctctgctcggcttcgatgtgcagtcctcccgcgaactacggcgttcccaggactacctgtcttgtgagcgcacacatccggaggactcagtcgggagcatggaggacattctggaggaactactgcagcaccgagagccgaaggctctgcagctctacctccgaaaggcactcagtaatagcttacaccccctcggtaaactcctgaggactctgatgctgacatttcaggccacctacgctggagtgggagccaacaaacatctacaggaactcgctcaggaagaggttaaacagcacgcccaggagctctgggctgcatatagaggattgctgcgcgtcgctcttgagaggaaggggcaggcccttgaggaagacgaggacactgagacacgggacctgcaagtccatgggctcgttctccctttgatgctcccaagcttttactccgaattgttcacactgtatctcctgctacacgagagagaagatagcttttactcgcagggcatcgccaacctttctctgtttccagacacccagctcctggagttcctggatgttcagaagcatctctggccactaaaggatcttaccttaacgtcgaaccaacggtactcactggtccgtgacaaatgttttctgtcagctactgagtgtctacaaaagatcatgaccacagtcgaccccagagagaagttggaagtgctagaacggacttacggcgaaatcgagggtaccgtgagccgagtactgggcagggagtacaagttgcctatggacgatctgctcccactgttaatctacgtcgtgtcacgtgcacgcatccagcacctcggcgcagagatccacctcataagagatatgatggacccaaaccatacaggaggactgtacgactttcttctcacggcactagaatcgtgttacgaacatatccagaaggaggatatgagactgcacaggcttccgggtcattggcactccagggaactgtggtag

SEQ ID NO: 72809 - DNA, 2862 bp, Artificial Sequence
  derived and/or modified sequence
atgtgcaaccccgaggaggccgccctgctgagactggaggaggtgttcagcgccaccctggcccacgtgaacagcctggtgctgcagcccctgctgcccgccgcccccgaccccagcgacccctggggcagagagtgcctgagactgctgcagcagctgcacaagagcagccagcagctgtgggaggtgaccgaggagagcctgcacagcctgcaggagagactgagataccccgacagcaccggcctggagagcctgctgctgctgagaggcgccgacagagtgctgcaggcccacatcgagtacatcgagagctacaccagctgcatggtggtgcaggccttccagaaggccgccaagagaagaagcgagtactggagaggccagagaaaggccctgagacagctgctgagcggcgtgagcagcgagggcagcgtgggcgccagcctgggccaggccctgcaccagcccctggcccaccacgtgcagcagtacgtgctgctgctgctgagcctgggcgacaccatcggcgagcaccaccccaccagagagctggtggtgaacgccgtgaccctgttcggcaacctgcagagcttcatgaagcaggagctggaccaggccgtggccacccaggccctgtggcacaccctgagaggcagactgagagacgtgctgtgcacccccgcccacagactgctgcaggacagccaggacgtgcccgtgaccgtggcccccctgagagccgagagagtgctgctgttcgacgacgccctggtgctgctgcagggccacaacgtgcacaccttcgacctgaagctggtgtgggtggaccccggccaggacggctgcaccttccacctgctgacccccgaggaggagttcagcttctgcgccaaggacagccagggccaggccgtgtggcagtggaaggtgacctgggccgtgcaccaggccctgcacggcaagaaggacttccccgtgctgggcgccggcctggagcccagccagccccccgactgcagatgcgccgagtacaccttccaggccgagggcagactgtgccaggccacctacgagggcgagtggtgcagaggcagaccccacggcaagggcaccctgaagtggcccgacggcagaaaccacgtgggcaacttctgccagggcctggagcacggcttcggcatcagactgctgccccaggccagcgaggacaagttcgactgctacaagtgccactggagagagggcagcatgtgcggctacggcatctgcgagtacagcaccgacgaggtgtacaagggctacttccaggagggcctgagacacggcttcggcgtgctggagagcggcccccaggccccccagcccttcagatacaccggccactgggagagaggccagagaagcggctacggcatcgaggaggacggcgacagaggcgagagatacatcggcatgtggcaggccggccagagacacggccccggcgtgatggtgacccaggccggcgtgtgctaccagggcaccttccaggccgacaagaccgtgggccccggcatcctgctgagcgaggacgacagcctgtacgagggcaccttcaccagagacctgaccctgatgggcaagggcaaggtgaccttccccaacggcttcaccctggagggcagcttcggcagcggcgccggcagaggcctgcacacccagggcgtgctggacaccgccgccctgccccccgaccccagcagcacctgcaagagacagctgggcgtgggcgccttccccgtggagagcagatggcagggcgtgtacagccccttcagagacttcgtgtgcgccggctgccccagagacctgcaggaggccctgctgggcttcgacgtgcagagcagcagagagctgagaagaagccaggactacctgagctgcgagagaacccaccccgaggacagcgtgggcagcatggaggacatcctggaggagctgctgcagcacagagagcccaaggccctgcagctgtacctgagaaaggccctgagcaacagcctgcaccccctgggcaagctgctgagaaccctgatgctgaccttccaggccacctacgccggcgtgggcgccaacaagcacctgcaggagctggcccaggaggaggtgaagcagcacgcccaggagctgtgggccgcctacagaggcctgctgagagtggccctggagagaaagggccaggccctggaggaggacgaggacaccgagaccagagacctgcaggtgcacggcctggtgctgcccctgatgctgcccagcttctacagcgagctgttcaccctgtacctgctgctgcacgagagagaggacagcttctacagccagggcatcgccaacctgagcctgttccccgacacccagctgctggagttcctggacgtgcagaagcacctgtggcccctgaaggacctgaccctgaccagcaaccagagatacagcctggtgagagacaagtgcttcctgagcgccaccgagtgcctgcagaagatcatgaccaccgtggaccccagagagaagctggaggtgctggagagaacctacggcgagatcgagggcaccgtgagcagagtgctgggcagagagtacaagctgcccatggacgacctgctgcccctgctgatctacgtggtgagcagagccagaatccagcacctgggcgccgagatccacctgatcagagacatgatggaccccaaccacaccggcggcctgtacgacttcctgctgaccgccctggagagctgctacgagcacatccagaaggaggacatgagactgcacagactgcccggccactggcacagcagagagctgtggtag

SEQ ID NO: 72810 - protein, 754 aa, Artificial Sequence
  derived and/or modified sequence
MFSGGCHSPGFGRPSPAFPAPGSPPPAPRPCRQETGEQIAIKQCRQELSPRNRERWCLEIQIMRRLTHPNVVAARDVPEGMQNLAPNDLPLLAMEYCQGGDLRKYLNQFENCCGLREGAILTLLSDIASALRYLHENRIIHRDLKPENIVLQQGEQRLIHKIIDLGYAKELDQGSLCTSFVGTLQYLAPELLEQQKYTVTVDYWSFGTLAFECITGFRPFLPNWQPVQWHSKVRQKSEVDIVVSEDLNGTVKFSSSLPYPNNLNSVLAERLEKWLQLMLMWHPRQRGTDPTYGPNGCFKALDDILNLKLVHILNMVTGTIHTYPVTEDESLQSLKARIQQDTGIPEEDQELLQEAGLALIPDKPATQCISDGKLNEGHTLDMDLVFLFDNSKITYETQISPRPQPESVSCILQEPKRNLAFFQLRKVWGQVWHSIQTLKEDCNRLQQGQRAAMMNLLRNNSCLSKMKNSMASMSQQLKAKLDFFKTSIQIDLEKYSEQTEFGITSDKLLLAWREMEQAVELCGRENEVKLLVERMMALQTDIVDLQRSPMGRKQGGTLDDLEEQARELYRRLREKPRDQRTEGDSQEMVRLLLQAIQSFEKKVRVIYTQLSKTVVCKQKALELLPKVEEVVSLMNEDEKTVVRLQEKRQKELWNLLKIACSKVRGPVSGSPDSMNASRLSQPGQLMSQPSTASNSLPEPAKKSEELVAEAHNLCTLLENAIQDTVREQDQSFTALDWSWLQTEEEEHSCLEQAS

SEQ ID NO: 72811 - DNA, 2265 bp, Artificial Sequence
  derived and/or modified sequence
atgttttctggagggtgtcacagtccgggctttggcagaccaagcccagccttccctgcacctggctcacccccccctgcgcctaggccctgccggcaggaaacaggagagcagatagctattaagcaatgtaggcaagagctgtcaccccgcaaccgggagcgctggtgtttggagattcaaattatgcgccgcctcacccatcccaacgtggtcgccgcccgcgacgtgccagaagggatgcaaaacctggctcctaatgatctaccactcctcgccatggaatactgtcaagggggcgatctcaggaagtatctgaaccaattcgaaaactgttgtgggctgcgcgaaggcgctatcctgacactgctcagcgatatagcgtcagctctccgctatctccacgagaacagaatcatccaccgtgatctcaaacccgagaacatagtccttcagcaaggggaacaacgactcatacataaaattattgatctgggctacgccaaggagcttgatcaggggtcgctttgcacatctttcgtggggacactccagtaccttgcccccgaactgctggagcagcagaaatacacagtcaccgttgactattggtccttcggaacacttgctttcgagtgtattaccggcttccgccctttcctccccaactggcaacctgtgcagtggcactctaaggtgcggcaaaagtctgaggtcgacatcgtggtttcagaggatttgaacggtactgtgaaattttccagctccctcccatatccaaacaatcttaacagtgtgctggccgagcgtctggaaaagtggctgcaactgatgctcatgtggcaccccagacagcgcgggacagacccaacgtacggaccgaatggatgttttaaagcactggatgatatcctaaacctcaagttggtgcatatccttaatatggtcactggaaccatccacacctacccggtcacagaagatgaatcactgcaatcacttaaagccagaattcagcaggacacaggcattcctgaggaggaccaggaactcctgcaagaagccgggctggccctgattcccgataagcccgccacacagtgcatctctgacggaaagctgaacgagggccacacattagacatggatttggttttcctgtttgacaactctaagatcacatacgagacgcaaatctcacccagaccacagcctgaaagcgtttcttgtattctgcaagagcccaagagaaacctagcctttttccagctccgaaaagtctgggggcaagtgtggcacagcattcagaccctgaaggaggattgcaacagactgcagcaaggacagcgcgcagccatgatgaaccttctgagaaacaattcctgcttgtcaaaaatgaagaatagtatggcttccatgtcacagcagctcaaggctaaactggatttctttaagaccagcatccagatcgatctcgagaaatatagcgagcaaaccgagttcgggatcaccagcgacaaattactccttgcctggagggaaatggaacaagctgttgagttgtgtggtcgcgaaaatgaggtgaaactgttagtcgagagaatgatggccctgcaaaccgatatcgtggatctccagcgcagcccaatgggacgcaagcaagggggaaccctggacgacctagaggaacaagcccgagaactctaccgcaggctgcgagaaaaacctagagatcaaaggacagaaggggatagccaggagatggtgagactgcttcttcaggcaatccagtcattcgaaaagaaggtgagagtaatttacactcagctgtccaaaaccgtcgtgtgcaaacagaaggccctagagctcttgcctaaggtggaggaggtagtgtctctcatgaatgaagatgagaagactgtggtgcggctccaggagaagcggcaaaaagagctctggaacctgctcaaaatagcatgttcaaaggttcgcggacccgtgtccggttccccggattcgatgaacgcttccaggctgtcacaaccaggccagctgatgtcacagcccagtacagctagcaatagccttcctgaaccagccaaaaaaagcgaggagttggtcgcagaagcccacaacttatgtacgcttctagagaatgcaatccaggacacagtccgagaacaggaccagagcttcaccgccctcgactggagttggctgcagaccgaggaagaggaacactcctgcctagaacaggcctcgtag

SEQ ID NO: 72812 - DNA, 1602 bp, Artificial Sequence
  derived and/or modified sequence
atgtcttcagacggaaccatacgtcacagtaaagttcgccaaaaaagcgaagtggacatcgtcgtgtcagaagatctgaatggcactgtaaaattcagctcttcccttccatatccaaataaccttaattctgtgctcgccgagcggttagagaagtggctgcagctgatgttgatgtggcatccacgacagagagggaccgaccccacctacggaccaaatggctgtttcaaggcgctcgacgacatattgaatctgaagctggtgcacattctaaacatggttactggaacaatccatacctatcctgtgaccgaggatgaatctctgcagagtttgaaggcccggattcagcaggataccggtatacctgaggaggatcaggagcttttgcaggaggccggattggcactcatcccagataagcccgcaacacagtgtatctcagatggaaagctgaacgaagggcatacgctggatatggatcttgtctttctgtttgataattctaagatcacatacgaaacacagatctcccctcgcccacaacctgaatctgtgtcttgtatattgcaggaaccaaagcggaacctggctttcttccagctgcggaaggtgtggggccaggtgtggcactcaatccagaccctgaaggaggattgcaatcggctacaacaagggcagagggccgctatgatgaacttattacgcaacaatagctgtttatcaaaaatgaagaattccatggccagcatgtctcagcaattgaaagccaagctggacttttttaagacaagcattcagatcgacctagagaaatactccgagcaaaccgagttcggaatcacgtcggacaagctgctcctagcttggcgagagatggagcaagcggtggagctgtgcgggagagagaacgaagtgaagctgctcgtggagcgcatgatggctttgcaaaccgatatcgttgatcttcagcggtctcccatgggtagaaaacaaggtggaactcttgacgaccttgaggaacaggctagagaactgtatcgtcggttgagagaaaaaccaagggaccagaggaccgaaggtgactcgcaagaaatggttagactccttctccaggctattcagtcattcgagaagaaagtaagagtgatctacacccagctgtccaaaaccgttgtgtgtaaacagaaagcccttgagctcctgcccaaggtcgaagaggtcgtttcactaatgaacgaggacgaaaaaaccgttgtgaggttacaagagaagagacagaaggaactgtggaatctgctgaaaatagcttgcagcaaagtaaggggacctgtctcggggagcccagactccatgaatgcgagtcgcctatcgcagccaggacaactgatgtcacaaccctccaccgctagcaattccctccctgagccagctaaaaaatccgaagaactggtagccgaagcccacaacctctgtacgctgctggagaatgccatacaggacaccgtgcgtgagcaggaccaaagctttacggccctagattggtcgtggcttcagactgaagaagaggaacattcgtgtttggagcaggcatcttag

SEQ ID NO: 72813 - DNA, 2403 bp, Artificial Sequence
  derived and/or modified sequence
aagtgtttgaggaagtcgcgccgcgctgcccgcgttaagattcccgcattttaatgttttcaggggggtgtcatagccccgggtttggccgccccagccccgccttccccgccccggggagcccgccccctgccccgcgtccctgccgacaggaaacaggtgagcagattgccatcaagcagtgccggcaggagctcagcccccggaaccgagagcggtggtgcctggagatccagatcatgagaaggctgacccaccccaatgtggtggctgcccgagatgtccctgaggggatgcagaacttggcgcccaatgacctgcccctgctggccatggagtactgccaaggaggagatctccggaagtacctgaaccagtttgagaactgctgtggtctgcgggaaggtgccatcctcaccttgctgagtgacattgcctctgcgcttagataccttcatgaaaacagaatcatccatcgggatctaaagccagaaaacatcgtcctgcagcaaggagaacagaggttaatacacaaaattattgacctaggatatgccaaggagctggatcagggcagtctttgcacatcattcgtggggaccctgcagtacctggccccagagctactggagcagcagaagtacacagtgaccgtcgactactggagcttcggcaccctggcctttgagtgcatcacgggcttccggcccttcctccccaactggcagcccgtgcagtggcattcaaaagtgcggcagaagagtgaggtggacattgttgttagcgaagacttgaatggaacggtgaagttttcaagctctttaccctaccccaataatcttaacagtgtcctggctgagcgactggagaagtggctgcaactgatgctgatgtggcacccccgacagaggggcacggatcccacgtatgggcccaatggctgcttcaaggccctggatgacatcttaaacttaaagctggttcatatcttgaacatggtcacgggcaccatccacacctaccctgtgacagaggatgagagtctgcagagcttgaaggccagaatccaacaggacacgggcatcccagaggaggaccaggagctgctgcaggaagcgggcctggcgttgatccccgataagcctgccactcagtgtatttcagacggcaagttaaatgagggccacacattggacatggatcttgtttttctctttgacaacagtaaaatcacctatgagactcagatctccccacggccccaacctgaaagtgtcagctgtatccttcaagagcccaagaggaatctcgccttcttccagctgaggaaggtgtggggccaggtctggcacagcatccagaccctgaaggaagattgcaaccggctgcagcagggacagcgagccgccatgatgaatctcctccgaaacaacagctgcctctccaaaatgaagaattccatggcttccatgtctcagcagctcaaggccaagttggatttcttcaaaaccagcatccagattgacctggagaagtacagcgagcaaaccgagtttgggatcacatcagataaactgctgctggcctggagggaaatggagcaggctgtggagctctgtgggcgggagaacgaagtgaaactcctggtagaacggatgatggctctgcagaccgacattgtggacttacagaggagccccatgggccggaagcaggggggaacgctggacgacctagaggagcaagcaagggagctgtacaggagactaagggaaaaacctcgagaccagcgaactgagggtgacagtcaggaaatggtacggctgctgcttcaggcaattcagagcttcgagaagaaagtgcgagtgatctatacgcagctcagtaaaactgtggtttgcaagcagaaggcgctggaactgttgcccaaggtggaagaggtggtgagcttaatgaatgaggatgagaagactgttgtccggctgcaggagaagcggcagaaggagctctggaatctcctgaagattgcttgtagcaaggtccgtggtcctgtcagtggaagcccggatagcatgaatgcctctcgacttagccagcctgggcagctgatgtctcagccctccacggcctccaacagcttacctgagccagccaagaagagtgaagaactggtggctgaagcacataacctctgcaccctgctagaaaatgccatacaggacactgtgagggaacaagaccagagtttcacggccctagactggagctggttacagacggaagaagaagagcacagctgcctggagcaggcctcatgatgtggggggactcgaccccctgacatggggcagcccatagcaggccttgtgcagtggggggactcgaccccctgacatggggctg

SEQ ID NO: 72814 - DNA, 2778 bp, Artificial Sequence
  derived and/or modified sequence
agtgtttgaggaagtcgcgccgcgctgcccgcgttaagattcccgcattttaatgttttcaggggggtgtcatagccccgggtttggccgccccagccccgccttccccgccccggggagcccgccccctgccccgcgtccctgccgacagagttagcacgacatcagtatgagctggtcaccttccctgacaacgcagacatgtggggcctgggaaatgaaagagcgccttgggacagggggatttggaaatgtcatccgatggcacaatcaggcattcaaaagtgcggcagaagagtgaggtggacattgttgttagcgaagacttgaatggaacggtgaagttttcaagctctttaccctaccccaataatcttaacagtgtcctggctgagcgactggagaagtggctgcaactgatgctgatgtggcacccccgacagaggggcacggatcccacgtatgggcccaatggctgcttcaaggccctggatgacatcttaaacttaaagctggttcatatcttgaacatggtcacgggcaccatccacacctaccctgtgacagaggatgagagtctgcagagcttgaaggccagaatccaacaggacacgggcatcccagaggaggaccaggagctgctgcaggaagcgggcctggcgttgatccccgataagcctgccactcagtgtatttcagacggcaagttaaatgagggccacacattggacatggatcttgtttttctctttgacaacagtaaaatcacctatgagactcagatctccccacggccccaacctgaaagtgtcagctgtatccttcaagagcccaagaggaatctcgccttcttccagctgaggaaggtgtggggccaggtctggcacagcatccagaccctgaaggaagattgcaaccggctgcagcagggacagcgagccgccatgatgaatctcctccgaaacaacagctgcctctccaaaatgaagaattccatggcttccatgtctcagcagctcaaggccaagttggatttcttcaaaaccagcatccagattgacctggagaagtacagcgagcaaaccgagtttgggatcacatcagataaactgctgctggcctggagggaaatggagcaggctgtggagctctgtgggcgggagaacgaagtgaaactcctggtagaacggatgatggctctgcagaccgacattgtggacttacagaggagccccatgggccggaagcaggggggaacgctggacgacctagaggagcaagcaagggagctgtacaggagactaagggaaaaacctcgagaccagcgaactgagggtgacagtcaggaaatggtacggctgctgcttcaggcaattcagagcttcgagaagaaagtgcgagtgatctatacgcagctcagtaaaactgtggtttgcaagcagaaggcgctggaactgttgcccaaggtggaagaggtggtgagcttaatgaatgaggatgagaagactgttgtccggctgcaggagaagcggcagaaggagctctggaatctcctgaagattgcttgtagcaaggtccgtggtcctgtcagtggaagcccggatagcatgaatgcctctcgacttagccagcctgggcagctgatgtctcagccctccacggcctccaacagcttacctgagccagccaagaagagtgaagaactggtggctgaagcacataacctctgcaccctgctagaaaatgccatacaggacactgtgagggaacaagaccagagtttcacggccctagactggagctggttacagacggaagaagaagagcacagctgcctggagcaggcctcatgatgtggggggactcgaccccctgacatggggcagcccatagcaggccttgtgcagtggggggactcgaccccctgacatggggctgcctggagcaggccgcgtgacgtggggctgcctggccgcggctctcacatggtggttcctgctgcactgatggcccaggggtctctggtatccagatggagctctcgcttcctcagcagctgtgactttcacccaggacccaggacgcagccctccgtgggcactgccggcgccttgtctgcacactggaggtcctccattacagaggcccagcgcacatcgctggccccacaaacgttcaggggtacagccatggcagctccttcctctgccgtgagaaaagtgcttggagtacggtttgccacacacgtgactggacagtgtccaattcaaatctttcagggcagagtccgagcagcgcttggtgacagcctgtcctctcctgctctccaaaggccctgctccctgtcctctctcactttacagcttgtgtttcttctggattcagcttctcctaaacagacagtttaattatagttgcggcctggccccatcctcacttcctctttttatttcactgctgctaaaattgtgtttttacctactactttggtggttgtcctcttttcggcaaagttggagcgagtgccaagctctccatctgtggtcctttctgccaagagcgactcatagtaaccaggatgggagagcagctgccttattctgaatcccaaaaattacttgggggtgattgtcacagaggagggacagaaagggtatctgctgaccaccagcctgcctacccatgcccatgtctccattcctgctcaagcgtgtgtgctgggccggggagtccctgtctctcacagcatctagcagtattattaaatggattcatttt

SEQ ID NO: 72815 - DNA, 2265 bp, Artificial Sequence
  derived and/or modified sequence
atgttttctgggggctgccacagccctggcttcggccggcccagccctgccttccctgcccctggcagccccccaccagccccccggccctgccggcaggagactggagagcagatcgccatcaagcagtgccggcaggagctgagccccaggaaccgggagcgctggtgcctggagatccagatcatgaggcggctgacccaccccaacgtggtggccgccagagatgtgcctgagggcatgcagaacctggccccaaatgacctgcccctgctggccatggagtactgccagggcggggacctgaggaagtacctgaaccagtttgagaactgctgcggcctgcgggagggcgccatcctgaccctgctgagtgacatcgccagcgccctgcgctacctgcacgagaaccgcatcatccaccgggacctgaagccagaaaatattgtgctgcagcagggcgagcagaggctcatccacaagatcatcgacctgggctacgccaaggagctggaccagggcagcctgtgcaccagctttgtgggcaccctgcagtacctggcccctgagctgctggagcagcagaagtacacagtgacagtggactactggagctttggcaccctggcctttgagtgcatcaccggcttccggcccttcctgcccaactggcagcctgtgcagtggcacagcaaggtgcggcagaagtctgaggtggacatcgtggtgtctgaggacctgaatggcaccgtgaagttcagcagcagcctgccctaccccaacaacctgaacagcgtgctggccgagcggctggagaagtggctgcagctgatgctgatgtggcacccccggcagaggggcacagaccccacctacggccccaacggctgcttcaaggccctggatgacatcctgaacctgaagctggtgcacatcctgaacatggtgacaggcaccatccacacctaccctgtgacagaagatgagagcctgcagagcctgaaggcccgcatccagcaggacaccggcatccctgaggaggaccaggagctgctgcaggaggccggcctggccctgatcccagacaagccagccacccagtgcatcagtgatggcaagctgaatgaaggccacaccctggacatggacctggtgttcctgtttgacaacagcaagatcacctatgagacccagatcagcccccggccccagcctgagagcgtgtcctgcatcctgcaggagcccaagaggaacctggccttcttccagctgaggaaggtgtggggccaggtgtggcacagcatccagaccctgaaggaggactgcaaccggctgcagcagggccagagagctgccatgatgaacctgctgaggaacaacagctgcctgagcaagatgaagaacagcatggcctccatgagccagcagctgaaggccaagctggacttcttcaagaccagcatccagattgacctggagaagtacagcgagcagacagaatttggcatcaccagtgacaagctgctgctggcctggagggagatggagcaggccgtggagctgtgtggcagagaaaatgaggtgaagctgctggtggagaggatgatggccctgcagacagacatcgtggacctgcagaggagccccatgggcaggaagcagggcggcaccctggatgacctggaggagcaggcccgggagctgtaccgccgcctgcgggagaagccccgggaccagaggacagaaggagacagccaggagatggtgcggctgctgctgcaggccatccagagctttgagaagaaggtgcgggtcatctacacccagctgagcaagacagtggtgtgcaagcagaaggccctggagctgctgcccaaggtggaggaggtggtgtccctgatgaatgaagatgagaagacagtggtgcggctgcaggagaagaggcagaaggagctgtggaacctgctgaagatcgcctgcagcaaggtgcggggccctgtgtctggcagcccagacagcatgaatgccagccggctgagccagcccggccagctgatgagccagcccagcacagccagcaacagcctgcctgagcccgccaagaagtctgaggagctggtggccgaggcccacaacctgtgcaccctgctggagaatgccatccaggacacagtgcgggagcaggaccagagcttcaccgccctggactggagctggctgcagacagaggaggaggagcacagctgcctggagcaggccagctag

SEQ ID NO: 72816 - DNA, 1602 bp, Artificial Sequence
  derived and/or modified sequence
atgagcagtgatggcaccatccgccacagcaaggtgcggcagaagtctgaggtggacatcgtggtgtctgaggacctgaatggaacagtgaagttcagcagcagcctgccctaccccaacaacctgaacagcgtgctggccgagcggctggagaagtggctgcagctgatgctgatgtggcacccccggcagaggggcacagaccccacctacggccccaacggctgcttcaaggccctggatgacatcctgaacctgaagctggtgcacatcctgaacatggtgacaggcaccatccacacctaccctgtgacagaagatgagagcctgcagagcctgaaggcccgcatccagcaggacaccggcatccctgaggaggaccaggagctgctgcaggaggccggcctggccctgatcccagacaagccagccacccagtgcatcagtgatggcaagctgaatgaaggccacaccctggacatggacctggtgttcctgtttgacaacagcaagatcacctatgagacccagatcagcccccggccccagcctgagagcgtgtcctgcatcctgcaggagcccaagaggaacctggccttcttccagctgaggaaggtgtggggccaggtgtggcacagcatccagaccctgaaggaggactgcaaccggctgcagcagggccagagagctgccatgatgaacctgctgaggaacaacagctgcctgagcaagatgaagaacagcatggcctccatgagccagcagctgaaggccaagctggacttcttcaagaccagcatccagattgacctggagaagtacagcgagcagacagaatttggcatcaccagtgacaagctgctgctggcctggagggagatggagcaggccgtggagctgtgtggccgggagaatgaggtgaagctgctggtggagaggatgatggccctgcagacagacatcgtggacctgcagaggagccccatgggcaggaagcagggcggcaccctggatgacctggaggagcaggcccgggagctgtacagaaggctgcgggagaagccccgggaccagaggacagaaggagacagccaggagatggtgcggctgctgctgcaggccatccagagctttgagaagaaggtgcgggtcatctacacccagctgagcaagacagtggtgtgcaagcagaaggccctggagctgctgcccaaggtggaggaggtggtgtccctgatgaatgaagatgagaagacagtggtgcggctgcaggagaagaggcagaaggagctgtggaacctgctgaagatcgcctgcagcaaggtgcggggccctgtgtctggcagcccagacagcatgaatgccagccggctgagccagcccggccagctgatgagccagcccagcacagccagcaacagcctgcctgagcccgccaagaagtctgaggagctggtggccgaggcccacaacctgtgcaccctgctggagaatgccatccaggacacagtgcgggagcaggaccagagcttcaccgccctggactggagctggctgcagacagaggaggaggagcacagctgcctggagcaggccagctag

SEQ ID NO: 72817 - DNA, 2265 bp, Artificial Sequence
  derived and/or modified sequence
atgttcagcggcggctgccacagccccggcttcggccggcccagccccgcattcccagccccagggtcacccccccccgccccaagaccctgccgccaggagactggagagcagatcgccatcaagcagtgccgtcaagagttgtctcctcggaacagggagcgttggtgcttggaaatccagattatgcggagactcactcaccccaatgtcgtcgctgcccgagacgtgccggaaggaatgcagaacttggctcctaacgacctccccttattggcgatggaatattgccaaggtggagacctcagaaaatatttaaatcagtttgaaaattgctgtgggttacgggagggcgcaatcctgacacttttgagcgacatagcgagcgccctgcgttatctgcacgagaaccgcattatccaccgagatctcaagccagagaacattgtgctgcagcagggagaacaaaggcttatccacaagatcatcgatttaggctatgccaaggagctagaccagggcagtctttgtacttcttttgtcggtacactacagtatttggctcccgagttgctcgagcagcagaagtacactgttaccgtagactattggtcatttgggacgctggcatttgaatgtattactgggttcagaccttttctcccaaactggcagcccgtgcaatggcacagcaaggtgcggcaaaagtccgaggtggatattgtggtgtcagaggacctgaatggcactgttaagttttcctccagtctaccctaccctaataatttaaacagcgtcctggccgagagactggagaaatggctgcaattgatgctgatgtggcacccgcgacagagggggaccgacccaacgtacggtcccaacgggtgctttaaggccctcgacgacattctaaatttgaaattagtgcatattctcaacatggtcactgggactatacacacctaccccgtgacagaggacgaatcactgcagtccctgaaggcccggatccagcaagacacgggaattcctgaggaagaccaggaactcctgcaagaggccggcttagctctgattccagacaagcccgccacgcagtgtatcagtgacggtaaactcaatgaaggtcacaccctggacatggatctggtgtttctgttcgacaactccaaaattacctatgagacgcaaatatccccaaggccgcagcctgaaagcgtgtcttgcattctccaggaaccgaagcgcaacctggccttttttcagttaaggaaggtgtggggtcaagtatggcacagtatccaaacgttgaaagaggattgtaaccgactgcagcagggccagagggcggccatgatgaatttgctgcggaacaattcatgtttatctaagatgaaaaactccatggccagcatgagccagcagctcaaggccaaactggatttcttcaaaacctccatacagatcgaccttgaaaagtactcggagcagaccgagtttggcatcactagcgataagcttttgcttgcatggagggagatggaacaagcggtcgagctatgcggcagggagaatgaggtcaaactcctggtggagcgaatgatggccttgcagacagatattgtcgacctacaacggtctcctatgggcaggaagcagggcggaacattggatgaccttgaggagcaggcgagagaattgtatcggaggctgcgggagaaaccacgggatcaacgcacagaaggagactcacaggagatggtgagattgttactccaagccatccagagtttcgagaagaaggttcgagttatatacacacagctatctaagactgtggtgtgcaagcagaaggccctggagctgttaccaaaagtggaggaggtcgtttccctcatgaacgaagatgaaaagacggtggtgagactgcaggaaaagaggcagaaagagttatggaacctgcttaagatcgcctgctcaaaggtgcggggcccagtgtccggctccccagatagcatgaacgcctctcggctgagtcagcctgggcagctgatgtcacaaccttccactgcttctaatagcctccccgagccggccaagaaatcggaggagctggtggccgaggctcataatctgtgtactctgcttgaaaatgcgattcaagatacggtgcgcgaacaggaccagagtttcactgccctggactggagctggttacaaactgaggaggaggaacactcttgtctagagcaagccagttag

SEQ ID NO: 72818 - DNA, 1602 bp, Artificial Sequence
  derived and/or modified sequence
atgagcagcgacggcaccatccggcacagcaaggtgcggcagaagtccgaagtcgacattgtagtgagcgaggatctcaatggtacagtaaagttctcctcaagcctgccctatcccaacaacttgaacagtgtactggcagagcggctggagaagtggcttcagctgatgctaatgtggcaccctagacagcgcggtaccgaccccacatacggacctaatggctgcttcaaggccctggatgacatcttaaatcttaaactggtccacatcctgaatatggtcaccggcacaatccacacataccccgtgactgaggatgagtcgctgcagagtttgaaggctcgcatccagcaggataccggaatcccagaggaggaccaggaactgctgcaagaagctggcttagccctgatccctgacaaacctgcaacccagtgtatctccgatggcaagctgaatgaggggcataccctcgacatggacttagtgttcctgttcgacaattccaagatcacttatgagacgcagattagcccacgtccgcagcccgagagcgtgtcctgtattctacaggaacctaagcgtaacttagcattttttcagctccgcaaggtctggggccaggtttggcattcaattcagacactcaaggaggactgtaatcggttacagcaggggcagcgcgccgccatgatgaacctcctgaggaacaatagctgtttatctaaaatgaaaaacagtatggcatccatgagtcaacagctgaaagcaaaactggatttcttcaaaacaagcattcagatcgatctggaaaagtattccgagcaaacagaatttggcataacaagtgacaagctcctgctggcttggagagagatggagcaagcagtggagctgtgtgggcgcgagaacgaggtcaagctcctggtggaaaggatgatggctttgcagacagatattgtagaccttcagcgcagccctatggggagaaaacagggcggaacattggacgacctggaggagcaggcacgcgaattgtataggagattgagggagaagccaagagatcaacgaaccgagggtgacagtcaggaaatggtccgtctgctcctgcaagccatccagagtttcgagaagaaggtgcgcgtgatttacactcagctgagcaagacagtggtatgcaagcagaaggccctagaacttctgccaaaggtagaagaggtagtcagtctgatgaatgaagatgaaaaaacagtcgtacggctgcaggagaaaagacaaaaagagctttggaatctacttaagattgcctgttccaaggtccgcggccccgtcagcggaagccccgactccatgaacgcatcccgtctgtctcagcctgggcaattgatgagccagccctctactgcgtctaacagcctgcccgaaccggctaagaagtctgaagaattggttgccgaggctcataacctttgcaccttgctcgaaaacgctatccaggacaccgtccgtgaacaagaccagtcttttacagcgctcgactggtcatggcttcagactgaggaagaagagcacagctgtctggaacaagcctcttag

SEQ ID NO: 72819 - DNA, 2265 bp, Artificial Sequence
  derived and/or modified sequence
atgtttagcggcggatgccatagccccggattcgggcgtccgtcacccgctttccccgcacctggaagcccgcctcccgcaccacgaccatgcaggcaagaaacgggagaacaaattgcaatcaaacagtgccgacaagaactctccccaaggaacagggagagatggtgtcttgagattcagatcatgcgacgcttaacccatccaaatgtggtggctgctcgggacgtgcctgagggaatgcagaatctagccccaaacgacttaccgctgcttgccatggagtactgccaaggcggtgacttgcggaagtatctcaatcagttcgagaattgttgtggcctgcgcgaaggagcaattctgacccttttgagtgacattgcttctgctctcaggtatcttcatgagaaccgcatcattcacagagacctgaaacccgaaaacatcgtgctgcaacagggggagcagaggcttatccataagattatcgaccttggttacgcaaaggaactggaccagggctccctctgtacctccttcgtcggaacgctgcaatacctggcaccagagctgctggagcagcagaaatacacggtcactgtagattattggagtttcggtactctcgcttttgaatgcataaccgggtttagaccctttctccccaattggcagcccgtgcagtggcacagtaaagtcagacagaagagcgaagtggacattgtggtttccgaggatctgaacggtaccgtaaagttttcatccagtctgccctacccaaacaacctcaatagcgtcctcgcagaacgtttggaaaaatggctgcagctcatgctcatgtggcatccacgacaaaggggtactgaccccacatacggtcccaatggctgctttaaggctctggatgacatcctgaacttaaaactggttcatatcctgaacatggtaactggaacaattcatacataccccgtaactgaagatgagtccttacagagcctgaaagcacgtatccagcaggacaccgggatcccggaagaagaccaggagctattgcaggaggcaggcctcgccctgattccggacaagcccgcaacccaatgcatcagcgacggaaaacttaacgagggccatactctcgatatggatcttgtgtttctgttcgacaattcaaagatcacctatgagacgcagatctcccccaggccccagcctgagagcgtgagttgtatcctccaggagcccaagcgcaatctcgcattcttccagctgagaaaagtatggggccaggtctggcactccattcagaccctcaaggaggactgtaatagactgcaacaaggacagagggcggcaatgatgaacctactccgcaataattcttgtctgtctaagatgaagaattctatggcctccatgagccaacagctgaaggcaaagcttgattttttcaagacctccatccagattgatctggagaaatattctgagcagacggaatttgggattacaagcgataaattgctgctggcatggcgcgaaatggagcaggccgtcgagctgtgtgggagagagaacgaggttaagctgttggttgagagaatgatggccctacagaccgatatcgtagacttgcaaagatccccaatgggacggaagcagggcggaacactggatgacttggaagagcaagctcgcgagctttacagaaggctaagagagaaacccagagatcagagaacggagggagattctcaggaaatggtgaggttactcttgcaggctattcaaagctttgaaaaaaaggttcgggtaatttatacgcaactgagtaagacagttgtgtgcaagcagaaggctctggaactgctaccgaaggtggaggaggttgtgagccttatgaatgaggacgaaaagactgtcgtgaggcttcaggaaaaaaggcaaaaagaactttggaatttactcaagattgcttgcagcaaggttcggggaccagtctcaggcagtcctgattccatgaacgcctctaggctttcccagccgggacagctcatgtcgcagccatccaccgcatctaactcactgcccgaacctgctaagaagagtgaagaactggttgcagaagcccataatctgtgcacactgctggagaacgccattcaggacacagtgcgagaacaggatcaatcgttcacggcactggactggtcttggttgcaaactgaggaagaagagcactcttgcctcgagcaagcctcttag

SEQ ID NO: 72820 - DNA, 1602 bp, Artificial Sequence
  derived and/or modified sequence
atgtcgtccgacgggaccatccgccactccaaggtaagacagaagtcggaggtggatattgtcgtctccgaagacctcaatggcacagtgaagttcagctcatcgttgccttaccccaacaatttaaacagcgtgttggccgaacggcttgaaaaatggctacagctgatgcttatgtggcaccctcgtcagcgcggtactgatcccacgtacggacctaacggctgttttaaggcccttgatgacattctgaacttgaaacttgtgcacattttgaatatggtgactggtaccatccatacctatccggtaactgaggatgagagtctgcagagccttaaggcacggatccagcaggatacaggcattccagaggaggatcaggagctcctgcaggaagcaggactggccctcataccggataaaccagcgacgcagtgcatcagtgatggaaaacttaatgaagggcataccctcgatatggacctggtgttcctgtttgacaattccaaaattacctacgaaacgcagatcagtcccagaccccagcctgagtctgtgtcatgtatcctacaggagcccaaacgtaacctggccttctttcaactgcgtaaggtttggggacaagtctggcactcaatacagacccttaaggaagattgtaataggttgcagcagggacagagagcagctatgatgaatttacttcgcaataactcgtgcctgtctaaaatgaaaaactctatggctagcatgtcccagcagctcaaagctaaactggatttcttcaagacatccatccagatagatttggagaagtactcagaacagacagaattcggaataacatcggacaagctattattagcgtggcgcgaaatggagcaagcagttgagttgtgtgggcgagagaacgaggtaaagctgctggtcgagaggatgatggccttgcaaactgacattgtcgatctgcagcgcagtcctatgggcagaaaacagggagggacgctggacgacctcgaagagcaggcaagggaactgtatagaaggctgagggaaaagcccagagaccaaaggaccgaaggcgattctcaggagatggtccgactgcttctgcaagcgattcagtcattcgaaaaaaaggtgagagtgatctacactcagctatccaagactgtggtgtgtaagcagaaggctctggaactgctgcccaaggtcgaagaggtcgttagcttgatgaatgaagacgagaagactgtggtgcgacttcaggaaaagagacagaaagagctgtggaatctccttaagatcgcatgttcaaaggtacgcggacccgtcagtggctcacctgatagcatgaatgccagccggctgagccagcccggacagttgatgagtcagccatcgaccgcgtccaatagtctgcccgaacctgctaagaagagtgaagaattggtggccgaggcccataacttatgtacactgcttgagaacgccatacaagatactgttcgagagcaagaccaaagctttacagcgctagactggtcatggctgcagacagaggaggaggagcacagctgtctcgaacaggcctcatag

SEQ ID NO: 72821 - DNA, 2265 bp, Artificial Sequence
  derived and/or modified sequence
atgttcagcggcggctgccacagccccggcttcggcagacccagccccgccttccccgcccccggcagccccccccccgcccccagaccctgcagacaggagaccggcgagcagatcgccatcaagcagtgcagacaggagctgagccccagaaacagagagagatggtgcctggagatccagatcatgagaagactgacccaccccaacgtggtggccgccagagacgtgcccgagggcatgcagaacctggcccccaacgacctgcccctgctggccatggagtactgccagggcggcgacctgagaaagtacctgaaccagttcgagaactgctgcggcctgagagagggcgccatcctgaccctgctgagcgacatcgccagcgccctgagatacctgcacgagaacagaatcatccacagagacctgaagcccgagaacatcgtgctgcagcagggcgagcagagactgatccacaagatcatcgacctgggctacgccaaggagctggaccagggcagcctgtgcaccagcttcgtgggcaccctgcagtacctggcccccgagctgctggagcagcagaagtacaccgtgaccgtggactactggagcttcggcaccctggccttcgagtgcatcaccggcttcagacccttcctgcccaactggcagcccgtgcagtggcacagcaaggtgagacagaagagcgaggtggacatcgtggtgagcgaggacctgaacggcaccgtgaagttcagcagcagcctgccctaccccaacaacctgaacagcgtgctggccgagagactggagaagtggctgcagctgatgctgatgtggcaccccagacagagaggcaccgaccccacctacggccccaacggctgcttcaaggccctggacgacatcctgaacctgaagctggtgcacatcctgaacatggtgaccggcaccatccacacctaccccgtgaccgaggacgagagcctgcagagcctgaaggccagaatccagcaggacaccggcatccccgaggaggaccaggagctgctgcaggaggccggcctggccctgatccccgacaagcccgccacccagtgcatcagcgacggcaagctgaacgagggccacaccctggacatggacctggtgttcctgttcgacaacagcaagatcacctacgagacccagatcagccccagaccccagcccgagagcgtgagctgcatcctgcaggagcccaagagaaacctggccttcttccagctgagaaaggtgtggggccaggtgtggcacagcatccagaccctgaaggaggactgcaacagactgcagcagggccagagagccgccatgatgaacctgctgagaaacaacagctgcctgagcaagatgaagaacagcatggccagcatgagccagcagctgaaggccaagctggacttcttcaagaccagcatccagatcgacctggagaagtacagcgagcagaccgagttcggcatcaccagcgacaagctgctgctggcctggagagagatggagcaggccgtggagctgtgcggcagagagaacgaggtgaagctgctggtggagagaatgatggccctgcagaccgacatcgtggacctgcagagaagccccatgggcagaaagcagggcggcaccctggacgacctggaggagcaggccagagagctgtacagaagactgagagagaagcccagagaccagagaaccgagggcgacagccaggagatggtgagactgctgctgcaggccatccagagcttcgagaagaaggtgagagtgatctacacccagctgagcaagaccgtggtgtgcaagcagaaggccctggagctgctgcccaaggtggaggaggtggtgagcctgatgaacgaggacgagaagaccgtggtgagactgcaggagaagagacagaaggagctgtggaacctgctgaagatcgcctgcagcaaggtgagaggccccgtgagcggcagccccgacagcatgaacgccagcagactgagccagcccggccagctgatgagccagcccagcaccgccagcaacagcctgcccgagcccgccaagaagagcgaggagctggtggccgaggcccacaacctgtgcaccctgctggagaacgccatccaggacaccgtgagagagcaggaccagagcttcaccgccctggactggagctggctgcagaccgaggaggaggagcacagctgcctggagcaggccagctag

SEQ ID NO: 72822 - DNA, 1602 bp, Artificial Sequence
  derived and/or modified sequence
atgagcagcgacggcaccatcagacacagcaaggtgagacagaagagcgaggtggacatcgtggtgagcgaggacctgaacggcaccgtgaagttcagcagcagcctgccctaccccaacaacctgaacagcgtgctggccgagagactggagaagtggctgcagctgatgctgatgtggcaccccagacagagaggcaccgaccccacctacggccccaacggctgcttcaaggccctggacgacatcctgaacctgaagctggtgcacatcctgaacatggtgaccggcaccatccacacctaccccgtgaccgaggacgagagcctgcagagcctgaaggccagaatccagcaggacaccggcatccccgaggaggaccaggagctgctgcaggaggccggcctggccctgatccccgacaagcccgccacccagtgcatcagcgacggcaagctgaacgagggccacaccctggacatggacctggtgttcctgttcgacaacagcaagatcacctacgagacccagatcagccccagaccccagcccgagagcgtgagctgcatcctgcaggagcccaagagaaacctggccttcttccagctgagaaaggtgtggggccaggtgtggcacagcatccagaccctgaaggaggactgcaacagactgcagcagggccagagagccgccatgatgaacctgctgagaaacaacagctgcctgagcaagatgaagaacagcatggccagcatgagccagcagctgaaggccaagctggacttcttcaagaccagcatccagatcgacctggagaagtacagcgagcagaccgagttcggcatcaccagcgacaagctgctgctggcctggagagagatggagcaggccgtggagctgtgcggcagagagaacgaggtgaagctgctggtggagagaatgatggccctgcagaccgacatcgtggacctgcagagaagccccatgggcagaaagcagggcggcaccctggacgacctggaggagcaggccagagagctgtacagaagactgagagagaagcccagagaccagagaaccgagggcgacagccaggagatggtgagactgctgctgcaggccatccagagcttcgagaagaaggtgagagtgatctacacccagctgagcaagaccgtggtgtgcaagcagaaggccctggagctgctgcccaaggtggaggaggtggtgagcctgatgaacgaggacgagaagaccgtggtgagactgcaggagaagagacagaaggagctgtggaacctgctgaagatcgcctgcagcaaggtgagaggccccgtgagcggcagccccgacagcatgaacgccagcagactgagccagcccggccagctgatgagccagcccagcaccgccagcaacagcctgcccgagcccgccaagaagagcgaggagctggtggccgaggcccacaacctgtgcaccctgctggagaacgccatccaggacaccgtgagagagcaggaccagagcttcaccgccctggactggagctggctgcagaccgaggaggaggagcacagctgcctggagcaggccagctag

SEQ ID NO: 72823 - protein, 696 aa, Artificial Sequence
  derived and/or modified sequence
MPLFFRKRKPSEEARKRLEYQMCLAKEAGADDILDISKCELSEIPFGAFATCKVLQKKVLIVHTNHLTSLLPKSCSLLSLATIKVLDLHDNQLTALPDDLGQLTALQVLNVERNQLMQLPRSIGNLTQLQTLNVKDNKLKELPDTVGELRSLRTLNISGNEIQRLPQMLAHVRTLEMLSLDASAMVYPPREVCGAGTAAILQFLCKESGLEYYPPSQYLLPILEQDGIENSRDSPDGPTDRFSREELEWQNRFSDYEKRKEQKMLEKLEFERRLELGQREHTQLLQQSSSQKDEILQTVKEEQSRLEQGLSEHQRHLNAERQRLQEQLKQTEQNISSRIQKLLQDNQRQKKSSEILKSLENERIRMEQLMSITQEETESLRRRDVASAMQQMLTESCKNRLIQMAYESQRQNLVQQACSSMAEMDERFQQILSWQQMDQNKAISQILQESAMQKAAFEALQVKKDLMHRQIRSQEMISEQRWALSSLLQQLLKEKQQREEELREILTELEAKSETRQENYWLIQYQRLLNQKPLSLKLQEEGMERQLVALLEELSAEHYLPIFAHHRLSLDLLSQMSPGDLAKVGVSEAGLQHEILRRVQELLDAARIQPELKPPMGEVVTPTAPQEPPESVRPSAPPAELEVQASECVVCLEREAQMIFLNCGHVCCCQQCCQPLRTCPLCRQDIAQRLRIYHSS

SEQ ID NO: 72824 - DNA, 2091 bp, Artificial Sequence
  derived and/or modified sequence
atgcctctgttctttagaaagcggaaacctagtgaagaagccaggaagcggctcgagtaccagatgtgcctcgctaaggaggccggcgctgatgatatactggatatcagcaagtgcgagctgtcagagatccccttcggagctttcgcaacttgtaaagtgttacagaaaaaggtgcttattgttcacacaaaccacctaacgtcacttttgccaaagtcatgttcccttctttctctcgcgactataaaggtcctggacctgcacgacaaccagctaacagccctccctgatgatctggggcaactcactgcccttcaagtgctcaatgttgaacggaatcagttgatgcagctcccgcgaagcataggtaacctcacccaactccagacccttaatgtaaaggataacaaattgaaggaactgcccgacacggtcggtgaactgaggtctcttcgcaccttgaatatcagcgggaacgagatacagcgactcccacaaatgctcgcccatgtgagaaccttggaaatgctgagtttggatgctagcgccatggtttaccctcctagggaggtgtgcggtgccggaacagctgcaattctacagtttctgtgcaaggaatctggccttgagtactaccctcctagccagtacctccttccaattctggagcaggatggaatcgaaaatagccgcgacagccccgatgggccaacagaccgattttccagagaggagctggaatggcagaatagattctcagactatgagaaaaggaaagaacaaaagatgttggagaaactggagtttgaaagaaggctggaactgggccaaagagagcacacacagctgttgcaacagtctagcagccaaaaagacgaaattctccagacagttaaagaagaacagagtcggctagagcaaggtctttcagaacatcagcgccacctcaatgctgaacggcaacgacttcaggagcagttgaagcaaacggaacaaaacattagctcaaggatacagaagcttctgcaggataatcagagacagaaaaagtccagcgaaatcctcaagtcattggagaacgaacggattcggatggagcagttgatgagtatcacgcaagaagagacagaatcccttaggagaagggacgtggcctcagcaatgcagcaaatgctgacagagtcatgcaagaatcgccttatacagatggcgtacgaatcacaacgccagaatctggtgcaacaggcctgttcctctatggcagagatggacgagagatttcagcagattctgtcttggcagcagatggatcagaacaaggccatttctcagatccttcaggaaagcgccatgcaaaaagctgcttttgaggccctccaagtaaagaaagacctaatgcacaggcaaattaggtctcaggagatgatatcggagcaaaggtgggccctgtcttctctgctgcaacagcttctgaaggagaaacagcagagagaggaggagctgcgcgagattctgactgagctggaagcgaaaagcgagactagacaagagaattattggctaatccagtaccaacgcttgctgaatcaaaagccactcagcctgaaacttcaggaggaggggatggagcgtcagctggttgccctcctagaggagctctctgctgagcattatctgccgatatttgcccaccaccggctgtctctggacctgctgtcacagatgtcacccggggacctggctaaagtaggggtgtcagaggctgggttacaacacgaaatcctcagacgcgtgcaggagcttctcgacgcggcccgaatccaacccgagttaaaacccccgatgggtgaggtagttacgccgaccgcccctcaagagcctcctgagtctgtgcggccaagcgccccacccgcagaactggaggtacaggcatctgagtgtgtggtctgtttagaaagggaggctcaaatgatttttctgaactgcggccacgtttgttgttgtcagcagtgctgccagcctctgagaacctgcccattgtgcagacaggacattgcccagcggttgcggatctaccacagcagctag

SEQ ID NO: 72825 - DNA, 2091 bp, Artificial Sequence
  derived and/or modified sequence
atgcccctcttcttcaggaagaggaagcccagcgaggaggccaggaagaggctggagtaccagatgtgcctggccaaggaggccggggctgatgacatcctggacatcagcaaatgtgagctgtctgagatcccctttggagcctttgccacctgcaaggtgctgcagaagaaggtgctgattgtgcacaccaaccacctgaccagcctgctgcccaagagctgcagcctgctgagcctggccaccatcaaggtgctggacctgcatgacaaccagctgacagccctgcctgatgacctgggccagctgacagccctgcaggtgctgaatgtggagaggaaccagctgatgcagctgcccaggagcatcggcaacctgacccagctgcagaccctgaatgtgaaggacaacaagctgaaggagctgcctgacacagtgggggagctgcggagcctgcggaccctgaacatctctggaaatgagatccagaggctgccccagatgctggcccacgtgaggaccctggagatgctgagcctggatgccagcgccatggtgtacccaccccgggaggtgtgtggggccggcacagctgccatcctgcagttcctgtgcaaggagagcggcctggagtactacccacccagccagtacctgctgcccatcctggagcaggacggcatcgagaacagccgggacagcccagatggccccacagaccgcttcagccgggaggagctggagtggcagaaccgcttcagtgactatgagaagaggaaggagcagaagatgctggagaagctggagtttgagcggcggctggagctgggccagcgggagcacacccagctgctgcagcagagcagcagccagaaggatgagatcctgcagacagtgaaggaggagcagagccggctggagcagggcctgtctgagcaccagaggcacctgaatgctgagcggcagaggctgcaggagcagctgaagcagacagagcagaacatcagcagccgcatccagaagctgctgcaggacaaccagaggcagaagaagagcagcgagatcctgaagagcctggagaatgaaagaatccgcatggagcagctgatgagcatcacccaggaggagacagagagcctgcggaggagagatgtggccagcgccatgcagcagatgctgacagagagctgcaagaacagactcatccagatggcctatgagagccagaggcagaacctggtgcagcaggcctgcagctccatggccgagatggatgagcgcttccagcagatcctgtcctggcagcagatggaccagaacaaggccatcagccagatcctgcaggagagcgccatgcagaaggccgcctttgaggccctgcaggtgaagaaggacctgatgcaccggcagatccgcagccaggagatgatcagcgagcagcgctgggccctgagcagcctgctgcagcagctgctgaaggagaagcagcagcgggaggaggagctgcgggagatcctgacagagctggaggccaagtctgagacccggcaggagaactactggctgatccagtaccagaggctgctgaaccagaagcccctgagcctgaagctgcaggaggagggcatggagcggcagctggtggccctgctggaggagctgtctgctgagcactacctgcccatctttgcccaccaccggctgagcctggacctgctgagccagatgagccctggggacctggccaaggtgggcgtgtctgaggccggcctgcagcacgagatcctgcggcgggtgcaggagctgctggatgctgcccgcatccagcctgagctgaagccacccatgggagaggtggtgacccccacagccccccaggagcccccagagagcgtgcggcccagcgcccctcctgctgagctggaggtgcaggcctctgaatgtgtggtgtgcctggagcgggaggcccagatgatcttcctgaactgtggccacgtgtgctgctgccagcagtgctgccagcccctgcggacctgccccctgtgccggcaggacatcgcccagaggctgcgcatctaccacagcagctag

SEQ ID NO: 72826 - DNA, 3044 bp, Artificial Sequence
  derived and/or modified sequence
tgtttgttgtgggcaggcgcctgaggctgacggctggcaagcagggcaccgcggtgcgctgaagctagagattccgaaagggggttcgggtagttcgctccggagaagtctgagaagggtggctccggtgatcccagccctagctgtttcccatattcctttatccacctgcctttgaaggagaccagactccggctccgcccggcccgtgccgggtggtctgcggccccgagtccgtgaccaagccctccgagtgatcggcctgccctcgggtgcacccgcgggtcccaacgtgggggatccctccatccgcaaagccagggtcctaaagatcgctctgggaaaagggaaggatgccgctcttcttccggaagcggaaacccagtgaggaggctcggaaacgcctggagtaccagatgtgtttggcaaaagaagctggggcagatgacattctcgacatctctaaatgtgagctctcagagattccatttggagcttttgcaacatgcaaagttctgcagaagaaggtgctgatcgtccacacgaatcacctcacttccctgcttcccaaatcctgcagcctcctgagtctggcaaccatcaaggttctagatctccacgataatcagctgacagcccttcctgacgatctggggcagctgactgccctccaggtcttaaacgtggaaaggaatcaactgatgcagctcccacgttccattgggaacctgacccagctccagactctcaatgttaaagacaacaagctgaaggagcttccagacaccgtgggggagcttcgaagcctgcgtaccctcaacatcagtggaaacgagatccagagattgccgcagatgctggctcacgttcgaaccctggagatgctgagccttgacgcctcggccatggtctacccgccgcgggaggtgtgtggtgccggcactgcggccatcttgcagttcctctgcaaagagtcagggctggaatactaccccccttctcagtacttgctgccaattctggagcaagatggaatcgagaactctcgggacagccctgatgggcccacggacagattctcaagggaggagttagagtggcagaacaggttctcagactatgagaagaggaaggaacagaagatgctggagaaactcgagtttgaacggcgcctggaactggggcagcgggagcacacccagctccttcagcagagcagcagccagaaggatgagatccttcagacggtcaaggaggagcagtcccggctggagcagggcctgagtgagcaccagcgccacctcaacgcagagcggcagcggctgcaggagcagctgaagcagacggaacagaacatttccagccggatccagaagctgctgcaggacaatcagagacaaaagaaaagctccgagattttgaaatcgctggaaaatgaaagaataagaatggaacagttgatgtccataacccaggaggagactgagagcctgcggcgacgtgacgttgcctccgccatgcagcagatgctgactgagagctgtaagaaccggctcatccagatggcctacgaatctcagaggcagaacttggtccagcaggcctgttccagcatggccgaaatggatgaacgattccagcagattctgtcgtggcagcaaatggatcagaacaaagccatcagccagatcctgcaggagagcgcgatgcagaaggctgcgttcgaggcactccaggtgaagaaagacctgatgcatcggcagatcaggagccaggagatgatctcggagcagcgctgggccctcagctccctgctccagcagctgctcaaagagaagcagcagcgagaggaagagctccgggaaatcctgacggagttagaagccaaaagtgaaaccaggcaggaaaattactggctgattcagtatcaacggcttttgaaccagaagcccttgtccttgaagctgcaagaagaggggatggagcgccagctggtggccctcctggaggagctgtcggctgagcactacctgcccatctttgcgcaccaccgcctctcactggacctgctgagccaaatgagcccaggggacctggccaaggtgggcgtctcagaagctggcctgcagcacgagatcctccggagagtccaggaactgctggatgcagccaggatccagccagagctgaaaccaccaatgggtgaggtcgtcacccctacggccccccaggagcctcctgagtctgtgaggccatccgctccccctgcagagctggaggtgcaggcctcagagtgtgtcgtgtgcctggaacgggaggcccagatgatcttcctcaactgtggccacgtctgctgctgccagcagtgctgccagccactgcgcacctgcccgctgtgccgccaggacatcgcccagcgcctccgcatctaccacagcagctgagtgctgcccgcccacctgggcctggtcctagccctgcctcggccactgtgagccccgggctcctgctcagccttgtgccagccagactcgtatgaggctcccccctgccctgggccccttccccactgcccaggagcccccatcctaagctccaagcatgtctgggccaggcagaggtgctcctcatccatgacaccaccagtctgaatggtcctgggggctggggctggagaggccgctgcaccaccacccgagcctgggagccagcgtcccagcctaatcacggatctgctgcctcccagctgtcttgactgaaggccaccgcccctgcaggagcttgggtcctcatctgggggccatgcacaggcccgtcccaccctgcatgtgggaagggagcaggagggcctggctgggtgaggggaggccttcctgggaaggcgtgtggtgcaggcctgtgctcacagtggcaccagcaaccctgggtctccctctctgctgctccccagaaccccggggccctcctgctctccacaactgtccctccttaccccatgtagctcgatccgaagcaggagtgtcaataaacctgtcttcagtgcg

SEQ ID NO: 72827 - DNA, 2091 bp, Artificial Sequence
  derived and/or modified sequence
atgcccctgttcttccggaagcggaagcccagcgaggaggcccggaaacgtctggagtaccagatgtgcctggctaaagaagctggtgctgatgatatcctcgatattagcaagtgcgaattgagtgagatcccctttggtgcctttgctacttgtaaagtgctccagaaaaaagtactcatcgtgcataccaatcatctgacctccctgctccccaaatcttgctctctgctctccctagcaactataaaggtgctggatcttcacgataaccaactcactgccctcccagacgacctggggcagctgacagctctgcaagtgcttaacgttgagcgcaatcaactcatgcagttgccacgatccattggcaatcttactcaactccagaccctgaatgtgaaagacaacaagctgaaggagttacctgacacagtaggtgaacttcgaagtcttagaacactgaatatttccggaaatgagatacagaggttaccacaaatgttggctcacgtgcggacactggaaatgctgagcctggatgcttccgccatggtgtatccgccccgggaagtatgtggcgccggcacggccgctattctccaatttctttgtaaggagtccggactggaatactatccaccttcccagtaccttctgcccattctggagcaggacgggatcgagaactccagagacagtcccgacgggcccaccgatcgcttcagccgggaggaattagagtggcagaataggttttctgattatgagaaacgaaaagagcagaagatgttggaaaagctcgaatttgagaggaggctggagctggggcagcgggaacacactcagctcctccaacagagttccagccagaaagatgagattctccagacagtgaaggaagagcagtctcggctggagcagggcttatcggaacaccaaagacaccttaacgcagaacgacaacgcttgcaggagcagctgaaacaaacagagcagaacatttcctcccgtatccaaaaactcctccaagacaatcaacgacagaaaaaatccagcgagatactgaagtcgctcgaaaatgagagaataaggatggagcagctcatgtcaataacccaagaagaaaccgaatccctgcgaagaagggacgtggcaagcgcaatgcagcagatgctgacggaatcttgtaagaaccggcttatccagatggcctacgagtcccagcgacagaacctggttcagcaggcgtgttcatctatggcagaaatggatgagcggtttcaacaaatcctgtcatggcagcagatggatcaaaataaggccatttctcagattctccaagagtcagccatgcagaaggcggctttcgaagctctccaggtgaagaaggatctcatgcatcgccagataagatcccaagagatgatctcagagcagcggtgggccctgtcatctctgctgcagcaattgctgaaggaaaaacagcagcgggaagaagagctgcgggagatccttaccgagctggaagctaagtccgaaacgcgtcaggagaattattggctaattcagtaccagcgattgctgaaccagaagcctctctcactgaagctgcaggaggagggcatggagcgccagcttgtggcgctgctggaggaattatcagctgagcattacttgcctatatttgcccaccatagactgagcctggatctgctttcccagatgagtcccggggacctggccaaagtgggcgtttctgaggcagggcttcagcatgaaatattgcgtagagtccaggagttgctcgatgccgcccgcatccaaccggaacttaaaccccccatgggagaggtggtgaccccgactgcccctcaggaaccccctgagagcgttcgcccttccgcacccccggctgaactggaagtgcaggcgagcgaatgcgtggtttgcctggagagagaggcccagatgatcttcctgaactgtggacacgtttgttgctgtcagcaatgttgccagcctttgagaacatgcccgttgtgtcgccaggatattgcccagagactgcggatctaccacagctcctag

SEQ ID NO: 72828 - DNA, 2091 bp, Artificial Sequence
  derived and/or modified sequence
atgccactcttctttagaaagcgaaaaccttcagaagaggctaggaagaggctggaatatcagatgtgtctcgcgaaggaagccggtgcagatgacatccttgatatttccaagtgtgagctgtctgagattccatttggtgcttttgctacctgtaaagttttacagaaaaaagttttgatagtgcataccaatcacctcacttcactactgcctaaaagctgctctctgctttccctggcgactattaaggtgctcgatcttcatgacaaccaactgaccgctctgcccgatgacctcgggcaactgactgccctgcaggtgttgaatgttgaacgtaaccagctcatgcagttgccacggtctatcgggaacctgacgcaactccaaaccctcaacgtgaaggataacaaattgaaagagctgcctgacaccgtaggcgagttgagatcactccgcactcttaatatctccggcaacgagatccaacggctgccgcagatgctggctcacgtcagaacactggagatgctaagcttagatgctagcgctatggtctacccaccacgagaggtatgcggggctggaacggccgctatcctgcagtttctctgtaaagagagcgggctggaatactatcccccatcccaatatctactacccattttagagcaggatggaatcgagaattcacgagattccccagacggacccaccgaccgcttctctagggaggagcttgaatggcaaaatcgcttcagtgattatgaaaaaaggaaagaacagaaaatgctggagaaattagaattcgaacggagattagaacttggacagcgggaacacacacagctgttacaacagtcttctagccagaaagacgaaatcttgcagaccgtgaaggaggagcaaagcagactggaacagggactgagcgagcatcaacgccatctaaacgctgagcgacaacgcctacaagagcagctaaaacagaccgagcagaacatttcgagtagaatccagaaactgttacaggacaaccagcggcagaagaaatcctcagagatcctgaaatcactggagaacgaacggattagaatggagcagctgatgagtattacacaggaggaaacagagagcctgagaaggagagatgtggcttctgcgatgcaacagatgttgacagaaagctgcaaaaatcggctgatccagatggcatacgaatctcagcgccaaaacctggtgcagcaggcttgcagcagcatggccgagatggacgaacgctttcagcagatcctcagctggcaacagatggatcagaataaggcgatatcgcagatcctgcaagagtctgcgatgcagaaggccgcattcgaagcgcttcaggtcaaaaaagacctgatgcaccgacagattagaagccaggagatgatatctgaacaacggtgggcactaagctccttattgcagcagcttctcaaggagaaacagcagcgagaagaagagcttcgggaaattctgactgagctggaggcaaagtcagaaacccggcaggagaactactggctaattcagtaccagcgtttacttaaccagaaaccactgtctctgaaactgcaggaggagggcatggaaaggcagcttgtggctctcctcgaggagctgtctgccgaacattatttgcctatttttgctcatcatagactcagtctggacttgctctcccagatgtctcctggcgatctggcaaaggtgggcgtctccgaggcaggactccagcatgagattctccgacgggtacaggaactccttgatgccgctcgtatccagcctgagctcaagccccctatgggagaagtggtgaccccaactgcccctcaggaaccaccagaaagcgtacgcccatcagcgccaccagctgaattggaggtgcaggcctccgagtgtgttgtgtgcctggaacgcgaagctcaaatgatttttctgaattgtggccatgtatgttgctgccagcagtgctgtcagccccttaggacctgtcccctgtgcagacaggacatcgctcagaggctccggatttaccattccagttag

SEQ ID NO: 72829 - DNA, 2091 bp, Artificial Sequence
  derived and/or modified sequence
atgcccctgttcttcagaaagagaaagcccagcgaggaggccagaaagagactggagtaccagatgtgcctggccaaggaggccggcgccgacgacatcctggacatcagcaagtgcgagctgagcgagatccccttcggcgccttcgccacctgcaaggtgctgcagaagaaggtgctgatcgtgcacaccaaccacctgaccagcctgctgcccaagagctgcagcctgctgagcctggccaccatcaaggtgctggacctgcacgacaaccagctgaccgccctgcccgacgacctgggccagctgaccgccctgcaggtgctgaacgtggagagaaaccagctgatgcagctgcccagaagcatcggcaacctgacccagctgcagaccctgaacgtgaaggacaacaagctgaaggagctgcccgacaccgtgggcgagctgagaagcctgagaaccctgaacatcagcggcaacgagatccagagactgccccagatgctggcccacgtgagaaccctggagatgctgagcctggacgccagcgccatggtgtacccccccagagaggtgtgcggcgccggcaccgccgccatcctgcagttcctgtgcaaggagagcggcctggagtactacccccccagccagtacctgctgcccatcctggagcaggacggcatcgagaacagcagagacagccccgacggccccaccgacagattcagcagagaggagctggagtggcagaacagattcagcgactacgagaagagaaaggagcagaagatgctggagaagctggagttcgagagaagactggagctgggccagagagagcacacccagctgctgcagcagagcagcagccagaaggacgagatcctgcagaccgtgaaggaggagcagagcagactggagcagggcctgagcgagcaccagagacacctgaacgccgagagacagagactgcaggagcagctgaagcagaccgagcagaacatcagcagcagaatccagaagctgctgcaggacaaccagagacagaagaagagcagcgagatcctgaagagcctggagaacgagagaatcagaatggagcagctgatgagcatcacccaggaggagaccgagagcctgagaagaagagacgtggccagcgccatgcagcagatgctgaccgagagctgcaagaacagactgatccagatggcctacgagagccagagacagaacctggtgcagcaggcctgcagcagcatggccgagatggacgagagattccagcagatcctgagctggcagcagatggaccagaacaaggccatcagccagatcctgcaggagagcgccatgcagaaggccgccttcgaggccctgcaggtgaagaaggacctgatgcacagacagatcagaagccaggagatgatcagcgagcagagatgggccctgagcagcctgctgcagcagctgctgaaggagaagcagcagagagaggaggagctgagagagatcctgaccgagctggaggccaagagcgagaccagacaggagaactactggctgatccagtaccagagactgctgaaccagaagcccctgagcctgaagctgcaggaggagggcatggagagacagctggtggccctgctggaggagctgagcgccgagcactacctgcccatcttcgcccaccacagactgagcctggacctgctgagccagatgagccccggcgacctggccaaggtgggcgtgagcgaggccggcctgcagcacgagatcctgagaagagtgcaggagctgctggacgccgccagaatccagcccgagctgaagccccccatgggcgaggtggtgacccccaccgccccccaggagccccccgagagcgtgagacccagcgccccccccgccgagctggaggtgcaggccagcgagtgcgtggtgtgcctggagagagaggcccagatgatcttcctgaactgcggccacgtgtgctgctgccagcagtgctgccagcccctgagaacctgccccctgtgcagacaggacatcgcccagagactgagaatctaccacagcagctag

SEQ ID NO: 72830 - protein, 180 aa, Artificial Sequence
  derived and/or modified sequence
MAKSAEVKLAIFGRAGVGKSESTYRHQATIDDEVVSMEILDTAGQEDTIQREGHMRWGEGFVLVYDITDRGSFEEVLPLKNILDEIKKPKNVTLILVGNKADLDHSRQVSTEEGEKLATELACAFYECSACTGEGNITEIFYELCREVRRRRMVQGKTRRRSSTTHVKQAINKMLTKISS

SEQ ID NO: 72831 - DNA, 543 bp, Artificial Sequence
  derived and/or modified sequence
atggcaaaatccgcagaggtgaaattggccatatttggccgcgcaggtgtcggcaaaagcgagtccacctataggcatcaagctaccattgacgatgaagtcgtttctatggagattctagacacagcaggtcaggaggacactatccagcgggaaggacatatgagatggggtgagggctttgtcctcgtgtatgacataacggaccggggaagctttgaggaggtgcttccgcttaagaacatcctcgatgagattaagaagcccaagaatgtcacattaatcctcgttggtaataaagccgacctggatcacagtcgccaagtcagtacagaggagggggagaagctggctaccgagctcgcctgtgcattttatgagtgctctgcctgtactggagagggcaatataacggaaatcttctacgagctctgcagagaagtgcggagaagacgtatggtgcagggaaagactcgcagacgatcttccactactcacgtcaagcaggcaatcaacaagatgctgacaaagattagcagctag

SEQ ID NO: 72832 - DNA, 543 bp, Artificial Sequence
  derived and/or modified sequence
atggccaagtctgctgaggtgaagctggccatcttcggccgggccggcgtgggcaagtctgagagcacctaccgccaccaggccaccattgatgatgaggtggtgtccatggagatcctggacacagctggccaggaggacaccatccagcgggagggccacatgcgctggggcgagggctttgtgctggtgtatgacatcacagaccggggcagctttgaggaggtgctgcccctgaagaacatcctggatgagatcaagaagcccaagaatgtgaccctcatcctggtgggcaacaaggctgacctggaccacagccggcaggtgtccacagaggagggggagaagctggccacagagctggcctgtgccttctatgaatgttctgcctgcaccggggagggcaacatcacagagatcttctatgagctgtgccgggaggtgagaagaagaaggatggtgcagggcaagacccggcggcgcagcagcaccacccacgtgaagcaggccatcaacaagatgctgaccaagatcagcagctag

SEQ ID NO: 72833 - DNA, 543 bp, Artificial Sequence
  derived and/or modified sequence
atggccaagagcgccgaggtgaagctggccatcttcggccgggccggggtgggtaagtccgaaagcacatatcgccaccaagcgacaatcgacgacgaggtggtttcaatggaaatcttagacaccgccggccaagaggatacgatccagcgcgaaggccacatgcgatggggtgaagggttcgtcctcgtgtacgatataactgaccgtggatcgttcgaagaagtcctgccactgaagaacattttggatgagataaagaagccaaaaaacgtcaccctgatccttgtgggcaataaggcagatttagatcacagtaggcaagtgtccactgaggagggagagaagctggccacagagctggcatgtgccttttatgagtgttctgcatgcactggcgaaggcaatatcactgaaatcttttatgagctgtgccgcgaggtcagacggcggagaatggtgcagggcaagactagaaggcggtcaagtaccacacatgtgaaacaagccatcaataagatgctgactaaaatctctagttag

SEQ ID NO: 72834 - DNA, 543 bp, Artificial Sequence
  derived and/or modified sequence
atggctaaatctgctgaagtgaagttggctatttttggtagggctggagtcggcaagtccgagtctacttatagacatcaagctaccatcgatgatgaagtagtctctatggagattctggacaccgccggacaagaggacaccatccaacgcgaaggtcatatgcgttggggggaaggcttcgtgctggtatatgacattaccgatcgcggtagcttcgaagaggtattgcctctgaaaaacattctcgacgagataaagaagccaaagaacgtgaccctcatcttagtgggcaacaaagcagacctagatcattcacggcaagtgagcacagaagagggtgagaagttggcaacagagctcgcttgtgctttctacgagtgttcagcttgcacaggagagggcaacatcactgaaattttctacgagctttgtcgagaagtgcggaggcgcagaatggtccagggcaagacgcggcgaaggtcctccacaacccacgttaagcaggcaatcaacaagatgttaaccaagatatctagctag

SEQ ID NO: 72835 - DNA, 1383 bp, Artificial Sequence
  derived and/or modified sequence
gcagtccctccgccgctagtcggagcgagcgcgagtgaggagacccccgccgggccactggcacttgcttctgcggcgagtcccacccacgaccgcagcccagcaactcgcaaacgcaacctgaagcctgggctgcgcagtgtgggagggcttcgcgatcttgggggacccattccgaacttgcagaggaccgtagctctcctggcctggagagtgtgaacaggattgtggactcttccaagattcacaatgatatggtgaatccaaagactggaaccaaaaagatttactcagtgctttagttttaacaacagtaaattgtctaccaacacccatcatggctaaaagtgcggaggtcaaactggcaatatttgggagagcaggcgtgggcaagtcagaatcaacctaccgacaccaagcaaccatcgatgatgaagttgtttccatggagatactagacactgctggtcaggaagataccattcagagggaggggcacatgcgatggggggaaggctttgtgctggtctacgacattactgaccgaggaagttttgaggaagtgctgccacttaagaacatcctagatgagatcaaaaagcccaagaatgtgactctcatcttggttggaaacaaagctgacttggaccactccaggcaggttagcacagaagaaggagagaagctggccacagaattggcttgtgctttttacgagtgctctgcctgcactggagaagggaacatcacagagatattctatgaattgtgtcgagaggtgcgtcgccggaggatggtgcagggcaagacgaggcgacgcagctccaccacgcatgtcaagcaagccattaacaagatgctcaccaaaatcagtagttaggcagcccagctgaggtggaccaactaattggaaacactcttccccttctgttcccctttcaaaaataaaacaaaatattgcattctttgtttggattctgagaaatgtctgggcttcccattgtttctggcctctaataggttgggaagttttagcgtgttttatgcaatttcagtgctaacaatttcttcctttcctgcttgaataagatacactctaatggcatttgaacatgtaatcaccagagattctgaaatgactggtttatgttaagctatttttaggcatcttcaccttgctttaagtaggttgaagtttttgcaaaggcatttaaaaattcaatttcttgtcagatactacaaataattttcttaaaagtctaagatagcagaaaatacagtaaaaacacaggagaagaagctgagctattggaacaggaaatagaaggaactctagtttctgtttgaagtgaggattttctgaattatctaatatcatctagg

SEQ ID NO: 72836 - DNA, 543 bp, Artificial Sequence
  derived and/or modified sequence
atggccaagagcgccgaggtgaagctggccatcttcggcagagccggcgtgggcaagagcgagagcacctacagacaccaggccaccatcgacgacgaggtggtgagcatggagatcctggacaccgccggccaggaggacaccatccagagagagggccacatgagatggggcgagggcttcgtgctggtgtacgacatcaccgacagaggcagcttcgaggaggtgctgcccctgaagaacatcctggacgagatcaagaagcccaagaacgtgaccctgatcctggtgggcaacaaggccgacctggaccacagcagacaggtgagcaccgaggagggcgagaagctggccaccgagctggcctgcgccttctacgagtgcagcgcctgcaccggcgagggcaacatcaccgagatcttctacgagctgtgcagagaggtgagaagaagaagaatggtgcagggcaagaccagaagaagaagcagcaccacccacgtgaagcaggccatcaacaagatgctgaccaagatcagcagctag

SEQ ID NO: 72837 - protein, 529 aa, Artificial Sequence
  derived and/or modified sequence
MYKRNGLMASVLVTSATPQGSSSSDSLEGQSCDYASKSYDAVVFDVLKVTPEEFASQITLMDIPVFKAIQPEELASCGWSKKEKHSLAPNVVAFTRRFNQVSFWVVREILTAQTLKIRAEILSHFVKIAKKLLELNNLHSLMSVVSALQSAPIFRLTKTWALLNRKDKTTFEKLDYLMSKEDNYKRTREYIRSLKMVPSIPYLGIYLLDLIYIDSAYPASGSIMENEQRSNQMNNILRIIADLQVSCSYDHLTTLPHVQKYLKSVRYIEELQKFVEDDNYKLSLRIEPGSSSPRLVSSKEDLAGPSAGSGSARFSRRPTCPDTSVAGSLPTPPVPRHRKSHSLGNNRGRLYATLGPNWRVPVRNSPRTRSCVYSPTGPCICSLGNSAAVPTMEGPLRRKTLLKEGRKPALSSWTRYWVILSGSTLLYYGAKSLRGTDRKHVSIVGWMVQLPDDPEHPDIFQLNNPDKGNVYKFQTGSRFHAILWHKHLDDACKSNRPQEAGAAPGPTGTDSHEVDHLEGGAGKEAGPCA

SEQ ID NO: 72838 - DNA, 1590 bp, Artificial Sequence
  derived and/or modified sequence
atgtataagaggaacggattgatggcctctgtcctcgtgacctccgcaacaccccagggatccagcagcagcgattcactggaggggcaatcttgtgactacgcttctaaaagttatgatgcagtggtttttgatgttttgaaggtgactcccgaagagtttgcttcccagatcactctcatggacatccctgtttttaaagcaattcagcctgaggagctagcctcctgcggctggtccaagaaggagaagcattcccttgccccgaatgtggtagcgtttaccagaaggtttaatcaggtgtctttttgggtggtgcgggaaatactgactgcacagacacttaagatccgtgctgaaattctctctcacttcgtcaagattgcaaaaaagttactcgagttgaataaccttcacagtctgatgtcggtggtatccgcactccaatctgcgcccatctttcgacttacaaagacatgggccttattgaaccgaaaagataaaactaccttcgaaaagctggattacctgatgtctaaggaggacaactacaaacgcacacgggaatacatacgttccctaaagatggtaccatccatcccatacctgggtatttatttgttagacctaatttacatcgacagtgcctatccggctagcggctcaattatggagaatgagcaaaggtcgaatcagatgaacaatatcctgaggattatagctgacctccaagtgtcatgtagctacgaccacttgacaacacttccacacgtacagaagtatcttaaatctgtcaggtacattgaggagctgcagaagttcgtcgaggacgacaactataagctcagcttgcggatagagccagggagctcctctccccgcctggtaagcagtaaagaagatctggctggcccctccgcgggctctggatctgctcgtttttcacggcggcccacatgccccgacaccagtgtcgctggcagcttgcctacccctcctgtgccacggcataggaagagccactctttaggcaacaaccgcggcagactatacgccactcttggcccaaattggcgagttcctgtgcgcaatagcccacggacacggtcctgtgtgtattcccccactggcccctgcatttgctctttagggaacagtgctgcagtcccaacgatggaagggcctctgcgcagaaagactctccttaaagaggggcggaaaccagctctgtcgtcctggacaagatactgggttatcctgtctggttctacattgctctattacggagctaagagtcttagggggaccgacagaaagcacgtgtcaatagtcgggtggatggtccagcttcccgatgacccagagcaccctgatatattccagctgaataaccccgataagggaaacgtttacaaatttcagaccggtagtagattccacgccattctctggcataagcatctggatgatgcctgcaaatcaaaccgcccacaggaggcaggcgccgcacccggacctaccggaactgacagccacgaagtggaccaccttgagggaggagccggaaaggaggccggaccctgtgcttag

SEQ ID NO: 72839 - DNA, 1590 bp, Artificial Sequence
  derived and/or modified sequence
atgtacaagagaaatggcctgatggcctctgtgctggtgaccagcgccaccccccagggcagcagcagcagtgacagcctggagggccagagctgtgactatgccagcaagagctatgatgctgtggtgtttgatgtgctgaaggtgaccccagaggagtttgccagccagatcaccctgatggacatccctgtgttcaaggccatccagcctgaggagctggccagctgtggctggagcaagaaggagaagcacagcctggcccccaacgtggtggccttcacccggcgcttcaaccaggtgtccttctgggtggtgcgggagatcctgacagcccagaccctgaagatccgggcagagatcctgagccactttgtgaagatcgccaagaagctgctggagctgaacaacctgcacagcctgatgtctgtggtgtctgccctgcagagcgcccccatcttccggctgaccaagacctgggccctgctgaacaggaaggacaagaccacctttgagaagctggactacctgatgagcaaagaagacaactacaagaggacccgggagtacatccgcagcctgaagatggtgcccagcatcccctacctgggcatctacctgctggacctgatctacattgattctgcctacccagccagcggcagcatcatggagaatgagcagaggagcaaccagatgaacaacatcctgcgcatcatcgctgacctgcaggtgtcctgcagctatgaccacctgaccaccctgccccacgtgcagaagtacctgaagtctgtgcgctacatcgaggagctgcagaagtttgtggaggatgacaactacaagctgagcctgcgcatcgagcccggcagcagcagcccccggctggtgagcagcaaggaggacctggccggccccagcgctggcagcggcagcgcccgcttcagccggcggcccacctgcccagacacctctgtggccggcagcctgcccaccccacctgtgcccaggcacaggaagagccacagcctgggcaacaacagaggccgcctgtatgccaccctgggccccaactggagggtgcctgtgaggaacagccccaggaccaggagctgtgtgtacagccccaccggcccctgcatctgcagcctgggcaacagcgctgctgtgcccaccatggagggccccctgcggaggaagaccctgctgaaggagggcaggaagccagccctgagctcctggacccgctactgggtgatcctgagcggcagcaccctgctgtactacggggccaagagcctgcggggcacagacaggaagcacgtgtccatcgtgggctggatggtgcagctgcctgatgatcctgagcacccagacatcttccagctgaacaacccagacaagggaaatgtgtacaagttccagacaggcagccgcttccacgccatcctgtggcacaagcacctggatgatgcctgcaagagcaaccggccccaggaggccggggccgcccctggccccactggaacagacagccatgaggtggaccacctggagggcggggccggcaaggaggccggcccctgtgcctag

SEQ ID NO: 72840 - DNA, 1590 bp, Artificial Sequence
  derived and/or modified sequence
atgtacaagcggaacggcctgatggccagcgtgctggtgaccagcgccacgccgcagggctcaagcagctcagattctcttgaagggcagagctgcgattacgcctcaaagtcctatgacgccgtggtgtttgatgtgctaaaggtgacaccagaagaattcgcatctcagattactctcatggatattccggtgttcaaagcaatacagccagaggaactcgcgagctgcggctggtcaaaaaaggaaaagcattctcttgcccctaacgtggtagcctttactaggcgcttcaatcaagtctctttttgggtggtccgcgagattcttaccgctcaaacactgaaaattagggcagagatcctttcccacttcgttaagatcgctaagaaactccttgaacttaacaatttacactccttgatgtccgttgtgtctgctttgcagtcagcacccatttttcggctgaccaagacctgggcattgctgaatcgaaaggacaaaacgaccttcgaaaaattggactacttgatgagtaaggaagataattataagcggacccgtgagtatataagatccctaaagatggtaccctcaatcccgtacctgggaatctatctcctggatctcatctatattgacagtgcataccctgctagcgggagtataatggaaaacgagcagagaagcaatcagatgaataatatcctccgcattatcgctgacctgcaggtcagctgttcctacgaccacctgacgacattacctcatgttcagaagtaccttaagtcagtccgttatatcgaggaactccagaagtttgttgaggacgacaattacaagctgtctctcaggatcgaacccgggtccagctccccaaggctggtctcttcgaaggaggacctcgctggcccatcagccggcagcggttcagccagattttcacgacggcccacatgcccagacacatcggtcgccggatcgttgccgactccgcctgtaccaaggcaccggaagagtcattcgttaggcaacaaccgaggccgcctctacgcaacgttggggccgaattggcgcgttcctgtccgaaacagccctaggacacgatcatgtgtgtactcccctaccgggccctgcatttgttctttgggcaatagtgccgctgtgccaactatggagggcccactgcgccgtaagactcttctcaaggagggccgaaagcccgcactgtcaagttggacgcgctactgggtgatcctgagtggttcaaccctgctgtactacggtgctaagtcattgcgcgggactgaccggaaacacgtcagcatagtgggatggatggtgcagttgcctgacgacccggagcaccctgatatcttccaacttaacaatcccgataagggcaacgtgtacaagttccaaactggatcaagattccacgctatactgtggcacaagcacctggacgatgcatgtaagagcaatcgtccgcaggaggctggcgctgcccccgggccaactggtactgatagtcatgaggtggatcatctggagggcggagctgggaaagaggccgggccatgcgcctag

SEQ ID NO: 72841 - DNA, 1590 bp, Artificial Sequence
  derived and/or modified sequence
atgtacaagcgtaatggcctgatggcctctgtgctggtgaccagcgcaacccctcagggttccagcagtagcgactctctcgaaggtcagtcctgcgattatgcttctaaaagctatgatgccgtagttttcgacgtgcttaaggttacaccagaagagtttgccagccagattacccttatggacatcccagtgttcaaggccatccagcctgaggaactcgcgtcctgtggatggtctaagaaggagaagcactctctggcccctaatgtggttgctttcacaaggaggttcaaccaagtgagcttttgggttgtgcgagaaattctgacagcgcagaccctcaaaatacgcgcagagattctttcacacttcgtcaaaatcgccaaaaaactgctggagttaaacaacctgcatagtttgatgtctgttgtgtccgcactgcagtctgctcccatctttcgcttgaccaaaacttgggccctgctgaatcgaaaagacaagaccacctttgagaagttagattacctgatgagcaaggaggataattataagcggactcgtgaatatatacggtctttaaagatggtgccgtccattccctacctgggtatctacctgctggacctgatatatattgatagcgcatatccggcatctggctccatcatggaaaatgagcagcggtcaaaccaaatgaataacatccttaggattatcgccgatctgcaggtgagttgtagctacgaccacttgacgaccctcccccatgttcagaagtaccttaagtctgtgaggtacattgaagagctccagaaattcgtagaagatgataactataagctgtcacttcgcattgagccaggtagctcctctcccaggctcgtcagcagtaaagaggacctggccggacctagcgcgggttccggctcagccagattcagtcggagaccaacttgtcctgacactagcgtggcaggatcactcccaaccccacccgtccccagacaccgcaaaagccactccctcggaaacaaccgcggtcgattatacgccactcttgggccaaactggcgggtgcctgtgcggaattcacccaggaccaggagttgcgtatattccccgacgggtccttgtatatgtagcctcgggaacagcgcagcggtaccaaccatggaagggcctctgagaagaaagaccctgctcaaagaggggagaaaaccagctctctccagctggacccgatattgggtgatcctaagtggatctactctgctgtactacggcgcaaagtctctcagggggacagaccggaaacacgtgtccatcgtgggctggatggtgcagctgcctgatgatcccgaacacccagacattttccagctcaacaacccggacaaggggaacgtgtataaattccagacaggctctcggtttcacgccatactttggcacaagcatcttgacgatgcttgcaaatctaatcgcccacaggaagctggagctgctccgggaccaacaggtacggactcccatgaagtcgaccacttggagggcggagccggtaaagaggccggtccttgtgcctag

SEQ ID NO: 72842 - DNA, 2466 bp, Artificial Sequence
  derived and/or modified sequence
gacttctccagacaggttatgttacctgcagaggctgccctgaagctccctgtggcctggagactatgtacaagaggaatggtctgatggctagcgtgttggtcacctctgccactccacagggcagcagcagctcggactctctggagggccagagctgcgactatgccagcaagagctatgatgccgttgtcttcgatgtcttgaaagtgaccccagaggagtttgctagccagattacattaatggatatacctgtgtttaaagctatccagccggaggaactagccagctgtggatggagtaagaaggagaaacacagtcttgcccctaacgttgtggcctttacccggaggtttaaccaggtcagtttttgggttgtacgagaaattctaacagcacagactttaaaaataagggcagaaatcctcagccattttgtgaaaatagccaagaaacttctagaactcaacaaccttcattctctcatgtctgtggtatcagcattacaaagtgctcccatcttcaggctgacaaaaacctgggctcttttaaatcgaaaagacaagactacctttgagaaattggactacctgatgtcgaaagaagataattacaagcggacacgggaatatatccgaagcctgaagatggttccaagtattccctatctaggaatctatcttctggatttaatctacattgattctgcatatcctgcctcaggcagtatcatggaaaatgaacaaagatccaatcagatgaacaatattcttcgaataattgctgatttacaagtttcctgcagctatgatcacctcaccaccctgccccatgtgcagaagtacctgaagtccgtacgctacattgaagagctccagaagtttgtggaagacgacaactacaaactgtcgctcagaatcgaaccaggaagcagctctccaagactagtctcttccaaggaagatcttgcaggtccctctgctggctccggttctgcgaggttcagccggaggcccacctgtcctgacacatctgttgctggcagcctccccacacctccagtccccagacacaggaagagccacagcctaggcaacaacaggggacgtctctatgccaccctggggcccaactggcgggttccagttaggaattctcccagaacccggagctgtgtctacagccccaccggcccgtgcatctgttctctggggaactccgcagctgtgcccaccatggaggggcctctgagaagaaaaaccctgctcaaggaagggcggaagcctgcgctgtcctcgtggaccaggtactgggtcatactctcaggatccaccctcctgtactacggagccaagtccttgcggggcacagacagaaaacacgtttccatcgtgggctggatggtgcagctgcccgatgaccccgagcacccagatatcttccagctgaacaaccctgacaaaggcaatgtttacaagtttcagactggttcccgatttcatgcaatactgtggcacaagcatttggatgatgcatgtaaaagcaacaggcctcaggaagccggagcagctccaggtccaacaggaactgacagccacgaggtggaccacctggagggcggtgcggggaaggaggcagggccctgtgcctgaagcctgggcaccatggtggccccagtcaggagcaacagtggtagccctgagtaaaacccattgtccctctttggaggagcggccagaggatgacagcagccccagcaggcagcagtgcctgggcaggctgatccagcagagcactaatgggtcagtttcatgtattggcagatgtggtgtagcatggcaaggctacaagttttaaggatttttgtctgattttcagacctggaggaggggatttttcttcctactttcccccttttttatttctaatttactttcaaccaaatattcccactatgtgctatatgtaataataaaaagttgacaacaactgaaatattcaacagcagaggatgatttaagtgaatcacagtacatccgtgtgatggaatgccaggagggtgtaagaaagagtgtgacagaaatgcatctattcacaaggaaacatcgcagtgactagagtgattttctgttctgtggaactgcatgtcctaaacttgtttttattaacactgaatacacttaaaccttatctataacatatgtataggtataaacaacagcaataaaacaccttattgccaccatgagcctaacagcagagccaccagggccttggaatgctgtccctcaccatggcctcttcctaattcggtttctctccctcccacctgtgccccagcaccactctcctgatttgtttgctgattattcctttagaattgcaggtcacgtacttgattccttcatgtgttgtctggggtgcatttttaaactttcttataaatagaaccataaagatgca

SEQ ID NO: 72843 - DNA, 1590 bp, Artificial Sequence
  derived and/or modified sequence
atgtacaagagaaacggcctgatggccagcgtgctggtgaccagcgccaccccccagggcagcagcagcagcgacagcctggagggccagagctgcgactacgccagcaagagctacgacgccgtggtgttcgacgtgctgaaggtgacccccgaggagttcgccagccagatcaccctgatggacatccccgtgttcaaggccatccagcccgaggagctggccagctgcggctggagcaagaaggagaagcacagcctggcccccaacgtggtggccttcaccagaagattcaaccaggtgagcttctgggtggtgagagagatcctgaccgcccagaccctgaagatcagagccgagatcctgagccacttcgtgaagatcgccaagaagctgctggagctgaacaacctgcacagcctgatgagcgtggtgagcgccctgcagagcgcccccatcttcagactgaccaagacctgggccctgctgaacagaaaggacaagaccaccttcgagaagctggactacctgatgagcaaggaggacaactacaagagaaccagagagtacatcagaagcctgaagatggtgcccagcatcccctacctgggcatctacctgctggacctgatctacatcgacagcgcctaccccgccagcggcagcatcatggagaacgagcagagaagcaaccagatgaacaacatcctgagaatcatcgccgacctgcaggtgagctgcagctacgaccacctgaccaccctgccccacgtgcagaagtacctgaagagcgtgagatacatcgaggagctgcagaagttcgtggaggacgacaactacaagctgagcctgagaatcgagcccggcagcagcagccccagactggtgagcagcaaggaggacctggccggccccagcgccggcagcggcagcgccagattcagcagaagacccacctgccccgacaccagcgtggccggcagcctgcccaccccccccgtgcccagacacagaaagagccacagcctgggcaacaacagaggcagactgtacgccaccctgggccccaactggagagtgcccgtgagaaacagccccagaaccagaagctgcgtgtacagccccaccggcccctgcatctgcagcctgggcaacagcgccgccgtgcccaccatggagggccccctgagaagaaagaccctgctgaaggagggcagaaagcccgccctgagcagctggaccagatactgggtgatcctgagcggcagcaccctgctgtactacggcgccaagagcctgagaggcaccgacagaaagcacgtgagcatcgtgggctggatggtgcagctgcccgacgaccccgagcaccccgacatcttccagctgaacaaccccgacaagggcaacgtgtacaagttccagaccggcagcagattccacgccatcctgtggcacaagcacctggacgacgcctgcaagagcaacagaccccaggaggccggcgccgcccccggccccaccggcaccgacagccacgaggtggaccacctggagggcggcgccggcaaggaggccggcccctgcgcctag

SEQ ID NO: 72844 - protein, 537 aa, Artificial Sequence
  derived and/or modified sequence
MYKRNGLMASVLVTSATPQGSSSSDSLEGQSCDYASKSYDAVVFDVLKVTPEEFASQITLMDIPVFKAIQPEELASCGWSKKEKHSLAPNVVAFTRRFNQVSFWVVREILTAQTLKIRAEILSHFVKIAKKLLELNNLHSLMSVVSALQSAPIFRLTKTWALLNRKDKTTFEKLDYLMSKEDNYKRTREYIRSLKMVPSIPYLGIYLLDLIYIDSAYPASGSIMENEQRSNQMNNILRIIADLQVSCSYDHLTTLPHVQKYLKSVRYIEELQKFVEDDNYKLSLRIEPGSSSPRLVSSKEDLAGPSAGSGSARFSRRPTCPDTSVAGSLPTPPVPRHRKSHSLGNNRGRLYATLGPNWRVPVRNSPRTRSCVYSPTGPCICSLGNSAAVPTMEGPLRRKTLLKEGRKPALSSWTRYWVILSGSTLLYYGAKSLRGTDRKHYKSTPGKKVSIVGWMVQLPDDPEHPDIFQLNNPDKGNVYKFQTGSRFHAILWHKHLDDACKSNRPQEAGAAPGPTGTDSHEVDHLEGGAGKEAGPCA

SEQ ID NO: 72845 - DNA, 1614 bp, Artificial Sequence
  derived and/or modified sequence
atgtataaacgcaacggattgatggcctctgtgctggtgacctcagccactcctcagggctcaagcagttctgattcgctcgaaggacaatcttgtgattatgctagcaaaagttatgacgccgtggtgttcgatgttcttaaagtaacgcctgaggagtttgcaagtcaaattactctgatggacattcccgtgttcaaggctattcaacccgaagaacttgccagttgcggttggagcaagaaagagaaacacagtctcgcaccaaatgtggtagctttcactcgcaggttcaatcaggtatcgttctgggtggtacgagaaatactcaccgcccaaactttgaaaattagagcagaaatcctatcccacttcgtgaagattgccaagaagctgcttgagctgaataaccttcactcgctgatgagcgttgtaagtgccctgcagagcgcccccatattcagactgaccaaaacctgggcgctccttaaccgcaaagataagactacgtttgagaaactggactatcttatgagtaaggaggacaattataagagaactagggagtacatcagatcccttaagatggtgccttccatcccctacctagggatttatttactggatttgatttacatcgactctgcatatccagcctctggcagcataatggaaaacgaacagagatcaaaccaaatgaacaatatcctgcggatcattgccgacctccaggtaagctgctcatatgaccacctcaccacgttgcctcacgtccagaaatacctgaagagtgtacgctacattgaagaacttcagaaattcgtggaggatgataattataaactgtccctgcgcatcgaaccagggagctcatctcctcggctggtctccagtaaagaggatctggccggcccatctgcaggctccggtagtgcacgcttttcccgccgtcccacctgccccgatactagcgttgccggatctctccccacgcctccggtaccccgtcatcgcaaatcccacagcttgggcaataatcgcgggcgcttatatgctactctcggccctaattggagagtaccagtccgcaattccccaaggaccaggagctgtgtttacagccctacaggaccctgtatctgttccttagggaatagcgctgcagtcccaaccatggagggtcccctgagaagaaagactctgctcaaggagggaagaaaacccgcactatcgtcctggacgcgctactgggtgatactcagcggaagcacactgctgtactacggagctaaaagtctgcgaggcacggatcgcaaacactacaagtctaccccgggcaagaaggtgagcattgtcggatggatggtacagcttcctgacgaccccgagcatccggatatattccagttgaacaacccggataaaggaaacgtctacaagttccaaacaggctcacgattccatgccatcctctggcataagcatttggacgatgcttgcaagtccaatcggccgcaggaggctggtgctgccccaggcccaacaggaaccgactcccacgaagtagaccacctggaggggggcgccggaaaggaggccggaccatgtgcttag

SEQ ID NO: 72846 - DNA, 1614 bp, Artificial Sequence
  derived and/or modified sequence
atgtacaagagaaatggcctgatggcctctgtgctggtgaccagcgccaccccccagggcagcagcagcagtgacagcctggagggccagagctgtgactatgccagcaagagctatgatgctgtggtgtttgatgtgctgaaggtgaccccagaggagtttgccagccagatcaccctgatggacatccctgtgttcaaggccatccagcctgaggagctggccagctgtggctggagcaagaaggagaagcacagcctggcccccaacgtggtggccttcacccggcgcttcaaccaggtgtccttctgggtggtgcgggagatcctgacagcccagaccctgaagatccgggcagagatcctgagccactttgtgaagatcgccaagaagctgctggagctgaacaacctgcacagcctgatgtctgtggtgtctgccctgcagagcgcccccatcttccggctgaccaagacctgggccctgctgaacaggaaggacaagaccacctttgagaagctggactacctgatgagcaaagaagacaactacaagaggacccgggagtacatccgcagcctgaagatggtgcccagcatcccctacctgggcatctacctgctggacctgatctacattgattctgcctacccagccagcggcagcatcatggagaatgagcagaggagcaaccagatgaacaacatcctgcgcatcatcgctgacctgcaggtgtcctgcagctatgaccacctgaccaccctgccccacgtgcagaagtacctgaagtctgtgcgctacatcgaggagctgcagaagtttgtggaggatgacaactacaagctgagcctgcgcatcgagcccggcagcagcagcccccggctggtgagcagcaaggaggacctggccggccccagcgctggcagcggcagcgcccgcttcagccggcggcccacctgcccagacacctctgtggccggcagcctgcccaccccacctgtgcccaggcacaggaagagccacagcctgggcaacaacagaggccgcctgtatgccaccctgggccccaactggagggtgcctgtgaggaacagccccaggaccaggagctgtgtgtacagccccaccggcccctgcatctgcagcctgggcaacagcgctgctgtgcccaccatggagggccccctgcggaggaagaccctgctgaaggagggcaggaagccagccctgagctcctggacccgctactgggtgatcctgagcggcagcaccctgctgtactacggggccaagagcctgcggggcacagacaggaagcactacaagagcaccccaggcaagaaggtgtccatcgtgggctggatggtgcagctgcctgatgatcctgagcacccagacatcttccagctgaacaacccagacaagggaaatgtgtacaagttccagacaggcagccgcttccacgccatcctgtggcacaagcacctggatgatgcctgcaagagcaaccggccccaggaggccggggccgcccctggccccactggaacagacagccatgaggtggaccacctggagggcggggccggcaaggaggccggcccctgtgcctag

SEQ ID NO: 72847 - DNA, 1614 bp, Artificial Sequence
  derived and/or modified sequence
atgtacaagcggaacggcctgatggccagcgtgctggtgaccagcgccactccacagggatcctcctccagtgattcattggaaggtcagtcgtgtgactacgccagcaaatcctatgatgccgtcgtgttcgatgtccttaaggtgactcccgaagaatttgcaagccagattaccctcatggacattcccgtttttaaggccattcagccagaggaactggccagctgtggttggtccaaaaaggagaaacattccctcgcacccaacgtggtagctttcacaagaagattcaaccaagtgagcttttgggtagttagggaaatcttgacagcgcagactcttaagatcagggccgagattctctctcacttcgtgaaaatcgctaagaagctgctggagctcaataatttgcattcgctgatgtctgtcgtaagcgccctgcagagtgccccaatcttcagactgacgaagacctgggccctcctgaataggaaagacaaaacgacctttgagaagcttgattatctcatgtcaaaggaggacaactacaaaaggacccgcgagtacatacggagtctcaaaatggtcccctccatcccttatctgggcatctatcttctagatcttatctacatcgattctgcatatcccgcttctggttccatcatggaaaacgagcagagaagcaatcagatgaacaatatcctgagaattatcgccgatctgcaggtgtcatgcagctatgatcatttaacaacacttccccatgtccagaaatacttgaagtcggtccgctatatagaagaattacagaaattcgttgaggatgataattataagctgtccctgcgtatcgaacctggaagttccagcccgagattggtttcctccaaagaggatctggccggcccctcagccggttccggttctgcaaggttctctcgacgtccgacatgtcccgatacgtccgtggcgggttcactgcccacaccgcctgttcctcgacatcggaaatcacactcccttggcaataatcgggggaggttgtatgccactctggggccaaattggcgcgtacctgtacgcaacagtccgcgcacccgaagttgcgtgtactcacccaccggcccctgcatctgtagcctgggcaactctgcagcggtgcctaccatggaaggtccgctccgacgcaagacactactgaaggagggtcgaaaacccgcattgagctcttggacccgctattgggtaattctgtctggcagcacacttctgtactacggggcgaaatctctccgcggaaccgatcggaaacattacaagtccacccctggcaagaaagtaagtattgtgggctggatggtccagcttcctgacgacccggagcaccctgacatcttccagctgaacaaccccgataaagggaacgtgtacaagtttcagaccggatctcgcttccacgctatactgtggcacaagcatctggatgacgcctgtaagagtaaccgcccccaagaggccggtgccgcacctggtcccacagggactgactcgcatgaagtggatcacctagagggcggggcaggaaaggaagccgggccttgcgcatag

SEQ ID NO: 72848 - DNA, 1614 bp, Artificial Sequence
  derived and/or modified sequence
atgtacaagcgtaacggcctcatggcatccgtcctggtgacctctgccactcctcagggctctagtagttccgacagcctggagggtcagtcctgtgactacgccagtaagtcgtatgacgcggtcgtatttgacgtgttgaaggtgacccccgaagagtttgcctctcagattacactgatggatatccccgtatttaaggctatacagcctgaggagttagcttcctgcggctggagtaaaaaagagaagcattctctagcacctaatgtcgtggctttcacgagaagatttaatcaggtgtccttttgggttgtgcgagagattctcacagcacagaccctgaagatcagagccgagattttgagccactttgtcaagatcgcaaagaagctcctggaacttaacaatctgcactccctgatgtctgtcgtctctgcactccagagcgccccaatctttcggctgaccaagacatgggccttgcttaatcgcaaagacaagaccacctttgagaagctcgactacttgatgtctaaggaggacaattacaaacgtacacgagaatatattcgctctctgaaaatggtaccatcaattccctacctggggatatacctcctcgacctcatttacattgactcggcctatcccgcttccggatccattatggaaaatgagcagcgaagtaaccaaatgaataatattctcaggataattgcagacttacaagtctcgtgcagctacgaccacctcacaacgcttccccatgtgcaaaaatatctgaaatcagtgcgttatatcgaagagcttcaaaagttcgtagaagacgacaactacaaactgtctctcagaattgagcccggatcatcgagccctaggcttgtgagctctaaggaagacctagctggcccttccgccggatctggctcggccagattctcacggagaccgacttgccccgacacctctgtggccggtagcctacccacaccacccgtgccccgtcacagaaagagtcactcacttggcaacaacaggggaagactctatgccacgctcggaccaaattggcgagtgccagtcaggaacagtccccgaacaaggtcttgcgtatacagcccaaccgggccttgcatttgctccctaggtaactccgccgctgtccccacaatggaggggccactgagacggaagactctgcttaaggaaggcaggaagcccgcactgagctcatggacaagatactgggtgatcctgtccggctctacacttttgtactacggcgctaagagcctcaggggtacagatcgcaagcactacaaaagcacccctggtaaaaaagtcagcatcgtcggctggatggtgcagttgcctgacgatcccgagcatcccgatatttttcagcttaacaacccagataagggaaatgtttacaagtttcagaccgggagtagattccacgctattctgtggcacaagcatctcgacgatgcttgcaaatctaatcgtccacaggaagctggagccgcaccagggcctactggaactgattcccacgaagtggaccatctggagggcggagcagggaaagaggccggaccatgcgcctag

SEQ ID NO: 72849 - DNA, 2362 bp, Artificial Sequence
  derived and/or modified sequence
cgccgctcaggccctggagcggacggttcctactgcggctgggcaccggctccgctcccgcgtctgcccgcgctccagctgcgcctggcccggccccggcccggctcggcgtggccccggcctccaagcgaaggcgccgctgccgctgggccgctcccagggccatgaggaagcggcggcagccactgcggcccgcgtcaaggtgaccggccgggactgcggcggcggggagagcggcggacttctccagacaggttatgttacctgcagaggctgccctgaagctccctgtggcctggagactatgtacaagaggaatggtctgatggctagcgtgttggtcacctctgccactccacagggcagcagcagctcggactctctggagggccagagctgcgactatgccagcaagagctatgatgccgttgtcttcgatgtcttgaaagtgaccccagaggagtttgctagccagattacattaatggatatacctgtgtttaaagctatccagccggaggaactagccagctgtggatggagtaagaaggagaaacacagtcttgcccctaacgttgtggcctttacccggaggtttaaccaggtcagtttttgggttgtacgagaaattctaacagcacagactttaaaaataagggcagaaatcctcagccattttgtgaaaatagccaagaaacttctagaactcaacaaccttcattctctcatgtctgtggtatcagcattacaaagtgctcccatcttcaggctgacaaaaacctgggctcttttaaatcgaaaagacaagactacctttgagaaattggactacctgatgtcgaaagaagataattacaagcggacacgggaatatatccgaagcctgaagatggttccaagtattccctatctaggaatctatcttctggatttaatctacattgattctgcatatcctgcctcaggcagtatcatggaaaatgaacaaagatccaatcagatgaacaatattcttcgaataattgctgatttacaagtttcctgcagctatgatcacctcaccaccctgccccatgtgcagaagtacctgaagtccgtacgctacattgaagagctccagaagtttgtggaagacgacaactacaaactgtcgctcagaatcgaaccaggaagcagctctccaagactagtctcttccaaggaagatcttgcaggtccctctgctggctccggttctgcgaggttcagccggaggcccacctgtcctgacacatctgttgctggcagcctccccacacctccagtccccagacacaggaagagccacagcctaggcaacaacaggggacgtctctatgccaccctggggcccaactggcgggttccagttaggaattctcccagaacccggagctgtgtctacagccccaccggcccgtgcatctgttctctggggaactccgcagctgtgcccaccatggaggggcctctgagaagaaaaaccctgctcaaggaagggcggaagcctgcgctgtcctcgtggaccaggtactgggtcatactctcaggatccaccctcctgtactacggagccaagtccttgcggggcacagacagaaaacactataaatccacacctggcaaaaaggtttccatcgtgggctggatggtgcagctgcccgatgaccccgagcacccagatatcttccagctgaacaaccctgacaaaggcaatgtttacaagtttcagactggttcccgatttcatgcaatactgtggcacaagcatttggatgatgcatgtaaaagcaacaggcctcaggaagccggagcagctccaggtccaacaggaactgacagccacgaggtggaccacctggagggcggtgcggggaaggaggcagggccctgtgcctgaagcctgggcaccatggtggccccagtcaggagcaacagtggtagccctgagtaaaacccattgtccctctttggaggagcggccagaggatgacagcagccccagcaggcagcagtgcctgggcaggctgatccagcagagcactaatgggtcagtttcatgtattggcagatgtggtgtagcatggcaaggctacaagttttaaggatttttgtctgattttcagacctggaggaggggatttttcttcctactttcccccttttttatttctaatttactttcaaccaaatattcccactatgtgctatatgtaataataaaaagttgacaacaactgaaatattcaacagcagaggatgatttaagtgaatcacagtacatccgtgtgatggaatgccaggagggtgtaagaaagagtgtgacagaaatgcatctattcac

SEQ ID NO: 72850 - DNA, 1614 bp, Artificial Sequence
  derived and/or modified sequence
atgtacaagagaaacggcctgatggccagcgtgctggtgaccagcgccaccccccagggcagcagcagcagcgacagcctggagggccagagctgcgactacgccagcaagagctacgacgccgtggtgttcgacgtgctgaaggtgacccccgaggagttcgccagccagatcaccctgatggacatccccgtgttcaaggccatccagcccgaggagctggccagctgcggctggagcaagaaggagaagcacagcctggcccccaacgtggtggccttcaccagaagattcaaccaggtgagcttctgggtggtgagagagatcctgaccgcccagaccctgaagatcagagccgagatcctgagccacttcgtgaagatcgccaagaagctgctggagctgaacaacctgcacagcctgatgagcgtggtgagcgccctgcagagcgcccccatcttcagactgaccaagacctgggccctgctgaacagaaaggacaagaccaccttcgagaagctggactacctgatgagcaaggaggacaactacaagagaaccagagagtacatcagaagcctgaagatggtgcccagcatcccctacctgggcatctacctgctggacctgatctacatcgacagcgcctaccccgccagcggcagcatcatggagaacgagcagagaagcaaccagatgaacaacatcctgagaatcatcgccgacctgcaggtgagctgcagctacgaccacctgaccaccctgccccacgtgcagaagtacctgaagagcgtgagatacatcgaggagctgcagaagttcgtggaggacgacaactacaagctgagcctgagaatcgagcccggcagcagcagccccagactggtgagcagcaaggaggacctggccggccccagcgccggcagcggcagcgccagattcagcagaagacccacctgccccgacaccagcgtggccggcagcctgcccaccccccccgtgcccagacacagaaagagccacagcctgggcaacaacagaggcagactgtacgccaccctgggccccaactggagagtgcccgtgagaaacagccccagaaccagaagctgcgtgtacagccccaccggcccctgcatctgcagcctgggcaacagcgccgccgtgcccaccatggagggccccctgagaagaaagaccctgctgaaggagggcagaaagcccgccctgagcagctggaccagatactgggtgatcctgagcggcagcaccctgctgtactacggcgccaagagcctgagaggcaccgacagaaagcactacaagagcacccccggcaagaaggtgagcatcgtgggctggatggtgcagctgcccgacgaccccgagcaccccgacatcttccagctgaacaaccccgacaagggcaacgtgtacaagttccagaccggcagcagattccacgccatcctgtggcacaagcacctggacgacgcctgcaagagcaacagaccccaggaggccggcgccgcccccggccccaccggcaccgacagccacgaggtggaccacctggagggcggcgccggcaaggaggccggcccctgcgcctag

SEQ ID NO: 72851 - protein, 305 aa, Artificial Sequence
  derived and/or modified sequence
MYKRNGLMASVLVTSATPQGSSSSDSLEGQSCDYASKSYDAVVFDVLKVTPEEFASQITLMDIPVFKAIQPEELASCGWSKKEKHSLAPNVVAFTRRFNQVSFWVVREILTAQTLKIRAEILSHFVKIAKKLLELNNLHSLMSVVSALQSAPIFRLTKTWALLNRKDKTTFEKLDYLMSKEDNYKRTREYIRSLKMVPSIPYLGIYLLDLIYIDSAYPASGSIMENEQRSNQMNNILRIIADLQVSCSYDHLTTLPHVQKYLKSVRYIEELQKFVEDDNYKLSLRIEPGSSSPRLVSSKEDLAAM

SEQ ID NO: 72852 - protein, 213 aa, Artificial Sequence
  derived and/or modified sequence
MYKRNGLMASVLVTSATPQGSSSSDSLEGQSCDYASKSYDAVVFDVLKVTPEEFASQITLMDIPVFKAIQPEELASCGWSKKEKHSLAPNVVAFTRRFNQVSFWVVREILTAQTLKIRAEILSHFVKIAKKLLELNNLHSLMSVVSALQSAPIFRLTKTWALLNRKDKTTFEKLDYLMSKEDNYKRTREYIRSLKMVPSIPYLGRSLNWLIFF

SEQ ID NO: 72853 - protein, 108 aa, Artificial Sequence
  derived and/or modified sequence
MYKRNGLMASVLVTSATPQGSSSSDSLEGQSCDYASKSYDAVVFDVLKVTPEEFASQITLMDIPVFKAIQPEKGWPARMEDSLQKSTVSSRPHDTLQFRKTLPVGPGT

SEQ ID NO: 72854 - protein, 384 aa, Artificial Sequence
  derived and/or modified sequence
MYKRNGLMASVLVTSATPQGSSSSDSLEGQSCDYASKSYDAVVFDVLKVTPEEFASQITLMDIPVFKAIQPEELASCGWSKKEKHSLAPNVVAFTRRFNQVSFWVVREILTAQTLKIRAEILSHFVKIAKKLLELNNLHSLMSVVSALQSAPIFRLTKTWALLNRKDKTTFEKLDYLMSKEDNYKRTREYIRSLKMVPSIPYLGIYLLDLIYIDSAYPASGSIMENEQRSNQMNNILRIIADLQVSCSYDHLTTLPHVQKYLKSVRYIEELQKFVEDDNYKLSLRIEPGSSSPRLVSSKEDLAVSHLSSLSHQGQAEEARLKPTSGQHPAWMWPSSSRVPAAPPASAAPRSPWPRNLRNDQGQPGAVALTCNPSTLGSRSRRIT

SEQ ID NO: 72855 - DNA, 918 bp, Artificial Sequence
  derived and/or modified sequence
atgtataagagaaatggactgatggcttcagtcctggtgactagtgctacaccacaagggtccagctccagcgatagcctggaggggcagtcttgcgactatgcgtccaagagctatgacgccgtcgtatttgatgtgctcaaggtgaccccggaagaatttgcatcacaaataacactgatggatattcccgtattcaaagctatccagcccgaggagctggcttcttgcggctggtccaagaaggaaaaacattccctcgcgcccaacgtggttgcctttactagaagattcaaccaggtcagtttttgggttgtcagagagatccttacggcgcaaaccttgaagatcagagctgaaattttatcacattttgtaaaaattgcaaagaagttactggagttgaataatctccacagtctgatgagcgtcgtttctgccctgcagtcagcaccaattttccgcctgaccaaaacctgggcgttgctcaaccgcaaagataagactacctttgaaaaattggactacctcatgtctaaggaagataattataagagaaccagagagtacatcagaagcttaaagatggtacctagtataccatacctgggaatctacctactagacctcatatatatcgatagtgcttatcccgcctcaggctctataatggagaacgagcagaggagcaaccagatgaacaacatcttacgcattatagctgatttgcaggtgtcatgttcttatgaccatcttactaccctgcctcatgtgcagaagtacctgaagagcgttcgctacatcgaggaactgcagaaatttgtggaagacgacaattacaagttgagtctgaggatcgaaccaggatcctcaagcccccggcttgtctcatctaaggaggatctggccgctatgtag

SEQ ID NO: 72856 - DNA, 642 bp, Artificial Sequence
  derived and/or modified sequence
atgtacaagaggaatggattaatggcctctgtcctggtgacgtcagcaacgccccaagggtcttcatcctccgatagcctcgaaggacagtcgtgcgattatgcttctaaatcttatgatgctgtcgtgttcgatgtactcaaagtgactccggaggaatttgcatcccagattactttgatggacatccctgtctttaaagcgattcaacctgaggagctggcatcttgcgggtggagcaagaaggaaaagcatagcttggccccaaacgtggtagccttcacacgtaggttcaatcaagtttctttctgggtggtacgggagatcttaacggcccaaacgctgaagatccgcgccgagatcttaagtcacttcgtgaagatcgctaagaaactactcgaactcaataatcttcatagtcttatgagtgtcgtttccgccctgcagagtgcccccatatttcgactaactaaaacctgggccctactaaataggaaggacaagaccacttttgaaaaattggactatctgatgtccaaagaagataactataaaagaactcgtgagtacattcgctccttaaagatggttcccagcataccctaccttgggaggagtttgaactggctgatcttcttttag

SEQ ID NO: 72857 - DNA, 327 bp, Artificial Sequence
  derived and/or modified sequence
atgtacaaaaggaacggcctgatggctagcgtgctcgtgactagcgctaccccacaagggagttctagcagcgattctctggagggccaatcatgtgattacgcatccaaaagctacgatgccgtggtttttgatgtcctgaaagtcacacctgaggagttcgcttcgcagattacacttatggatatccccgtctttaaggccatccaacctgaaaaggggtggcctgcacggatggaagacagtctgcagaagagcactgtttccagccgaccccacgacaccctgcagtttcgcaagactcttcctgtggggcctggcacctag

SEQ ID NO: 72858 - DNA, 1155 bp, Artificial Sequence
  derived and/or modified sequence
atgtataagcgtaatggattgatggccagtgttctggtgacttccgccacaccacaggggagttcgtccagtgactccctggaggggcagtcttgcgactacgcatctaagtcttatgacgcagtagtctttgacgtattgaaggtaactccagaggagttcgctagccagattacactgatggatatacctgtgttcaaagctattcagccagaggaactagcctcttgtgggtggtcgaagaaggagaagcattccctggcacccaacgtggtggcatttacgaggaggtttaatcaagtgtctttttgggtagtccgtgagatcctgactgcacagaccctgaaaattagagcggagattctgtcacactttgtcaaaatcgcaaagaaactccttgagctgaataatcttcattcgctcatgtccgttgttagtgccctccagtcagctcccatctttcggttgacaaagacatgggccttgttgaaccgcaaagacaaaaccaccttcgagaagctggactacctgatgtccaaagaagataactataaacggacaagagagtacatccgaagtttaaagatggtaccatccattccctatctaggaatctacctgctcgatctgatctacatagactctgcgtatcccgccagcgggtctatcatggagaatgagcaaaggtccaatcagatgaataatatactcagaattatcgccgatcttcaggtgtcttgtagttatgaccacctgacgactctgccccacgttcagaagtacctcaaaagtgtcaggtacatagaagagttgcaaaagtttgttgaggatgataattacaaactgtccctccgcatagagcccggaagttcttccccccgtttggtctcaagcaaggaggaccttgcagtgtctcacctgagctcgttgtcccatcagggtcaggcagaagaggcgcggctgaagccaacatctggacaacatcctgcctggatgtggccatcttccagcagggttcccgctgcccctcctgcttctgccgcccccagatctccgtggccacgtaacctgcggaacgaccagggtcagcctggcgctgtggccctgacctgcaacccttccactctgggctctagatccagaagaatcacatag

SEQ ID NO: 72859 - DNA, 918 bp, Artificial Sequence
  derived and/or modified sequence
atgtacaagagaaatggcctgatggcctctgtgctggtgaccagcgccaccccccagggcagcagcagcagtgacagcctggagggccagagctgtgactatgccagcaagagctatgatgctgtggtgtttgatgtgctgaaggtgaccccagaggagtttgccagccagatcaccctgatggacatccctgtgttcaaggccatccagcctgaggagctggccagctgtggctggagcaagaaggagaagcacagcctggcccccaacgtggtggccttcacccggcgcttcaaccaggtgtccttctgggtggtgcgggagatcctgacagcccagaccctgaagatccgggcagagatcctgagccactttgtgaagatcgccaagaagctgctggagctgaacaacctgcacagcctgatgtctgtggtgtctgccctgcagagcgcccccatcttccggctgaccaagacctgggccctgctgaacaggaaggacaagaccacctttgagaagctggactacctgatgagcaaagaagacaactacaagaggacccgggagtacatccgcagcctgaagatggtgcccagcatcccctacctgggcatctacctgctggacctgatctacattgattctgcctacccagccagcggcagcatcatggagaatgagcagaggagcaaccagatgaacaacatcctgcgcatcatcgctgacctgcaggtgtcctgcagctatgaccacctgaccaccctgccccacgtgcagaagtacctgaagtctgtgcgctacatcgaggagctgcagaagtttgtggaggatgacaactacaagctgagcctgcgcatcgagcccggcagcagcagcccccggctggtgagcagcaaggaggacctggccgccatgtag

SEQ ID NO: 72860 - DNA, 642 bp, Artificial Sequence
  derived and/or modified sequence
atgtacaagagaaatggcctgatggcctctgtgctggtgaccagcgccaccccccagggcagcagcagcagtgacagcctggagggccagagctgtgactatgccagcaagagctatgatgctgtggtgtttgatgtgctgaaggtgaccccagaggagtttgccagccagatcaccctgatggacatccctgtgttcaaggccatccagcctgaggagctggccagctgtggctggagcaagaaggagaagcacagcctggcccccaacgtggtggccttcacccggcgcttcaaccaggtgtccttctgggtggtgcgggagatcctgacagcccagaccctgaagatccgggcagagatcctgagccactttgtgaagatcgccaagaagctgctggagctgaacaacctgcacagcctgatgtctgtggtgtctgccctgcagagcgcccccatcttccggctgaccaagacctgggccctgctgaacaggaaggacaagaccacctttgagaagctggactacctgatgagcaaagaagacaactacaagaggacccgggagtacatccgcagcctgaagatggtgcccagcatcccctacctgggccgcagcctgaactggctgatcttcttctag

SEQ ID NO: 72861 - DNA, 327 bp, Artificial Sequence
  derived and/or modified sequence
atgtacaagagaaatggcctgatggcctctgtgctggtgaccagcgccaccccccagggcagcagcagcagtgacagcctggagggccagagctgtgactatgccagcaagagctatgatgctgtggtgtttgatgtgctgaaggtgaccccagaggagtttgccagccagatcaccctgatggacatccctgtgttcaaggccatccagcctgagaagggctggccagccaggatggaggacagcctgcagaagagcacagtgagcagccggccccatgacaccctgcagttcaggaagaccctgcctgtgggccctggcacctag

SEQ ID NO: 72862 - DNA, 1155 bp, Artificial Sequence
  derived and/or modified sequence
atgtacaagagaaatggcctgatggcctctgtgctggtgaccagcgccaccccccagggcagcagcagcagtgacagcctggagggccagagctgtgactatgccagcaagagctatgatgctgtggtgtttgatgtgctgaaggtgaccccagaggagtttgccagccagatcaccctgatggacatccctgtgttcaaggccatccagcctgaggagctggccagctgtggctggagcaagaaggagaagcacagcctggcccccaacgtggtggccttcacccggcgcttcaaccaggtgtccttctgggtggtgcgggagatcctgacagcccagaccctgaagatccgggcagagatcctgagccactttgtgaagatcgccaagaagctgctggagctgaacaacctgcacagcctgatgtctgtggtgtctgccctgcagagcgcccccatcttccggctgaccaagacctgggccctgctgaacaggaaggacaagaccacctttgagaagctggactacctgatgagcaaagaagacaactacaagaggacccgggagtacatccgcagcctgaagatggtgcccagcatcccctacctgggcatctacctgctggacctgatctacattgattctgcctacccagccagcggcagcatcatggagaatgagcagaggagcaaccagatgaacaacatcctgcgcatcatcgctgacctgcaggtgtcctgcagctatgaccacctgaccaccctgccccacgtgcagaagtacctgaagtctgtgcgctacatcgaggagctgcagaagtttgtggaggatgacaactacaagctgagcctgcgcatcgagcccggcagcagcagcccccggctggtgagcagcaaggaggacctggccgtgagccacctgagcagcctgagccaccagggccaggccgaggaggcccggctgaagcccaccagcggccagcacccagcctggatgtggcccagcagcagccgggtgcctgctgcccccccagccagcgctgcccccaggagcccctggcccaggaacctgagaaatgaccagggccagcccggggctgtggccctgacctgcaaccccagcaccctgggcagccgcagccgccgcatcacctag

SEQ ID NO: 72863 - DNA, 918 bp, Artificial Sequence
  derived and/or modified sequence
atgtacaagcggaacggcctgatggccagcgtgctggtgaccagcgccactccccagggatcatcgagtagcgactctttggaaggacaatcatgcgactatgctagcaaatcttacgatgcagtcgtgttcgatgtcctcaaggtgaccccggaggagtttgcttcccagatcaccctcatggacatcccagtgtttaaggccatccagccggaggaactggccagttgcggttggtccaagaaagagaagcattctctggcaccaaatgtagtagccttcacaagaagattcaaccaggtttccttttgggttgtgcgggagatcctgacggcgcaaacgttgaagattcgggctgagatcctctcacatttcgttaaaatagccaaaaaactgttagaactgaacaacctccactccctaatgagcgtggtgagcgctctccagagtgcgccaatttttagattaacaaagacgtgggctctgctaaatcggaaggacaagacaacattcgagaagcttgattacctgatgagtaaggaagacaattataagcgtactcgggagtatattagatccctgaagatggtgccgagcatcccctacttgggcatataccttttggaccttatatatattgattcggcgtaccctgctagtggctcgatcatggagaatgagcagcgaagtaaccagatgaataatatcctccgtattatcgcagacctgcaggtgtcgtgctcttatgaccatttgaccactctaccacacgttcagaagtacctgaaatctgtgcgttatatcgaggaactacagaagttcgtagaagacgacaattacaagctcagcctacgcatcgagccaggctcaagcagtcctcggttggtgtcttcaaaggaggatttggccgcaatgtag

SEQ ID NO: 72864 - DNA, 642 bp, Artificial Sequence
  derived and/or modified sequence
atgtacaagcggaacggcctgatggccagcgtgctggtgaccagcgccaccccccaggggtcatcaagttcagactccctggagggacagagttgcgactatgcaagcaagtcatatgatgcggtcgtgttcgacgttctaaaagtgaccccggaagagttcgcgtcacagatcacattaatggacatccctgtgttcaaagccattcagcccgaagagctagcttcctgtggatggtccaaaaaggagaagcattcactcgctcccaacgtcgtggcattcacgcgaagatttaatcaggtgtccttctgggttgtcagggagattctcaccgctcaaactctgaaaattcgagccgagattctatcacacttcgtcaaaatcgccaagaagctcctagagcttaataatttgcactcattgatgagtgtggtgtcagcgctgcagtctgccccaattttccgcctcaccaagacatgggcgctgctcaatcgtaaagataagacgacgtttgaaaagctcgactacctcatgagcaaggaggacaattataaaagaactcgggaatacatacgctccctcaagatggttccctccatcccttaccttggtcggagcctcaactggctgatctttttctag

SEQ ID NO: 72865 - DNA, 327 bp, Artificial Sequence
  derived and/or modified sequence
atgtacaagcggaacggcctgatggccagcgtgctggtgaccagcgctacaccccaaggaagttcttcaagcgactcgcttgaaggccagagttgcgattatgcctcaaagagctacgatgcggtagttttcgacgtcctgaaggtcaccccagaagagtttgcctcccagatcacccttatggatatccccgtcttcaaggccatccagccagagaagggctggcccgcaaggatggaggactctcttcaaaagtctaccgtgtcatccaggcctcatgacactctgcagttccgcaaaaccctccccgtaggcccagggacctag

SEQ ID NO: 72866 - DNA, 1155 bp, Artificial Sequence
  derived and/or modified sequence
atgtacaagcggaacggcctgatggccagcgtgctggtgaccagcgctaccccccaggggtctagttccagcgattcgttggagggccaatcgtgcgactacgcatctaagagctacgatgccgtagtttttgacgtgcttaaggtcacacctgaggaatttgcctcccaaatcaccctgatggacattcctgtttttaaggcaatacaacccgaggaactggcatcctgcggctggtcaaagaaggagaagcattctctcgcccccaacgtggtggccttcactcggaggttcaaccaggtgtctttctgggtcgtacgcgaaattctcacagcccagaccttgaagatacgagcagagatcttatcccactttgttaagatcgcgaaaaagctattagaactcaacaatctccattccctgatgagcgtggtatctgccctgcagagcgcgcctatattcaggctcacaaagacatgggcgctgcttaacagaaaggacaagactacattcgagaagttggattacctcatgagcaaggaagacaactataaacgcacccgtgaatacatcagaagtttgaaaatggtcccttctattccctatctcgggatttacctgctggatttgatttacattgattctgcgtacccagcttctggcagcatcatggaaaacgagcaacgctccaaccagatgaacaacattctgcgcatcatagcggacttgcaggtttcatgctcatatgatcatctgaccaccctgccccatgtgcagaagtaccttaagtcggtgagatatattgaggagttacagaagtttgtagaggatgataactataaactgtccttgagaatcgagccgggcagctcaagtccaagactggtgtccagcaaggaggacttagccgttagccacctgagtagcctgtctcaccaagggcaagccgaggaagcgcggctgaaaccaacaagtgggcagcaccccgcatggatgtggccttcttcaagcagggtgcctgcagctccgccagcatctgccgccccccgaagtccgtggccccgcaacctgcggaatgaccagggccagcccggagcagtggccttgacttgcaatcctagtaccctcggttcaagaagccgtaggatcacttag

SEQ ID NO: 72867 - DNA, 918 bp, Artificial Sequence
  derived and/or modified sequence
atgtataaacgcaacggcctcatggcctcagtccttgtgacatccgctaccccccagggctccagctccagcgactcgctagaaggacagagctgtgactatgcatctaagtcttacgacgctgttgtgttcgacgtgctcaaagttacacctgaggagttcgcctcccagatcacgttaatggacatacccgtcttcaaagccatacagccagaggaactggcttcttgtggatggtccaaaaaggagaaacattccctcgctcctaacgtggtggccttcacccggagatttaaccaggtgtccttttgggtggtacgagagatcttgaccgctcagacactgaagattcgggctgagatcctctctcacttcgtgaaaatcgcaaagaagctattagagctgaacaacctgcactcactaatgtccgtggttagtgctctgcagtctgctcccatttttcgtctcacaaagacctgggctttacttaatcggaaggataaaactactttcgagaagctggactatctgatgtctaaagaagacaattataaaaggactagagaatacattcgaagcctcaaaatggtgccaagcattccttacctgggaatctacttgctcgatctaatctacattgactccgcttaccccgctagtggaagtattatggaaaatgaacaacggtctaaccagatgaacaatatcttaagaatcattgcggatttacaagtcagctgcagctatgatcatttaactaccctaccccacgtgcagaaatatttaaaaagtgtgcggtacattgaggaattgcagaagtttgtagaagacgacaattataagctctccttaaggatcgagccaggcagtagctcaccacggctcgtgagctcaaaagaggacttggctgctatgtag

SEQ ID NO: 72868 - DNA, 642 bp, Artificial Sequence
  derived and/or modified sequence
atgtataagcggaacggtctgatggccagtgtactggtgacaagcgctacccctcaggggagcagtagcagcgattctttggaggggcagagttgcgattatgcttccaagtcgtatgatgcggtggttttcgacgtattaaaagtgacacccgaggagttcgcatcccagatcaccttgatggacattcccgtgttcaaggccattcagccagaagaactcgccagttgcggctggagtaaaaaagaaaagcactcacttgcgcctaatgtggtagcatttacccggaggttcaatcaagtgtctttctgggtagtaagagaaattctgacagcacaaaccctaaaaattcgagcggaaattctatctcacttcgtcaaaattgctaaaaagctattggagctgaataacctccattcattaatgtccgtggtgtcggcactgcagtctgctcctatcttccggctgactaaaacctgggccttactgaatcgaaaagataaaactacttttgaaaagctcgactacctgatgtctaaggaagacaattacaagaggacgcgggaatacatcaggtccctcaaaatggtcccatcgatcccttatctggggagatcattgaattggctcattttcttctag

SEQ ID NO: 72869 - DNA, 327 bp, Artificial Sequence
  derived and/or modified sequence
atgtataagcggaatggtttaatggcatccgtgcttgtaacatccgccaccccacaaggctctagcagcagcgattctcttgaggggcagagctgcgactacgcttcaaaatcctatgacgctgtcgtgtttgacgttctgaaagtaacccctgaagagttcgctagccagatcactttgatggacatccccgttttcaaagccatccagccagaaaagggctggccagcaagaatggaagacagtctgcagaaatcaactgttagcagcagaccacatgatacattgcaattcaggaaaactctgcccgtggggcctgggacctag

SEQ ID NO: 72870 - DNA, 1155 bp, Artificial Sequence
  derived and/or modified sequence
atgtataaacgaaacggcttaatggcatctgtacttgtcacgtccgcaactccgcaggggtcatcatctagtgacagtttagagggacagagttgcgattacgccagcaaatcttacgatgcagtggtgtttgatgttttgaaggttacgcccgaagagttcgcaagtcaaattaccttgatggatatacctgttttcaaagccatccagcctgaagagcttgcatcctgtggatggagcaagaaggaaaagcacagtctcgcacccaatgtggtcgcattcacccgaagatttaaccaggtcagtttttgggtggtgcgggagattctgaccgcccagacattaaagattcgcgcagagatcctgtcgcatttcgttaagattgctaagaagttgctggaactgaataatctccatagtcttatgagtgtcgtgtccgcactgcagagtgcccctatatttcggttaacaaagacctgggcgctcttaaaccgcaaagacaaaacaacctttgagaaactcgattatctgatgagcaaggaggacaactataaacgcactagagaatacattagatcgctgaaaatggtcccctctattccctacttgggcatctacctgctggatctcatttacatcgatagcgcttacccggcttctggcagtattatggaaaatgaacagaggtccaaccaaatgaacaatattttacgcattatcgcggatttgcaggtgagctgcagctacgatcatctgacgacacttccccatgtccaaaaatacctgaagagcgtcagatatattgaggaattgcagaagtttgtcgaggatgataattacaagttgagcctgcgcatcgagcccggttcaagcagtccgagactagtctccagtaaggaggacttagctgtttcccatttgagctccctgtcccaccagggccaggcagaagaggcacggctgaaaccaacttcaggacagcaccctgcttggatgtggcccagcagttcgcgcgtgcccgcagctcctccggctagcgctgctccccgttctccctggccccgaaacttgcgcaatgaccagggtcagcccggtgccgttgccttaacctgcaatcctagcacactgggaagtcggtcacgccgaataacatag

SEQ ID NO: 72871 - DNA, 1667 bp, Artificial Sequence
  derived and/or modified sequence
gctgcgcctggcccggccccggcccggctcggcgtggccccggcctccaagcgaaggcgccgctgccgctgggccgctcccagggccatgaggaagcggcggcagccactgcggcccgcgtcaaggtgaccggccgggactgcggcggcggggagagcggcggacttctccagacaggttatgttacctgcagaggctgccctgaagctccctgtggcctggagactatgtacaagaggaatggtctgatggctagcgtgttggtcacctctgccactccacagggcagcagcagctcggactctctggagggccagagctgcgactatgccagcaagagctatgatgccgttgtcttcgatgtcttgaaagtgaccccagaggagtttgctagccagattacattaatggatatacctgtgtttaaagctatccagccggaggaactagccagctgtggatggagtaagaaggagaaacacagtcttgcccctaacgttgtggcctttacccggaggtttaaccaggtcagtttttgggttgtacgagaaattctaacagcacagactttaaaaataagggcagaaatcctcagccattttgtgaaaatagccaagaaacttctagaactcaacaaccttcattctctcatgtctgtggtatcagcattacaaagtgctcccatcttcaggctgacaaaaacctgggctcttttaaatcgaaaagacaagactacctttgagaaattggactacctgatgtcgaaagaagataattacaagcggacacgggaatatatccgaagcctgaagatggttccaagtattccctatctaggaatctatcttctggatttaatctacattgattctgcatatcctgcctcaggcagtatcatggaaaatgaacaaagatccaatcagatgaacaatattcttcgaataattgctgatttacaagtttcctgcagctatgatcacctcaccaccctgccccatgtgcagaagtacctgaagtccgtacgctacattgaagagctccagaagtttgtggaagacgacaactacaaactgtcgctcagaatcgaaccaggaagcagctctccaagactagtctcttccaaggaagatcttgcagccatgtgagaccagaaaccagcaagccagccaacctccagcatcagagccctggcaggggacagaatggaccccagatggttcacatgaagagactttaatgaacagaaccaataaagcatggcgaggcacccatgggccggcccagggtcctggggagggtggagccctaggctaaagggcatggggaagaagtgttaccaatcccagggatggctgagttctggaggatgattggctgtgcagggtctgtgggcagggagggggaagcaggagcgagcagagaaaaatccctggcctccctttcctccagccctcagtctgccaccagagcctttcattggccaaatccaatagaaagctgggggcaaggggtccaggagatgcatctcaggggtcagcctcccccgaacagaagtggcaagtgggcagggcaaaaaatgcagctgaattgtgtgaacagactactcagcatactgccaagcctcagtgtctctatctgtaaagtgggcataaaatcttcctccttca

SEQ ID NO: 72872 - DNA, 1524 bp, Artificial Sequence
  derived and/or modified sequence
gagcggacggttcctactgcggctgggcaccggctccgctcccgcgtctgcccgcgctccagctgcgcctggcccggccccggcccggctcggcgtggccccggcctccaagcgaaggcgccgctgccgctgggccgctcccagggccatgaggaagcggcggcagccactgcggcccgcgtcaaggtgaccggccgggactgcggcggacttctccagacaggttatgttacctgcagaggctgccctgaagctccctgtggcctggagactatgtacaagaggaatggtctgatggctagcgtgttggtcacctctgccactccacagggcagcagcagctcggactctctggagggccagagctgcgactatgccagcaagagctatgatgccgttgtcttcgatgtcttgaaagtgaccccagaggagtttgctagccagattacattaatggatatacctgtgtttaaagctatccagccggaggaactagccagctgtggatggagtaagaaggagaaacacagtcttgcccctaacgttgtggcctttacccggaggtttaaccaggtcagtttttgggttgtacgagaaattctaacagcacagactttaaaaataagggcagaaatcctcagccattttgtgaaaatagccaagaaacttctagaactcaacaaccttcattctctcatgtctgtggtatcagcattacaaagtgctcccatcttcaggctgacaaaaacctgggctcttttaaatcgaaaagacaagactacctttgagaaattggactacctgatgtcgaaagaagataattacaagcggacacgggaatatatccgaagcctgaagatggttccaagtattccctatctaggtaggagtttgaattggcttatttttttttaagaaacctactcggtgccaaataagatgtttttacagtttctacctgaaaaatttccaggaagcgacatggcccgtagataaagaggcaattggttggctctttgggttggaacaggctgttggtacttcccaaggttggaaacctggattagggtgatatacaagtgatgttctgctttttatataaaagacctgtgggccccagggttccccaggctgcagcccagatgggtcacaatgagagtgataagactcgtactggttcatccacatcctcctgaactggggcatgtcaggcacaaaccctctgttctggttctctgggcattattagtatatttcatatttgtacaaataaaattatagtaatgtttatttttctggttagaaaataatgcatgttaattgtaaggaattagagaaaaaagttaatatcttttgttatctcacctaaagatatttgcttcatatcttattgatttgggcatatctaaaatatgtatgcttactctatcctaaaaatgttatttttatcttaaaaattttatctacttttcgatgctatgactcattcccatcagatggatttgtcaaactcgaatctgctct

SEQ ID NO: 72873 - DNA, 819 bp, Artificial Sequence
  derived and/or modified sequence
ctgcggctgggcaccggctccgctcccgcgtctgcccgcgctccagctgcgcctggcccggccccggcccggctcggcgtggccccggcctccaagcgaaggcgccgctgccgctgggccgctcccagggccatgaggaagcggcggcagccactgcggcccgcgtcaaggtgaccggccgggactgcggcggcggggagagcggcggacttctccagacaggttatgttacctgcagaggctgccctgaagctccctgtggcctggagactatgtacaagaggaatggtctgatggctagcgtgttggtcacctctgccactccacagggcagcagcagctcggactctctggagggccagagctgcgactatgccagcaagagctatgatgccgttgtcttcgatgtcttgaaagtgaccccagaggagtttgctagccagattacattaatggatatacctgtgtttaaagctatccagccggagaaaggctggcctgccagaatggaagactccctgcagaagtccacagtttcctccaggccacatgacacgttgcagttcaggaaaacactgcctgtgggtccaggaacctgaccctctggccttttgtctggatgccgtttgcctgctctgaagaagcgggcgttccagaaagccgaggtcaatgttggacgtcggacaaaccctgtgtgtctttgctgctccttggaatcagtgtttggccctcggagagggaagaatgtggccagcaggcagtcatttgtaaagtggagattggtttccctgacatcattaaaacccctctctcaggtca

SEQ ID NO: 72874 - DNA, 1672 bp, Artificial Sequence
  derived and/or modified sequence
cctggagcggacggttcctactgcggctgggcaccggctccgctcccgcgtctgcccgcgctccagctgcgcctggcccggccccggcccggctcggcgtggccccggcctccaagcgaaggcgccgctgccgctgggccgctcccagggccatgaggaagcggcggcagccactgcggcccgcgtcaaggtgaccggccgggactgcggcggcggggagagcggcggacttctccagacaggttatgttacctgcagaggctgccctgaagctccctgtggcctggagactatgtacaagaggaatggtctgatggctagcgtgttggtcacctctgccactccacagggcagcagcagctcggactctctggagggccagagctgcgactatgccagcaagagctatgatgccgttgtcttcgatgtcttgaaagtgaccccagaggagtttgctagccagattacattaatggatatacctgtgtttaaagctatccagccggaggaactagccagctgtggatggagtaagaaggagaaacacagtcttgcccctaacgttgtggcctttacccggaggtttaaccaggtcagtttttgggttgtacgagaaattctaacagcacagactttaaaaataagggcagaaatcctcagccattttgtgaaaatagccaagaaacttctagaactcaacaaccttcattctctcatgtctgtggtatcagcattacaaagtgctcccatcttcaggctgacaaaaacctgggctcttttaaatcgaaaagacaagactacctttgagaaattggactacctgatgtcgaaagaagataattacaagcggacacgggaatatatccgaagcctgaagatggttccaagtattccctatctaggaatctatcttctggatttaatctacattgattctgcatatcctgcctcaggcagtatcatggaaaatgaacaaagatccaatcagatgaacaatattcttcgaataattgctgatttacaagtttcctgcagctatgatcacctcaccaccctgccccatgtgcagaagtacctgaagtccgtacgctacattgaagagctccagaagtttgtggaagacgacaactacaaactgtcgctcagaatcgaaccaggaagcagctctccaagactagtctcttccaaggaagatcttgcagtctcccatctcagcagcctgtcacatcaaggtcaagcagaagaggcaagactcaaacccacctctggccaacaccctgcctggatgtggcccagctcctcacgagtaccagcggctcccccagcatctgctgctccgcgctccccgtggcctaggaatctaagaaatgatcaaggtcaaccaggtgcagtggctctcacctgtaatcccagcactttgggaagccgaagcaggaggatcacttgagcccaggagttcaagaccagcctgggcaacatggcaaaaccccatctctacaaaagtatataaatgatctgggcatggtggtgcgtgcctacagccccagctcctcagggcttaggcgagatcgcttgatcccaggagggggaggctacagtgagccgtgatcgcgccaccgcgctccagcttgggtgacagagcaagaccttgtctcaggaaaaaaaaaaaaaa

SEQ ID NO: 72875 - DNA, 918 bp, Artificial Sequence
  derived and/or modified sequence
atgtacaagagaaacggcctgatggccagcgtgctggtgaccagcgccaccccccagggcagcagcagcagcgacagcctggagggccagagctgcgactacgccagcaagagctacgacgccgtggtgttcgacgtgctgaaggtgacccccgaggagttcgccagccagatcaccctgatggacatccccgtgttcaaggccatccagcccgaggagctggccagctgcggctggagcaagaaggagaagcacagcctggcccccaacgtggtggccttcaccagaagattcaaccaggtgagcttctgggtggtgagagagatcctgaccgcccagaccctgaagatcagagccgagatcctgagccacttcgtgaagatcgccaagaagctgctggagctgaacaacctgcacagcctgatgagcgtggtgagcgccctgcagagcgcccccatcttcagactgaccaagacctgggccctgctgaacagaaaggacaagaccaccttcgagaagctggactacctgatgagcaaggaggacaactacaagagaaccagagagtacatcagaagcctgaagatggtgcccagcatcccctacctgggcatctacctgctggacctgatctacatcgacagcgcctaccccgccagcggcagcatcatggagaacgagcagagaagcaaccagatgaacaacatcctgagaatcatcgccgacctgcaggtgagctgcagctacgaccacctgaccaccctgccccacgtgcagaagtacctgaagagcgtgagatacatcgaggagctgcagaagttcgtggaggacgacaactacaagctgagcctgagaatcgagcccggcagcagcagccccagactggtgagcagcaaggaggacctggccgccatgtag

SEQ ID NO: 72876 - DNA, 642 bp, Artificial Sequence
  derived and/or modified sequence
atgtacaagagaaacggcctgatggccagcgtgctggtgaccagcgccaccccccagggcagcagcagcagcgacagcctggagggccagagctgcgactacgccagcaagagctacgacgccgtggtgttcgacgtgctgaaggtgacccccgaggagttcgccagccagatcaccctgatggacatccccgtgttcaaggccatccagcccgaggagctggccagctgcggctggagcaagaaggagaagcacagcctggcccccaacgtggtggccttcaccagaagattcaaccaggtgagcttctgggtggtgagagagatcctgaccgcccagaccctgaagatcagagccgagatcctgagccacttcgtgaagatcgccaagaagctgctggagctgaacaacctgcacagcctgatgagcgtggtgagcgccctgcagagcgcccccatcttcagactgaccaagacctgggccctgctgaacagaaaggacaagaccaccttcgagaagctggactacctgatgagcaaggaggacaactacaagagaaccagagagtacatcagaagcctgaagatggtgcccagcatcccctacctgggcagaagcctgaactggctgatcttcttctag

SEQ ID NO: 72877 - DNA, 327 bp, Artificial Sequence
  derived and/or modified sequence
atgtacaagagaaacggcctgatggccagcgtgctggtgaccagcgccaccccccagggcagcagcagcagcgacagcctggagggccagagctgcgactacgccagcaagagctacgacgccgtggtgttcgacgtgctgaaggtgacccccgaggagttcgccagccagatcaccctgatggacatccccgtgttcaaggccatccagcccgagaagggctggcccgccagaatggaggacagcctgcagaagagcaccgtgagcagcagaccccacgacaccctgcagttcagaaagaccctgcccgtgggccccggcacctag

SEQ ID NO: 72878 - DNA, 1155 bp, Artificial Sequence
  derived and/or modified sequence
atgtacaagagaaacggcctgatggccagcgtgctggtgaccagcgccaccccccagggcagcagcagcagcgacagcctggagggccagagctgcgactacgccagcaagagctacgacgccgtggtgttcgacgtgctgaaggtgacccccgaggagttcgccagccagatcaccctgatggacatccccgtgttcaaggccatccagcccgaggagctggccagctgcggctggagcaagaaggagaagcacagcctggcccccaacgtggtggccttcaccagaagattcaaccaggtgagcttctgggtggtgagagagatcctgaccgcccagaccctgaagatcagagccgagatcctgagccacttcgtgaagatcgccaagaagctgctggagctgaacaacctgcacagcctgatgagcgtggtgagcgccctgcagagcgcccccatcttcagactgaccaagacctgggccctgctgaacagaaaggacaagaccaccttcgagaagctggactacctgatgagcaaggaggacaactacaagagaaccagagagtacatcagaagcctgaagatggtgcccagcatcccctacctgggcatctacctgctggacctgatctacatcgacagcgcctaccccgccagcggcagcatcatggagaacgagcagagaagcaaccagatgaacaacatcctgagaatcatcgccgacctgcaggtgagctgcagctacgaccacctgaccaccctgccccacgtgcagaagtacctgaagagcgtgagatacatcgaggagctgcagaagttcgtggaggacgacaactacaagctgagcctgagaatcgagcccggcagcagcagccccagactggtgagcagcaaggaggacctggccgtgagccacctgagcagcctgagccaccagggccaggccgaggaggccagactgaagcccaccagcggccagcaccccgcctggatgtggcccagcagcagcagagtgcccgccgccccccccgccagcgccgcccccagaagcccctggcccagaaacctgagaaacgaccagggccagcccggcgccgtggccctgacctgcaaccccagcaccctgggcagcagaagcagaagaatcacctag

SEQ ID NO: 72879 - protein, 494 aa, Artificial Sequence
  derived and/or modified sequence
MMYSPICLTQDEFHPFIEALLPHVRAIAYTWFNLQARKRKYFKKHEKRMSKDEERAVKDELLSEKPEIKQKWASRLLAKLRKDIRQEYREDFVLTVTGKKHPCCVLSNPDQKGKIRRIDCLRQADKVWRLDLVMVILFKGIPLESTDGERLMKSPHCTNPALCVQPHHITVSVKELDLFLAYYVQEQDSGQSGSPSHNDPAKNPPGYLEDSFVKSGVFNVSELVRVSRTPITQGTGVNFPIGEIPSQPYYHDMNSGVNLQRSLSSPPSSKRPKTISIDENMEPSPTGDFYPSPSSPAAGSRTWHERDQDMSSPTTMKKPEKPLFSSASPQDSSPRLSTFPQHHHPGIPGVAHSVISTRTPPPPSPLPFPTQAILPPAPSSYFSHPTIRYPPHLNPQDTLKNYVPSYDPSSPQTSQPNGSGQVVGKVPGHFTPVLAPSPHPSAVRPVTLSMTDTKPITTSTEAYTASGTSQANRYVGLSPRDPSFLHQQQSWYLG

SEQ ID NO: 72880 - DNA, 1485 bp, Artificial Sequence
  derived and/or modified sequence
atgatgtattcgccgatttgcctgacgcaggacgagttccaccccttcattgaagctttactgccccacgttcgcgctattgcttatacatggtttaatctgcaggcaaggaagcggaagtattttaaaaagcacgagaagagaatgtccaaagatgaggagagagcggtaaaggacgaactgctgagtgaaaaacctgagattaagcaaaaatgggcctcccgccttcttgcgaaactgcggaaagacatcagacaggaatacagagaagatttcgtgctgacagtaactggaaaaaaacatccctgttgcgtccttagtaaccccgaccaaaaaggcaagattcgcaggatagattgcttacgccaggccgataaggtgtggagactcgacctcgtcatggttattttgtttaagggcatccccctcgagagtactgatggggaacgactcatgaaaagccctcactgtaccaaccctgcactgtgcgttcagccacatcatattaccgttagcgtcaaagagctggacttgttcctggcttactatgtccaggaacaagatagcgggcaatccggaagtccaagtcacaacgacccagccaagaaccctccaggttatttggaggatagttttgtcaaatccggggtgttcaatgttagcgaactggtccgcgtctcacgtactcctataacccaggggactggcgtcaactttccaatcggagagatcccgagtcaaccatactatcatgacatgaatagcggcgtgaatctccagagaagcctaagtagccctccttcctccaagcgccctaagaccattagtatcgacgagaacatggagcctagccctaccggggacttttatccgtctccaagttcaccagcagcaggatcacggacctggcacgagcgagatcaggacatgtcttcgccgacaaccatgaaaaagcctgaaaagcctctgttcagtagcgcatctccacaagatagctcccctaggctgagcacctttccgcagcaccatcatcctggcatccccggggttgcccactcagtcatatcaactcgcacccctccccccccctctcctctcccttttcctacacaggcaatccttccacccgctccttcttcctacttctctcaccccaccatcagataccctccacacctgaatccccaggatacacttaaaaactatgtgccaagctatgacccgtcatccccacaaacctcacagcccaacggatctggccaggtcgtcggcaaggtgcccggacattttacaccagttctagccccttcgccacacccctctgccgtaaggcccgtgaccttgtctatgactgacaccaagccgatcaccacaagcaccgaagcctatacagcttcgggcacgtctcaggctaaccggtatgtcggtcttagccccagagatccctccttcctgcatcagcagcagtcctggtatcttggatag

SEQ ID NO: 72881 - DNA, 1485 bp, Artificial Sequence
  derived and/or modified sequence
atgatgtacagccccatctgcctgacccaggatgagttccaccccttcatcgaggccctgctgccccacgtgcgggccatcgcctacacctggttcaacctgcaggccaggaagaggaagtacttcaagaagcatgagaagaggatgagcaaggatgaggagagagctgtgaaggatgagctgctgtctgagaagccagagatcaagcagaagtgggccagccggctgctggccaagctgaggaaggacatccggcaggagtaccgggaggactttgtgctgactgtgacaggcaagaagcacccctgctgcgtgctgagcaacccagaccagaagggcaagatcagaagaattgactgcctgcggcaggccgacaaggtgtggaggctggacctggtgatggtgatcctcttcaagggcatccccctggagagcacagatggagagcggctgatgaagagcccccactgcaccaacccagccctgtgtgtgcagccccaccacatcaccgtgtctgtgaaggagctggacctcttcctggcctactacgtgcaggagcaggacagcggccagagcggcagccccagccacaatgaccctgccaagaaccccccaggctacctggaggacagctttgtgaagtctggagtcttcaacgtgtctgagctggtgcgggtgtccaggacccccatcacccagggcactggagtgaacttccccatcggggagatccccagccagccctactaccatgacatgaacagcggcgtgaacctgcagaggagcctgagcagcccccccagcagcaagaggcccaagaccatcagcattgatgagaacatggagcccagccccaccggggacttctaccccagccccagcagccctgctgctggcagcaggacctggcatgagcgggaccaggacatgagcagccccaccaccatgaagaagccagagaagcccctcttcagcagcgccagcccccaggacagcagcccccggctgagcaccttcccccagcaccaccaccctggcatccctggggtggcccacagcgtcatcagcaccaggaccccacctccacccagccccctgcccttccccacccaggccatcctgcccccagcccccagcagctacttcagccaccccaccatccgctacccaccccacctgaacccccaggacaccctgaagaactacgtgcccagctatgaccccagcagcccccagaccagccagcccaatggaagtggccaggtggtgggcaaggtgcccggccacttcacccctgtgctggcccccagcccccaccccagcgctgtgcggcctgtgaccctgtccatgacagacaccaagcccatcaccaccagcacagaggcctacacagccagcggcaccagccaggccaaccgctacgtgggcctgagcccccgggaccccagcttcctgcaccagcagcagagctggtacctgggctag

SEQ ID NO: 72882 - DNA, 1485 bp, Artificial Sequence
  derived and/or modified sequence
atgatgtacagccccatctgcctgacccaggacgagttccacccctttatcgaagcgttgctaccgcacgtgcgagcaatcgcttacacctggtttaacttgcaagccaggaagagaaaatactttaagaagcatgaaaaacgcatgtctaaggacgaggagagggcagtgaaggacgaactgcttagcgagaagccagaaatcaaacagaagtgggctagccggctactggcaaaattgagaaaagatatcaggcaggagtaccgggaggattttgttctgacggtgaccggcaaaaagcacccatgttgtgtgttgtctaacccagaccagaaggggaaaattcgtcgcatagattgcctaaggcaggctgataaagtgtggaggctagacttggtaatggtgattctgttcaaagggatccccctggagtcaacagacggtgagcgcttgatgaagtctcctcactgtaccaacccagccttgtgcgtgcagccgcatcacataacagtgtctgttaaagaactcgatttgttcctggcctattacgttcaggaacaagactctggacagagcggctccccttctcacaacgacccagccaaaaacccccccggctatctcgaggactccttcgtgaaatctggagtcttcaatgttagcgagctcgttcgcgtgtctcgaaccccgatcacccaggggaccggcgtgaatttccctattggtgagatacccagtcagccttactatcacgacatgaattcaggcgttaatcttcagagaagtcttagttcacctccatcctctaagcgacctaaaactatcagtatcgacgaaaacatggaaccatcacctacgggtgatttttacccttccccttcctcacctgccgctgggtctcgcacgtggcacgagcgtgatcaggatatgtccagtccaactaccatgaaaaagcccgaaaaacctcttttctcctccgcttccccacaggattcttcgccaagactgtccaccttcccacagcatcatcatccaggaattcccggcgtggcccactccgtcatcagcactagaacccccccacccccgtcccccctgccctttcccacccaagctattctgcctccagcgccgagttcttacttttcccatcccactatccgctatccccctcacctaaatcctcaggataccctgaagaactatgttccttcatacgatccttcttccccgcagacaagtcagccaaacgggagtggccaggtggttggcaaagttccaggccatttcacaccagtactcgcgccctctccgcacccttcagccgtgcgcccggtgaccctgtctatgactgacacgaagcccattacaacctccaccgaagcctacacagcatctggcactagccaggccaaccgctatgtggggttgtcaccgagagacccatcttttctgcatcagcagcaatcctggtatctggggtag

SEQ ID NO: 72883 - DNA, 2381 bp, Artificial Sequence
  derived and/or modified sequence
ctgggtttgttgtgaagttgcggtgatccagcgcagagccccgtcctgattgatcgcatcgcggggctcagatgactgtaaaatgaatagatgaaattcttgcttctcgaagattttcttgggcatctcccggaaagtgcgttttaaggcgaagtcatgatgtattctcccatctgtctcactcaggatgaatttcacccattcatcgaggcacttcttccacatgtccgtgcaattgcctatacttggttcaacctgcaggctcgaaaacgcaagtactttaaaaagcatgagaagcgaatgtcaaaggatgaagaaagagcagtcaaagatgagcttctcagtgaaaagcctgaaatcaaacagaagtgggcatccaggctccttgccaaactgcgcaaagatattcgccaggagtatcgagaggactttgtgctcaccgtgactggcaagaagcacccgtgctgtgtcttatccaatcccgaccagaagggtaagattaggagaatcgactgcctgcgacaggcagacaaagtctggcgtctggatctagtcatggtgatcctgttcaaaggcatccccttggaaagtaccgatggagagcggctcatgaaatccccacattgcacaaacccagcactttgtgtccagccacatcatatcacagtatcagttaaggagcttgatttgtttttggcatactacgtgcaggagcaagattctggacaatcaggaagtccaagccacaatgatcctgccaagaatcctccaggttaccttgaggatagttttgtaaaatctggagtcttcaatgtatcagaacttgtaagagtatccagaacgcccataacccagggaactggagtcaacttcccaattggagaaatcccaagccaaccatactatcatgacatgaactcgggggtcaatcttcagaggtctctgtcttctccaccaagcagcaaaagacccaaaactatatccatagatgaaaatatggaaccaagtcctacaggagacttttacccctctccaagttcaccagctgctggaagtcgaacatggcacgaaagagatcaagatatgtcttctccgactactatgaagaagcctgaaaagccattgttcagctctgcatctccacaggattcttccccaagactgagcactttcccccagcaccaccatcccggaatacctggagttgcacacagtgtcatctcaactcgaactccacctccaccttcaccgttgccatttccaacacaagctatccttcctccagccccatcgagctacttttctcatccaacaatcagatatcctccccacctgaatcctcaggatactctgaagaactatgtaccttcttatgacccatccagtccacaaaccagccagcctaacggcagtggtcaagtagtagggaaagtgcctggccatttcactcctgtcttggcaccctctccccatcccagtgcagtgcgacctgtgaccctgagcatgacagatactaaacccatcactacatccactgaagcctacacagcctcaggcacatctcaagccaatcgatatgtgggactaagcccaagagacccatccttcctacatcagcaacagtcctggtacctgggctagcttggttcctttccaagtgtcaaataggacacccatcttaccggccaatgtccaaaattacggtttgaacataattggagaacctttccttcaagcagaaacaagcaactgagggaaaaagaaacacaacaatagtttaagaaattttttttttaaataaaaaaaaaggaaaagaggaagactggacaaaacaacacaaaggcagaaaggaaagaaactgaagaaagaagataatagaccagcaattgcagcacttacaatcactaattcccttaaggttgaaactgtaatgacataaaaagggtcgatgatatttcactgatggtagatcgcagcccctgcaacgtagcctttgttacatgaagtccgctgggaaatagatgttctgtctctatgacaatatattttaactgactttctagatgccttaatatttgcatgataagctagttttattggtttagtattcttgttgtttacgcatggaatcactattcctggttatctcaccaacgaaggctaggaggcggcgtcagaggtgctgggtgacagagccatgagccagccattttataagcactctgatttctaaaagttaaaaaaaatatatgaaatctctgtagcctttagttatcagtacagatttattaaatttcggcccttaacccagccttttccagtgtgtaacccagtttgaaatcttaaaaaaagaaaaaatgaaaaaaaaaggaaaaaaagaa

SEQ ID NO: 72884 - DNA, 1485 bp, Artificial Sequence
  derived and/or modified sequence
atgatgtactccccaatttgtctgacgcaggacgaattccaccctttcattgaggcactcctgcctcatgtgcgggctattgcgtatacgtggtttaatctgcaggcgcgtaaacgtaaatatttcaagaagcatgaaaaacgtatgagcaaagatgaagagcgcgctgtgaaggatgagcttctgtccgagaaaccagaaattaaacagaagtgggccagtagactcctggcaaagctaaggaaggatatcaggcaggaatatagagaagacttcgttctgacagtcaccggaaaaaagcacccttgctgcgtgctgagtaatcccgaccagaagggaaagattcgcaggattgactgcttacgacaggccgacaaagtgtggcgattagacttggtcatggtgatcctttttaaagggattcctctagaatctaccgatggcgagcgactcatgaaaagcccacactgcaccaatccagccctctgcgtccagccccatcacattaccgtgtccgtgaaggaattggacttgttcctggcctattacgtccaggagcaggattcagggcagagtggatctccgtcccacaatgacccagcaaagaacccccctggctacctggaggatagcttcgtgaagtccggagtgtttaatgtttcggagctggttcgagtgtctcggacacccatcacccaggggacaggcgtaaatttccccatcggtgaaattccttcccagccctactaccatgacatgaattcaggcgtgaatctgcagagatctctttcgtctccccctagctctaaacgccctaaaactatctcgattgatgaaaatatggagcctagtcctaccggggatttctatccgtcacccagctctcctgctgcaggttctagaacctggcacgagagagaccaggacatgagcagccctactactatgaagaaacctgagaaaccccttttttcgagcgcctcaccacaggacagttccccacggctctccacttttccacagcaccaccaccccggtattccaggggtcgcccacagcgtaatctctacgcgaacaccaccaccgccatcacccttacccttcccgacgcaggccattcttcccccagctccctcaagctacttctcgcatcctacaattcgttaccctccccatctgaaccctcaagacaccttgaaaaattatgtccccagctatgatcccagctccccccagactagtcagcccaacggatcgggccaggtggtcgggaaggtccctggacatttcacccccgtattggcgccatcaccccaccccagcgctgtacgtccagtgactctgtcaatgacagacaccaagcctattacaacatcaactgaagcctataccgcctcaggtaccagccaagcaaaccggtacgtgggcctgtctcctagagatccgtccttcctgcaccagcagcagagttggtacctgggctag

SEQ ID NO: 72885 - DNA, 1485 bp, Artificial Sequence
  derived and/or modified sequence
atgatgtacagccccatctgcctgacccaggacgagttccaccccttcatcgaggccctgctgccccacgtgagagccatcgcctacacctggttcaacctgcaggccagaaagagaaagtacttcaagaagcacgagaagagaatgagcaaggacgaggagagagccgtgaaggacgagctgctgagcgagaagcccgagatcaagcagaagtgggccagcagactgctggccaagctgagaaaggacatcagacaggagtacagagaggacttcgtgctgaccgtgaccggcaagaagcacccctgctgcgtgctgagcaaccccgaccagaagggcaagatcagaagaatcgactgcctgagacaggccgacaaggtgtggagactggacctggtgatggtgatcctgttcaagggcatccccctggagagcaccgacggcgagagactgatgaagagcccccactgcaccaaccccgccctgtgcgtgcagccccaccacatcaccgtgagcgtgaaggagctggacctgttcctggcctactacgtgcaggagcaggacagcggccagagcggcagccccagccacaacgaccccgccaagaacccccccggctacctggaggacagcttcgtgaagagcggcgtgttcaacgtgagcgagctggtgagagtgagcagaacccccatcacccagggcaccggcgtgaacttccccatcggcgagatccccagccagccctactaccacgacatgaacagcggcgtgaacctgcagagaagcctgagcagcccccccagcagcaagagacccaagaccatcagcatcgacgagaacatggagcccagccccaccggcgacttctaccccagccccagcagccccgccgccggcagcagaacctggcacgagagagaccaggacatgagcagccccaccaccatgaagaagcccgagaagcccctgttcagcagcgccagcccccaggacagcagccccagactgagcaccttcccccagcaccaccaccccggcatccccggcgtggcccacagcgtgatcagcaccagaaccccccccccccccagccccctgcccttccccacccaggccatcctgccccccgcccccagcagctacttcagccaccccaccatcagataccccccccacctgaacccccaggacaccctgaagaactacgtgcccagctacgaccccagcagcccccagaccagccagcccaacggcagcggccaggtggtgggcaaggtgcccggccacttcacccccgtgctggcccccagcccccaccccagcgccgtgagacccgtgaccctgagcatgaccgacaccaagcccatcaccaccagcaccgaggcctacaccgccagcggcaccagccaggccaacagatacgtgggcctgagccccagagaccccagcttcctgcaccagcagcagagctggtacctgggctag

SEQ ID NO: 72886 - protein, 168 aa, Artificial Sequence
  derived and/or modified sequence
MNSGVNLQRSLSSPPSSKRPKTISIDENMEPSPTGDFYPSPSSPAAGSRTWHERDQDMSSPTTMKKPEKPLFSSASPQDSSPRLSTFPQHHHPGIPGVAHSVISTRTPPPPSPLPFPTQAILPPAPSSYFSHPTIRYPPHLNPQDTLKNYVPSYDPSSPQTSQSWYLG

SEQ ID NO: 72887 - protein, 446 aa, Artificial Sequence
  derived and/or modified sequence
MERIPVSVDFWVVCCAVLKCNPGIPKRMSTLCFGFSDEFHPFIEALLPHVRAIAYTWFNLQARKRKYFKKHEKRMSKDEERAVKDELLSEKPEIKQKWASRLLAKLRKDIRQEYREDFVLTVTGKKHPCCVLSNPDQKGKIRRIDCLRQADKVWRLDLVMVILFKGIPLESTDGERLMKSPHCTNPALCVQPHHITVSVKELDLFLAYYVQEQDSGQSGSPSHNDPAKNPPGYLEDSFVKSGVFNVSELVRVSRTPITQGTGVNFPIGEIPSQPYYHDMNSGVNLQRSLSSPPSSKRPKTISIDENMEPSPTGDFYPSPSSPAAGSRTWHERDQDMSSPTTMKKPEKPLFSSASPQDSSPRLSTFPQHHHPGIPGVAHSVISTRTPPPPSPLPFPTQAILPPAPSSYFSHPTIRYPPHLNPQDTLKNYVPSYDPSSPQTSQSWYLG

SEQ ID NO: 72888 - DNA, 1341 bp, Artificial Sequence
  derived and/or modified sequence
atggagcggattccggtgagtgtggacttttgggtggtctgctgtgctgtgctgaaatgcaaccccggtatcccgaaacggatgagtaccctgtgctttggatttagcgatgagtttcatccgttcatagaggcactcctcccacacgtccgcgcgatcgcatacacctggtttaacttgcaggcgcggaaaaggaagtactttaagaaacacgagaaacggatgtcgaaagacgaagaacgcgctgtcaaagacgagctgctctccgagaaaccggagatcaaacagaaatgggcatctcgtctgctggctaagctgaggaaggatattcggcaagagtatcgagaggatttcgtgctgactgttactgggaagaaacacccttgctgtgtgttgtcaaaccccgatcagaaaggtaagatccggcgaatcgactgcctaagacaggccgacaaggtatggcggctcgacctggtcatggttatactctttaaagggatcccactagaatccactgacggtgaacggctgatgaagtcaccacattgtacaaatccggccttatgcgtgcaaccacaccacataaccgttagcgtcaaagagctggacttgtttctggcttactatgtgcaagaacaagattcaggtcaatctggaagtccgtctcataatgacccggccaagaacccacccggctatttggaagacagttttgtcaaaagcggagtcttcaacgtttctgagttggtgcgtgtctcccgcactcccatcacccagggaaccggcgtgaacttcccgataggggagattcccagtcagccgtattaccatgacatgaattcaggtgtcaatctacagaggtcgctgtcttccccaccttcatctaaacgcccgaaaacgatctcaatcgacgagaacatggaacccagccctaccggggacttctatccgagccccagctccccagcagcaggctcaagaacatggcatgagcgagaccaggacatgagctcacccacaacgatgaaaaaacccgagaaacctttattctcctcagccagtccacaggactccagccccaggctgtccacattcccacagcatcaccacccaggaatccccggagtcgctcatagcgtgattagtactcgaactccaccccctccttctcccctgccgtttcccactcaggctattctgccacctgcgcctagtagctacttttctcatcccaccatccggtacccgccccacctgaacccccaagataccttaaagaactacgttccttcgtatgacccatccagtccacagacatcccagtcatggtacttgggatag

SEQ ID NO: 72889 - DNA, 1341 bp, Artificial Sequence
  derived and/or modified sequence
atggagcgcatccctgtgtctgtggacttctgggtggtgtgctgtgctgtgctgaagtgcaaccctggcatccccaagaggatgagcaccctgtgcttcggcttcagtgatgagttccaccccttcatcgaggccctgctgccccacgtgcgggccatcgcctacacctggttcaacctgcaggccaggaagaggaagtacttcaagaagcatgagaagaggatgagcaaggatgaggagagagctgtgaaggatgagctgctgtctgagaagccagagatcaagcagaagtgggccagccggctgctggccaagctgaggaaggacatccggcaggagtaccgggaggactttgtgctgactgtgacaggcaagaagcacccctgctgcgtgctgagcaacccagaccagaagggcaagatcagaagaattgactgcctgcggcaggccgacaaggtgtggaggctggacctggtgatggtgatcctcttcaagggcatccccctggagagcacagatggagagcggctgatgaagagcccccactgcaccaacccagccctgtgtgtgcagccccaccacatcaccgtgtctgtgaaggagctggacctcttcctggcctactacgtgcaggagcaggacagcggccagagcggcagccccagccacaatgaccctgccaagaaccccccaggctacctggaggacagctttgtgaagtctggagtcttcaacgtgtctgagctggtgcgggtgtccaggacccccatcacccagggcactggagtgaacttccccatcggggagatccccagccagccctactaccatgacatgaacagcggcgtgaacctgcagaggagcctgagcagcccccccagcagcaagaggcccaagaccatcagcattgatgagaacatggagcccagccccaccggggacttctaccccagccccagcagccctgctgctggcagcaggacctggcatgagcgggaccaggacatgagcagccccaccaccatgaagaagccagagaagcccctcttcagcagcgccagcccccaggacagcagcccccggctgagcaccttcccccagcaccaccaccctggcatccctggggtggcccacagcgtcatcagcaccaggaccccacctccacccagccccctgcccttccccacccaggccatcctgcccccagcccccagcagctacttcagccaccccaccatccgctacccaccccacctgaacccccaggacaccctgaagaactacgtgcccagctatgaccccagcagcccccagaccagccagagctggtacctgggctag

SEQ ID NO: 72890 - DNA, 1341 bp, Artificial Sequence
  derived and/or modified sequence
atggagcggatccccgtgagcgtggacttctgggtggtgtgctgcgctgtactgaaatgtaatcctggtattcccaaaagaatgagtaccctgtgcttcgggttttctgacgagttccatccgtttattgaagccctgcttccacatgtacgagcaatcgcctacacatggtttaacctgcaggctcgaaagagaaaatacttcaaaaagcacgaaaaaagaatgagtaaggatgaagagcgagctgtaaaggatgagctcttgtcagagaagcctgagattaagcagaagtgggcctccaggttgcttgccaaactacgtaaggacataagacaggaatatcgtgaagattttgtgcttactgtaacggggaagaaacacccatgctgtgtgctttccaatcccgaccagaaggggaagatcaggaggatagattgccttaggcaggctgacaaggtgtggagactcgacctagtcatggtgatcctgttcaagggaatccctctcgagtcaaccgacggcgaacgactcatgaagagtcctcattgcacaaaccctgccctttgtgtccagcctcatcatatcaccgtgtcagtcaaggaacttgacttatttttggcatactatgtgcaggagcaggattccggccagtcaggttccccatcccataatgaccctgctaagaaccctccggggtaccttgaggactcctttgtgaagagcggcgtctttaacgtatcagaattagtgcgggtctcccgcacaccaataacacaaggaaccggggtcaatttccctataggggagattccctcccagccctattatcatgacatgaacagtggggttaatctgcagcggagtctgagttcacctccttcctccaagcgtcctaagaccatttctatcgacgagaatatggagccatcccccactggcgatttctatccctccccttcttctcctgcagcaggaagcaggacatggcacgagcgtgatcaggacatgtcaagccccacaaccatgaaaaagcctgagaaacccctgtttagcagtgcctcccctcaggactcttccccccgcttgtccactttcccgcagcaccatcatccaggcataccaggcgtggcccatagcgtgatttcaacacgtacacccccgcctccgagtccgcttcctttccccactcaggctattctcccgcctgcaccatccagctacttttcgcacccaactatccgctatcctccacacctcaatccacaagatacgctgaaaaattatgtgccttcgtacgatccgtcctccccacagacctcccagtcttggtacctcgggtag

SEQ ID NO: 72891 - DNA, 8159 bp, Artificial Sequence
  derived and/or modified sequence
tattgggcagtacaggtctagatgatcaaatgcctacactgaatgacttcatagaatatcactgttgagctgacaccgatctaaaagattcacatgtcggagcaagactgttagtggagtaaactcctcgagtgtacaggacccctttgttcttgttctattttgtttttaacagcttgctctgctccataaagatccatcagtcaccctcaaactcttcggaccttctgcctgttcattcctatgaagctgcgtttgctaaggtactcggtgacctggagcaaacattctaaaacagcgcaaatggcagaagcagagcctacaggcttcttgtcgggaatccgttcggagtatggaaagaatcccagtgtctgtggacttctgggttgtctgctgtgcagttctgaaatgtaaccctgggattcctaaaagaatgtcaactctgtgctttggattttctgatgaatttcacccattcatcgaggcacttcttccacatgtccgtgcaattgcctatacttggttcaacctgcaggctcgaaaacgcaagtactttaaaaagcatgagaagcgaatgtcaaaggatgaagaaagagcagtcaaagatgagcttctcagtgaaaagcctgaaatcaaacagaagtgggcatccaggctccttgccaaactgcgcaaagatattcgccaggagtatcgagaggactttgtgctcaccgtgactggcaagaagcacccgtgctgtgtcttatccaatcccgaccagaagggtaagattaggagaatcgactgcctgcgacaggcagacaaagtctggcgtctggatctagtcatggtgatcctgttcaaaggcatccccttggaaagtaccgatggagagcggctcatgaaatccccacattgcacaaacccagcactttgtgtccagccacatcatatcacagtatcagttaaggagcttgatttgtttttggcatactacgtgcaggagcaagattctggacaatcaggaagtccaagccacaatgatcctgccaagaatcctccaggttaccttgaggatagttttgtaaaatctggagtcttcaatgtatcagaacttgtaagagtatccagaacgcccataacccagggaactggagtcaacttcccaattggagaaatcccaagccaaccatactatcatgacatgaactcgggggtcaatcttcagaggtctctgtcttctccaccaagcagcaaaagacccaaaactatatccatagatgaaaatatggaaccaagtcctacaggagacttttacccctctccaagttcaccagctgctggaagtcgaacatggcacgaaagagatcaagatatgtcttctccgactactatgaagaagcctgaaaagccattgttcagctctgcatctccacaggattcttccccaagactgagcactttcccccagcaccaccatcccggaatacctggagttgcacacagtgtcatctcaactcgaactccacctccaccttcaccgttgccatttccaacacaagctatccttcctccagccccatcgagctacttttctcatccaacaatcagatatcctccccacctgaatcctcaggatactctgaagaactatgtaccttcttatgacccatccagtccacaaaccagccagtcctggtacctgggctagcttggttcctttccaagtgtcaaataggacacccatcttaccggccaatgtccaaaattacggtttgaacataattggagaacctttccttcaagcagaaacaagcaactgagggaaaaagaaacacaacaatagtttaagaaattttttttttaaataaaaaaaaaggaaaagaggaagactggacaaaacaacacaaaggcagaaaggaaagaaactgaagaaagaagataatagaccagcaattgcagcacttacaatcactaattcccttaaggttgaaactgtaatgacataaaaagggtcgatgatatttcactgatggtagatcgcagcccctgcaacgtagcctttgttacatgaagtccgctgggaaatagatgttctgtctctatgacaatatattttaactgactttctagatgccttaatatttgcatgataagctagttttattggtttagtattcttgttgtttacgcatggaatcactattcctggttatctcaccaacgaaggctaggaggcggcgtcagaggtgctgggtgacagagccatgagccagccattttataagcactctgatttctaaaagttaaaaaaaatatatgaaatctctgtagcctttagttatcagtacagatttattaaatttcggcccttaacccagccttttccagtgtgtaacccagtttgaaatcttaaaaaaagaaaaaatgaaaaaaaaaggaaaaaaagaaaaaaggaaaaaaacagtttgaacacaaaggctctatggaagaaatgcctctatgtaggtgaagtgttctctctgcatgcaacagtaaaaattaatataatattttccccacaaaagaaacacttaacagaggcaagtgcaatttataaatttatatctaaaggggaatcatgattataagtccttcagcccttggactctaaattgaggggattaaaaagaatttaaaataattttgaacgaatttattttcccctcagtttttgagggcattaaaaaggcattaaatcaagacaaatcatgtgcttgagaaaaataaaattaatgaaaacacagcacttatgttggtttagctgcagcctccttggaggtagaatttatttatttaaaattactggttgcatcaagaacccatagggtgtacaaaaggttctataaaatctgcattatagagacaaagaggcaggcaaatccatgtcacaagggtaaagcttacagtttacaaactgggaacgccagggtgtaggatataaaaacgcactcttgagaaaacaaatgtaatcagggtgctgaaaacttgcatggtgctttcagacattagccttgttcaacaaatttcttgtattgacagatccatagtgtgcatgggcagacacattttgcctctatgtctcttaaaattttaattaaaaatactctttccagtaatcctaatttgcacgaagatataatgtccacattacgtgccttgccttgaaatctaaaaaacaaaaaacaaaaaaaaaaaaacaaaaaaatacaacaaagtgacatcactacacttgttttgctgcatttattatcattttaaatctttaccatttttatgacaaaatattttgtactccagacgaagaaaaatgtgtgacatcatggattttttagacagttatacctttatctcacatttataaagcatatcatggctgtgtatagttgccgcttaaaaattgtaatcgaccagcaatattttcagtattttggtgtttttttctattaacctttcatgtttttcatcttccaattaatatttgggggggaggggtttcaaatttatacgaattatgcaataccaagttttgcctatgtaggtagtgcttttagctgtattggttattataggtaagtacacagatttaaaaaaaaaataatgtatgcttttttgtttgtttgtttgttttaattgaccaaagtgggtactgctatttttgcagtgtgatgaggtccttttgtgtactgagagatggacaggggattttttttaatatacatatatatatattctggggtgggtgggaggatttttaacactttgcagtgtagctgtgaagcagtgcaccctgagatgggcctgggctgcaaagcgactgttctgcctactgtgacaaacttcaacttacacaggttcccctctctaacttcccacctgggttgcaagctgaactcattactggttttcataacaacacaatagtaagaacaagcaaacacaacaaattctcctggaggcagacttggcttaaaaaggcagacttggcttggtgatagtttttcttgaaagttccagatccacagtggagagtgagcctgtctcatatttggcaaaaatatttgttgaaatgtccacataggggatgttggatgtttaacacttttgagagtttaacacatgaatattctttctcctagaaaacacattagacctgttggagggagtctcccgtattccttttctgccacttttcgtccccatttcatttcattaatgataggatatgatttacctgtgacttactacttcaaatggatggcagtgcacttggatttttttttaatatccagaagattgaacagagggttgctattgttgaatgtatttggactgatagattaaaatcaaagttcaatttttaaggaacaaaaaagtaaatcctgttttcattttatctccccttttaaaactgagaaccagagcagaagggaaatatagaattttaagcaattaatcttcctgtggatgaattaaacccattagatgctgatgggatttttttaaggaatggtaccttaactatatatttgatttcgtttcccctgagggctagaggctgaatggaggctggttttattttgcctttccctcaccgcccagtcccattgagtgtattcattactagaaggaaaatctttcagaattggtgacacatggtaggctgtcttaaggagtcccctggcccccttcccctaggccatggcctaataaaataaactgtcaattgttctcacagcatatcatttaataatgaatactttagaacaatgcttatgggctggagaattgtatttgattagcccattcagtttgatagcccaaatgctgaacagcacagcgggatcctagcagtgcaagttcaaaagtaagtccaatcatttctgtgatactcgccctggtagcaaacagatcatctcagccaagctcttcatgtatctttgacctattaggtgaacaaatgaacctcacaggacacacagtattttttaaaggcagactcgctctcttttttgccagtgagcagttctagctaaccaagttacacactgtgggtattcctgcctgcctcttgaatacaaaggcctagttcaagtgttgctttttttatttcaaatcaattttttcttctttcctttttgagataaaactattaaaagtactactatatatataaaatctcaaatcaacttttcggcctcctcctcgtgtaccaggaagtatattctgacgaagggccccacttttgcaggtcttgcacgcccctcccttacccagaactgcagagcttcaggatggcgaaggtcacccaagggcatgagtagggagtggtgtctccaaccatcagttccgtggcactgttcagcctttgtgtgctgccctgccacccaccactcacagtgcctctgaagcgtgttacccctggagtgacgtgagcatttgaggcttgtctaaggaaaaaaataaaaggcagtgaaggagactgtacataaagacatggcaaaaatcttaattatagcaatatagttatcgggtaatgttcgggtgggcagctccattaaaaaatatgtgaatgaatctgtgaagctgcaagtagcgagaagagcgaaaggtcttcttaatgaaccgcctaccttgtagacagtaatttgtacactgtatagttttgttaagaattttttttaaattaaaattcccatgtttgtaaagctaactttttaacaattataatggaactatatgttgtttccatttttaaagtaaacaagaatattccttgtttagagactggacttgagttaaaactctccagtctcttaagttatgtattaaaaagaaaatctgtccatgttaggagttatttcacagattcctgtgcttgaaaagcataggatactaatcctttaaaaaagtgtaaatggagaaaagttatattttatgaaggttattttgttgtatttagtattggaaaagttggtttccagagcatttcagaatgtcgaagcaccactgtctttttattagtatatacggcctttagcaaaagtttttgtgattgttacgtgatggtatttaaggttaagtttcacagagcattcaggataggcagaaaactaaaacagtgctatgtctcacataacgtgtcctcagggagcagaatcttggatttgtgacttgtagcttcataaggactcaacgaaagagattgcacagggacatcttcagcggtgtgacagcaggacatgttctttacctagattcaaattctatgtactgtgtgaaatgatgaaggctgcagaaagttatcccatattcagtgtacagtattcatttttaatgaaacaactctacaatattgctggcagataggccccaagcatgacattcaatatagtttacatgttcctgtcaaggtcttttgttaacattaaccagctgcatgctttctggactttaagaaattgggtttctatagaaaactttttttttttttttttttttaatgtgcaggctattcaagttcaatagtaaaagctcaaaaatgaatgttctactccatgctgaaggagctgaaagctgccttcttcatattttgcactttctggtagttcccctgttttttctaattccctaaaattgtgtgggtggagtggagccctgcagttggggggtaacatggaccactgattttgccctttgaccctgcacaatgacctttgcatcagccaaactcattgccatgacaactctttgtactgtgtccgtgccacagatctgttggtcacattgttaatagtaaaggggacaagttggagacggtcaatttttacattttttgttgcaattttttcttcaatggttgtaagtagtttttttttttttttaataataaaagggttcactagttaatactctagaaatatctgtgtgttgcaattcaaatgtatgttgagattgtgaaaagcgcttcagtgccactagcttaccggtacactagactaagcccttgatgacttattgcatgatacagtaccaggaacaacaggtggcctaaatacatgaaaagcagtgtaagctagtgacactaaagccagtcttgtattactgtatttttgacagaatggttttgaaaactgtgctacagggactgatgtggcaaatatatctctttatgcagaaggaagtctttttttttcttttttttttttttaagaagtatggctttttatgcatccttcatcgagggcattgaagttgcatggactgataaaagttgatgcaaaacaagaaagaaacaaacaaaaaaaaaaaaccagcaaaatgtttaccaaaaaactcaaacaaatgagcagtgcctgttcaatttcacagtctctgttgagttcagttgtaaatatgtttcaaatgacattttcttgggaaaaaaaatctctacaacattgtagaatgtgaggggtaactacatcccaggcataggtttctcaaagctgcagtagattatgtcttcatcaagctgttaatttgtgcttatatcatatagaacttttagcatcctgggaagagctgcccccacctcaatgatatttctctgagaacaacttttgtaggactgtgtgtttctttagatacatttagtacaactgtaggtgacgagtagtcagttattgcttgctagctacacaccagggttgatccattttaaaacttttggcattttgtcctcatgggccataaatacagaaccttgtattttaattaaatttttttacaaaaggaggcacatgcacaatctccatgtaacaaacctttagcagtaggatgtattatacgacagttacttaatttctagagttcaggcctctgggatcaaccccagactgggccagaatgttagtgaaggttttattgtgcccggttggaggataacgttctttgggtactttttgtgggttgcaaatgaactcaattgccacaagttttaaactggtgtaaatcaagcttgacttaatgtgattgttactgttatatccagcctatactgctagcagctgctcatactgcagtcaattactggaagcggatatatttcctatgcaaaaactgtttaaacaataaaatgagctatgctacagactctg

SEQ ID NO: 72892 - DNA, 1341 bp, Artificial Sequence
  derived and/or modified sequence
atggaaagaattcccgttagcgttgacttctgggtggtatgctgcgcagtgctcaagtgcaatcccggaatacctaagaggatgtccaccctttgttttggcttctcagatgagtttcaccctttcattgaggcgctgctgccccacgtgagagccatcgcttacacatggttcaatttgcaggcaagaaaacgcaagtactttaaaaagcatgagaagaggatgtccaaagacgaagagagagctgtcaaggacgagctactgagcgagaaaccagaaatcaagcagaaatgggcctctagacttctggctaaactgcggaaggacattagacaagagtaccgggaggactttgtcctcacagtgaccgggaagaagcacccatgttgtgttctgtcgaaccccgatcagaagggaaagatccggaggatagactgtcttagacaggccgataaggtgtggaggcttgacctagtgatggttatcctgtttaaagggatcccgctggaaagcactgatggggagcgcttaatgaagagtccccattgcacaaaccctgctctgtgcgtgcagccacaccacattaccgtgtcagtcaaggagttagatctgttcctcgcttactacgtccaagagcaggattccggccaaagcggttcgcctagccacaacgaccccgctaagaatccaccgggatacctggaagacagcttcgtcaagtccggagtatttaatgtgtccgaactcgttcgcgtgagtcgaactcctatcacccagggcacaggcgtcaacttccctatcggtgagatcccttctcagccctattaccacgacatgaatagcggcgttaatctgcagagaagtctcagttctcctcctagcagtaagaggcccaaaacaataagcatcgacgaaaacatggaacctagcccgacaggtgatttctacccgtcccctagctcgccggcagctggatcacgtacatggcacgaaagggatcaagatatgagcagccccactaccatgaaaaagccagagaagcccttattctcctcggccagtcctcaggactccagtcccagactgtcgacctttcctcaacaccaccaccctggaattcccggtgtcgcccattccgtcatctccactaggacaccaccccctccttcccccttgccatttccaactcaggccatcctgcccccagcacctagttcctatttttcgcaccctactatccgttacccgccacacctaaacccacaagacactttgaagaactatgttccaagttatgatcccagtagccctcagacatcacagagttggtaccttggctag

SEQ ID NO: 72893 - DNA, 1341 bp, Artificial Sequence
  derived and/or modified sequence
atggagagaatccccgtgagcgtggacttctgggtggtgtgctgcgccgtgctgaagtgcaaccccggcatccccaagagaatgagcaccctgtgcttcggcttcagcgacgagttccaccccttcatcgaggccctgctgccccacgtgagagccatcgcctacacctggttcaacctgcaggccagaaagagaaagtacttcaagaagcacgagaagagaatgagcaaggacgaggagagagccgtgaaggacgagctgctgagcgagaagcccgagatcaagcagaagtgggccagcagactgctggccaagctgagaaaggacatcagacaggagtacagagaggacttcgtgctgaccgtgaccggcaagaagcacccctgctgcgtgctgagcaaccccgaccagaagggcaagatcagaagaatcgactgcctgagacaggccgacaaggtgtggagactggacctggtgatggtgatcctgttcaagggcatccccctggagagcaccgacggcgagagactgatgaagagcccccactgcaccaaccccgccctgtgcgtgcagccccaccacatcaccgtgagcgtgaaggagctggacctgttcctggcctactacgtgcaggagcaggacagcggccagagcggcagccccagccacaacgaccccgccaagaacccccccggctacctggaggacagcttcgtgaagagcggcgtgttcaacgtgagcgagctggtgagagtgagcagaacccccatcacccagggcaccggcgtgaacttccccatcggcgagatccccagccagccctactaccacgacatgaacagcggcgtgaacctgcagagaagcctgagcagcccccccagcagcaagagacccaagaccatcagcatcgacgagaacatggagcccagccccaccggcgacttctaccccagccccagcagccccgccgccggcagcagaacctggcacgagagagaccaggacatgagcagccccaccaccatgaagaagcccgagaagcccctgttcagcagcgccagcccccaggacagcagccccagactgagcaccttcccccagcaccaccaccccggcatccccggcgtggcccacagcgtgatcagcaccagaaccccccccccccccagccccctgcccttccccacccaggccatcctgccccccgcccccagcagctacttcagccaccccaccatcagataccccccccacctgaacccccaggacaccctgaagaactacgtgcccagctacgaccccagcagcccccagaccagccagagctggtacctgggctag

SEQ ID NO: 72894 - protein, 385 aa, Artificial Sequence
  derived and/or modified sequence
MQACGGGAAGRRAFDSICPNRMLALPGRALLCKPGKPERKFAPPRKFFPGCTGGSPVSVYEDPPDAEPTALPALTTIDLQDLADCSSLLGSDAPPGGDLAASQNHSHQTEADFNLQDFRDTVDDLISDSSSMMSPTLASGDFPFSPCDISPFGPCLSPPLDPRALQSPPLRPPDVPPPEQYWKEVADQNQRALGDALVENNQLHVTLTQKQEEIASLKERNVQLKELASRTRHLASVLDKLMITQSRDCGAAAEPFLLKAKAKRSLEELVSAAGQDCAEVDAILREISERCDEALQSRDPKRPRLLPEPANTDTRPGNLHGAFRGLRTDCSRSALNLSHSELEEGGSFSTRIRSHSTIRTLAFPQGNAFTIRTANGGYKFRWVPS

SEQ ID NO: 72895 - DNA, 1158 bp, Artificial Sequence
  derived and/or modified sequence
atgcaagcctgcggcgggggagccgcaggaaggcgggccttcgacagcatttgccctaaccgtatgctggccctgccaggccgagcccttttatgcaagcctggtaagcctgaacggaaattcgccccaccacggaaattcttcccaggctgcacgggggggtctcccgtttcggtttatgaagacccccctgatgccgaaccgacagcactgccggccctcacgacgattgatttacaggacctggctgactgctcttcattgctgggtagtgatgccccgccagggggggatcttgccgcttcccagaaccacagccatcagacagaggccgacttcaacctccaggacttccgcgataccgtggacgacttaatttctgatagcagttcaatgatgagcccaactttagcaagcggcgatttcccattctctccgtgcgacatcagccctttcggtccgtgcctgtccccacccctggatccccgtgcactgcagtcgccgccactccggccccctgatgtaccacccccagagcagtactggaaagaggtggccgaccagaaccaacgggccctaggtgacgccctcgtggagaacaatcagctgcatgttaccttaacacagaaacaggaggaaattgcctcgctgaaagaacggaacgtccagttgaaggagttagcgtctcgtacgaggcacctagcatcagttctggacaagctcatgatcacgcaaagccgggattgcggcgcagccgcagaacccttcctcctcaaagctaaggctaagagaagcctggaagagctggtgagtgcggcggggcaggactgtgccgaagtggacgcaatcttgcgtgagatcagtgagagatgcgacgaggccttgcaaagccgtgatcccaagaggccacgactactgcctgagcctgccaatactgataccagacccggtaatctgcacggcgctttcagaggcctcagaacggactgctcccgcagtgccctcaatctctcccattccgagctcgaagaaggaggctctttcagcacacgcatccgaagtcattcaaccatcagaaccctcgcttttccacaaggaaacgcgtttactatcagaaccgccaacggcgggtacaaatttaggtgggttccctcttag

SEQ ID NO: 72896 - DNA, 1158 bp, Artificial Sequence
  derived and/or modified sequence
atgcaggcctgtggcggcggcgctgctggaagaagagcctttgacagcatctgccccaacaggatgctggccctgcccggccgggccctgctgtgcaagccaggcaagccagagaggaagtttgccccacccaggaagttcttccctggctgcaccggcggcagccctgtgtctgtgtatgaagatcctccagatgctgagcccacagccctgcctgccctgaccaccatcgacctgcaggacctggccgactgcagcagcctgctgggcagtgatgcccctcctggaggagacctggccgccagccagaaccacagccaccagacagaagctgacttcaacctgcaggacttccgggacacagtggatgacctgatcagtgacagcagctccatgatgagccccaccctggccagcggggacttccccttcagcccctgtgacatcagccccttcggcccctgcctgagcccccccctggacccccgggccctgcagagcccccccctgcggcccccagatgtgcccccacctgagcagtactggaaggaggtggccgaccagaaccagagggccctgggagatgccctggtggagaacaaccagctgcacgtgaccctgacccagaagcaggaggagatcgccagcctgaaggagagaaatgtgcagctgaaggagctggccagcaggaccaggcacctggcctctgtgctggacaagctgatgatcacccagagccgggactgtggggctgctgctgagcccttcctgctgaaggccaaggccaagaggagcctggaggagctggtgtctgctgctggccaggactgtgccgaggtggatgccatcctgcgggagatcagcgagcgctgtgatgaggccctgcagagccgggaccccaagaggccccggctgctgcctgagcccgccaacacagacacccggcccggcaacctgcacggggccttccggggcctgaggacagactgcagccgcagcgccctgaacctgagccacagcgagctggaggagggcggcagcttcagcacccgcatccgcagccacagcaccatccgcaccctggccttcccccagggcaatgccttcaccatcagaacagccaatggaggctacaagttccgctgggtgcccagctag

SEQ ID NO: 72897 - DNA, 1736 bp, Artificial Sequence
  derived and/or modified sequence
cccgccatctctcagcacctcctcggcagcccctcggctccttctcggtcacgcgcctgccccaacctctggctggcttcggagcctgcaggcactgaagggagtgcagggtgtggatcgctgccccagcccgggccgccgcctccgagcagtcggcacccggaggcaggaggcacaatgcaggcgtgcgggggcggcgcggccggccgtcgggccttcgacagcatctgccccaacagaatgctggcactgccgggccgggcgctgctctgcaagccggggaagccggagaggaagttcgctcctccgcggaagttcttccccggatgcacaggcgggagcccggtgtcggtgtacgaggatcccccggacgccgagcccacagcgctgccagccctcaccaccatagacctgcaggacctcgctgactgctcttcgctactcgggtccgacgcgccgcctggtggtgacctggccgcctcgcagaaccattcccaccaaacggaagcagacttcaatctgcaagatttcagagacacggtggatgatctcatttcagactcatcctctatgatgtcgcctaccctggccagcggagacttccccttctctccttgcgacatatcaccattcgggccctgcctctccccgccactggacccacgggccctgcagtcaccaccgctgcgccctccagacgtgcccccgcctgagcaatactggaaggaggtggcggaccagaaccagagagcgttgggagacgcgcttgttgagaataatcaactgcacgtgacattgacccagaaacaggaggagatcgcctcgctcaaggagcggaacgtgcagctgaaggaactcgccagccgaacccggcacctggcctcggtgctggataagctgatgatcacacagtcccgggattgtggggcggcggccgagcccttcctgctcaaggcgaaggccaaaaggagcctggaggagttggtcagcgctgcggggcaggattgcgcggaagtggacgccatcctgagggagatttccgagcgctgcgatgaagcccttcagagccgcgatcccaagcggccccgactgctgccagagcccgcgaatactgacaccaggcccgggaacctgcatggcgccttccgggggctgcgcacagactgcagccggagcgcgttgaacctgagccacagtgagctggaggagggcggctccttcagcacccgcatccgcagccacagcaccatccgcaccctcgccttcccccagggcaatgccttcaccatcagaacagccaacgggggttacaagttccgctgggtccccagttgagctgtgatgtggtcccccaaaacactgccctgtgtttccactgaagtgcctgggggcttcccagaactttgccttcaggttgaatgccaccctgaaacactttttcaggaacaaaagcatcttgataccgatgcattgtaaatttctgctacaaaacattgtatagcccctccccttgtcacagtgaaactctgtttatatatgtatatgtcacatatgtcacagccaattttaaaagtatttatttttagcagctttgaattatgtatttttagagcagggaaggatttagaaaccatagttacttttataattatgtaatgctctaatattataagaaggaaaagaaggctctaagagattaagtaatttcctgcaatgggaaacactggaacctttca

SEQ ID NO: 72898 - DNA, 1158 bp, Artificial Sequence
  derived and/or modified sequence
atgcaggcctgcggcggcggcgccgccggccggcgggccttcgactcaatctgccccaacaggatgctagcactgcccggccgggcactgctgtgcaagcctggcaagcccgaacgcaagttcgcaccaccccggaagttctttcctggttgtactggagggagccctgtatctgtatatgaagaccctcccgatgcagagccaacagccctaccggctttgacgactattgacctgcaagatttggcagactgttcaagcctgctgggctctgatgccccccctggaggagatttggccgccagccagaaccactctcatcagaccgaagctgacttcaatctgcaggacttcagggatacagtggacgacctaatttctgactcttcctcgatgatgtcacctacactggcgagcggagattttccattcagcccctgcgatatttcgcccttcgggccttgcttgtcccccccacttgacccccgggcactgcagagcccccccttgcgcccccctgatgttccacccccagagcagtactggaaggaggtggcggaccaaaaccagcgtgccctgggggacgccttggtggagaacaatcaacttcatgtgactctcactcaaaaacaggaggagattgcaagtctgaaggagaggaacgtccagttgaaggagctggcctcgcgtacacgacaccttgccagcgttctcgacaagctgatgattacccagtccagggattgcggcgctgcagccgagccatttctcttaaaagccaaagccaaaagaagtctcgaagagctggtgtctgctgctggccaggattgcgctgaagtggatgctatcctgcgggagatatcggagcgatgcgacgaggcgctccagtcgagggatcccaagagacctcggctcctgccagaaccggctaacaccgatacacggcccgggaacctccacggagccttcaggggtctcaggacggactgttctcggagtgctctgaacttaagccatagcgaactggaagaaggcggtagcttttccacgcgcatccgctcgcactccaccatccgtaccctggcgttcccgcagggaaatgcattcacaattagaaccgccaacggcggttacaagttccgatgggtgccatcttag

SEQ ID NO: 72899 - DNA, 1158 bp, Artificial Sequence
  derived and/or modified sequence
atgcaagcatgcggagggggagccgcaggtcggagagcattcgattctatatgcccaaatagaatgctggccctgcccggtagggcgctcctctgcaagcctggaaaaccggaaagaaagtttgccccacctagaaagtttttcccagggtgcactgggggatccccagttagtgtctatgaagacccaccggatgccgaacccactgccctaccagctctgactacgatcgatctccaggatcttgcagattgcagctcgctgctagggtctgacgcacctcccggaggggatctggccgcttcacaaaaccacagtcaccagactgaggccgactttaacctgcaagatttcagagatactgttgacgatctcatatccgatagcagctcgatgatgagtccaactttagccagtggagacttcccttttagcccttgcgatatctcacctttcggcccatgcctgtctccaccgctggatcccagagcacttcagtccccaccactccgccctcccgatgtcccacccccagagcaatattggaaagaggtggccgaccagaaccagagggccctcggcgatgcgttggtggaaaacaaccagctccatgttacgctaactcaaaagcaagaggagattgcctccctgaaagaaaggaatgtgcagctgaaggagcttgcctccagaactagacaccttgcctctgtgctggataagctgatgataacccagtctcgggattgcggtgcagccgctgagcccttcctcttaaaggccaaggctaaacgcagcctggaagaactggtcagcgcagccggacaggactgtgcggaggtagatgccatcctccgagaaataagcgagcgttgtgacgaggcgctccaatccagggatccaaaaagacctagattactgcccgaaccagctaacactgacactcgccctgggaatttgcacggcgcatttcggggactgaggacggactgctctagatctgctctgaatctctcacatagtgagctggaggagggtggatctttctcaaccaggatccgaagccactcgacaattcggacccttgcctttccccaggggaatgcctttactatacgcactgccaacggtggatataagtttaggtgggttccaagttag

SEQ ID NO: 72900 - DNA, 1158 bp, Artificial Sequence
  derived and/or modified sequence
atgcaggcctgcggcggcggcgccgccggcagaagagccttcgacagcatctgccccaacagaatgctggccctgcccggcagagccctgctgtgcaagcccggcaagcccgagagaaagttcgccccccccagaaagttcttccccggctgcaccggcggcagccccgtgagcgtgtacgaggacccccccgacgccgagcccaccgccctgcccgccctgaccaccatcgacctgcaggacctggccgactgcagcagcctgctgggcagcgacgccccccccggcggcgacctggccgccagccagaaccacagccaccagaccgaggccgacttcaacctgcaggacttcagagacaccgtggacgacctgatcagcgacagcagcagcatgatgagccccaccctggccagcggcgacttccccttcagcccctgcgacatcagccccttcggcccctgcctgagcccccccctggaccccagagccctgcagagcccccccctgagaccccccgacgtgcccccccccgagcagtactggaaggaggtggccgaccagaaccagagagccctgggcgacgccctggtggagaacaaccagctgcacgtgaccctgacccagaagcaggaggagatcgccagcctgaaggagagaaacgtgcagctgaaggagctggccagcagaaccagacacctggccagcgtgctggacaagctgatgatcacccagagcagagactgcggcgccgccgccgagcccttcctgctgaaggccaaggccaagagaagcctggaggagctggtgagcgccgccggccaggactgcgccgaggtggacgccatcctgagagagatcagcgagagatgcgacgaggccctgcagagcagagaccccaagagacccagactgctgcccgagcccgccaacaccgacaccagacccggcaacctgcacggcgccttcagaggcctgagaaccgactgcagcagaagcgccctgaacctgagccacagcgagctggaggagggcggcagcttcagcaccagaatcagaagccacagcaccatcagaaccctggccttcccccagggcaacgccttcaccatcagaaccgccaacggcggctacaagttcagatgggtgcccagctag

SEQ ID NO: 72901 - protein, 445 aa, Artificial Sequence
  derived and/or modified sequence
MSLVEAISLWNEGVLAADKKDWKGALDAFSAVQDPHSRICFNIGCMYTILKNMTEAEKAFTRSINRDKHLAVAYFQRGMLYYQTEKYDLAIKDLKEALIQLRGNQLIDYKILGLQFKLFACEVVASVVDQDSFSGFAPLQPQAAEPPPRPKTPEIFRALEGEAHRVLFGFVPETKEELQVMPGNIVFVLKKGNDNWATVMFNGQKGLVPCNYLEPVELRIHPQQQPQEESSPQSDIPAPPSSKAPGRPQLSPGQKQKEEPKEVKLSVPMPYTLKVHYKYTVVMKTQPGLPYSQVRDMVSKKLELRLEHTKLSYRPRDSNELVPLSEDSMKDAWGQVKNYCLTLWCENTVGDQGFPDEPKESEKADANNQTTEPQLKKGSQVEALFSYEATQPEDLEFQEGDIILVLSKVNEEWLEGECKGKVGIFPKVFVEDCATTDLESTRREV

SEQ ID NO: 72902 - DNA, 327 bp, Artificial Sequence
  derived and/or modified sequence
atgctggccaagggcgccgaggagggcagaagcggcggccccagacccgccatcaccctgcccggcagcctgcacttcacctgcgacctgaagaccagcccctactgcctgaccagagccgagctgatggagcacctgcccctgagagtggccgtgcacagcatgagcccctgccacagaagctgcttctgcggcgagctgaagagaggccacccctggaacaccccccaggtgagcagcttccccagcagcaccaccagcctgagccacagctgcaccaccagccacctggactgcagccagcaggtggagagcggcagcaagtag

SEQ ID NO: 72903 - DNA, 1338 bp, Artificial Sequence
  derived and/or modified sequence
atgtcacttgtggaagctataagcctctggaacgagggtgtgctcgccgctgacaagaaggactggaagggggccctcgatgccttctcagctgtgcaggacccacactccagaatctgttttaacataggatgtatgtataccatactgaaaaacatgactgaggccgagaaagccttcacaaggtccatcaaccgcgacaagcaccttgccgtcgcatactttcaaagaggcatgctctactatcaaactgaaaagtatgaccttgcaatcaaggatcttaaagaggcgttaatacagttaaggggtaaccagttaatagattacaaaatcctcgggttacagttcaaactgttcgcctgcgaagttgttgcttcagtggtagaccaggatagcttctctggctttgcgcctttacagccacaggccgccgaaccccctccaaggccaaagactccagagatcttcagagctcttgaaggagaggcccatagagttctcttcggattcgtcccggaaaccaaggaggaactgcaggtgatgcctgggaacattgtgttcgtgctgaagaaagggaatgacaattgggctacggtcatgttcaacgggcagaaaggcctggtcccctgtaactacctcgagccggtcgaactgagaattcatccccagcagcagccgcaagaagaaagctcacctcagtctgatattccggcgccacccagctctaaggctccaggcagaccgcaactgtcacctggacagaagcaaaaagaggagccaaaggaggtaaagctctctgtacctatgccctacacacttaaagtacactacaagtacacagtcgtgatgaagacgcagccgggcctgccttatagtcaggttcgggacatggtcagtaagaagctggaactaagattggagcacactaagctctcttataggccccgcgattctaacgaactggtcccgctgagtgaagattcgatgaaagacgcatggggccaggtcaagaactattgtctgacactgtggtgtgagaacaccgtaggagatcaagggtttccagacgagccaaaggaatccgagaaagccgatgccaataaccagacaacagagccacagctcaagaagggtagccaggtggaggccctgttttcttatgaagcaacccagcctgaagatttggaatttcaagaaggtgacataatcctagtgctgtcaaaggtcaacgaagaatggctggagggcgaatgcaaaggcaaggtcggtatctttcccaaagtgttcgttgaggactgtgcaacgaccgatctggagagtacccggagagaagtctag

SEQ ID NO: 72904 - DNA, 432 bp, Artificial Sequence
  derived and/or modified sequence
atgcctggcaacattgtgttcgtcctgaagaagggcaacgacaattgggcaaccgtgatgtttaacgggcagaagggcttggtgccatgtaactatttggagccagtggaattaagaatacacccacagcagcagccacaggaggagagttcccctcagtccgacatccccgctccgccttcaagtaaggcccccggccggccccagctcagccccggccagaagcaaaaggaagaacctaaggaggtcaagctttccgtccccatgccatacacccttaaggtgcactataagtacactgtggtcatgaaaactcagccagggttgccctactcccaagttcgggacatggtgagcaagaagctggagttgagactggagcacacgaagctgagctatcgtccgcgcgatagcaacgagctggtcccctag

SEQ ID NO: 72905 - DNA, 171 bp, Artificial Sequence
  derived and/or modified sequence
atgccatacaccttaaaggtccattacaagtataccgtggtgatgaaaactcagcctggcctgccgtacagccaagttcgggatatggtttcaaagaaactagagctgcggctggagcacaccaagctgtcataccggcccagggattcaaacgagctcgtacctctgtag

SEQ ID NO: 72906 - DNA, 1338 bp, Artificial Sequence
  derived and/or modified sequence
atgagcctggtggaggccatcagcctgtggaatgaaggagtgctggccgctgacaagaaggactggaagggggccctggatgccttctctgctgtgcaggacccccacagccgcatctgcttcaacatcggctgcatgtacaccatcctgaagaacatgacagaggccgagaaggccttcaccaggagcatcaacagagacaagcacctggccgtggcctacttccagaggggcatgctgtactaccagacagagaagtatgacctggccatcaaggacctgaaggaggccctgatccagctgcggggcaaccagctgattgactacaagatcctgggcctgcagttcaagctgtttgcctgtgaggtggtggcctctgtggtggaccaggacagcttcagcggctttgcccccctgcagccccaggccgctgagcccccaccccggcccaagaccccagagatcttccgggccctggagggggaggcccaccgggtgctgtttggatttgtgcctgagaccaaggaggagctgcaggtgatgcctggcaacatcgtgtttgtgctgaagaagggaaatgacaactgggccaccgtgatgttcaacggccagaagggcctggtgccctgcaactacctggagcctgtggagctgcgcatccacccccagcagcagccccaggaggagagcagcccccagagcgacatcccagccccacccagcagcaaggcccctggccggccccagctgagccctggccagaagcagaaggaggagcccaaggaggtgaagctgtctgtgcccatgccctacaccctgaaggtgcactacaagtacacagtggtgatgaagacccagcccggcctgccctacagccaggtgcgggacatggtgtccaagaagctggagctgcggctggagcacaccaagctgagctaccggccccgggacagcaatgagctggtgcccctgtctgaggacagcatgaaggatgcctggggccaggtgaagaactactgcctgaccctgtggtgtgagaacacagtgggggaccagggcttcccagatgagcccaaggagagcgagaaggcagatgccaacaaccagaccacagagccccagctgaagaagggcagccaggtggaggccctcttctcctatgaggccacccagcctgaggacctggagttccaggagggggacatcatcctggtgctgagcaaggtgaatgaggagtggctggagggagaatgtaaaggcaaggtgggcatcttccccaaggtgtttgtggaggactgtgccaccacagacctggagagcacccggcgggaggtgtag

SEQ ID NO: 72907 - DNA, 432 bp, Artificial Sequence
  derived and/or modified sequence
atgcctggcaacatcgtgtttgtgctgaagaagggaaatgacaactgggccaccgtgatgttcaacggccagaagggcctggtgccctgcaactacctggagcctgtggagctgcgcatccacccccagcagcagccccaggaggagagcagcccccagagcgacatcccagccccacccagcagcaaggcccctggccggccccagctgagccctggccagaagcagaaggaggagcccaaggaggtgaagctgtctgtgcccatgccctacaccctgaaggtgcactacaagtacacagtggtgatgaagacccagcccggcctgccctacagccaggtgcgggacatggtgtccaagaagctggagctgcggctggagcacaccaagctgagctaccggccccgggacagcaatgagctggtgccctag

SEQ ID NO: 72908 - DNA, 171 bp, Artificial Sequence
  derived and/or modified sequence
atgccctacaccctgaaggtgcactacaagtacacagtggtgatgaagacccagcccggcctgccctacagccaggtgcgggacatggtgtccaagaagctggagctgcggctggagcacaccaagctgagctaccggccccgggacagcaatgagctggtgcccctgtag

SEQ ID NO: 72909 - DNA, 1338 bp, Artificial Sequence
  derived and/or modified sequence
atgagcctggtggaggccatcagcctgtggaacgagggcgtgctggcagcagataagaaggattggaagggcgcgcttgatgcatttagtgccgtgcaggaccctcactcacgaatatgcttcaacatcggatgtatgtacacaatattaaaaaacatgacagaagccgagaaagccttcacacggagtattaatagggacaagcatctggcggtggcatatttccagagaggcatgctgtattatcagacagagaaatacgatttggccatcaaggacctcaaagaggcgcttatccagctacgaggcaaccaactcatcgattacaagattctgggacttcagtttaagctgtttgcttgcgaggtagtcgcctccgtcgtcgaccaggatagtttttccggttttgctcccctgcagccgcaggctgcagagccccctcctcgaccaaaaacccctgagattttccgagcgctggagggtgaggctcatcgcgtcctcttcggatttgtgcccgaaacaaaagaggaactgcaggtgatgccgggtaacattgtgtttgtcctcaaaaagggaaacgataactgggcgaccgtaatgtttaacggccagaaggggcttgtcccatgcaattatcttgaacccgttgagctcaggatccatccacaacagcagccccaagaagagagttcccctcagagtgatataccggcgccacctagttctaaagcccccggacgaccccaactgtcaccaggacaaaagcagaaagaggagcctaaggaggtgaaactttctgttcccatgccttataccttgaaggtccattataaatataccgtagtgatgaaaacacaacctgggctgccctactctcaggtccgagacatggtctctaagaaacttgaactccgtttggagcacaccaagctgagctaccgcccaagggattccaacgaattggttccattgtcagaggattcgatgaaagatgcttggggtcaagtgaaaaactattgcctgactctctggtgcgagaacaccgtaggagaccagggatttcccgacgagcccaaggagtccgaaaaggctgacgcaaataatcaaacaacggagcctcagttaaagaaaggttcccaggtcgaagcattgttctcctatgaagccactcagccggaggatctggagtttcaggaaggggacataatactggtgctgtctaaggtgaacgaagagtggctcgaaggcgaatgcaagggtaaagtaggtatcttccccaaggttttcgtggaggactgcgctaccactgatttggagtccacgcgacgggaagtttag

SEQ ID NO: 72910 - DNA, 432 bp, Artificial Sequence
  derived and/or modified sequence
atgcccggcaacatcgtgttcgtgctgaagaagggcaacgacaactgggctactgtcatgttcaacgggcaaaaaggcctcgtgccatgtaattacttagagcctgtggagttgcgaatccatccacagcaacaaccacaagaggagtcttccccccagtcggatattccggccccgccgtctagcaaagcaccagggcgtccccagctgtcccccggacagaaacagaaggaggaacccaaagaggtaaagttgagtgtgccaatgccgtacacattgaaggtgcactacaagtataccgtggttatgaaaacccagcccgggttgccctactcacaagtgcgagatatggtcagtaaaaagctggagctcagactggaacacactaagctctcctacagaccccgggacagcaatgagctggtcccttag

SEQ ID NO: 72911 - DNA, 171 bp, Artificial Sequence
  derived and/or modified sequence
atgccctacaccctgaaggtgcactacaagtacaccgtggtgatgaagactcagccaggacttccgtactctcaggtgagagacatggtgagtaagaagttagagctcagattggagcacaccaagctatcctatcgtcccagagacagtaacgaactcgtgcctctgtag

SEQ ID NO: 72912 - DNA, 2168 bp, Artificial Sequence
  derived and/or modified sequence
acactccacccctactcgccctctctctctctgcttctttccttttctctctcatggtagggttatgagtcagttgccaaaaggtggggacatttcctgatgcatttgcaacactgagaagttatcttaagggaggctgggccccattctactcatctggcccagaaagtgaacaccttgggggccactaaggcagccctgctaggggagacgctccaacctgtcttctctctgtctcctggcagctctcttggcctcctagtttctacctaatcatgtccctggtggaggccatcagcctctggaatgaaggggtgctggcagcggacaagaaggactggaagggagccctggatgccttcagtgccgtccaggacccccactcccggatttgcttcaacattggctgcatgtacactatcctgaagaacatgactgaagcagagaaggcctttaccagaagcattaaccgagacaagcacttggcagtggcttacttccaacgagggatgctctactaccagacagagaaatatgatttggctatcaaagaccttaaagaagccttgattcagcttcgagggaaccagctgatagactataagatcctggggctccagttcaagctgtttgcctgtgaggtcgtggcatctgtggtggatcaagacagtttctctgggtttgcccctctgcaaccacaggcagctgagcctccacccagaccgaaaaccccagagatcttcagggctctggaaggggaggctcaccgtgtgctatttgggtttgtgcctgagacaaaagaagagctccaggtcatgccagggaacattgtctttgtcttgaagaagggcaatgataactgggccacggtcatgttcaacgggcagaaggggcttgttccctgcaactaccttgaaccagttgagctgcggatccaccctcagcagcagccccaggaggaaagctctccgcagtccgacatcccagctcctcctagttccaaagcccctggaagaccccagctgtcaccaggccagaaacaaaaagaagagcctaaggaagtgaagctcagtgttcccatgccctacacactcaaggtgcactacaagtacacggtagtcatgaagactcagcccgggctcccctacagccaggtccgggacatggtgtctaagaaactggagctccggctggaacacactaagctgagctatcggcctcgggacagcaatgagctggtgcccctttcagaagacagcatgaaggatgcctggggccaggtgaaaaactactgcctgactctgtggtgtgagaacacagtgggtgaccaaggctttccagatgaacccaaggaaagtgaaaaagctgatgctaataaccagacaacagaacctcagcttaagaaaggcagccaagtggaggcactcttcagttatgaggctacccaaccagaggacctggagtttcaggaaggggatataatcctggtgttatcaaaggtgaatgaagaatggctggaaggggagtgcaaagggaaggtgggcattttccccaaagtttttgttgaagactgcgcaactacagatttggaaagcactcggagagaagtctaggatgtttcacaaactacaaagctgaagaaaatgaagccctattacttgtttgtaagatttagcacccttctgctgtatactgtactgagacattacagtttggaagtgttaactatttattccctgttaaaatttaacctactagacaatgatgtgagtacccaggatgatttcctggggcacagtgggtgaggagatggggacaggtgaatggaggagttaggggagaggaaaagtggatggaagtgtctggaaagggcacgagagagtcttccaggtactgatcctgtttcttgctctgagtgctagctagccagctgtgttcacactgtaaacattcatcaagctgtacatttggtgcacttttctgtgtcataccacaataaaaaaaaacctagcatcttacaaaaacaagacacccaagtccaggcccaaggagtaagtacaaatattcctgtttctgaaccattactgtaattggctcttaaggcttgaagtaaccttataggttactcataaggcatatacaaataaacttgtttgttttcttttttc

SEQ ID NO: 72913 - DNA, 584 bp, Artificial Sequence
  derived and/or modified sequence
attgccttttccgttttcacttctcctgaatgttcaataggcagctgagcctccacccagaccgaaaaccccagagatcttcagggctctggaaggggaggctcaccgtgtgctatttgggtttgtgcctgagacaaaagaagagctccaggtcatgccagggaacattgtctttgtcttgaagaagggcaatgataactgggccacggtcatgttcaacgggcagaaggggcttgttccctgcaactaccttgaaccagttgagctgcggatccaccctcagcagcagccccaggaggaaagctctccgcagtccgacatcccagctcctcctagttccaaagcccctggaagaccccagctgtcaccaggccagaaacaaaaagaagagcctaaggaagtgaagctcagtgttcccatgccctacacactcaaggtgcactacaagtacacggtagtcatgaagactcagcccgggctcccctacagccaggtccgggacatggtgtctaagaaactggagctccggctggaacacactaagctgagctatcggcctcgggacagcaatgagctggtgcccc

SEQ ID NO: 72914 - DNA, 376 bp, Artificial Sequence
  derived and/or modified sequence
attgccttttccgttttcacttctcctgaatgttcaataggcagctgagcctccacccagaccgaaaaccccagagatcttcaggaggaaagctctccgcagtccgacatcccagctcctcctagttccaaagcccctggaagaccccagctgtcaccaggccagaaacaaaaagaagagcctaaggaagtgaagctcagtgttcccatgccctacacactcaaggtgcactacaagtacacggtagtcatgaagactcagcccgggctcccctacagccaggtccgggacatggtgtctaagaaactggagctccggctggaacacactaagctgagctatcggcctcgggacagcaatgagctggtgccccttt

SEQ ID NO: 72915 - DNA, 1338 bp, Artificial Sequence
  derived and/or modified sequence
atgtctcttgtcgaagcaatctcactttggaatgaaggagttctggctgcagataagaaagattggaaaggcgcactcgacgctttctcagcggtgcaggacccccactcccgaatatgctttaatatcggatgtatgtacaccatactcaagaatatgacagaagctgagaaagcctttacaaggtccatcaatagagataaacatcttgctgtggcctactttcagcggggtatgctttattatcaaacggaaaaatacgaccttgctatcaaggacctcaaagaagcactcatacaactgcggggaaatcaacttattgattataagattctggggctgcagttcaagctattcgcatgtgaggtagtggccagtgtggttgatcaggactcattctcgggttttgctcctctccaacctcaagctgcagaaccacccccacggcctaaaacccccgaaatctttagagcattagaaggggaggcccaccgggtgctttttggattcgtgcctgaaaccaaggaggaactgcaggtgatgccagggaatattgtattcgttctgaagaaggggaacgataattgggctactgtgatgtttaatgggcagaaggggctagtgccctgtaattacctggagccagtggaactgaggattcaccctcaacaacagccccaggaagagtcatcaccgcaatctgatattccggcaccgccaagctctaaggccccagggcgtcctcagctatcaccaggccagaagcagaaggaggagccgaaggaggtgaaattgagcgtcccaatgccctacactctgaaggtgcactataagtatacagttgtgatgaagacccaaccaggcttgccgtattcccaagtcagggatatggtgtcgaagaaactcgagctacgcctcgaacatactaaactgtcatatcgacccagggattcaaacgagctcgtaccactgagcgaggactcaatgaaagacgcatggggccaggtaaagaattactgcctgacactgtggtgtgagaataccgtgggcgatcaagggttccctgatgaacccaaagagtctgagaaagcagacgcaaacaaccagactaccgagccacagttgaagaaaggttcccaagtggaggcactgttctcatacgaagcgacccagcctgaggatttggaatttcaagaaggcgatattatcctggtgctcagcaaggtcaacgaagaatggttggaaggcgagtgtaaaggcaaggtcggtatctttccgaaggtgtttgttgaggactgtgctaccaccgatctggagtcgacaaggagagaggtgtag

SEQ ID NO: 72916 - DNA, 432 bp, Artificial Sequence
  derived and/or modified sequence
atgcccggaaatattgttttcgtgcttaaaaaagggaatgataattgggcaacagttatgtttaatggtcagaagggcctagtgccatgtaactacctcgagcccgtagagcttcgcatacacccacagcaacagccacaggaggaaagtagtccccagtccgacattccagctcctcctagcagcaaagcccctgggcgaccacaactaagccccggacagaagcaaaaagaagaaccgaaagaagtgaaactctccgtcccaatgccttatacattgaaggtccactacaaatacacagttgttatgaagacacagcctggcttaccttactcacaggtgcgcgacatggtcagcaaaaaattggaactccgccttgagcacacgaaattatcataccgtccgcgagactcaaacgagttagtgccctag

SEQ ID NO: 72917 - DNA, 171 bp, Artificial Sequence
  derived and/or modified sequence
atgccatatacattgaaggtgcactataagtataccgtagtcatgaagacccaacccggacttccatattcgcaggtgcgcgacatggtgtcaaaaaagttggagctgcggcttgagcatacaaaactgtcatatcgccctcgagacagcaatgagctggtgcccctgtag

SEQ ID NO: 72918 - DNA, 1338 bp, Artificial Sequence
  derived and/or modified sequence
atgagcctggtggaggccatcagcctgtggaacgagggcgtgctggccgccgacaagaaggactggaagggcgccctggacgccttcagcgccgtgcaggacccccacagcagaatctgcttcaacatcggctgcatgtacaccatcctgaagaacatgaccgaggccgagaaggccttcaccagaagcatcaacagagacaagcacctggccgtggcctacttccagagaggcatgctgtactaccagaccgagaagtacgacctggccatcaaggacctgaaggaggccctgatccagctgagaggcaaccagctgatcgactacaagatcctgggcctgcagttcaagctgttcgcctgcgaggtggtggccagcgtggtggaccaggacagcttcagcggcttcgcccccctgcagccccaggccgccgagcccccccccagacccaagacccccgagatcttcagagccctggagggcgaggcccacagagtgctgttcggcttcgtgcccgagaccaaggaggagctgcaggtgatgcccggcaacatcgtgttcgtgctgaagaagggcaacgacaactgggccaccgtgatgttcaacggccagaagggcctggtgccctgcaactacctggagcccgtggagctgagaatccacccccagcagcagccccaggaggagagcagcccccagagcgacatccccgccccccccagcagcaaggcccccggcagaccccagctgagccccggccagaagcagaaggaggagcccaaggaggtgaagctgagcgtgcccatgccctacaccctgaaggtgcactacaagtacaccgtggtgatgaagacccagcccggcctgccctacagccaggtgagagacatggtgagcaagaagctggagctgagactggagcacaccaagctgagctacagacccagagacagcaacgagctggtgcccctgagcgaggacagcatgaaggacgcctggggccaggtgaagaactactgcctgaccctgtggtgcgagaacaccgtgggcgaccagggcttccccgacgagcccaaggagagcgagaaggccgacgccaacaaccagaccaccgagccccagctgaagaagggcagccaggtggaggccctgttcagctacgaggccacccagcccgaggacctggagttccaggagggcgacatcatcctggtgctgagcaaggtgaacgaggagtggctggagggcgagtgcaagggcaaggtgggcatcttccccaaggtgttcgtggaggactgcgccaccaccgacctggagagcaccagaagagaggtgtag

SEQ ID NO: 72919 - DNA, 432 bp, Artificial Sequence
  derived and/or modified sequence
atgcccggcaacatcgtgttcgtgctgaagaagggcaacgacaactgggccaccgtgatgttcaacggccagaagggcctggtgccctgcaactacctggagcccgtggagctgagaatccacccccagcagcagccccaggaggagagcagcccccagagcgacatccccgccccccccagcagcaaggcccccggcagaccccagctgagccccggccagaagcagaaggaggagcccaaggaggtgaagctgagcgtgcccatgccctacaccctgaaggtgcactacaagtacaccgtggtgatgaagacccagcccggcctgccctacagccaggtgagagacatggtgagcaagaagctggagctgagactggagcacaccaagctgagctacagacccagagacagcaacgagctggtgccctag

SEQ ID NO: 72920 - DNA, 171 bp, Artificial Sequence
  derived and/or modified sequence
atgccctacaccctgaaggtgcactacaagtacaccgtggtgatgaagacccagcccggcctgccctacagccaggtgagagacatggtgagcaagaagctggagctgagactggagcacaccaagctgagctacagacccagagacagcaacgagctggtgcccctgtag

SEQ ID NO: 72921 - protein, 481 aa, Artificial Sequence
  derived and/or modified sequence
MSLVEAISLWNEGVLAADKKDWKGALDAFSAVQDPHSRICFNIGCMYTILKNMTEAEKAFTRSINRDKHLAVAYFQRGMLYYQTEKYDLAIKDLKEALIQLRGNQLIDYKILGLQFKLFACEKQKLYEPVVIPVGKLFRPNERQVAQLAKKDYLGKATVVASVVDQDSFSGFAPLQPQAAEPPPRPKTPEIFRALEGEAHRVLFGFVPETKEELQVMPGNIVFVLKKGNDNWATVMFNGQKGLVPCNYLEPVELRIHPQQQPQEESSPQSDIPAPPSSKAPGRPQLSPGQKQKEEPKEVKLSVPMPYTLKVHYKYTVVMKTQPGLPYSQVRDMVSKKLELRLEHTKLSYRPRDSNELVPLSEDSMKDAWGQVKNYCLTLWCENTVGDQGFPDEPKESEKADANNQTTEPQLKKGSQVEALFSYEATQPEDLEFQEGDIILVLSKVNEEWLEGECKGKVGIFPKVFVEDCATTDLESTRREV

SEQ ID NO: 72922 - DNA, 1446 bp, Artificial Sequence
  derived and/or modified sequence
atgtcccttgtcgaagccattagcctgtggaacgaaggtgtgttagccgctgacaagaaggattggaagggggcgttggatgcgttttcggctgtgcaggatcctcatagccgcatctgttttaatatcggatgcatgtacactattttgaaaaatatgacagaggctgaaaaggctttcacacgctcaatcaaccgtgacaagcatctggccgtcgcctatttccagcgcggcatgctgtactaccagaccgaaaagtacgaccttgcaatcaaggatctgaaagaagcgctgatccagctgcggggaaaccagctgattgactacaagattctggggcttcagttcaagctgtttgcatgcgaaaaacagaaactatacgagcccgtagtgattccagtaggcaaactcttcaggccgaatgagagacaggtggctcagcttgccaagaaagactacttagggaaggctaccgtagtggcatctgttgtggatcaggacagtttttccggctttgccccgctgcagcctcaagcggccgagcccccacctaggcccaagaccccggagattttccgcgcccttgagggtgaggcacatagggtccttttcggatttgtcccagagactaaagaggagctgcaggtgatgcccggcaatattgtctttgtcctgaagaagggcaatgacaactgggcgaccgtgatgtttaacgggcagaaaggtttagtgccatgcaattatttagagcccgtggagctgagaattcacccacagcagcagcctcaggaggaatcatcccctcagagcgacattcccgctccccccagctccaaggccccaggcaggcctcaactcagcccagggcagaagcaaaaggaggaaccaaaagaggtgaagttgtccgtcccaatgccctacacactgaaggtgcactacaaatacacagttgtcatgaagactcagcccggactgccatatagtcaagtgcgggatatggtcagtaagaaactcgagctgaggcttgagcacacaaaactgtcatatagacccagggattcaaatgaactggtcccactttcagaagattctatgaaggacgcctggggccaggtgaaaaattactgtctgaccttgtggtgcgaaaataccgttggggaccagggattcccagatgagcccaaggaatccgagaaggccgacgcaaacaatcagaccacagagcctcaattaaagaaggggtcgcaggtggaggcactattctcttatgaagctactcaaccggaggatctggagttccaggaaggagatatcatcctcgttcttagcaaggtgaatgaggagtggcttgaaggtgagtgcaagggtaaggtcgggatttttcctaaggtatttgtcgaggactgtgcaactacagaccttgagagcactcggagagaagtgtag

SEQ ID NO: 72923 - DNA, 1446 bp, Artificial Sequence
  derived and/or modified sequence
atgagcctggtggaggccatcagcctgtggaatgaaggagtgctggccgctgacaagaaggactggaagggggccctggatgccttctctgctgtgcaggacccccacagccgcatctgcttcaacatcggctgcatgtacaccatcctgaagaacatgacagaggccgagaaggccttcaccaggagcatcaacagagacaagcacctggccgtggcctacttccagaggggcatgctgtactaccagacagagaagtatgacctggccatcaaggacctgaaggaggccctgatccagctgcggggcaaccagctgattgactacaagatcctgggcctgcagttcaagctgtttgcctgtgagaagcagaagctgtatgagcctgtggtgattcctgtgggcaagctgttccggcccaatgaaaggcaggtggcccagctggccaagaaggactacctgggcaaggccaccgtggtggcctctgtggtggaccaggacagcttcagcggctttgcccccctgcagccccaggccgctgagcccccaccccggcccaagaccccagagatcttccgggccctggagggggaggcccaccgggtgctgtttggatttgtgcctgagaccaaggaggagctgcaggtgatgcctggcaacatcgtgtttgtgctgaagaagggaaatgacaactgggccaccgtgatgttcaacggccagaagggcctggtgccctgcaactacctggagcctgtggagctgcgcatccacccccagcagcagccccaggaggagagcagcccccagagcgacatcccagccccacccagcagcaaggcccctggccggccccagctgagccctggccagaagcagaaggaggagcccaaggaggtgaagctgtctgtgcccatgccctacaccctgaaggtgcactacaagtacacagtggtgatgaagacccagcccggcctgccctacagccaggtgcgggacatggtgtccaagaagctggagctgcggctggagcacaccaagctgagctaccggccccgggacagcaatgagctggtgcccctgtctgaggacagcatgaaggatgcctggggccaggtgaagaactactgcctgaccctgtggtgtgagaacacagtgggggaccagggcttcccagatgagcccaaggagagcgagaaggcagatgccaacaaccagaccacagagccccagctgaagaagggcagccaggtggaggccctcttctcctatgaggccacccagcctgaggacctggagttccaggagggggacatcatcctggtgctgagcaaggtgaatgaggagtggctggagggagaatgtaaaggcaaggtgggcatcttccccaaggtgtttgtggaggactgtgccaccacagacctggagagcacccggcgggaggtgtag

SEQ ID NO: 72924 - DNA, 1446 bp, Artificial Sequence
  derived and/or modified sequence
atgagcctggtggaggccatcagcctgtggaacgagggcgtgctggcagccgataagaaggactggaaaggagcactggatgcgttttcagccgtgcaggatccacatagcagaatctgctttaacatcgggtgcatgtacacaatattgaaaaatatgaccgaagccgagaaggcgttcactaggagcataaatcgggataaacatctggccgttgcatactttcagagaggaatgctttactaccagaccgagaagtacgacctggcgatcaaggacctgaaagaggccctcattcagctgcgagggaaccaactgatagattacaagatccttggcctccagttcaaactgttcgcctgcgagaaacagaaactctacgaacctgtggtgattcctgtgggtaaactgtttcgacccaatgaaaggcaagtggctcaactagccaagaaggactacctgggcaaggcgacagtggtggcttctgtggtggatcaggacagcttttctgggttcgcaccgttacaacctcaggccgctgaaccccccccaaggcctaagactcctgaaatcttcagagcccttgaaggcgaagctcatcgggttcttttcggtttcgtccctgaaacgaaggaggagctgcaggtgatgcctggcaatatcgttttcgtgctaaaaaagggcaatgacaattgggccacggtgatgttcaatgggcagaaggggttagtgccctgtaactacttggagccggtggaactgcgcatccacccacagcagcagccccaggaagaaagcagcccccagtctgatatcccagccccccccagctcgaaggcccccggccgaccccagctctctcccggacagaaacagaaggaggaaccaaaggaagtgaagctgagcgtccctatgccctacactttgaaggtgcattataagtataccgtggttatgaaaacccagcccgggctcccttactcacaagtgagagatatggtttctaaaaaactggagctgcgcctggaacatacaaagctgtcctatcggcctcgggacagcaatgaacttgtacccctcagtgaggattccatgaaggacgcttgggggcaggtaaagaattactgcctgaccctgtggtgtgagaataccgttggggatcaaggatttcccgacgagcctaaagagtctgagaaggcagacgccaacaaccagaccacagaacctcaactgaagaaggggtcccaagtcgaggccctgttctcttacgaggccacgcagccggaggacctggagtttcaggagggcgacattatacttgtcctttcaaaagtgaacgaagaatggttggagggtgagtgcaaagggaaggttggaatctttcctaaggttttcgtcgaggattgcgcgacgactgaccttgagagtaccagaagagaagtttag

SEQ ID NO: 72925 - DNA, 2276 bp, Artificial Sequence
  derived and/or modified sequence
acactccacccctactcgccctctctctctctgcttctttccttttctctctcatggtagggttatgagtcagttgccaaaaggtggggacatttcctgatgcatttgcaacactgagaagttatcttaagggaggctgggccccattctactcatctggcccagaaagtgaacaccttgggggccactaaggcagccctgctaggggagacgctccaacctgtcttctctctgtctcctggcagctctcttggcctcctagtttctacctaatcatgtccctggtggaggccatcagcctctggaatgaaggggtgctggcagcggacaagaaggactggaagggagccctggatgccttcagtgccgtccaggacccccactcccggatttgcttcaacattggctgcatgtacactatcctgaagaacatgactgaagcagagaaggcctttaccagaagcattaaccgagacaagcacttggcagtggcttacttccaacgagggatgctctactaccagacagagaaatatgatttggctatcaaagaccttaaagaagccttgattcagcttcgagggaaccagctgatagactataagatcctggggctccagttcaagctgtttgcctgtgagaagcagaagctatatgagccagtggtgatccctgtgggcaagctgtttcgaccaaatgagagacaagtggctcagctggccaagaaggattacctaggcaaggcgacggtcgtggcatctgtggtggatcaagacagtttctctgggtttgcccctctgcaaccacaggcagctgagcctccacccagaccgaaaaccccagagatcttcagggctctggaaggggaggctcaccgtgtgctatttgggtttgtgcctgagacaaaagaagagctccaggtcatgccagggaacattgtctttgtcttgaagaagggcaatgataactgggccacggtcatgttcaacgggcagaaggggcttgttccctgcaactaccttgaaccagttgagctgcggatccaccctcagcagcagccccaggaggaaagctctccgcagtccgacatcccagctcctcctagttccaaagcccctggaagaccccagctgtcaccaggccagaaacaaaaagaagagcctaaggaagtgaagctcagtgttcccatgccctacacactcaaggtgcactacaagtacacggtagtcatgaagactcagcccgggctcccctacagccaggtccgggacatggtgtctaagaaactggagctccggctggaacacactaagctgagctatcggcctcgggacagcaatgagctggtgcccctttcagaagacagcatgaaggatgcctggggccaggtgaaaaactactgcctgactctgtggtgtgagaacacagtgggtgaccaaggctttccagatgaacccaaggaaagtgaaaaagctgatgctaataaccagacaacagaacctcagcttaagaaaggcagccaagtggaggcactcttcagttatgaggctacccaaccagaggacctggagtttcaggaaggggatataatcctggtgttatcaaaggtgaatgaagaatggctggaaggggagtgcaaagggaaggtgggcattttccccaaagtttttgttgaagactgcgcaactacagatttggaaagcactcggagagaagtctaggatgtttcacaaactacaaagctgaagaaaatgaagccctattacttgtttgtaagatttagcacccttctgctgtatactgtactgagacattacagtttggaagtgttaactatttattccctgttaaaatttaacctactagacaatgatgtgagtacccaggatgatttcctggggcacagtgggtgaggagatggggacaggtgaatggaggagttaggggagaggaaaagtggatggaagtgtctggaaagggcacgagagagtcttccaggtactgatcctgtttcttgctctgagtgctagctagccagctgtgttcacactgtaaacattcatcaagctgtacatttggtgcacttttctgtgtcataccacaataaaaaaaaacctagcatcttacaaaaacaagacacccaagtccaggcccaaggagtaagtacaaatattcctgtttctgaaccattactgtaattggctcttaaggcttgaagtaaccttataggttactcataaggcatatacaaataaacttgtttgttttcttttttc

SEQ ID NO: 72926 - DNA, 1446 bp, Artificial Sequence
  derived and/or modified sequence
atgtcactagtggaagccatctctctctggaacgaaggtgtattggcggctgataaaaaagactggaagggagccttggatgcctttagcgccgtgcaggacccacattccagaatctgcttcaacatcggctgcatgtataccatcctgaagaatatgaccgaggccgagaaagcctttacccgcagcattaatagggacaagcacctggccgtagcttacttccagcgtggtatgctgtactaccagacggaaaaatacgatctcgcgattaaggacctgaaggaggcactgatccagttaaggggcaaccagctgatagattataaaatacttggcttgcaattcaagttatttgcctgtgaaaagcagaaactgtacgagcccgttgtcatccccgtcggcaaactctttagaccaaacgagcggcaggtagcgcagcttgcaaagaaggactacttgggaaaggcgaccgtggttgcctccgtggtggatcaggacagcttttccggattcgccccactccaaccacaggctgcagagcccccaccaagacccaagacaccagagattttccgggcactggaaggagaggcccacagggtgctcttcggatttgtccctgaaaccaaagaagagctccaggtgatgcccggaaacattgtatttgttctcaaaaaaggaaatgacaactgggccacggtgatgttcaatgggcaaaaaggactggtgccctgcaactatctggagcccgtggaacttcgcattcatccccagcaacagccacaggaagagtcttcaccccaatctgacatccccgctccaccttcctctaaagcccctggaagaccgcagctgtcccctggtcagaagcagaaggaagaacctaaggaggtgaagctgtcggtccctatgccttacacactcaaggtgcactataaatatactgtggttatgaagactcaacctggcttgccttatagccaagtgcgggatatggtatccaaaaagctagagttacggttagagcatacaaaactatcttaccgcccaagagattcaaatgagctcgtccccttgtccgaagactccatgaaggatgcctggggacaggttaaaaattattgtctgactctgtggtgcgagaatactgtgggggaccagggctttcctgacgaacccaaggagtctgaaaaagcagatgcaaacaatcagacaaccgagccacagctcaagaagggatcacaggtggaggcgctattttcttatgaggccactcagccagaggacctggaattccaggagggcgacatcatactcgtattgagtaaagtaaacgaagagtggctggaaggggaatgcaaaggaaaagtcgggatatttccaaaggttttcgttgaggattgtgctactacggacctggaatccacgcgcagggaagtgtag

SEQ ID NO: 72927 - DNA, 1446 bp, Artificial Sequence
  derived and/or modified sequence
atgagcctggtggaggccatcagcctgtggaacgagggcgtgctggccgccgacaagaaggactggaagggcgccctggacgccttcagcgccgtgcaggacccccacagcagaatctgcttcaacatcggctgcatgtacaccatcctgaagaacatgaccgaggccgagaaggccttcaccagaagcatcaacagagacaagcacctggccgtggcctacttccagagaggcatgctgtactaccagaccgagaagtacgacctggccatcaaggacctgaaggaggccctgatccagctgagaggcaaccagctgatcgactacaagatcctgggcctgcagttcaagctgttcgcctgcgagaagcagaagctgtacgagcccgtggtgatccccgtgggcaagctgttcagacccaacgagagacaggtggcccagctggccaagaaggactacctgggcaaggccaccgtggtggccagcgtggtggaccaggacagcttcagcggcttcgcccccctgcagccccaggccgccgagcccccccccagacccaagacccccgagatcttcagagccctggagggcgaggcccacagagtgctgttcggcttcgtgcccgagaccaaggaggagctgcaggtgatgcccggcaacatcgtgttcgtgctgaagaagggcaacgacaactgggccaccgtgatgttcaacggccagaagggcctggtgccctgcaactacctggagcccgtggagctgagaatccacccccagcagcagccccaggaggagagcagcccccagagcgacatccccgccccccccagcagcaaggcccccggcagaccccagctgagccccggccagaagcagaaggaggagcccaaggaggtgaagctgagcgtgcccatgccctacaccctgaaggtgcactacaagtacaccgtggtgatgaagacccagcccggcctgccctacagccaggtgagagacatggtgagcaagaagctggagctgagactggagcacaccaagctgagctacagacccagagacagcaacgagctggtgcccctgagcgaggacagcatgaaggacgcctggggccaggtgaagaactactgcctgaccctgtggtgcgagaacaccgtgggcgaccagggcttccccgacgagcccaaggagagcgagaaggccgacgccaacaaccagaccaccgagccccagctgaagaagggcagccaggtggaggccctgttcagctacgaggccacccagcccgaggacctggagttccaggagggcgacatcatcctggtgctgagcaaggtgaacgaggagtggctggagggcgagtgcaagggcaaggtgggcatcttccccaaggtgttcgtggaggactgcgccaccaccgacctggagagcaccagaagagaggtgtag

SEQ ID NO: 72928 - protein, 313 aa, Artificial Sequence
  derived and/or modified sequence
MDWLNVFKDFFSIGKVKRKPSVPDSASPADDSFVDPGERLYDLNMPAYVKFNYMAEREDELSLIKGTKVIVMEKCSDGWWRGSYNGQVGWFPSNYVTEEGDSPLGDHVGSLSEKLAAVVNNLNTGQVLHVVQALYPFSSSNDEELNFEKGDVMDVIEKPENDPEWWKCRKINGMVGLVPKNYVTVMQNNPLTSGLEPSPPQCDYIRPSLTGKFAGNPWYYGKVTRHQAEMALNERGHEGDFLIRDSESSPNDFSVSLKAQGKNKHFKVQLKETVYCIGQRKFSTMEELVEHYKKAPIFTSEQGEKLYLVKHLS

SEQ ID NO: 72929 - DNA, 942 bp, Artificial Sequence
  derived and/or modified sequence
atggactggctgaacgtgttcaaggacttcttcagcatcggcaaggtgaagagaaagcccagcgtgcccgacagcgccagccccgccgacgacagcttcgtggaccccggcgagagactgtacgacctgaacatgcccgcctacgtgaagttcaactacatggccgagagagaggacgagctgagcctgatcaagggcaccaaggtgatcgtgatggagaagtgcagcgacggctggtggagaggcagctacaacggccaggtgggctggttccccagcaactacgtgaccgaggagggcgacagccccctgggcgaccacgtgggcagcctgagcgagaagctggccgccgtggtgaacaacctgaacaccggccaggtgctgcacgtggtgcaggccctgtaccccttcagcagcagcaacgacgaggagctgaacttcgagaagggcgacgtgatggacgtgatcgagaagcccgagaacgaccccgagtggtggaagtgcagaaagatcaacggcatggtgggcctggtgcccaagaactacgtgaccgtgatgcagaacaaccccctgaccagcggcctggagcccagccccccccagtgcgactacatcagacccagcctgaccggcaagttcgccggcaacccctggtactacggcaaggtgaccagacaccaggccgagatggccctgaacgagagaggccacgagggcgacttcctgatcagagacagcgagagcagccccaacgacttcagcgtgagcctgaaggcccagggcaagaacaagcacttcaaggtgcagctgaaggagaccgtgtactgcatcggccagagaaagttcagcaccatggaggagctggtggagcactacaagaaggcccccatcttcaccagcgagcagggcgagaagctgtacctggtgaagcacctgagctag

SEQ ID NO: 72930 - DNA, 942 bp, Artificial Sequence
  derived and/or modified sequence
atggactggttgaatgtcttcaaggatttcttttccataggtaaagtgaagcgcaaaccatcagtgcctgacagcgccagtccggccgatgatagcttcgtagatccaggtgagcgcttatatgatctgaatatgccggcctacgtgaagtttaattatatggctgagcgagaggatgaactcagcttgataaaaggcacgaaagtgatcgtaatggaaaagtgtagcgatggatggtggcgtggtagttacaatggacaagttggctggtttccctctaactatgtgacagaggaaggcgacagcccactcggagaccacgtaggctctctgtcggagaagctggctgctgtggtgaacaacctgaatacaggccaggtgctccacgtagtgcaggcactgtaccccttctcaagtagtaatgacgaagaactgaactttgagaaaggggacgtgatggatgttatcgaaaaacctgagaatgatccagagtggtggaagtgtagaaagataaacggcatggtgggactggtacctaagaattatgtgacggtcatgcagaataacccattgacatccgggctggaacctagcccccctcaatgcgattacattcgtcctagcctaacagggaagttcgccggcaacccatggtactacggcaaagtaactaggcatcaggcggagatggccttgaacgaacggggtcatgaaggagatttccttatcagagatagcgagtcgagtccgaatgacttcagcgtttcactgaaggcacaaggaaaaaataagcactttaaggtgcaactgaaagagacagtgtactgcatcgggcagcggaaattctcgacaatggaggagctcgtggaacattataaaaaggccccaatatttacctccgagcaaggagaaaagctgtacctggtgaagcatctcagctag

SEQ ID NO: 72931 - DNA, 942 bp, Artificial Sequence
  derived and/or modified sequence
atggactggctgaatgtgttcaaggacttcttcagcatcggcaaggtgaagaggaagcccagcgtgcctgattctgccagccctgcagatgacagctttgtggaccccggggagcggctgtatgacctgaacatgcctgcctacgtgaagttcaactacatggccgagcgggaggatgagctgagcctcatcaagggcaccaaggtgattgtgatggagaagtgcagtgatggctggtggaggggcagctacaacggccaggtgggctggttccccagcaactacgtgacagaggagggggacagccccctgggggaccacgtgggcagcctgtctgagaagctggccgctgtggtgaacaacctgaacacaggccaggtgctgcacgtggtgcaggccctgtaccccttcagcagcagcaatgatgaggagctgaactttgagaagggagatgtgatggatgtgattgagaagccagaaaatgaccctgagtggtggaagtgcaggaagatcaatggcatggtgggcctggtgcccaagaactacgtgacagtgatgcagaacaaccccctgaccagcggcctggagcccagccccccccagtgtgactacatccggcccagcctgaccgggaagtttgctggcaacccctggtactacggcaaggtgaccaggcaccaggccgagatggccctgaatgaaagaggacatgaaggagacttcctgatccgggacagcgagagcagccccaatgacttctctgtgtccctgaaggcccagggcaagaacaagcacttcaaggtgcagctgaaggagaccgtgtactgcatcggccagaggaagttcagcaccatggaggagctggtggagcactacaagaaggcccccatcttcaccagcgagcagggcgagaagctgtacctggtgaagcacctgtcctag

SEQ ID NO: 72932 - DNA, 2403 bp, Artificial Sequence
  derived and/or modified sequence
gtttcagtgttgcagaacagacgaggaagctcactgagaattatcctgagctgtgttaacaaactgacagaacacagaatttttactcaaaatggattggttaaacgtctttaaagattttttcagcattggaaaagtgaaaagaaaacctagtgtgccagattctgcatctcctgctgatgatagttttgttgacccaggggaacgtctctatgacctcaacatgcccgcttatgtgaaatttaactacatggctgagagagaggatgaattatcattgataaaggggacaaaggtgatcgtcatggagaaatgcagtgatgggtggtggcgtggtagctacaatggacaagttggatggttcccttcaaactatgtaactgaagaaggtgacagtcctttgggtgaccatgtgggttctctgtcagagaaattagcagcagtcgtcaataacctaaatactgggcaagtgttgcatgtggtacaggctctttacccattcagctcatctaatgatgaagaacttaatttcgagaaaggagatgtaatggatgttattgaaaaacctgaaaatgacccagagtggtggaaatgcaggaagatcaatggtatggttggtctagtaccaaaaaactatgttaccgttatgcagaataatccattaacttcaggtttggaaccatcacctccacagtgtgattacattaggccttcactcactggaaagtttgctggcaatccttggtattatggcaaagtcaccaggcatcaagcagaaatggcattaaatgaaagaggacatgaaggggatttcctcattcgtgatagtgaatcttcgccaaatgatttctcagtatcactaaaagcacaagggaaaaacaagcattttaaagtccaactaaaagagactgtctactgcattgggcagcgtaaattcagcaccatggaagaacttgtagaacattacaaaaaggcaccaatttttacaagtgaacaaggagaaaaattatatcttgtcaagcatttatcatgatactgctgaccagaagtgactgctgtgtagctgtaatttgtcatgtaattgaagactgagaaaatgttgggtccagtcgtgcttgattggaaattgttgtttctaaatctatatgagaattgacaataagtatttttattataactcagcccatacatatatactatgtatgcagtgcatctgcatagaacagttccttatccttggccttctgttttattgtttttttctttgctgttttccctttgcttctaatattacagttttgtattttgtaaacaaaaatcaaataatgcatatcagaatctttatatggaagaaatcctttattgcctttcctttgtttccttgtaaaggcaccctgttctgttatggtttttcattatataaaattattatatctatatatgacatatgctaaaatttcttggagagtgttaatcttttctgtgactaaatagcaataataagtggaaaattagaaattatttccaggtattatatttgtcacaggccattgtaaataccaagtatattgtgtctgccataatttttaaaaatacattcattgtcttcagtcatacagcaagacacatgagacatagattagaaaacatgttgtacaattttaatttacaactgttggaaataaaaatcacttaatttttttccagtgcttctccctcatctggttattcaagaaaacaaaacagtctctgagatatttagcttttcaaactgtaaatagatgctctagtgttatttatttttttaatcccacttgtattattttacctctagagcatcttgtattaggacatgttatatttatgccagtgggaaataagttatggccaagttttgcaaaaacaggaagcagtgagatacttgtttttttctcctcactaaatatcagtaattgtcaggaatggtattacctattttcatttcctcttttcagctttaagttttgttgattgggacactaaaactgatgtatacctgaggaaaaaatagaatgtgctcatggttagggaaaattatattatttttaattttttaatttgttttttaaccaagtaggaatttgggtgtatggataagaggccaatctgcttctgtaggctatagaagaaaaccagttgtattttatggtcataatttgtccccctattattctggagatttaaatttaagtaaagtagccatcagtattttaattgaaaaatactaaagccacataactgagtaggatgtcgtatgatactttcaacaaattccctaatgctgcctaagcatatggatgttttaattctttgctgttataaatagatatctaatacgccagaattactgatggtaaaattgaa

SEQ ID NO: 72933 - DNA, 942 bp, Artificial Sequence
  derived and/or modified sequence
atggactggctgaacgtgttcaaggacttcttcagcatcggcaaggtgaaacgtaagcccagcgtgccagatagcgcatcgcccgctgatgatagcttcgtcgatcctggggagcggctctacgacctgaacatgcccgcctacgttaaattcaattacatggccgagagggaagacgaattaagcctgattaaaggcactaaggtgatcgtaatggaaaagtgcagcgatggctggtggcgaggaagctacaacggccaggtagggtggttcccgagcaactatgttacggaagaaggggacagccccctgggagaccatgtggggagcttatcggagaagctagctgcggttgtgaacaatctgaacacaggacaggtcctgcacgtggtgcaggccctgtatcccttctcaagctcgaacgatgaagaactcaactttgaaaaaggcgatgtcatggacgtcatcgaaaaacccgaaaacgatccagagtggtggaagtgtcggaagattaacggcatggtcggacttgttcccaagaactatgtcactgttatgcagaataatcctttaacatcaggcctggagccttccccaccccagtgcgactatattcgcccgagcctgaccggcaagtttgccggaaacccgtggtattacggcaaggtgacaagacatcaagccgaaatggctttgaacgaaaggggacatgaaggcgattttctgattcgcgatagcgaaagtagccccaacgacttcagcgtctcgctcaaggctcaggggaaaaataagcacttcaaggtgcagttaaaagaaaccgtatattgtatcggtcaaaggaagttctcgacgatggaagaattagtggaacactacaagaaagcccccatatttacttcagagcagggcgagaaactgtatctcgtgaaacacctttcctag

SEQ ID NO: 72934 - DNA, 942 bp, Artificial Sequence
  derived and/or modified sequence
atggactggctgaacgttttcaaggactttttctccataggcaaggtgaagagaaaaccgtctgttccagattccgcttcccctgctgatgactccttcgtcgaccctggtgagcggctttatgatctcaatatgcctgcctacgttaagttcaactacatggcggagagagaagacgagttatccctcatcaagggaacaaaggtgatcgtgatggaaaaatgctcggatggatggtggcggggttcctacaatggacaggttgggtggtttcctagcaactatgttacagaggagggggacagcccccttggagatcacgtggggagcctaagcgaaaaactggctgccgtggttaataacttaaatacggggcaggtgctgcatgttgtccaggctctttacccattttccagcagcaatgacgaagagttgaactttgaaaagggcgatgtgatggacgtgattgagaagcctgagaacgacccagagtggtggaagtgccgcaagattaacggcatggtgggtttggtgcctaaaaactatgtgaccgtcatgcagaacaatcccctgacttccggactcgaaccaagccccccacagtgtgattatatacggccttcgctcactggaaagttcgccggaaatccttggtactacggtaaagtgacccgacaccaggccgagatggccctgaatgagaggggacatgaaggagatttcctgattcgtgacagtgagtcatcgccaaacgacttttctgtaagcctgaaggcccaaggtaaaaacaagcactttaaggtgcagcttaaggaaaccgtttattgcattggccagcggaagttttcgaccatggaggagctcgtggaacattataaaaaggcgccaatctttacaagtgaacagggcgagaaactgtacctggttaaacatctttcctag

SEQ ID NO: 72935 - protein, 938 aa, Artificial Sequence
  derived and/or modified sequence
MATCIGEKIEDFKVGNLLGKGSFAGVYRAESIHTGLEVAIKMLYNYFEDSNYVYLVLEMCHNGEMNRYLKNRVKPFSENEARHFMHQIITGMLYLHSHGILHRDLTLSNLLLTRNMNIKIADFGLATQLKMPHEKHYTLCGTPNYISPEIATRSAHGLESDVWSLGCMFYTLLIGRPPFDTDTVKNTLNKVVLADYEMPSFLSIEAKDLIHQLLRRNPADRLSLSSVLDHPFMSRNSSTKSKDLGTVEDSIDSGHATISTAITASSSTSISGSLFDKRRLLIGQPLPNKMTVFPKNKSSTDFSSSGDGNSFYTQWGNQETSNSGRGRVIQDAEERPHSRYLRRAYSSDRSGTSNSQSQAKTYTMERCHSAEMLSVSKRSGGGENEERYSPTDNNANIFNFFKEKTSSSSGSFERPDNNQALSNHLCPGKTPFPFADPTPQTETVQQWFGNLQINAHLRKTTEYDSISPNRDFQGHPDLQKDTSKNAWTDTKVKKNSDASDNAHSVKQQNTMKYMTALHSKPEIIQQECVFGSDPLSEQSKTRGMEPPWGYQNRTLRSITSPLVAHRLKPIRQKTKKAVVSILDSEEVCVELVKEYASQEYVKEVLQISSDGNTITIYYPNGGRGFPLADRPPSPTDNISRYSFDNLPEKYWRKYQYASRFVQLVRSKSPKITYFTRYAKCILMENSPGADFEVWFYDGVKIHKTEDFIQVIEKTGKSYTLKSESEVNSLKEEIKMYMDHANEGHRICLALESIISEEERKTRSAPFFPIIIGRKPGSTSSPKALSPPPSVDSNYPTRERASFNRMVMHSAASPTQAPILNPSMVTNEGLGLTTTASGTDISSNSLKDCLPKSAQLLKSVFVKNVGWATQLTSGAVWVQFNDGSQLVVQAGVSSISYTSPNGQTTRYGENEKLPDYIKQKLQCLSSILLMFSNPTPNFH

SEQ ID NO: 72936 - DNA, 2817 bp, Artificial Sequence
  derived and/or modified sequence
atggccacctgcatcggcgagaagatcgaggacttcaaggtgggcaacctgctgggcaagggcagcttcgccggcgtgtacagagccgagagcatccacaccggcctggaggtggccatcaagatgctgtacaactacttcgaggacagcaactacgtgtacctggtgctggagatgtgccacaacggcgagatgaacagatacctgaagaacagagtgaagcccttcagcgagaacgaggccagacacttcatgcaccagatcatcaccggcatgctgtacctgcacagccacggcatcctgcacagagacctgaccctgagcaacctgctgctgaccagaaacatgaacatcaagatcgccgacttcggcctggccacccagctgaagatgccccacgagaagcactacaccctgtgcggcacccccaactacatcagccccgagatcgccaccagaagcgcccacggcctggagagcgacgtgtggagcctgggctgcatgttctacaccctgctgatcggcagaccccccttcgacaccgacaccgtgaagaacaccctgaacaaggtggtgctggccgactacgagatgcccagcttcctgagcatcgaggccaaggacctgatccaccagctgctgagaagaaaccccgccgacagactgagcctgagcagcgtgctggaccaccccttcatgagcagaaacagcagcaccaagagcaaggacctgggcaccgtggaggacagcatcgacagcggccacgccaccatcagcaccgccatcaccgccagcagcagcaccagcatcagcggcagcctgttcgacaagagaagactgctgatcggccagcccctgcccaacaagatgaccgtgttccccaagaacaagagcagcaccgacttcagcagcagcggcgacggcaacagcttctacacccagtggggcaaccaggagaccagcaacagcggcagaggcagagtgatccaggacgccgaggagagaccccacagcagatacctgagaagagcctacagcagcgacagaagcggcaccagcaacagccagagccaggccaagacctacaccatggagagatgccacagcgccgagatgctgagcgtgagcaagagaagcggcggcggcgagaacgaggagagatacagccccaccgacaacaacgccaacatcttcaacttcttcaaggagaagaccagcagcagcagcggcagcttcgagagacccgacaacaaccaggccctgagcaaccacctgtgccccggcaagacccccttccccttcgccgaccccaccccccagaccgagaccgtgcagcagtggttcggcaacctgcagatcaacgcccacctgagaaagaccaccgagtacgacagcatcagccccaacagagacttccagggccaccccgacctgcagaaggacaccagcaagaacgcctggaccgacaccaaggtgaagaagaacagcgacgccagcgacaacgcccacagcgtgaagcagcagaacaccatgaagtacatgaccgccctgcacagcaagcccgagatcatccagcaggagtgcgtgttcggcagcgaccccctgagcgagcagagcaagaccagaggcatggagcccccctggggctaccagaacagaaccctgagaagcatcaccagccccctggtggcccacagactgaagcccatcagacagaagaccaagaaggccgtggtgagcatcctggacagcgaggaggtgtgcgtggagctggtgaaggagtacgccagccaggagtacgtgaaggaggtgctgcagatcagcagcgacggcaacaccatcaccatctactaccccaacggcggcagaggcttccccctggccgacagaccccccagccccaccgacaacatcagcagatacagcttcgacaacctgcccgagaagtactggagaaagtaccagtacgccagcagattcgtgcagctggtgagaagcaagagccccaagatcacctacttcaccagatacgccaagtgcatcctgatggagaacagccccggcgccgacttcgaggtgtggttctacgacggcgtgaagatccacaagaccgaggacttcatccaggtgatcgagaagaccggcaagagctacaccctgaagagcgagagcgaggtgaacagcctgaaggaggagatcaagatgtacatggaccacgccaacgagggccacagaatctgcctggccctggagagcatcatcagcgaggaggagagaaagaccagaagcgcccccttcttccccatcatcatcggcagaaagcccggcagcaccagcagccccaaggccctgagccccccccccagcgtggacagcaactaccccaccagagagagagccagcttcaacagaatggtgatgcacagcgccgccagccccacccaggcccccatcctgaaccccagcatggtgaccaacgagggcctgggcctgaccaccaccgccagcggcaccgacatcagcagcaacagcctgaaggactgcctgcccaagagcgcccagctgctgaagagcgtgttcgtgaagaacgtgggctgggccacccagctgaccagcggcgccgtgtgggtgcagttcaacgacggcagccagctggtggtgcaggccggcgtgagcagcatcagctacaccagccccaacggccagaccaccagatacggcgagaacgagaagctgcccgactacatcaagcagaagctgcagtgcctgagcagcatcctgctgatgttcagcaaccccacccccaacttccactag

SEQ ID NO: 72937 - DNA, 2817 bp, Artificial Sequence
  derived and/or modified sequence
atggccacctgtataggggagaagattgaggactttaaagtgggtaatcttctgggaaagggaagttttgcaggcgtctatcgcgcggaaagtatccatacaggcttggaggtggccatcaagatgctttacaattactttgaagactctaactatgtatacctcgttctggaaatgtgccacaatggggaaatgaaccgatacctgaagaacagggtgaaacccttcagcgagaacgaagctcggcacttcatgcaccaaatcataacgggaatgctatatctgcattcccacggcattctgcatagagacctgaccctttcaaatctgctcctgacacgcaacatgaacattaagatcgcagattttggcctggcaacccagcttaagatgccccacgagaaacactacacattatgcggcacccctaattacatctccccggagatcgccacacggagcgctcacggactcgagtctgatgtgtggtcactggggtgtatgttctacaccctgctgattgggcggcctcccttcgacactgacactgtcaaaaacaccttaaacaaggtcgtcctggccgactacgaaatgcccagcttcctgtcaattgaagcaaaggatctgatccaccagctgctgcgaagaaaccctgctgataggttatccctctcgtcggttctggatcatccgtttatgtctagaaattctagcacaaagagcaaagatctgggcactgtggaggatagtatcgacagcggccacgccacgattagtacagctatcaccgcctcctcctctacatccatttctgggtccctgttcgataagaggcgattactaatagggcagccactgccaaacaagatgaccgtctttcccaaaaataaatcgtctacagactttagctcctccggagacgggaattctttttatactcagtggggaaatcaagagacctccaattccgggcgcggccgggtaatccaggatgcggaagaacgcccgcactctcggtacctgagacgggcctacagtagtgataggtctggcacctctaattctcagtcccaggcgaagacttacacaatggaaagatgccacagtgcagagatgcttagtgtgtctaaacggtcaggagggggcgagaacgaggagaggtatagtccaaccgacaataacgcaaacatatttaacttcttcaaagagaagacatcgtccagtagcggaagcttcgaacgccccgataataatcaggctctctctaatcatttgtgccctggaaaaacgccctttccatttgcggacccaacccctcagacagagaccgtgcagcagtggtttggcaacctccagattaacgcccaccttagaaagacgactgagtacgatagcatttcccctaacagagattttcagggtcacccggatctccagaaggatacctctaaaaacgcgtggaccgacacaaaggtgaaaaagaattccgatgcctcagacaatgctcattctgtcaagcaacagaacactatgaaatatatgacagccttacatagcaagcctgaaattatccagcaggagtgcgtttttggaagtgaccccctgagtgagcagagcaaaacccgcggcatggaacccccctggggctaccagaatcgaacactcagaagcatcaccagtcccctcgtcgcccatcgactgaaacctatcagacagaaaaccaagaaagcagttgtgtctatactcgacagcgaagaagtatgcgtggaactagttaaagagtacgcctcccaggagtacgtcaaagaagtacttcaaataagctcagacggcaacactataacgatttattaccccaacggaggccgcgggttccccctcgctgatagaccaccctctccaacagataacataagtagatactcgttcgacaatctccccgaaaagtattggcgcaagtatcaatatgcgtcccgtttcgtgcaactggtgaggtcaaagtcacccaaaatcacttactttactaggtatgcaaagtgcatactgatggaaaacagccctggcgctgatttcgaagtctggttttacgacggcgtgaaaatccacaaaacagaagattttattcaggtgattgagaagacagggaaaagctacactctgaagtccgaaagcgaggttaactccctaaaggaggagatcaagatgtatatggaccacgcaaatgaaggacaccgtatctgcttagctctggaaagtatcattagtgaagaagagaggaagacacgtagtgccccattctttcctatcataatcggacggaaacccgggtcaacttcctccccgaaggccttgtctcccccaccttctgtggacagtaattacccaactagggagcgcgcttccttcaacagaatggtgatgcatagtgcagcatcaccaacccaggcccccattctcaacccctccatggtgaccaacgaggggctaggattgaccaccacagccagtggaacagatatctctagcaatagtctcaaggactgtctgccaaagtccgcacaactcttgaaatcagtgttcgtaaaaaatgtgggatgggcgacccagctgacatccggggctgtttgggtgcagttcaatgatggaagccaattggttgtccaggcaggggtttcctctattagctatacttcacccaacgggcagaccactcgttatggtgagaatgaaaagctgcccgattacatcaagcagaagctccagtgcctgagtagcatattactgatgtttagcaatcctactccaaactttcactag

SEQ ID NO: 72938 - DNA, 2817 bp, Artificial Sequence
  derived and/or modified sequence
atggccacctgcattggagagaagattgaggacttcaaggtgggcaacctgctgggcaagggcagctttgctggggtgtacagagctgagagcatccacacaggcctggaggtggccatcaagatgctgtacaactactttgaggacagcaactacgtgtacctggtgctggagatgtgccacaacggggagatgaaccgctacctgaagaacagagtgaagcccttctctgaaaatgaggcccggcacttcatgcaccagatcatcaccggcatgctgtacctgcacagccacggcatcctgcaccgggacctgaccctgagcaacctgctgctgaccaggaacatgaacatcaagattgctgactttggcctggccacccagctgaagatgcctcatgagaagcactacaccctgtgtggcacccccaactacatcagccctgagatcgccaccaggtctgcccacggcctggagagtgatgtgtggagcctgggctgcatgttctacaccctgctgattggccggcccccatttgacacagacacagtgaagaacaccctgaacaaggtggtgctggccgactatgagatgcccagcttcctgagcattgaggccaaggacctgatccaccagctgctgcggaggaacccagctgaccggctgagcctgagctctgtgctggaccaccccttcatgagcaggaacagcagcaccaagagcaaggacctgggcaccgtggaggacagcattgattctggccacgccaccatcagcacagccatcacagccagcagcagcaccagcatcagcggcagcctgtttgacaagaggcggctgctgattggccagcccctgcccaacaagatgacagtgttccccaagaacaagagcagcacagacttcagcagcagtggagatggcaacagcttctacacccagtggggcaaccaggagaccagcaacagcggccggggccgggtcatccaggatgctgaggagcggccccacagccgctacctgcggcgggcctacagcagtgacaggagcggcaccagcaacagccagagccaggccaagacctacaccatggagcgctgccacagcgctgagatgctgtctgtgtccaagaggtctggaggaggagaaaatgaggagcgctacagccccacagacaacaatgccaacatcttcaacttcttcaaggagaagaccagcagcagcagcggcagctttgagaggccagacaacaaccaggccctgagcaaccacctgtgccctgggaagacccccttcccctttgctgaccccaccccccagacagaaacagtgcagcagtggtttggaaacctgcagatcaatgcccacctgaggaagaccacagaatatgacagcatcagccccaacagagacttccagggccacccagacctgcagaaggacaccagcaagaatgcctggacagacaccaaggtgaagaagaacagtgatgccagtgacaatgcccacagcgtgaagcagcagaacaccatgaagtacatgacagccctgcacagcaagccagagatcatccagcaggagtgtgtgtttggaagtgaccccctgtctgagcagagcaagacccggggcatggagcccccctggggctaccagaacagaaccctgcggagcatcaccagccccctggtggcccaccggctgaagcccatccggcagaagaccaagaaggctgtggtgtccatcctggacagcgaggaggtgtgtgtggagctggtgaaggagtatgccagccaggagtatgtgaaggaggtgctgcagatcagcagtgatggcaacaccatcaccatctactaccccaacggcggccggggcttccccctggccgacaggcctcccagccccacagacaacatcagccgctacagctttgacaacctgcctgagaagtactggaggaagtaccagtatgccagcagatttgtgcagctggtgcgcagcaagagccccaagatcacctacttcaccaggtatgccaagtgcatcctgatggagaacagccctggagctgactttgaggtgtggttctatgatggagtgaagatccacaagacagaggacttcatccaggtgattgagaagacaggcaagagctacaccctgaagtctgagagcgaggtgaacagcctgaaggaggagatcaagatgtacatggaccacgccaatgaaggccaccgcatctgcctggccctggagagcatcatcagcgaggaggagaggaagaccaggtctgcccccttcttccccatcatcattggaaggaagccaggcagcaccagcagccccaaggccctgagccccccaccttctgtggacagcaactaccccacccgggagcgggccagcttcaacaggatggtgatgcacagcgctgccagccccacccaggcccccatcctgaaccccagcatggtgaccaatgaaggcctgggcctgaccaccacagccagcggcacagacatcagcagcaacagcctgaaggactgcctgcccaagagcgcccagctgctgaagtctgtgtttgtgaagaatgtgggctgggccacccagctgaccagcggggctgtgtgggtgcagttcaatgatggcagccagctggtggtgcaggccggcgtgagcagcatctcctacaccagccccaacggccagaccacccgctacggggagaatgagaagctgcctgactacatcaagcagaagctgcagtgcctgagcagcatcctgctgatgttcagcaaccccacccccaacttccactag

SEQ ID NO: 72939 - DNA, 2817 bp, Artificial Sequence
  derived and/or modified sequence
atggccacctgcatcggcgagaagatcgaggacttcaaggtgggcaatctgctcggaaagggcagctttgcgggcgtgtatcgcgccgagtctattcacaccggcttagaggtcgctattaagatgctttataattattttgaagatagcaattatgtttacctggtcctggagatgtgtcataacggcgagatgaacaggtacttaaaaaaccgggtgaagccattcagtgagaacgaagcgaggcatttcatgcaccagattattacaggtatgctatatctgcatagtcatggaatcttacacagagatctcaccctgtcaaacctgcttctaactcgcaacatgaacattaaaattgcagactttggactagcaacacaactaaagatgccccacgagaagcactacactctgtgcgggaccccaaactacattagcccagagatcgctacacggtccgcacacggactggaaagtgatgtgtggagtctgggttgcatgttttatactctactgatcgggcgacccccctttgatactgacactgtaaagaacaccctgaataaggtcgttctcgccgattatgagatgccctctttcttgtctatagaggccaaggacctcatccaccaactgctgcgcaggaatccggctgatcgtctttcactgagttctgttctcgatcacccttttatgtcccggaatagcagtactaagagcaaagacctgggcacagtggaggacagcattgattcaggacacgcgaccatttccaccgctatcacagcctcaagcagtacctctatctccggatcactatttgataaaagacggctccttatcggtcagcccctcccgaacaaaatgaccgtgtttcctaagaataagagttcaaccgacttctccagctccggggatggcaactccttctatactcaatggggtaaccaagaaacctcaaattcgggtagagggagagttatccaagatgccgaggagaggccccatagtcggtacctgcggagggcctactcaagcgaccgctccggcaccagcaattcgcagtcccaggccaaaacctacactatggagaggtgtcattctgctgaaatgctgagcgtatcaaaaagatctggcggtggggaaaatgaagagaggtattcccctacagacaacaacgccaacatttttaacttcttcaaggagaagaccagtagtagtagcggctcctttgagagaccagataataaccaggccctgtccaaccacttgtgtccaggcaagactcctttcccgttcgccgaccccactccacagaccgagactgtccaacagtggttcgggaatttacagatcaacgcccacttaagaaaaactacagagtatgatagcattagcccaaacagagattttcaggggcatccggatctgcagaaggacactagtaagaacgcctggactgatacaaaggttaagaagaactcagacgctagtgataatgcccacagcgtgaaacagcaaaacacgatgaagtacatgacggcactccattcgaagccagagataattcaacaggagtgcgtctttggaagtgatcctctcagcgaacaatccaaaaccagagggatggagcctccctggggatatcagaaccgcacgctgcgcagtatcacatcaccactggtggctcaccggctgaaaccgatccgtcaaaaaactaagaaagcggtcgttagcatcctcgattcagaagaagtgtgcgtcgaattggttaaggagtatgcatctcaggagtatgtgaaagaagtcctacagatatctagcgacgggaacaccatcacaatttactatccgaacggcgggagggggttccctcttgctgacagacctccctcaccaacagataacatttcgagatattcatttgacaatctccctgaaaagtattggcggaagtatcagtacgcctcgaggtttgttcagctagttagaagcaaatctccgaagatcacctatttcacgcgctacgcaaagtgcattctcatggagaatagtcccggcgcagattttgaggtatggttctatgatggtgtaaaaatccataagacggaggattttatccaagtgatagaaaaaaccggaaagagctacactctgaaatccgaatctgaagtaaacagtctgaaggaggaaataaaaatgtatatggatcatgccaacgaaggacaccgtatctgtctagctctggagtccattatttcagaagaggaacggaagaccagatctgctccattcttccccataattattggaaggaagccagggtctacgtcttcccctaaggcccttagcccaccaccaagcgtggactccaattatccaactagggagcgcgcgtccttcaacagaatggtcatgcattcagccgctagtccaacccaggcacctattttaaatcccagtatggtgaccaacgagggactgggcctgacaacaaccgctagcggaaccgacatttcctccaactctctgaaagactgcctccctaaaagcgcacagttgcttaagtctgtattcgttaagaatgtggggtgggctacacagttgacttccggcgctgtttgggtccagtttaacgacggcagtcagctggtggtccaggctggagtgagcagcatatcctacacgagccctaacgggcagacgacccgttacggagagaatgagaagctccccgattatatcaaacagaagctgcagtgtctatccagcatcctacttatgtttagtaacccaacacctaattttcattag

SEQ ID NO: 72940 - DNA, 2817 bp, Artificial Sequence
  derived and/or modified sequence
atggctacctgtattggtgaaaaaatcgaggactttaaggtggggaatcttttagggaagggcagctttgctggcgtgtaccgcgctgaatcaatacacacgggactcgaagtggcaataaagatgctttacaactactttgaagatagcaactacgtgtatctcgttttggaaatgtgccataacggtgagatgaacagataccttaagaaccgtgtgaaacccttttccgagaacgaggcccgacatttcatgcaccaaatcattacaggaatgctgtacctccattcgcatgggatcctgcacagggacctgacactgtccaatctgctacttactcgcaatatgaacatcaagatcgcagacttcggcttggccacccagttgaaaatgccccatgagaaacactataccttatgtgggactcctaactacatatctcctgagattgcaacgcggagcgctcacgggctggaaagcgacgtttggtccttgggctgtatgttctacactctgcttatagggaggcccccttttgataccgacacagtgaagaataccctgaacaaagtggtgttagctgactacgaaatgccatccttcttgtccatagaggctaaggaccttatacatcagttacttaggcgtaatcctgctgaccgtctgtcattatcttccgttctggatcaccctttcatgtccagaaatagctctaccaaaagtaaggacctgggcaccgtggaagattctatcgacagcggtcacgccaccatctctactgcgatcacagcgtccagctccacatcgattagcggatccctttttgataaaagacgccttctgatcggacagcctctgccaaataagatgactgtgttccctaaaaacaaatcctcaacagacttttcgagctcaggggacggtaatagcttctacacccagtggggtaatcaggagaccagcaacagcggccgaggcagagtgatccaggacgctgaggaacgcccacactccagatacctgcgacgcgcatactcttctgatcgcagcggcactagcaactcccagtcgcaggccaagacctacacaatggagcgctgccactcggccgaaatgctgagcgtttcaaagcggtcaggcggtggcgagaacgaggaaagatatagtcccacagacaacaatgcgaatatcttcaacttcttcaaagaaaaaacctcctcatcctcagggagctttgaaaggccagataataatcaggctctgtccaatcacctgtgtccaggcaagacgccttttccattcgcggatccgactccccaaacggaaaccgtgcaacaatggttcggaaacttgcaaataaacgcgcacctacgaaaaactaccgaatacgattccatttctcccaacagagattttcaaggacaccccgatctccaaaaggacacatctaagaatgcttggacagacaccaaggtgaaaaagaatagcgacgcctcagacaatgcccattcagtaaagcagcagaatactatgaagtacatgacagccctgcactctaaacccgaaatcattcagcaggagtgcgtgttcggctcagacccattgtcagagcagagcaagacacgaggcatggagccaccatgggggtaccagaatcgtacattacggagcatcacttctcctctggtggcccataggctgaagccaatacggcaaaagactaaaaaggctgtggtgtctatcctcgattctgaggaagtgtgcgtcgaattagtaaaagagtatgcctcacaggagtatgtgaaagaagtcctccagatctcctcagatggcaatacaatcacaatatactaccccaatggtggacgcggatttcccctggctgatagaccaccatcgcccacagacaacattagtcggtacagcttcgataacctaccagagaagtattggcggaaataccagtacgccagcagatttgtccaattggtacgatccaagagtcctaagatcacttactttactaggtacgccaagtgcattcttatggagaattctccaggcgctgacttcgaggtctggttctacgatggtgtgaaaattcacaagacggaggattttatccaggtgattgaaaagacagggaagtcttatacattaaagagcgaatctgaagtgaactctctgaaagaagagatcaagatgtacatggaccatgcaaatgagggccacagaatttgtctcgctctcgaatctatcataagcgaggaagagcgcaagacaagatccgccccattctttcccattataattggacggaagccaggctccacgtcatcccctaaagcactgtccccaccacctagtgtggactccaactatcctacaagagaaagagcctccttcaatagaatggtaatgcactccgctgccagccccactcaagccccaatactaaatcctagcatggtgactaacgaaggcctgggcttaactacgaccgcatcaggtacggatattagctccaactccttgaaggactgcctccccaagagtgctcagttactaaagagcgtgttcgtgaaaaatgttgggtgggccacccaactgacaagtggagctgtttgggttcaatttaacgatggatcccagttagtcgtacaagcaggagtgtcttctatatcttatacctcacccaacgggcagacaacacgctacggagagaacgagaaactgccagattatattaaacagaaattacagtgcctgagcagtattcttctgatgttttcaaaccccacacctaactttcactag

SEQ ID NO: 72941 - DNA, 3123 bp, Artificial Sequence
  derived and/or modified sequence
gattttcaaaatgggagcccagaggcaccgcccaggcctcggaaggtgtcagggagaactttccgtggtttcagcgtcgtcgcctggagcggcggtttagagagccgagcctgatgggcgccaaggccggctggctgcttggagcgctgcctcgaagggactgcgtgaaggaagctaatccggagaacccaggccagagcctggaaatatggcgacctgcatcggggagaagatcgaggattttaaagttggaaatctgcttggtaaaggatcatttgctggtgtctacagagctgagtccattcacactggtttggaagttgcaatcaaaatgctttataactattttgaagatagcaattatgtgtatctggtattagaaatgtgccataatggagaaatgaacaggtatctaaagaatagagtgaaacccttctcagaaaatgaagctcgacacttcatgcaccagatcatcacagggatgttgtatcttcattctcatggtatactacaccgggacctcacactttctaacctcctactgactcgtaatatgaacatcaagattgctgattttgggctggcaactcaactgaaaatgccacatgaaaagcactatacattatgtggaactcctaactacatttcaccagaaattgccactcgaagtgcacatggccttgaatctgatgtttggtccctgggctgtatgttttatacattacttatcgggagaccacccttcgacactgacacagtcaagaacacattaaataaagtagtattggcagattatgaaatgccatcttttttgtcaatagaggccaaggaccttattcaccagttacttcgtagaaatccagcagatcgtttaagtctgtcttcagtattggaccatccttttatgtcccgaaattcttcaacaaaaagtaaagatttaggaactgtggaagactcaattgatagtgggcatgccacaatttctactgcaattacagcttcttccagtaccagtataagtggtagtttatttgacaaaagaagacttttgattggtcagccactcccaaataaaatgactgtatttccaaagaataaaagttcaactgatttttcttcttcaggagatggaaacagtttttatactcagtggggaaatcaagaaaccagtaatagtggaaggggaagagtaattcaagatgcagaagaaaggccacattctcgataccttcgtagagcttattcctctgatagatctggcacttctaatagtcagtctcaagcaaaaacatatacaatggaacgatgtcactcagcagaaatgctttcagtgtccaaaagatcaggaggaggtgaaaatgaagagaggtactcacccacagacaacaatgccaacatttttaacttctttaaagaaaagacatccagtagttctggatcttttgaaagacctgataacaatcaagcactctccaatcatctttgtccaggaaaaactccttttccatttgcagacccgacacctcagactgaaaccgtacaacagtggtttgggaatctgcaaataaatgctcatttaagaaaaactactgaatatgacagcatcagcccaaaccgggacttccagggccatccagatttgcagaaggacacatcaaaaaatgcctggactgatacaaaagtcaaaaagaactctgatgcttctgataatgcacattctgtaaaacagcaaaataccatgaaatatatgactgcacttcacagtaaacctgagataatccaacaagaatgtgtttttggctcagatcctctttctgaacagagcaagactaggggtatggagccaccatggggttatcagaatcgtacattaagaagcattacatctccgttggttgctcacaggttaaaaccaatcagacagaaaaccaaaaaggctgtggtgagcatacttgattcagaggaggtgtgtgtggagcttgtaaaggagtatgcatctcaagaatatgtgaaagaagttcttcagatatctagtgatggaaatacgatcactatttattatccaaatggtggtagaggttttcctcttgctgatagaccaccctcacctactgacaacatcagtaggtacagctttgacaatttaccagaaaaatactggcgaaaatatcaatatgcttccaggtttgtacagcttgtaagatctaaatctcccaaaatcacttattttacaagatatgctaaatgcattttgatggagaattctcctggtgctgattttgaggtttggttttatgatggggtaaaaatacacaaaacagaagatttcattcaggtgattgaaaagacagggaagtcttacactttaaaaagtgaaagtgaagttaatagcttgaaagaggagataaaaatgtatatggaccatgctaatgagggtcatcgtatttgtttagcactggaatccataatttcagaagaggaaaggaaaactaggagtgctccctttttcccaataatcataggaagaaaacctggtagtactagttcacctaaggccttatcacctcctccttctgtggattcaaattacccaacgagagagagagcatctttcaacagaatggtcatgcatagtgctgcttctccaacacaggcaccaatccttaatccctctatggttacaaatgaaggacttggtcttacaactacagcttctggaacagacatctcttctaatagtctaaaagattgtcttcctaaatcagcacaacttttgaaatctgtttttgtgaaaaatgttggttgggctacacagttaactagtggagctgtgtgggttcagtttaatgatgggtcccagttggttgtgcaggcaggagtgtcttctatcagttatacctcaccaaatggtcaaacaactaggtatggagaaaatgaaaaattaccagactacatcaaacagaaattacagtgtctgtcttccatccttttgatgttttctaatccgactcctaattttcattgattaaaactcctttcagacatataagtttaataaataacttttttgttgactttcaagtaaagtgattttttttaatttaacataaagtcttcagaaag

SEQ ID NO: 72942 - DNA, 2790 bp, Artificial Sequence
  derived and/or modified sequence
atgatcgacaagaaggccatgtacaaggccggcatggtgcagagagtgcagaacgaggtgaagatccactgccagctgaagcaccccagcatcctggagctgtacaactacttcgaggacagcaactacgtgtacctggtgctggagatgtgccacaacggcgagatgaacagatacctgaagaacagagtgaagcccttcagcgagaacgaggccagacacttcatgcaccagatcatcaccggcatgctgtacctgcacagccacggcatcctgcacagagacctgaccctgagcaacctgctgctgaccagaaacatgaacatcaagatcgccgacttcggcctggccacccagctgaagatgccccacgagaagcactacaccctgtgcggcacccccaactacatcagccccgagatcgccaccagaagcgcccacggcctggagagcgacgtgtggagcctgggctgcatgttctacaccctgctgatcggcagaccccccttcgacaccgacaccgtgaagaacaccctgaacaaggtggtgctggccgactacgagatgcccagcttcctgagcatcgaggccaaggacctgatccaccagctgctgagaagaaaccccgccgacagactgagcctgagcagcgtgctggaccaccccttcatgagcagaaacagcagcaccaagagcaaggacctgggcaccgtggaggacagcatcgacagcggccacgccaccatcagcaccgccatcaccgccagcagcagcaccagcatcagcggcagcctgttcgacaagagaagactgctgatcggccagcccctgcccaacaagatgaccgtgttccccaagaacaagagcagcaccgacttcagcagcagcggcgacggcaacagcttctacacccagtggggcaaccaggagaccagcaacagcggcagaggcagagtgatccaggacgccgaggagagaccccacagcagatacctgagaagagcctacagcagcgacagaagcggcaccagcaacagccagagccaggccaagacctacaccatggagagatgccacagcgccgagatgctgagcgtgagcaagagaagcggcggcggcgagaacgaggagagatacagccccaccgacaacaacgccaacatcttcaacttcttcaaggagaagaccagcagcagcagcggcagcttcgagagacccgacaacaaccaggccctgagcaaccacctgtgccccggcaagacccccttccccttcgccgaccccaccccccagaccgagaccgtgcagcagtggttcggcaacctgcagatcaacgcccacctgagaaagaccaccgagtacgacagcatcagccccaacagagacttccagggccaccccgacctgcagaaggacaccagcaagaacgcctggaccgacaccaaggtgaagaagaacagcgacgccagcgacaacgcccacagcgtgaagcagcagaacaccatgaagtacatgaccgccctgcacagcaagcccgagatcatccagcaggagtgcgtgttcggcagcgaccccctgagcgagcagagcaagaccagaggcatggagcccccctggggctaccagaacagaaccctgagaagcatcaccagccccctggtggcccacagactgaagcccatcagacagaagaccaagaaggccgtggtgagcatcctggacagcgaggaggtgtgcgtggagctggtgaaggagtacgccagccaggagtacgtgaaggaggtgctgcagatcagcagcgacggcaacaccatcaccatctactaccccaacggcggcagaggcttccccctggccgacagaccccccagccccaccgacaacatcagcagatacagcttcgacaacctgcccgagaagtactggagaaagtaccagtacgccagcagattcgtgcagctggtgagaagcaagagccccaagatcacctacttcaccagatacgccaagtgcatcctgatggagaacagccccggcgccgacttcgaggtgtggttctacgacggcgtgaagatccacaagaccgaggacttcatccaggtgatcgagaagaccggcaagagctacaccctgaagagcgagagcgaggtgaacagcctgaaggaggagatcaagatgtacatggaccacgccaacgagggccacagaatctgcctggccctggagagcatcatcagcgaggaggagagaaagaccagaagcgcccccttcttccccatcatcatcggcagaaagcccggcagcaccagcagccccaaggccctgagccccccccccagcgtggacagcaactaccccaccagagagagagccagcttcaacagaatggtgatgcacagcgccgccagccccacccaggcccccatcctgaaccccagcatggtgaccaacgagggcctgggcctgaccaccaccgccagcggcaccgacatcagcagcaacagcctgaaggactgcctgcccaagagcgcccagctgctgaagagcgtgttcgtgaagaacgtgggctgggccacccagctgaccagcggcgccgtgtgggtgcagttcaacgacggcagccagctggtggtgcaggccggcgtgagcagcatcagctacaccagccccaacggccagaccaccagatacggcgagaacgagaagctgcccgactacatcaagcagaagctgcagtgcctgagcagcatcctgctgatgttcagcaaccccacccccaacttccactag

SEQ ID NO: 72943 - DNA, 2790 bp, Artificial Sequence
  derived and/or modified sequence
atgattgacaaaaaagctatgtataaagctgggatggtccagcgagttcagaatgaggtgaagattcactgtcagcttaagcatccctccattctggaattgtataattattttgaggattcaaactacgtataccttgtcctcgagatgtgccacaatggagaaatgaaccggtaccttaagaatagggtgaaaccgttcagcgagaatgaagctcgtcactttatgcaccagatcattacagggatgttatatctgcatagccatggaatccttcaccgcgacctaacattaagtaacctcctgcttacgcgcaatatgaatataaaaatcgcggacttcggcttggccacacagcttaagatgccccatgaaaagcactatacactttgtggaacccccaactacatttctccagagattgcgacaagaagcgcacatggtctggaatcagacgtctggagcctaggctgtatgttttacacactactaatcggaaggcctccttttgacaccgatacggtgaagaacactttaaataaagttgtgctggccgactacgagatgccctccttcctgtctatagaagccaaagacctgattcaccaactgctacgccgcaatcccgctgacagactctcgttgtcctctgttctcgatcacccctttatgagtcgcaacagttccaccaaaagcaaggatctggggactgtggaggacagtatcgactctggtcacgctacaatcagcacagccataaccgcatcgtcttctaccagcatttcaggctctctgttcgacaaaaggcgcctgctaattggccagccacttccaaacaaaatgacggtgttccccaaaaacaagtcttccaccgacttttcgtccagcggcgatggcaattctttttacacgcagtggggtaaccaggaaacctccaattctggcagggggcgtgtcatacaggatgcggaagagcgcccgcactctagatacctcagacgagcatactcaagcgatagatcagggacatctaactcccagtcgcaggccaaaacatatacaatggaacggtgccactcagcggagatgttgagcgtgtccaagaggtcagggggcggcgaaaacgaggagcgttactcaccaactgacaacaatgctaatattttcaattttttcaaggaaaaaacgtcctcttcaagcgggtccttcgaacggccagacaacaatcaggctctctcgaaccacctgtgtcccggtaagactccctttccttttgccgacccgactccgcagaccgagacagtgcagcaatggtttggcaacctgcagatcaatgcccacctgcggaaaaccactgagtacgattccatttcgcccaaccgggattttcaaggacatcctgacctacagaaggacacatcaaagaatgcctggaccgacaccaaggtcaaaaaaaattcggatgcgtctgacaacgcacactcagtgaaacagcaaaacaccatgaaatacatgactgctttacattccaagccagagatcattcagcaggagtgcgtatttgggagcgaccccctcagcgagcagagcaagacccgcggcatggaaccaccctggggctatcagaataggaccctgcgatcgattacctctccactggttgctcaccggcttaaaccgataagacagaagactaaaaaggccgtggtctccatactggatagtgaggaggtatgcgtggagctggttaaagagtacgcctcccaggaatacgtgaaagaagttctccagatcagctctgatggtaacacaatcaccatttattatcccaacggcggacggggttttcctctcgctgaccgaccaccttcacctactgacaacatcagccgttattcctttgacaatctgcccgaaaaatattggcggaaatatcagtatgcgagtcgttttgttcagctcgtgagatctaagtctccaaaaataacatactttacgcgctatgcaaagtgtatcctcatggaaaattcacccggggcagatttcgaagtctggttctatgacggggtaaagatacataaaacagaggattttattcaggtcatagagaagaccgggaagtcctacactctgaaaagcgaatccgaggtgaactctctgaaagaagaaattaagatgtacatggaccacgctaacgaagggcatagaatctgccttgctcttgaaagcattatctccgaagaagaaagaaaaacaagatctgccccttttttcccgattattatcggaaggaagcccggcagtacctctagcccaaaagcgctgagcccacctccctcagtagactcaaactaccccacacgagaacgtgcatccttcaaccgcatggtgatgcatagtgccgcaagtcccacgcaagcccctatactcaatccgagtatggtgacaaacgagggactcggtctgactaccacagcaagcgggactgacatttcctccaactcactgaaggactgcctcccaaaaagcgcccagctcctcaaaagcgtgtttgtgaagaacgtggggtgggccacccagctgacatccggagctgtttgggtgcagttcaatgatggttctcagctcgtcgtgcaagcaggtgtcagttccatatcttataccagtccaaacgggcagacgacgcggtatggtgaaaacgaaaagctgcctgattacattaagcagaagctgcagtgtctgtcgagcattctgctgatgttctctaaccctacacctaacttccactag

SEQ ID NO: 72944 - DNA, 2790 bp, Artificial Sequence
  derived and/or modified sequence
atgattgacaagaaggccatgtacaaggccggcatggtgcagagggtgcagaatgaggtgaagatccactgccagctgaagcaccccagcatcctggagctgtacaactactttgaggacagcaactacgtgtacctggtgctggagatgtgccacaatggagagatgaaccgctacctgaagaacagagtgaagcccttctctgaaaatgaggcccggcacttcatgcaccagatcatcaccggcatgctgtacctgcacagccacggcatcctgcaccgggacctgaccctgagcaacctgctgctgaccaggaacatgaacatcaagattgctgactttggcctggccacccagctgaagatgcctcatgagaagcactacaccctgtgtggcacccccaactacatcagccctgagatcgccaccaggtctgcccacggcctggagagtgatgtgtggagcctgggctgcatgttctacaccctgctgattggccggcccccatttgacacagacacagtgaagaacaccctgaacaaggtggtgctggccgactatgagatgcccagcttcctgagcattgaggccaaggacctgatccaccagctgctgcggagaaatcctgctgaccggctgagcctgagctctgtgctggaccaccccttcatgagcaggaacagcagcaccaagagcaaggacctgggcaccgtggaggacagcattgacagcggccacgccaccatcagcacagccatcacagccagcagcagcaccagcatcagcggcagcctgtttgacaagaggcggctgctgattggccagcccctgcccaacaagatgaccgtcttccccaagaacaagagcagcacagacttcagcagcagtggagatggcaacagcttctacacccagtggggcaaccaggagaccagcaacagcggccggggccgggtcatccaggatgctgaggagcggccccacagccgctacctgcggcgggcctacagcagtgacagaagtggcaccagcaacagccagagccaggccaagacctacaccatggagcgctgccacagcgctgagatgctgtctgtgtccaagaggtctgggggcggggagaatgaggagcgctacagccccacagacaacaatgccaacatcttcaacttcttcaaggagaagaccagcagcagcagcggcagctttgagaggccagacaacaaccaggccctgagcaaccacctgtgccctgggaagacccccttcccctttgctgaccccaccccccagacagagaccgtgcagcagtggtttggaaacctgcagatcaatgcccacctgaggaagaccacagaatatgacagcatcagccccaacagagacttccagggccacccagacctgcagaaggacaccagcaagaatgcctggacagacaccaaggtgaagaagaacagtgatgccagtgacaatgcccacagcgtgaagcagcagaacaccatgaagtacatgacagccctgcacagcaagccagagatcatccagcaggagtgtgtgtttggaagtgaccccctgtctgagcagagcaagacccggggcatggagcccccctggggctaccagaacagaaccctgcggagcatcaccagccccctggtggcccaccggctgaagcccatccggcagaagaccaagaaggctgtggtgtccatcctggacagcgaggaggtgtgtgtggagctggtgaaggagtatgccagccaggagtatgtgaaggaggtgctgcagatcagcagtgatggcaacaccatcaccatctactacccaaatggaggccggggcttccccctggccgaccggccccccagccccacagacaacatcagccgctacagctttgacaacctgcctgagaagtactggaggaagtaccagtatgccagcagatttgtgcagctggtgcgcagcaagagccccaagatcacctacttcaccaggtatgccaagtgcatcctgatggagaacagccctggagctgactttgaggtgtggttctatgatggagtgaagatccacaagacagaggacttcatccaggtgattgagaagacaggcaagagctacaccctgaagtctgagagcgaggtgaacagcctgaaggaggagatcaagatgtacatggaccacgccaatgaaggccaccgcatctgcctggccctggagagcatcatcagcgaggaggagaggaagaccaggtctgcccccttcttccccatcatcatcggcaggaagccaggcagcaccagcagccccaaggccctgagccccccacccagcgtggacagcaactaccccacccgggagcgggccagcttcaacaggatggtgatgcacagcgctgccagccccacccaggcccccatcctgaaccccagcatggtgaccaatgaaggcctgggcctgaccaccacagccagcggcacagacatcagcagcaacagcctgaaggactgcctgcccaagagcgcccagctgctgaagtctgtgtttgtgaagaatgtgggctgggccacccagctgaccagcggggctgtgtgggtgcagttcaatgatggcagccagctggtggtgcaggccggcgtgagcagcatctcctacaccagccccaacggccagaccaccaggtatggagaaaatgagaagctgcctgactacatcaagcagaagctgcagtgcctgagcagcatcctgctgatgttcagcaaccccacccccaacttccactag

SEQ ID NO: 72945 - DNA, 2790 bp, Artificial Sequence
  derived and/or modified sequence
atgatcgacaagaaggccatgtacaaggccggcatggtgcagcgggtgcagaacgaagtcaagatccattgtcagctgaagcacccgtctatcctcgaactttacaactatttcgaggacagcaactacgtatatctagtgctagagatgtgtcacaacggcgaaatgaatagatacttgaaaaatcgagtgaaaccctttagcgagaacgaagccagacacttcatgcatcagatcataaccggtatgctgtatcttcactcgcacggcatcctgcacagggatcttactctgtccaatctgctcctcacccgcaatatgaatatcaagattgctgacttcgggcttgctactcagctaaaaatgccacacgagaagcattataccttatgtggcacaccaaactacattagtcctgagattgcaacaagatccgcacacggacttgaatccgacgtttggtccctcggctgcatgttttataccctacttatcggtcgccccccttttgacacagacactgttaagaataccctgaataaggttgtcttggccgattatgagatgccatcgttcctgtccatcgaggctaaggacctaattcatcagttgctccgccggaatccagcagaccggctgtccctaagctccgttcttgatcatccattcatgtcccgcaacagcagcaccaagtctaaagatctggggactgttgaggatagcattgattctggccatgccactatctctaccgccatcaccgcatcttcttcaacaagcatctcaggatccctctttgacaagcgaagacttcttatcgggcagccgctgccaaacaaaatgaccgtctttcctaaaaataaaagcagcaccgatttttcttcaagcggggacggcaactccttttatacacagtggggaaatcaagagaccagtaattcaggccgcggaagagtgatacaggacgctgaggaacggccccacagccgatatctgagacgcgcctacagttcagatagatctggaacttctaactcacagtcacaagctaaaacgtatacgatggaaagatgtcacagtgccgagatgttaagcgtttccaaacgcagcgggggaggcgaaaacgaggagaggtactcaccaaccgataacaacgcaaacattttcaactttttcaaggaaaaaaccagcagttcctctggcagttttgagcgcccagataacaatcaggccctgtctaatcacctctgtcctggcaaaacaccgtttcctttcgctgacccaacaccacagaccgaaaccgtgcagcagtggtttggcaatttgcagatcaatgcccatcttcgcaagaccacagagtacgacagtatcagccctaacagagatttccaaggacatcctgatctccagaaggacacgtcaaagaacgcttggacggatacgaaggtgaagaagaacagcgacgctagcgataacgcacatagtgtaaaacaacagaacacaatgaaatacatgacggccttacacagtaaacctgaaataattcagcaggaatgcgtgtttggcagcgacccgctttcggagcagtctaagaccaggggcatggaacctccttggggctatcagaataggacactacgatctatcactagtccccttgtcgcccataggctcaagccgatcaggcagaaaaccaaaaaggcagtggtctccattcttgattctgaagaagtctgcgtcgagctagtcaaagaatatgcctcccaggagtacgtcaaagaagtgctgcagatctcttctgatggtaacaccattaccatctattatcctaatgggggccggggttttccactggcagatagaccaccatctcctactgacaacatcagccgctattcattcgacaatctgcctgaaaagtactggcgtaaataccagtacgcaagcaggttcgtgcaattagtgaggtccaaaagccccaagatcacatacttcacacggtatgcaaaatgtatactgatggagaacagtcctggcgccgactttgaagtgtggttttatgatggagtgaaaatccataagactgaagatttcatacaggttattgagaagactggcaagagttacacactaaagagtgaaagcgaagtcaactccctcaaggaggagataaagatgtatatggatcatgctaacgaggggcatcgcatctgtctcgccctggagagcattatttctgaggaagagaggaagaccagatccgcaccattttttcctatcattatagggagaaagccaggatctacatcctcacccaaggccttgtcccctcctccatccgttgacagcaactaccccaccagagagagggccagctttaatcggatggtcatgcacagcgctgcgtctccgactcaagcacctattctgaatcctagcatggtaaccaacgaaggacttggcctgaccacaaccgccagcggcacggatatctccagtaattctttaaaggattgtctgcccaagagtgcccagctgctgaagagcgtatttgtcaagaatgtcgggtgggcgacccaacttacttctggggctgtgtgggtccaattcaacgacggttcacagctggttgtacaggccggtgtcagtagtataagctacaccagtcccaacggccagaccactagatacggcgagaacgaaaaactcccagattatataaagcagaagctgcagtgcttaagtagcattttgctaatgttttcaaaccctacaccgaactttcattag

SEQ ID NO: 72946 - DNA, 2790 bp, Artificial Sequence
  derived and/or modified sequence
atgatcgacaagaaagcaatgtataaggcgggaatggttcagagagtgcagaatgaagtcaaaatacactgccagctgaaacacccctccatccttgagctctataattactttgaggattcgaactacgtgtatttggttctcgaaatgtgtcacaacggcgagatgaatcgatatctcaaaaaccgcgtgaagccttttagcgagaatgaggcaaggcacttcatgcaccaaatcataactgggatgctgtatctccactcacatgggatactgcaccgcgatctgaccctgagcaatctcttactgacaaggaacatgaacatcaagatagcggactttggccttgccacccagctgaagatgccacacgaaaagcactacactctgtgtgggacccccaattacatttctcctgagatcgctacacggtccgcccacgggctggagtcggacgtttggagtctgggctgcatgttttacaccctgctcatagggagaccaccctttgataccgatactgtcaagaacactctgaataaggtggtgctggcagattatgagatgccaagctttctgtcaatcgaagccaaggatctgatccatcagcttttgaggcgtaacccagccgaccgacttagtctgtcttcagtattggaccacccattcatgagccggaattcttcaaccaagtccaaggatctcggtacggtagaggactccatcgattcagggcacgcgactatttccacagctataactgcatctagctccacgagcatcagcgggagcctatttgacaagcgaagacttcttattggccagccgcttcccaacaagatgacggtcttccctaagaacaagtcaagtacagacttctcttcttccggggacggaaattccttctatactcagtgggggaaccaagagactagcaatagtgggagagggagagtgatacaggacgctgaggaaaggccccattcccgatacctgcgaagggcttactcatctgatcggtctggtacttctaactctcaatcccaggcgaagacctataccatggaacgttgccattccgctgagatgttatcagtatctaagcggtctgggggtggagagaacgaagagagatatagccccactgataataatgctaacatctttaattttttcaaagaaaaaacatcgtcctctagcggtagtttcgagcgaccagacaataaccaggccctttccaaccacctttgtcccggtaagaccccatttcccttcgctgatccaacccctcaaactgagacagtgcagcaatggtttgggaacctccaaataaacgcccaccttcgcaaaactacagagtatgacagtataagtcctaatcgcgatttccaggggcaccccgacctacaaaaagatacatccaaaaatgcatggactgacactaaggtgaagaagaactccgacgcctcggacaatgctcacagcgtcaagcagcaaaacacaatgaaatacatgacggccctccattccaaaccagaaatcatccagcaggagtgtgtgttcggatccgacccactctcagaacagtcaaagacccgtggtatggagcctccttgggggtaccaaaacaggaccttgcgttccatcaccagtccattggtggctcataggcttaaaccaatccgtcaaaagaccaaaaaagccgtggtgagtatccttgatagcgaagaagtgtgcgtggagctcgtcaaggaatacgcgtcccaggaatatgtgaaagaagtgcttcaaatatcaagcgacggaaacaccatcactatctactatcctaacggcggtcggggtttcccgctggccgatcggccaccatcacctaccgataatatatctagatattcgttcgataatctgccagagaaatattggcgtaaataccaatacgcctcccgttttgtccaactcgtccgctccaagtcacccaagattacctacttcactcggtatgcaaaatgcattctcatggagaacagtccaggggctgatttcgaagtgtggttttacgatggggttaaaatccataaaaccgaggacttcattcaagtgatcgagaaaaccggcaagtcatacacccttaagtccgagagtgaagttaacagtttgaaggaggagattaaaatgtacatggatcacgctaacgaagggcaccgaatctgtctggctcttgagtccatcatctcagaagaggagcggaagacgcgatctgctcccttttttcctataattattgggcgaaagccaggctctacaagtagtcccaaggcactgagcccccctcccagtgtagatagcaattacccgactagagagcgggcaagtttcaacagaatggtgatgcatagtgcggctagtcccacacaggcccctattctcaaccccagtatggtgactaatgaaggattgggactcactaccaccgcatccgggacagacatctcgagcaattccctgaaggattgtctgcctaagagtgcacagcttttgaagtccgtcttcgtgaaaaacgtggggtgggccactcagttaacttctggcgctgtgtgggtccagttcaatgatgggagccagcttgtggtgcaggcgggagttagctcaatcagctacacatcccccaacggacagaccacgagatacggagaaaatgaaaaacttccagactacattaaacagaaacttcagtgtctgagctccattcttttgatgttcagcaacccaacccctaactttcattag

SEQ ID NO: 72947 - protein, 124 aa, Artificial Sequence
  derived and/or modified sequence
MAEQSDEAVKYYTLEEIQKHNHSKSTWLILHHKVYDLTKFLEEHPGGEEVLREQAGGDATENFEDVGHSTDAREMSKTFIIGELHPETLITTIDSSSSWWTNWVIPAISAVAVALMYRLYMAED

SEQ ID NO: 72948 - DNA, 375 bp, Artificial Sequence
  derived and/or modified sequence
atggccgagcagagcgacgaagctgtcaaatattatactcttgaagagattcagaagcacaatcactctaaatctacatggctgattctgcaccataaagtatatgacttgacaaagtttctcgaggaacatcccggaggcgaggaagtcctgcgggaacaggctggtggtgatgctaccgagaattttgaagacgtgggccactcaacggatgcacgcgaaatgtctaagacctttattatcggagagctgcaccccgagacactcatcactacaattgacagctcctcctcttggtggaccaattgggtcatacctgccatctcagcagtggccgtggcgctgatgtatagactgtatatggcagaggactag

SEQ ID NO: 72949 - DNA, 375 bp, Artificial Sequence
  derived and/or modified sequence
atggccgagcagagtgatgaggccgtgaagtactacaccctggaggagatccagaagcacaaccacagcaagagcacctggctgatcctgcaccacaaggtgtatgacctgaccaagttcctggaggagcaccctggaggagaggaggtgctgcgggagcaggccggaggagatgccacagaaaattttgaagatgtgggccacagcacagatgcccgggagatgagcaagaccttcatcattggagagctgcaccctgagaccctcatcaccaccatcgacagcagcagctcctggtggaccaactgggtgatcccagccatctctgctgtggccgtggccctgatgtaccgcctgtacatggctgaagattag

SEQ ID NO: 72950 - DNA, 375 bp, Artificial Sequence
  derived and/or modified sequence
atggccgagcagagcgacgaggccgtgaagtactacaccctggaggagatccagaagcacaatcactctaagagtacctggctgatcctccatcacaaagtttacgatcttacgaagtttctggaggaacatcccggaggggaggaagtcctcagagagcaggcagggggcgacgcaacagagaacttcgaggatgtggggcactccacagacgctcgagaaatgtcgaagacttttatcattggcgagctgcaccccgaaacgttgatcacgaccatcgatagctcgtccagttggtggacgaattgggtgatacccgccatcagtgctgtggcagttgcgctgatgtatagactgtatatggcggaggattag

SEQ ID NO: 72951 - DNA, 375 bp, Artificial Sequence
  derived and/or modified sequence
atggcagaacagtccgatgaagctgtgaaatattatacccttgaagagatacagaaacacaatcatagtaaaagcacatggctcattctccaccataaagtgtacgacctgaccaagtttttagaagaacaccctggtggcgaagaagttctgcgggagcaagcaggcggtgatgcgactgaaaactttgaagatgttgggcatagcaccgacgcacgagagatgagcaaaacatttatcattggagagctgcaccccgaaaccctgatcactactatcgactcaagctcctcttggtggacaaactgggtgatcccagccattagtgccgtagccgtcgcactgatgtatcggctgtacatggccgaggattag

SEQ ID NO: 72952 - DNA, 777 bp, Artificial Sequence
  derived and/or modified sequence
cccagtggggttcccggcgcggggaatgtcccgggtggagctggctgagtcgcgcgctctgctccacccgacggggctgtgtgtgctgggcctggctcgcggcgaaccgagatggcagagcagtcggacgaggccgtgaagtactacaccctagaggagattcagaagcacaaccacagcaagagcacctggctgatcctgcaccacaaggtgtacgatttgaccaaatttctggaagagcatcctggtggggaagaagttttaagggaacaagctggaggtgacgctactgagaactttgaggatgtcgggcactctacagatgccagggaaatgtccaaaacattcatcattggggagctccatccagaaactcttatcactactattgattctagttccagttggtggaccaactgggtgatccctgccatctctgcagtggccgtcgccttgatgtatcgcctatacatggcagaggactgaacacctcctcagaagtcagcgcaggaagagcctgctttggacacgggagaaaagaagccattgctaactacttcaactgacagaaaccttcacttgaaaacaatgattttaatatatctctttctttttcttccgacattagaaacaaaacaaaaagaactgtcctttctgcgctcaaatttttcgagtgtgcctttttattcatctactttattttgatgtttccttaatgtgtaatttacttattataagcatgatcttttaaaaatatatttggcttttaaagtatgc

SEQ ID NO: 72953 - DNA, 375 bp, Artificial Sequence
  derived and/or modified sequence
atggccgagcagagcgacgaggccgtgaagtactacaccctggaggagatccagaagcacaaccacagcaagagcacctggctgatcctgcaccacaaggtgtacgacctgaccaagttcctggaggagcaccccggcggcgaggaggtgctgagagagcaggccggcggcgacgccaccgagaacttcgaggacgtgggccacagcaccgacgccagagagatgagcaagaccttcatcatcggcgagctgcaccccgagaccctgatcaccaccatcgacagcagcagcagctggtggaccaactgggtgatccccgccatcagcgccgtggccgtggccctgatgtacagactgtacatggccgaggactag

SEQ ID NO: 72954 - protein, 315 aa, Artificial Sequence
  derived and/or modified sequence
MAAPSCGGDRKARLTPSLPHESTANPETPNSTISREASTQSSSAATSQGYILPEGKIMPNTVFVGGIDVRMDETEIRSFFARYGSVKEVKIITDRTGVSKGYGFVSFFNDVDVQKIVESQINFHGKKLKLGPAIRKQNLCAYHVQPRPLVFNHPPPPQFQNVWTNPNTETYMQPTTTMNPITQYVQAYPTYPNSPVQVITGYQLPVYNYQMPPQWPVGEQRSYVVPPAYSAVNYHCNEVDPGAEVVPNECSVHEATPPSGNGPQKKSVDRSIQTVVSCLFNPENRLRNSVVTQDDYFKDKRVHHFRRSRAMLKSV

SEQ ID NO: 72955 - DNA, 948 bp, Artificial Sequence
  derived and/or modified sequence
atggcagcacccagttgtggaggtgaccggaaggccagactgactccctccctgccccatgagtccactgccaatcctgagacccccaattccaccatctccagagaggcctcaactcagtccagctccgccgcaacttcccaagggtatattctacctgagggcaagattatgcccaacacagtgtttgtaggcggaatcgatgttaggatggacgagacggagataagatccttttttgctcggtatggttcagtcaaggaagttaagattattaccgatagaactggtgtctccaaaggatatggtttcgtgagcttcttcaatgacgtcgatgtgcagaagattgtagaatcccaaatcaactttcacggtaagaaactgaagttgggtccggccattagaaagcagaacctgtgcgcctaccatgtgcaacctaggccactggtgttcaatcacccgccgccaccgcagttccaaaatgtttggacaaatccaaacaccgaaacttatatgcagcccactacgaccatgaaccccattacacagtacgtgcaggcctatcccacgtacccgaactctcccgtgcaggttatcacagggtaccagctgccagtttacaattaccagatgccgccgcagtggcctgttggggaacaacgaagctacgtggtacctccagcctatagcgccgtgaactaccactgcaatgaagtggaccccggcgccgaagtcgtacccaatgagtgttctgtgcatgaggcgacccccccctctggaaacgggccacaaaagaagagcgtggatcgctccattcaaactgtggtgtcgtgtctgtttaatccagagaaccgcttgcggaatagtgtggtcactcaggacgattatttcaaggacaagcgggtgcatcattttcgtcgaagcagagcaatgttgaagagcgtgtag

SEQ ID NO: 72956 - DNA, 948 bp, Artificial Sequence
  derived and/or modified sequence
atggccgcccccagctgtggcggggacaggaaggcccggctgacccccagcctgccccatgagagcacagccaaccctgagacccccaacagcaccatcagccgggaggccagcacccagagcagcagcgctgccaccagccagggctacatcctgcctgagggcaagatcatgcccaacacagtgtttgtgggcggcattgatgtgaggatggatgaaacagagatccgctccttctttgcccgctatggctctgtgaaggaggtgaagatcatcacagacagaactggagtgtccaagggctacggctttgtgtccttcttcaatgatgtggatgtgcagaagatcgtggagagccagatcaacttccacggcaagaagctgaagctgggccctgccatcaggaagcagaacctgtgtgcctaccacgtgcagccccggcccctggtgttcaaccaccccccaccaccccagttccagaatgtgtggaccaaccccaacacagagacctacatgcagcccaccaccaccatgaaccccatcacccagtatgtgcaggcctaccccacctaccccaacagccctgtgcaggtgatcaccggctaccagctgcctgtgtacaactaccagatgccaccccagtggcctgtgggggagcagaggagctatgtggtgcccccagcctacagcgctgtgaactaccactgcaatgaggtggaccctggagctgaggtggtgcccaatgaatgttctgtgcatgaggccaccccaccttctggaaatggcccccagaagaagtctgtggacaggagcatccagacagtggtgtcctgcctcttcaacccagaaaatcggctgagaaattctgtggtgacccaggatgactacttcaaggacaagagggtgcaccacttccgccgcagccgggccatgctgaagtctgtgtag

SEQ ID NO: 72957 - DNA, 948 bp, Artificial Sequence
  derived and/or modified sequence
atggccgcccccagctgcggcggcgaccggaaggcccggctgaccccatcattaccccacgagtccacagcaaatccggagaccccaaacagcacgatcagtcgggaggcctccacccagtcctctagtgctgccactagtcaaggctacatcctccccgaaggcaagattatgcccaacacagtttttgtgggaggaatcgatgtacgcatggacgagaccgaaattcgatcttttttcgcaaggtatggaagcgtgaaagaggtaaaaatcatcacagatagaaccggtgtctctaaaggctatggctttgtttccttttttaatgacgtggatgtccaaaagatcgtcgagagtcaaatcaacttccacggcaagaaactgaagctagggcccgcaatccgcaaacagaatctgtgtgcctaccacgtgcaacccagacccctggtgtttaaccatccgcccccccctcaatttcaaaatgtgtggaccaacccgaacacagagacctatatgcagcctaccaccactatgaacccgatcactcagtacgtgcaggcgtaccccacatacccaaactccccagttcaggtgattaccgggtaccagttgcccgtgtacaactaccagatgcctccacaatggcctgtgggagagcagagatcatacgtggtgccgccagcctactctgcagtgaactatcattgcaatgaagtggatcccggggctgaggtggtaccgaacgaatgtagtgtgcatgaagcgacaccccccagtggcaacggaccacagaaaaaatctgtcgaccggagcattcagactgtggtctcctgcctctttaaccccgagaacaggttgcgaaacagcgtcgtgacccaagacgactatttcaaagataagcgagtccaccacttccgtcgctccagagccatgctgaagtcagtgtag

SEQ ID NO: 72958 - DNA, 948 bp, Artificial Sequence
  derived and/or modified sequence
atggcagcaccctcctgtgggggtgatagaaaggccaggctgacaccttccctcccccacgagtcgactgctaatcccgagacacccaatagcacgatttctagggaggcaagcactcagtcttcctcagctgccacaagtcagggttacattctgcccgaggggaaaattatgccgaatactgttttcgttggtggcattgacgtgcgaatggacgaaacagagatccgttcttttttcgcccgatacggatcagtcaaggaggtgaaaatcatcaccgatagaacaggagtgagtaaaggctacggatttgtgtctttcttcaatgatgttgatgtccagaagattgtagagagccaaatcaactttcatggcaaaaaactaaagctgggtcccgctattcgcaagcagaacctgtgcgcctatcatgtccaaccgaggccattagtgttcaatcaccccccacctccccagttccagaacgtgtggacgaatcctaacactgagacctacatgcagcccactacaaccatgaatcccattactcagtatgttcaggcataccctacttatcctaactccccagttcaggtcatcaccgggtatcagctaccagtgtataactaccagatgccgccacaatggcccgtgggagaacagaggtcttatgtcgtgcctccagcgtacagcgctgtcaactatcattgcaatgaagtggacccgggtgctgaagtggtgcccaacgagtgctcagtgcacgaggctacccctccatccgggaacggaccacagaaaaagtcagttgataggtctattcagaccgtcgtctcctgcttgtttaaccccgaaaacaggctgcggaactctgtcgtgactcaggatgattattttaaagacaagcgcgtgcaccacttccgaagaagccgagctatgctgaaatccgtgtag

SEQ ID NO: 72959 - DNA, 948 bp, Artificial Sequence
  derived and/or modified sequence
atggccgcccccagctgcggcggcgacagaaaggccagactgacccccagcctgccccacgagagcaccgccaaccccgagacccccaacagcaccatcagcagagaggccagcacccagagcagcagcgccgccaccagccagggctacatcctgcccgagggcaagatcatgcccaacaccgtgttcgtgggcggcatcgacgtgagaatggacgagaccgagatcagaagcttcttcgccagatacggcagcgtgaaggaggtgaagatcatcaccgacagaaccggcgtgagcaagggctacggcttcgtgagcttcttcaacgacgtggacgtgcagaagatcgtggagagccagatcaacttccacggcaagaagctgaagctgggccccgccatcagaaagcagaacctgtgcgcctaccacgtgcagcccagacccctggtgttcaaccaccccccccccccccagttccagaacgtgtggaccaaccccaacaccgagacctacatgcagcccaccaccaccatgaaccccatcacccagtacgtgcaggcctaccccacctaccccaacagccccgtgcaggtgatcaccggctaccagctgcccgtgtacaactaccagatgcccccccagtggcccgtgggcgagcagagaagctacgtggtgccccccgcctacagcgccgtgaactaccactgcaacgaggtggaccccggcgccgaggtggtgcccaacgagtgcagcgtgcacgaggccaccccccccagcggcaacggcccccagaagaagagcgtggacagaagcatccagaccgtggtgagctgcctgttcaaccccgagaacagactgagaaacagcgtggtgacccaggacgactacttcaaggacaagagagtgcaccacttcagaagaagcagagccatgctgaagagcgtgtag

SEQ ID NO: 72960 - DNA, 3104 bp, Artificial Sequence
  derived and/or modified sequence
actcccacgcgcctccgccccgccagcctcatttctggcgcgctctccccgtggctccgcaagatggcggcgggcctgctgagggacttgccttcttaaacttcgagggccggagcttccttaggaagtggttccctcctggtccctgtacttggtggggtgggcggggttcgtgggggcctcagcgtggggtgtggggcgtcctgaaggcatggccctgtagctgagggggctgggccggaagtgcctctggtcccctcgcgcctgtcagctgcgggggacttgctgatggcggctccctcgtgtggcggcgacagaaaagctcgcctgacgccatctttgccgcacgagtctactgcaaatcctgaaactccaaactcaaccatctccagagaggccagcacccagtcctcatcagctgcaaccagccaaggctatattttaccagaaggcaaaatcatgccaaacactgtttttgttggaggaattgatgttaggatggatgaaactgagattagaagcttctttgctagatatggttcagtgaaagaagtgaagataatcactgatcgaactggtgtgtccaaaggctatggatttgtttcattttttaatgacgtggatgtgcagaagatagtagaatcacagataaatttccatggtaaaaagctgaagctgggccctgcaatcaggaaacaaaatttatgtgcttatcatgtgcagccacgtcctttggtttttaatcatcctcctccaccacagtttcagaatgtctggactaatccaaacactgaaacttatatgcagcccacaaccacgatgaatcctataactcagtatgttcaggcatatcctacttacccaaattcaccagttcaggtcatcactggatatcagttgcctgtatataattatcagatgccaccacagtggcctgttggggagcaaaggagctatgttgtacctccggcttattcagctgttaactaccactgtaatgaagttgatccaggagctgaagttgtgccaaatgaatgttcagttcatgaagctactccaccctctggaaatggcccacaaaagaaatctgtggaccgaagcatacaaacggtggtatcttgtctgtttaatccagagaacagactgagaaactctgttgttactcaagatgactacttcaaggataaaagagtgcatcactttagaagaagtcgggcaatgcttaaatctgtttgatcctcctggcttatctagttacatgggaagttgctggttttgaatattaagctaaaaggtttccactattatagaaattctgaattttggtaaatcacactcaaactttgtgtataagttgtattattagactctctagttttatcttaaactgttcttcattagatgtttatttagaaactggttctgtgttgaaatatagttgaaagtaaaaaaataattgagactgaaagaaactaagatttatctgcaaggattttttaaaaattggcattttaagtgtttaaaagcaaatactgattttcaaaaaaatgtttttaaaaacctattttgaaaggtcagaattttgttggtctgaatacaaacatttcacttctccaacaagtacctgtgaacagtacagtatttacagtattgagctttgcatttatgatttctccagaaatttaccacaaaagcaaaatttttaaaactgcatttttaatcagtggaactcaatatatagttagctttattgaagtcttcttatctaaacccagcaaaacagattcaaagcgaacagtccaatcagtgggtcatatgtttattcaaaatattttatcttttagctagaatccacacatatatatcctatttgattagggtagtaattaggataactaaaattctgggcctaattttttaaagaatccaagacaaactaaactttactaggtacataagcttctcaatgagtcaccattcttcttttttgtaaaaacttttttctttgaaatgctaaacttggctgtatgtcaaattgtgcaaaatattggtattaaagaatgctgcaacttttttatgtctcttagaggttaatcagagtatctgaagggaattgtttttataaaaacattgaaatattagttacttgctataaatagatttagtctgttatatttccttttgtaaagtaaaatatgtccagaagagtcaaagtagttagttttggttatttctaaaccacaaaagttgtttaataagtatatcttaagaatgtgctagagttaaaagttagcattgtttctagattagctggtgtcttcattttacattgtgacaaacagctagagcatcagagcccttttgctataccacagtctttcgtttccagcctttgtcactagtctttgaggaggtttgctcctagaactggtgatataaagaatgaaagtagctgtatgagcagagcagttcaagggccaaaccctggaacggtagcaatgggatataatacctttctaagggaaaaagttgtatcagtaccatttgatctgccatggacatgagtttaaagcggctttctggcccttctttcagtgacttcttccctaaaatgtagaaattctaacttaatgtagttactgtgagccatattactagtgccccctagggtctataattccttaaaattttcattctgaatctgaaggagagagtcttttaactttagaattcccaagagggctttattacacctcagaaattgaaagcactatgaatttgtccatttaaaaatgatctgtagtttttttggtgctataacattctgacacatatcattctgtgattaaatctccagcttactataaatgatatctatattctaaagagctacttctaattattccaatatgaccttaaggaaaagtaagggaataaatttttgtctttgttggagtgaagcatttaaaagagtaagggtaaaaaagataaagtcctgaacctttcaaaatggaaaattaattctaaacttagaaatatgcttctgcctattgctgatactgtctttgcatacatgaataaaaataaagtttttttcttcaaaa

SEQ ID NO: 72961 - DNA, 636 bp, Artificial Sequence
  derived and/or modified sequence
atggacttcctgaagcccaccgccgactgccccgacgccgtgcccagcagcgccgagaccggcggcaccaactacctggcccccggcggcctgagcgacagccagctgctgctggagcccggcgacagaagccactggtgcgtggtggcctactgggaggagaagaccagagtgggcagactgtactgcgtgcaggagcccagcctggacatcttctacgacctgccccagggcaacggcttctgcctgggccagctgaacagcgacaacaagagccagctggtgcagaaggtgagaagcaagatcggctgcggcatccagctgaccagagaggtggacggcgtgtgggtgtacaacagaagcagctaccccatcttcatcaagagcgccaccctggacaaccccgacagcagaaccctgctggtgcacaaggtgttccccggcttcagcatcaaggccttcgactacgagaaggcctacagcctgcagagacccaacgaccacgagttcatgcagcagccctggaccggcttcaccgtgcagatcagcttcgtgaagggctggggccagtgctacaccagacagttcatcagcagctgcccctgctggctggaggtgatcttcaacagcagatag

SEQ ID NO: 72962 - DNA, 636 bp, Artificial Sequence
  derived and/or modified sequence
atggacttccttaaaccaaccgcagactgccccgatgccgtgccatcctcagccgagaccgggggaacgaactacctggcacccggtggtctgtcggattcccagctactgctcgaaccaggggacagatctcactggtgtgtcgtcgcctattgggaggagaagactagggtgggtcggctgtattgcgtccaggagccatcactggacatcttttatgaccttccgcaggggaacggcttctgccttgggcaactgaattccgataacaagagccagttggtgcagaaagtcaggagtaaaatcggttgcggaattcagcttactagagaagttgacggagtgtgggtttacaataggtcttcttaccccatcttcatcaagtctgctaccttggataaccctgattctcgaactctgctcgtgcataaagtgttcccgggattctcaatcaaggcttttgactacgaaaaagcctattccctgcaaagacctaatgatcacgaatttatgcagcagccctggaccgggtttacagttcagatcagcttcgttaaagggtggggacagtgttacacaaggcagttcatctcttcctgcccctgttggctcgaagttatctttaattcccgctag

SEQ ID NO: 72963 - DNA, 636 bp, Artificial Sequence
  derived and/or modified sequence
atggactttctcaagccaacagccgattgcccagacgccgtgccctcttctgccgagactggcggtacaaattatctagctccaggtgggctatcagactcccagcttctgctggaacccggagatcggagccactggtgtgtagtcgcctactgggaggaaaaaacccgtgtggggagactctactgcgttcaggagccttccctggatatcttttacgatttaccccagggcaatggattctgtttggggcagctcaacagtgataacaagtcacagcttgttcaaaaggtgcggtccaaaatcggctgcggaatccagctgacaagagaggtggacggtgtttgggtgtacaatagaagctcataccctatttttattaaaagcgcaacattggacaacccggattcacgtactctgctggtgcataaagtattccctggtttctctatcaaagccttcgactatgagaaggcttacagcttacagcggcccaatgaccatgaatttatgcagcagccctggacgggcttcactgtgcagatctctttcgtgaaaggctggggccagtgttatacaaggcagtttatcagcagctgcccctgttggcttgaagtcatattcaactctagatag

SEQ ID NO: 72964 - DNA, 636 bp, Artificial Sequence
  derived and/or modified sequence
atggacttcctgaagcccacagctgactgcccagatgctgtgcccagcagcgctgagaccggcggcaccaactacctggcccctgggggcctgagtgacagccagctgctgctggagcccggggacaggagccactggtgtgtggtggcctactgggaggagaagaccagggtgggccgcctgtactgtgtgcaggagcccagcctggacatcttctatgacctgccccagggcaatggcttctgcctgggccagctgaacagcgacaacaagagccagctggtgcagaaggtgcgcagcaagattggctgcggcatccagctgacccgggaggtggatggagtgtgggtgtacaacagaagcagctaccccatcttcatcaagagcgccaccctggacaacccagacagcaggaccctgctggtgcacaaggtgtttcctggcttcagcatcaaggcctttgattatgagaaggcctacagcctgcagaggcccaatgaccacgagttcatgcagcagccctggacaggcttcaccgtgcagatcagctttgtgaagggctggggccagtgctacacccggcagttcatcagcagctgcccctgctggctggaggtgatcttcaacagcaggtag

SEQ ID NO: 72965 - DNA, 636 bp, Artificial Sequence
  derived and/or modified sequence
atggacttcctgaagcccaccgccgactgccccgacgccgtgccctccagcgctgagactggtggtacgaattacctggctcccggcggactcagcgactcccagcttttgctagagcctggggatagatcccattggtgtgtagtcgcatactgggaggaaaagacccgtgtgggtcgcctctattgcgtgcaagaaccatcattagatatattttacgatttgccgcagggcaacggattctgtctgggtcagctgaactccgataataaatcccagttagtgcagaaagtaagaagtaagataggctgtgggatccagttaaccagagaagtggatggggtttgggtttacaacagatccagctatccaatcttcatcaagagcgccacactggacaatcccgacagcagaactcttttggtgcataaagttttcccaggtttttctataaaagcctttgactacgagaaagcctattccctgcagaggcccaacgaccacgagtttatgcagcagccctggaccgggttcactgtccagatcagctttgttaaaggatggggccagtgttataccagacagtttatttcttcttgcccgtgttggttagaggtgatctttaattctcgttag

SEQ ID NO: 72966 - DNA, 636 bp, Artificial Sequence
  derived and/or modified sequence
atggacttcctgaagcccaccgccgactgccccgacgccgtgccctcttctgccgagaccggtggcactaactacctagcgcctggggggctgtccgatagccagctgttgctggaaccaggcgatcggagtcactggtgcgtcgtagcatattgggaggaaaagacgcgggtgggtcggctttattgcgtacaggaaccatcactcgacatcttttacgacctgccacagggtaacggcttttgtctcggccagttgaatagcgataacaaatcccagctggtgcaaaaagtcaggtccaagatcggctgcggcatacagcttacccgagaggtagatggtgtttgggtgtataatcggtcctcctaccccatatttatcaaaagcgcaacactggacaaccctgacagtcggacactcctggtgcacaaagtattcccgggcttctccataaaggcgttcgactacgaaaaggcctacagcttacagcgaccaaatgaccacgaattcatgcagcagccctggaccggatttacggtgcagattagtttcgtaaaggggtggggccagtgttacacccggcagtttattagcagttgcccttgctggctcgaggtgatctttaattcccgctag

SEQ ID NO: 72967 - DNA, 636 bp, Artificial Sequence
  derived and/or modified sequence
atggatttcttgaaaccaaccgccgattgtccggatgccgtcccaagtagtgcagaaacgggcggtacaaactatctcgcacctggcggtttgtccgattcccaactgctgctggaaccaggcgacaggtcacactggtgcgttgtggcttattgggaggaaaagactcgcgtgggaaggctgtactgtgtgcaggaaccctcgctggacattttctatgacctgccacagggaaacggcttttgtttaggccagctgaacagtgacaacaaatctcagctcgtgcagaaagtcaggtctaaaattggatgcggcattcagcttacacgagaagtcgacggggtgtgggtgtacaatcgatcttcctaccccatctttatcaagagtgctaccttggataaccctgattctcggaccctcctggtccataaagtttttcctggtttctctatcaaggccttcgactacgaaaaagcctacagtcttcagcgaccaaatgaccacgagttcatgcagcagccgtggacaggctttaccgtgcaaattagcttcgttaaagggtgggggcagtgttacacgagacagtttatcagtagctgcccttgctggcttgaggtgatcttcaatagtcggtag

SEQ ID NO: 72968 - DNA, 636 bp, Artificial Sequence
  derived and/or modified sequence
atggattttcttaagccgacagccgattgccccgatgctgtcccttcctctgctgagacgggaggaacaaattatttagcccctggcggtctctcggactcacagcttctgttagaacccggtgatcgctctcactggtgcgttgtcgcatactgggaagagaagacccgagtgggtagactctactgcgtgcaggaaccctccctggacattttttacgatctgccgcagggtaacggcttttgcctgggacaactgaatagcgataacaaatcgcagctcgtacagaaagtgcgttcgaagataggatgcggcatacaactgactcgcgaagtggacggcgtgtgggtatacaatagatcttcttacccgatcttcatcaaatccgccactctcgacaaccctgacagccggacgctcctggtgcacaaagtgttcccagggttttctatcaaggccttcgactacgagaaagcctatagtctccagcggccaaacgaccatgagtttatgcagcagccctggaccggctttaccgtgcaaataagcttcgttaaaggatgggggcagtgctacacacggcagttcatctcatcttgtccctgttggctcgaagttatcttcaattcccgatag

SEQ ID NO: 72969 - protein, 303 aa, Artificial Sequence
  derived and/or modified sequence
MGILSFLPVLATESDWADCKSPQPWGHMLLWTAVLFLAAPPKAVLKLEPQWINVLQEDSVTLTCRGTHSPESDSIQWFHNGNLIPTHTQPSYRFKANNNDSGEYTCQTGQTSLSDPVHLTVLSEWLVLQTPHLEFQEGETIVLRCHSWKDKPLVKVTFFQNGKSKKFSRSDPNFSIPQANHSHSGDYHCTGNIGYTLYSSKPVTITVQAPSSSPMGIIVAVVTGIAVAAIVAAVVALIYCRKKRISALPGYPECREMGETLPEKPANPTNPDEADKVGAENTITYSLLMHPDALEEPDDQNRI

SEQ ID NO: 72970 - DNA, 2136 bp, Artificial Sequence
  derived and/or modified sequence
agaacatttctttttcacttcccctttcagactccagaatttgtttgccctctagggtagaatccgccaagctttgagagaaggctgtgactgctgtgctctgggcgccagctcgctccagggagtgatgggaatcctgtcattcttacctgtccttgccactgagagtgactgggctgactgcaagtccccccagccttggggtcatatgcttctgtggacagctgtgctattcctggcagctcccccaaaggctgtgctgaaactcgagccccagtggatcaacgtgctccaggaggactctgtgactctgacatgccgggggactcacagccctgagagcgactccattcagtggttccacaatgggaatctcattcccacccacacgcagcccagctacaggttcaaggccaacaacaatgacagcggggagtacacgtgccagactggccagaccagcctcagcgaccctgtgcatctgactgtgctttctgagtggctggtgctccagacccctcacctggagttccaggagggagaaaccatcgtgctgaggtgccacagctggaaggacaagcctctggtcaaggtcacattcttccagaatggaaaatccaagaaattttcccgttcggatcccaacttctccatcccacaagcaaaccacagtcacagtggtgattaccactgcacaggaaacataggctacacgctgtactcatccaagcctgtgaccatcactgtccaagctcccagctcttcaccgatggggatcattgtggctgtggtcactgggattgctgtagcggccattgttgctgctgtagtggccttgatctactgcaggaaaaagcggatttcagctctcccaggataccctgagtgcagggaaatgggagagaccctccctgagaaaccagccaatcccactaatcctgatgaggctgacaaagttggggctgagaacacaatcacctattcacttctcatgcacccggatgctctggaagagcctgatgaccagaaccgtatttagtctccattgtcttgcattgggatttgagaagaaaatcagagagggaagatctggtatttcctggcctaaattccccttggggaggacagggagatgctgcagttccaaaagagaaggtttcttccagagtcatctacctgagtcctgaagctccctgtcctgaaagccacagacaatatggtcccaaataaccgactgcaccttctgtgcttcagctcttcttgacatcaaggctcttccgttccacatccacacagccaatccaattaatcaaaccactgttattaacagataatagcaacttgggaaatgcttatgttacaggttacgtgagaacaatcatgtaaatctatatgatttcagaaatgttaaaatagactaacctctaccagcacattaaaagtgattgtttctgggtgataaaattattgatgatttttattttctttatttttctataaagatcatatattacttttataataaaacattataaaaacaacattctgtttaccttttcaaggctgtattggttggagtgtagactgaactgcctggggtctgtttctcttcagtgatgagactcttaggaaggcaggaatggataggatagggggaggagaggagagatggggatttagaatgtagagtgagtgccccttttcttaaaactgaatacagtcacgcaccacataatgatgtttagttcaacaacagactgcatatatgatggtgatcccataaaattataataccatatttctattgtaccttttctattcctatgtttagatatatgagtacttaccattgtgttacaattgcctaaagtattcagtacagtagcatgctgtacaggtttgtagcctaggggcaataggctatacgctacagcctaggtgtgtagtaggccacaccatttaggtttgtataagtacctgctatgatgttcacacaacaaaattgcctgcatttctcaaaatgtatccccatatttcaacaatgcatgactgtactcttctgccaatgaccttgtattcttgtttccatgtcttcttctctttcctcctatggcaaataaaacactgttttgcaac

SEQ ID NO: 72971 - DNA, 1472 bp, Artificial Sequence
  derived and/or modified sequence
gccctctagggtagaatccgccaagctttgagagaaggctgtgactgctgtgctctgggcgccagctcgctccagggagtgatgggaatcctgtcattcttacctgtccttgccactgagagtgactgggctgactgcaagtccccccagccttggggtcatatgcttctgtggacagctgtgctattcctggcagctcccccaaaggctgtgctgaaactcgagccccagtggatcaacgtgctccaggaggactctgtgactctgacatgccgggggactcacagccctgagagcgactccattcagtggttccacaatgggaatctcattcccacccacacgcagcccagctacaggttcaaggccaacaacaatgacagcggggagtacacgtgccagactggccagaccagcctcagcgaccctgtgcatctgactgtgctttctgagtggctggtgctccagacccctcacctggagttccaggagggagaaaccatcgtgctgaggtgccacagctggaaggacaagcctctggtcaaggtcacattcttccagaatggaaaatccaagaaattttcccgttcggatcccaacttctccatcccacaagcaaaccacagtcacagtggtgattaccactgcacaggaaacataggctacacgctgtactcatccaagcctgtgaccatcactgtccaagctcccagctcttcaccgatggggatcattgtggctgtggtcactgggattgctgtagcggccattgttgctgctgtagtggccttgatctactgcaggaaaaagcggatttcagctctcccaggataccctgagtgcagggaaatgggagagaccctccctgagaaaccagccaatcccactaatcctgatgaggctgacaaagttggggctgagaacacaatcacctattcacttctcatgcacccggatgctctggaagagcctgatgaccagaaccgtatttagtctccattgtcttgcattgggatttgagaagaaaatcagagagggaagatctggtatttcctggcctaaattccccttggggaggacagggagatgctgcagttccaaaagagaaggtttcttccagagtcatctacctgagtcctgaagctccctgtcctgaaagccacagacaatatggtcccaaataaccgactgcaccttctgtgcttcagctcttcttgacatcaaggctcttccgttccacatccacacagccaatccaattaatcaaaccactgttattaacagataatagcaacttgggaaatgcttatgttacaggttacgtgagaacaatcatgtaaatctatatgatttcagaaatgttaaaatagactaacctctaccagcacattaaaagtgattgtttctgggtgataaaattattgatgatttttattttctttatttttctataaagatcatatattactttt

SEQ ID NO: 72972 - DNA, 912 bp, Artificial Sequence
  derived and/or modified sequence
atggggattctcagcttcctccccgtgctagcgaccgaatctgactgggcagattgtaaatcccctcagccttgggggcacatgcttttgtggacagcagtgttgtttcttgctgccccccctaaggctgtcctgaagctcgaaccacagtggataaatgtgctccaagaggacagcgtgactctcacatgtcgggggacacatagccccgaaagtgactcgattcagtggttccacaatggaaatttaatcccaacgcatacacaaccttcataccgcttcaaagccaataataatgacagcggcgaatacacgtgtcagactggccagacatcgttaagcgatccagttcatttgactgtgttgtcagagtggttggtgttgcagacaccccatcttgagttccaggagggagagacaatagtgcttaggtgccactcatggaaagataaaccattggtgaaagttactttctttcagaatgggaaatctaagaagttctcacgttccgatcccaacttttccataccacaggccaaccactctcacagtggagattaccactgcacgggcaatatcggatacacactctacagctcaaagccggtgactataactgtccaggccccatcctcctctcccatgggcatcatcgtggctgtggtgaccggcatagccgtggccgcgatagtagcagccgtcgtagctcttatctactgtaggaagaagaggatcagcgcattacccggctatcctgagtgccgcgaaatgggagagacactgcctgagaagcccgcaaaccctactaatccagatgaggcagacaaagtgggcgccgaaaataccattacatactctcttctcatgcatcccgatgccctggaggaacctgacgaccagaacaggatttag

SEQ ID NO: 72973 - DNA, 912 bp, Artificial Sequence
  derived and/or modified sequence
atgggcatactgtcctttcttcccgtcctggccacagagtccgattgggcagattgcaaatcacctcagccatggggccacatgttactttggactgcagtgttatttctcgccgctccaccgaaggcggttctcaaattggaacctcagtggataaatgttttgcaggaggacagtgtcactctcacatgtcggggcacccatagcccagaatcagatagcattcagtggtttcacaatggaaacctgatcccgacgcatactcagccttcttacaggttcaaggcgaacaacaatgattctggggagtacacttgccagacaggccagaccagtctgtctgaccccgtgcacttaacagttctgagcgaatggctggtgttgcaaacacctcacctggagttccaggaaggagaaactattgtgctgcggtgtcatagttggaaagacaagccactcgtgaaagtgaccttcttccagaacgggaaatcaaagaaattttcacgaagcgatcctaatttttctatcccccaggctaaccatagtcactccggagactatcactgcactggtaatattgggtacaccctctatagctccaaaccggtcacgatcactgtgcaagcgccatcaagcagccccatggggattatcgttgccgttgttacgggaatcgcagtcgcggccatcgtagcagcagtggttgcattaatatactgccgtaaaaaaagaatctcagccctgcccggatacccggaatgccgggaaatgggcgaaacactccctgagaaaccggccaaccctacgaatcccgatgaagctgacaaagttggggccgagaatacaattacgtatagtctcttaatgcatccggacgcccttgaggagcctgacgaccagaaccgtatttag

SEQ ID NO: 72974 - DNA, 912 bp, Artificial Sequence
  derived and/or modified sequence
atgggcatcctgtccttcctgcctgtgctggccacagaaagtgactgggccgactgcaagagcccccagccctggggccacatgctgctgtggacagctgtgctcttcctggccgccccacccaaggctgtgctgaagctggagccccagtggatcaacgtgctgcaggaggacagcgtgaccctgacctgccggggcacccacagccctgagagtgacagcatccagtggttccacaacggcaacctgatccccacccacacccagcccagctaccgcttcaaggccaacaacaatgattctggagagtacacctgccagacaggccagaccagcctgagtgaccctgtgcacctgactgtgctgtctgagtggctggtgctgcagaccccccacctggagttccaggagggggagaccatcgtgctgcgctgccacagctggaaggacaagcccctggtgaaggtgaccttcttccagaatggcaagagcaagaagttcagcagaagtgaccccaacttcagcatcccccaggccaaccacagccacagcggggactaccactgcaccggcaacatcggctacaccctgtacagcagcaagcctgtgaccatcaccgtgcaggcccccagcagcagccccatgggcatcatcgtggccgtggtgactggaattgctgtggccgccatcgtggccgctgtggtggccctgatctactgcaggaagaagaggatcagcgccctgcccggctacccagaatgtcgggagatgggagagaccctgcctgagaagccagccaaccccaccaacccagatgaggccgacaaggtgggcgctgagaacaccatcacctacagcctgctgatgcacccagatgccctggaggagccagatgaccagaaccgcatctag

SEQ ID NO: 72975 - DNA, 912 bp, Artificial Sequence
  derived and/or modified sequence
atgggcatcctgagcttcctgcccgtgctggccaccgagagcgactgggcagattgtaaaagtccacagccctggggacatatgttgctgtggacagccgtgcttttcctggccgctccccccaaggcagttctaaaactagagccccagtggatcaacgtgctccaggaggacagtgtgactctgacatgtcgtggaacgcactcacccgaatccgattctatccagtggtttcataacggaaacctgataccaacccacactcagcctagctatcgttttaaggcgaacaacaatgacagcggcgaatatacgtgtcagaccggtcaaacctctctcagtgatcccgtgcatttaactgtcctgagcgaatggctggtcctgcaaaccccgcatctggagttccaagagggggaaactatagtcctacgctgtcacagctggaaggataaaccattggttaaagtgaccttcttccagaacggaaaatctaaaaaattttccagatccgacccaaatttctccattccacaggctaatcactctcactcgggagactaccactgcaccggtaacattggttacacgctctactcatccaaacccgtgaccatcacggtacaggctccatcttcttccccaatgggcattatcgtcgctgtcgtgaccgggatcgctgtcgccgccatcgttgctgcagttgtggcccttatttattgccggaagaaaaggattagcgcactgcctgggtaccctgaatgcagggaaatgggtgagacactgccagaaaaaccggccaatcctaccaatccggacgaggctgataaggtcggtgcagagaatacgattacctactcccttctgatgcacccggacgccctcgaggaacctgatgaccagaatcggatatag

SEQ ID NO: 72976 - DNA, 912 bp, Artificial Sequence
  derived and/or modified sequence
atgggcatcctgagcttcctgcccgtgctggccaccgagagcgactgggctgactgcaaaagtccccagccgtggggccacatgctcctgtggacggccgtcctgttcctggccgcccctcctaaagctgtgctgaagctggagccccagtggatcaacgtgctgcaggaagatagcgttaccctcacatgtaggggaacacacagtcctgagtcagacagcattcagtggttccacaatggaaatctgattccaactcatactcagccctcttataggttcaaggctaacaataacgatagcggcgaatacacttgtcagacgggacaaacttccctgagcgatcccgtgcacctgaccgtgctgtccgaatggctggtgctgcaaaccccccacctggaattccaggagggcgagaccattgtcctaagatgtcacagttggaaagacaagcccttagtaaaagtgaccttttttcagaatgggaagagcaaaaagttctcaagatctgaccccaactttagtattccccaagcgaaccacagccatagtggggactaccactgtaccggcaacatcggatatacactttattcctctaaacccgtgacaatcactgtacaggcaccaagcagctctcccatgggaataattgttgccgtggttaccggcatagctgtcgccgctattgttgccgccgtggtggctctgatttattgcagaaagaagaggatcagtgccctgccgggttacccagaatgtcgggagatgggggaaaccctgccagagaaaccagctaatcccacgaatcccgatgaggccgacaaggtcggagctgaaaacacaatcacgtattctttactgatgcacccagatgccctggaagagccagatgatcagaatagaatctag

SEQ ID NO: 72977 - DNA, 912 bp, Artificial Sequence
  derived and/or modified sequence
atgggtattctgagttttttgccagtgctggccaccgaaagtgactgggcagactgtaaatccccgcagccatggggccatatgctgctgtggactgccgtcctctttttggctgcccctcccaaggcagtgttaaagctggagccgcaatggatcaacgttcttcaggaggactctgtaacgttgacttgccggggtacacacagccctgaaagtgattcaatccagtggttccacaacgggaatctgattcccacgcacacgcaaccttcctataggttcaaagcaaataataatgactcgggggagtacacctgtcagactggccaaaccagcctctccgacccagtccacctgaccgtattgtctgagtggctcgtactgcagacccctcacctggagttccaggagggggagacaattgtcctgcggtgtcacagctggaaagacaagcccctcgtaaaggtaaccttttttcaaaacggcaaatcaaaaaagttctctagatctgaccctaacttttccattcctcaggcaaatcattctcacagcggagattatcattgtactgggaatatcgggtacactttatacagcagcaagcctgttactattactgtacaggcaccgagcagttcaccaatgggaattattgtggccgtggtaacagggatcgcagtggctgctatagtcgccgctgtcgtcgccctgatctactgccgcaaaaaaaggatttctgcgttaccaggatatccggagtgtagagaaatgggcgagacccttcccgagaaacccgcaaaccccacaaatcccgacgaggccgacaaagtgggcgctgagaatacgattacatacagtctcctgatgcaccccgacgctttggaggagcccgacgaccagaatcgtatctag

SEQ ID NO: 72978 - DNA, 912 bp, Artificial Sequence
  derived and/or modified sequence
atgggaatcctgagctttttacccgttctggcaactgaatctgattgggcagactgcaaaagccctcagccatggggacacatgctgctgtggaccgccgtgcttttcctggctgccccacccaaggccgtgctgaagctggaaccccaatggatcaacgttcttcaggaggactctgtgactctcacctgtagagggacccatagtcccgaaagtgacagcatccaatggtttcacaacggcaatctgatcccaacgcatactcagccatcctaccggtttaaagccaacaataacgattctggcgagtatacctgtcagaccggacaaacctccctgagcgaccctgtgcacctcacagtcctgtctgagtggctcgtgcttcagactccgcatttggagttccaggagggcgagaccatcgtcctgcggtgccattcttggaaggacaaaccgctggtaaaggtgaccttcttccagaacgggaagtccaagaagttctcaaggtcagatccaaatttctccataccacaggcaaatcatagccacagtggcgattatcattgcaccggtaatatcggatacactctgtatagtagcaagccagttaccatcacggtgcaggcacccagcagttcccccatgggtattatagtcgccgtagtcacaggtattgctgtagccgctatcgtggccgcagtcgttgcactgatatattgcagaaagaagagaatcagcgctctgcccggttatccagagtgccgggaaatgggcgagacgcttccagaaaagcctgctaatcctaccaatccagacgaagcagataaggtgggcgctgaaaacactatcacttattctctgctgatgcatccagatgccttggaagagccagacgaccagaaccgaatttag

SEQ ID NO: 72979 - DNA, 912 bp, Artificial Sequence
  derived and/or modified sequence
atgggcatcctgagcttcctgcccgtgctggccaccgagagcgactgggccgactgcaagagcccccagccctggggccacatgctgctgtggaccgccgtgctgttcctggccgccccccccaaggccgtgctgaagctggagccccagtggatcaacgtgctgcaggaggacagcgtgaccctgacctgcagaggcacccacagccccgagagcgacagcatccagtggttccacaacggcaacctgatccccacccacacccagcccagctacagattcaaggccaacaacaacgacagcggcgagtacacctgccagaccggccagaccagcctgagcgaccccgtgcacctgaccgtgctgagcgagtggctggtgctgcagaccccccacctggagttccaggagggcgagaccatcgtgctgagatgccacagctggaaggacaagcccctggtgaaggtgaccttcttccagaacggcaagagcaagaagttcagcagaagcgaccccaacttcagcatcccccaggccaaccacagccacagcggcgactaccactgcaccggcaacatcggctacaccctgtacagcagcaagcccgtgaccatcaccgtgcaggcccccagcagcagccccatgggcatcatcgtggccgtggtgaccggcatcgccgtggccgccatcgtggccgccgtggtggccctgatctactgcagaaagaagagaatcagcgccctgcccggctaccccgagtgcagagagatgggcgagaccctgcccgagaagcccgccaaccccaccaaccccgacgaggccgacaaggtgggcgccgagaacaccatcacctacagcctgctgatgcaccccgacgccctggaggagcccgacgaccagaacagaatctag

SEQ ID NO: 72980 - protein, 890 aa, Artificial Sequence
  derived and/or modified sequence
MSAEASARPLRVGSRVEVIGKGHRGTVAYVGATLFATGKWVGVILDEAKGKNDGTVQGRKYFTCDEGHGIFVRQSQIQVFEDGADTTSPETPDSSASKVLKREGTDTTAKTSKLPTRPASTGVAGASSSLGPSGSASAGELSSSEPSTPAQTPLAAPIIPTPVLTSPGAVPPLPSPSKEEEGLRAQVRDLEEKLETLRLKRAEDKAKLKELEKHKIQLEQVQEWKSKMQEQQADLQRRLKEARKEAKEALEAKERYMEEMADTADAIEMATLDKEMAEERAESLQQEVEALKERVDELTTDLEILKAEIEEKGSDGAASSYQLKQLEEQNARLKDALVRMRDLSSSEKQEHVKLQKLMEKKNQELEVVRQQRERLQEELSQAESTIDELKEQVDAALGAEEMVEMLTDRNLNLEEKVRELRETVGDLEAMNEMNDELQENARETELELREQLDMAGARVREAQKRVEAAQETVADYQQTIKKYRQLTAHLQDVNRELTNQQEASVERQQQPPPETFDFKIKFAETKAHAKAIEMELRQMEVAQANRHMSLLTAFMPDSFLRPGGDHDCVLVLLLMPRLICKAELIRKQAQEKFELSENCSERPGLRGAAGEQLSFAAGLVYSLSLLQATLHRYEHALSQCSVDVYKKVGSLYPEMSAHERSLDFLIELLHKDQLDETVNVEPLTKAIKYYQHLYSIHLAEQPEDCTMQLADHIKFTQSALDCMSVEVGRLRAFLQGGQEATDIALLLRDLETSCSDIRQFCKKIRRRMPGTDAPGIPAALAFGPQVSDTLLDCRKHLTWVVAVLQEVAAAAAQLIAPLAENEGLLVAALEELAFKASEQVGLDGWVEGVGRVSDQCGAFTSALGSCRSMGPPPAAPMSVCASHATSSSVP

SEQ ID NO: 72981 - DNA, 2673 bp, Artificial Sequence
  derived and/or modified sequence
atgtctgctgaggctagcgctcggcccctcagggttggctcccgcgtggaggtcattgggaagggtcaccgtggaaccgtcgcttatgttggcgcaacactgtttgccactgggaaatgggtaggagtcattcttgatgaggcaaagggtaaaaatgacggaacagtccagggacggaagtattttacttgcgacgaaggacacggaatatttgtgcggcagtcccagatccaagtttttgaagacggggccgacacaacatctccagagactcccgattcatctgcaagtaaagtgttgaagcgggagggtaccgatacaactgcaaagacgagcaagctccctacccgcccagctagtacaggcgtcgcaggggcctcttcctctctgggaccctcaggctccgccagcgccggagaacttagctcctctgagcctagcacccctgctcagaccccccttgctgcccctatcattcctacacctgtgctcacctcacctggtgctgtgccgccgctgcccagcccttctaaggaagaggagggattgcgagctcaagtacgggatctggaggagaagctcgaaacccttcggctcaagagagcagaggacaaagctaagttgaaggaactggagaagcacaagattcagctggagcaggttcaagagtggaagtccaaaatgcaggagcagcaagcagacctgcagcggcggctgaaagaggctagaaaagaggccaaagaggccctcgaagctaaagaaaggtacatggaggaaatggccgatacagctgatgccatcgaaatggcgacactggataaggaaatggcagaagagagagcagagtcccttcaacaggaggtggaggctctcaaagaacgcgtcgatgagcttacaacggatctggaaatccttaaggcagagatcgaagagaaaggatccgacggcgccgcatcttcttaccaactaaaacaacttgaagagcagaacgctcgactcaaagatgctctcgtgcggatgcgagatctcagcagcagcgagaaacaagaacacgtgaagctacaaaagttaatggaaaaaaagaaccaagagctggaggtcgtcaggcagcagcgtgaaaggctccaggaagagctgagccaagccgaatctactatagatgagttgaaagagcaggtcgacgccgccctgggtgcagaagaaatggttgaaatgctgacggataggaatctgaatttggaggaaaaagtgcgagaattgagagaaacagttggggacctagaggccatgaacgaaatgaatgacgaactgcaggagaacgcgcgagaaacggagcttgaacttagagagcagctggacatggccggtgctagggtccgggaggctcagaagagagttgaggccgcccaggagacagtggccgactatcagcaaaccatcaagaaatacagacagctcacagctcacctgcaggacgtgaatcgcgagctgaccaatcagcaagaagcttctgttgaaagacagcagcagccaccacccgaaacctttgactttaaaatcaaattcgccgaaaccaaggctcacgctaaggccatcgagatggaactgcgccagatggaggtcgcacaagccaataggcatatgtccttgctgactgcattcatgcccgacagctttcttagaccaggaggcgaccacgattgcgttttagttcttcttctgatgcccagactaatttgtaaggctgagctgatccggaaacaggcccaggagaagtttgaactgtctgaaaactgcagtgaacgaccgggcctgaggggtgccgccggcgagcagctgtctttcgcagccggccttgtatactccctctccctcctacaggccacactgcaccgatatgagcacgccctgagccaatgttcagtggatgtatataagaaggtaggaagtctgtaccccgagatgagtgctcatgaaaggtctctcgatttcctcatagaattgctccacaaagaccagttggatgaaaccgtgaacgtggaaccactgactaaagctataaaatattatcaacacctgtactccattcacctcgcggagcaacccgaggactgtaccatgcagctggctgaccacattaaatttacgcaatccgcattagactgtatgagcgtggaggtaggacggctgcgggcttttttacagggcggtcaagaagctaccgacattgcactgctgttaagggatctagaaacatcatgttctgacatcagacagttctgtaagaagattcgacgccgcatgccaggaacagatgcccccggcattcccgcagctctcgcctttggtccccaagtgagcgacacgctcttggattgccgaaaacaccttacatgggtagtggccgtcctgcaggaagtggccgcagcggctgcgcaattgatagcgcccttagccgagaatgaaggccttctggtggctgccctggaggaacttgcctttaaggccagtgagcaggtcgggcttgacggctgggtcgaaggtgtgggacgagtcagcgaccaatgcggagccttcacatctgccctcggctcatgcaggagtatgggcccccccccggccgccccaatgagtgtgtgcgcatctcatgcaacttccagctctgtgccttag

SEQ ID NO: 72982 - DNA, 3711 bp, Artificial Sequence
  derived and/or modified sequence
atgagcgcggaggcaagcgcaagacccctccgggttggctctcgagtagaggtgatcggcaaaggccatcgaggcactgttgcttatgtcggcgccaccctgttcgctaccgggaaatgggtcggtgtgatactcgatgaagcaaaagggaagaatgatggaacagttcaggggcgaaagtattttacgtgtgatgagggccacggaattttcgtgagacagagccagattcaggtctttgaggatggtgccgacaccacgagccctgagacccctgattcgtctgccagcaaagtgctaaagagagagggcacagataccaccgcaaaaacctccaaacttcctactcggcccgcctccacaggcgtggctggcgcctcgagcagcctggggccttccggctctgcatctgcaggagaactatcttcaagcgaaccatcgactccggcccaaaccccactggccgcacccatcattccgactccagttttgactagtcctggtgctgttccccccctgccttcacctagtaaagaagaggagggactaagggctcaggtgcgggatctcgaagagaagctggagactttgcgattaaagcgggcggaggataaggccaaattgaaagagctggaaaagcacaagatccagttggagcaggttcaagaatggaaatccaaaatgcaagagcagcaggcggacctgcaaaggagactaaaagaggctcgcaaagaagcaaaggaagccctggaggccaaggaacggtatatggaggagatggctgacactgccgatgccatcgagatggccacactcgataaggagatggcagaggagagagccgaatctctccagcaggaggtggaggctcttaaggaaagagtagacgagttgaccaccgatctggaaattcttaaagcagaaatagaagagaagggatcagatggagccgctagtagctaccaactgaaacagttagaggagcagaatgctcgcctgaaggacgcactcgtgaggatgcgggatctctcatcatcggagaagcaagaacacgtgaaactccagaagctgatggagaagaagaaccaggaacttgaagtggttagacagcagagggaaagactgcaggaggagcttagccaggcagagtcgacaattgacgagctcaaagagcaggttgacgccgcacttggtgccgaggagatggtcgagatgttaacagatcggaatctgaatctcgaggagaaagtgagagagctccgcgaaaccgttggggacttggaagctatgaatgaaatgaacgatgaactacaggaaaacgcccgcgagacagagctcgagttgcgtgaacagctcgacatggccggggctcgagttagggaggcacagaagagggtcgaggcagcgcaggaaacagtcgcggactaccagcagaccataaagaaataccgacagctcacagctcacctgcaggacgtcaacagggaactcaccaatcagcaggaggcctctgttgaaaggcagcagcagccgcccccagagactttcgatttcaagatcaaatttgcggaaacgaaagcccatgcaaaggccattgagatggaattacgacagatggaagtggcacaggccaaccgccatatgtctctactgactgccttcatgcctgactctttcctgagacccggaggggaccacgactgtgtactggtcttactccttatgccacggctaatttgtaaggccgaactcatccgaaaacaggctcaggagaagttcgagctgagcgaaaattgttctgagcgcccaggactgcgtggcgcggcaggggaacagctgtcattcgccgccgggcttgtgtacagcctttcactgttgcaagccaccctgcatcgctacgaacacgccctctcacagtgttccgtggacgtttataagaaggttggcagtctgtatcctgagatgagtgcgcatgagcgctccttggatttcctgatcgagctattgcacaaagaccagttggacgagaccgtcaatgtcgagcccctgactaaagctattaagtattaccagcacctgtacagtatccacctcgctgaacagccagaggactgtacgatgcagcttgccgaccacattaaattcactcagagcgccctggattgcatgtccgttgaagtcggtcgcctgcgggccttcctgcaggggggtcaggaagccacggacatcgccctcctgttgagggacctggagacctcctgctcagatatccgccagttttgcaaaaagattcgccggcgaatgccaggcacggacgcccctggcatccccgccgcactggctttcgggccgcaggtaagtgacaccctgttagattgtaggaaacatcttacatgggtggtcgcagttttacaagaagttgcggctgccgctgcccagctgatcgccccgcttgctgaaaatgaagggttactggtggctgccctagaagaactagcattcaaagccagcgaacagatctacgggacacctagctcttccccttatgagtgtctgcgacagtcttgcaacatcctgattagcaccatgaataagctcgctaccgccatgcaggagggggaatacgatgcggaaagacccccctcaaagccaccacctgttgagctgcgtgctgccgctctccgcgctgagatcacagatgccgaaggcctcggcctgaagcttgaagatcgggagactgtgatcaaagaattgaagaagtctttgaagatcaagggcgaagaactaagcgaggctaacgtgcggctgtcactgctcgaaaagaaactagattccgccgctaaggacgcagatgaacgtatcgagaaggtgcagactcgcttggaagagacacaggctctcttgcgcaagaaggagaaggaatttgaggaaacaatggatgccctgcaagcggacattgatcagctagaagcagaaaaggccgaacttaagcagcgcctaaactctcaaagcaagagaacaatcgagggactcagaggacctccaccgagtgggatagcaacccttgtgtctgggatcgccggcggcgcaatccccggccaagctccaggatccgtgcctggtcccggtctggtgaaagactcaccccttctactacagcagatcagcgctatgcgtttgcacatttcccaattgcagcacgaaaactcaatcctgaagggggcacaaatgaaagctagtctagctagcctgcctccactccatgtagctaagctttcacacgagggcccgggctcagagttgcccgccggcgccctgtaccggaagactagccaactcctcgaaaccttaaaccagctgtccacccatacccacgtggtggatataaccaggactagtcccgccgcaaagtcaccatctgcacagctgatggaacaggtggcacaattaaagtctctttcggatacggtcgagaagctcaaggatgaagttttaaaggagacagtgagtcagcgaccaggagctacagtgcccacagattttgccactttcccttcttcagcatttctccgcgctaaggaggaacagcaagacgatacagtgtatatgggtaaagtgacgttctcgtgcgcggctggcttcggccaacgccatagactggtcctgacacaggaacagttgcaccagttgcatagcagactcataagctag

SEQ ID NO: 72983 - DNA, 2673 bp, Artificial Sequence
  derived and/or modified sequence
atgtctgctgaggccagcgcccggcccctgcgggtgggcagccgggtggaggtgattggcaagggccaccggggcaccgtggcctacgtgggcgccaccctgtttgccaccgggaagtgggtgggcgtcatcctggatgaggccaagggcaagaatgatggcaccgtgcagggcaggaagtacttcacctgtgatgagggccacggcatctttgtgcggcagagccagatccaggtgtttgaagatggagctgacaccaccagccctgagaccccagacagcagcgccagcaaggtgctgaagcgggagggcacagacaccacagccaagaccagcaagctgcccaccaggcctgccagcactggagtggccggggccagcagcagcctgggccccagcggcagcgccagcgctggggagctgagcagcagcgagcccagcaccccagcccagacccccctggccgcccccatcatccccacccctgtgctgaccagccctggagctgtgccccccctgcccagccccagcaaggaggaggagggcctgcgggcccaggtgcgggacctggaggagaagctggagaccctgcggctgaagagagctgaggacaaggccaagctgaaggagctggagaagcacaagatccagctggagcaggtgcaggagtggaagagcaagatgcaggagcagcaggccgacctgcagaggcggctgaaggaggccaggaaggaggccaaggaggccctggaggccaaggagcgctacatggaggagatggctgacacagcagatgccatcgagatggccaccctggacaaggagatggccgaggagagagctgagagcctgcagcaggaggtggaggccctgaaggagcgggtggatgagctgaccacagacctggagatcctgaaggccgagattgaggagaagggcagtgatggagctgccagcagctaccagctgaagcagctggaggagcagaatgcccggctgaaggatgccctggtgaggatgagggacctgagcagcagcgagaagcaggagcacgtgaagctgcagaagctgatggagaagaagaaccaggagctggaggtggtgcggcagcagcgggagcggctgcaggaggagctgagccaggccgagagcaccattgatgagctgaaggagcaggtggatgctgccctgggcgctgaggagatggtggagatgctgacagacaggaacctgaacctggaggagaaggtgcgggagctgcgggagaccgtgggggacctggaggccatgaatgagatgaatgatgagctgcaggagaatgcccgggagacagagctggagctgcgggagcagctggacatggccggggcccgggtgcgggaggcccagaagagggtggaggccgcccaggagaccgtggccgactaccagcagaccatcaagaagtaccggcagctgacagcccacctgcaggatgtgaaccgggagctgaccaaccagcaggaggcctctgtggagcggcagcagcagcccccacctgagacctttgacttcaagatcaagtttgctgagaccaaggcccacgccaaggccatcgagatggagctgcggcagatggaggtggcccaggccaacagacacatgagcctgctgacagccttcatgccagacagcttcctgcggcctggaggagaccatgactgtgtgctggtgctgctgctgatgcccaggctcatctgcaaggccgagctgatcaggaagcaggcccaggagaagtttgagctgtctgagaactgcagcgagaggcctggcctgcggggagctgctggggagcagctgagctttgctgctggcctggtgtacagcctgagcctgctgcaggccaccctgcacagatatgaacatgccctgagccagtgcagcgtggatgtgtacaagaaggtgggcagcctgtacccagagatgtctgcccacgagaggagcctggacttcctgattgagctgctgcacaaggaccagctggatgaaacagtgaatgtggagcccctgaccaaggccatcaagtactaccagcacctgtacagcatccacctggccgagcagcctgaggactgcaccatgcagctggccgaccacatcaagttcacccagagcgccctggactgcatgtctgtggaggtgggccgcctgcgggccttcctgcagggcggccaggaggccacagacatcgccctgctgctgcgggacctggagaccagctgcagcgacatccggcagttctgcaagaagatcagaagaaggatgcctggaacagatgcccctggcatcccagctgccctggccttcggcccccaggtgtctgacaccctgctggactgcaggaagcacctgacctgggtggtggccgtgctgcaggaggtggccgctgctgctgcccagctgattgcccccctggccgagaatgaaggcctgctggtggccgccctggaggagctggccttcaaggccagcgagcaggtgggcctggatggctgggtggagggcgtgggccgggtgtctgaccagtgtggggccttcaccagcgccctgggcagctgccgctccatgggccccccacctgctgcccccatgtctgtgtgtgccagccacgccaccagcagctctgtgccctag

SEQ ID NO: 72984 - DNA, 3711 bp, Artificial Sequence
  derived and/or modified sequence
atgtctgctgaggccagcgcccggcccctgcgggtgggcagccgggtggaggtgattggcaagggccaccggggcaccgtggcctacgtgggcgccaccctgtttgccaccgggaagtgggtgggcgtcatcctggatgaggccaagggcaagaatgatggcaccgtgcagggcaggaagtacttcacctgtgatgagggccacggcatctttgtgcggcagagccagatccaggtgtttgaagatggagctgacaccaccagccctgagaccccagacagcagcgccagcaaggtgctgaagcgggagggcacagacaccacagccaagaccagcaagctgcccaccaggcctgccagcactggagtggccggggccagcagcagcctgggccccagcggcagcgccagcgctggggagctgagcagcagcgagcccagcaccccagcccagacccccctggccgcccccatcatccccacccctgtgctgaccagccctggagctgtgccccccctgcccagccccagcaaggaggaggagggcctgcgggcccaggtgcgggacctggaggagaagctggagaccctgcggctgaagagagctgaggacaaggccaagctgaaggagctggagaagcacaagatccagctggagcaggtgcaggagtggaagagcaagatgcaggagcagcaggccgacctgcagaggcggctgaaggaggccaggaaggaggccaaggaggccctggaggccaaggagcgctacatggaggagatggctgacacagcagatgccatcgagatggccaccctggacaaggagatggccgaggagagagctgagagcctgcagcaggaggtggaggccctgaaggagcgggtggatgagctgaccacagacctggagatcctgaaggccgagattgaggagaagggcagtgatggagctgccagcagctaccagctgaagcagctggaggagcagaatgcccggctgaaggatgccctggtgaggatgagggacctgagcagcagcgagaagcaggagcacgtgaagctgcagaagctgatggagaagaagaaccaggagctggaggtggtgcggcagcagcgggagcggctgcaggaggagctgagccaggccgagagcaccattgatgagctgaaggagcaggtggatgctgccctgggcgctgaggagatggtggagatgctgacagacaggaacctgaacctggaggagaaggtgcgggagctgcgggagaccgtgggggacctggaggccatgaatgagatgaatgatgagctgcaggagaatgcccgggagacagagctggagctgcgggagcagctggacatggccggggcccgggtgcgggaggcccagaagagggtggaggccgcccaggagaccgtggccgactaccagcagaccatcaagaagtaccggcagctgacagcccacctgcaggatgtgaaccgggagctgaccaaccagcaggaggcctctgtggagcggcagcagcagcccccacctgagacctttgacttcaagatcaagtttgctgagaccaaggcccacgccaaggccatcgagatggagctgcggcagatggaggtggcccaggccaacagacacatgagcctgctgacagccttcatgccagacagcttcctgcggcctggaggagaccatgactgtgtgctggtgctgctgctgatgcccaggctcatctgcaaggccgagctgatcaggaagcaggcccaggagaagtttgagctgtctgagaactgcagcgagaggcctggcctgcggggagctgctggggagcagctgagctttgctgctggcctggtgtacagcctgagcctgctgcaggccaccctgcacagatatgaacatgccctgagccagtgcagcgtggatgtgtacaagaaggtgggcagcctgtacccagagatgtctgcccacgagaggagcctggacttcctgattgagctgctgcacaaggaccagctggatgaaacagtgaatgtggagcccctgaccaaggccatcaagtactaccagcacctgtacagcatccacctggccgagcagcctgaggactgcaccatgcagctggccgaccacatcaagttcacccagagcgccctggactgcatgtctgtggaggtgggccgcctgcgggccttcctgcagggcggccaggaggccacagacatcgccctgctgctgcgggacctggagaccagctgcagcgacatccggcagttctgcaagaagatcagaagaaggatgcctggaacagatgcccctggcatcccagctgccctggccttcggcccccaggtgtctgacaccctgctggactgcaggaagcacctgacctgggtggtggccgtgctgcaggaggtggccgctgctgctgcccagctgattgcccccctggccgagaatgaaggcctgctggtggccgccctggaggagctggccttcaaggccagcgagcagatctacggcacccccagcagcagcccctatgagtgcctgcggcagagctgcaacatcctgatcagcaccatgaacaagctggccacagccatgcaggagggggagtatgatgctgagcggccccccagcaagcccccacctgtggagctgcgggccgccgccctgcgggcagagatcacagatgctgagggcctgggcctgaagctggaggaccgggagaccgtcatcaaggagctgaagaagagcctgaagatcaagggggaggagctgtctgaggccaacgtgcggctgagcctgctggagaagaagctggacagcgctgccaaggatgctgatgagcgcatcgagaaggtgcagacccggctggaggagacccaggccctgctgaggaagaaggagaaggagtttgaggagaccatggatgccctgcaggccgacatcgaccagctggaggccgagaaggccgagctgaagcagaggctgaacagccagagcaagaggaccatcgagggcctgcggggccccccaccttctggaattgccaccctggtgtctggaattgctggaggagccatccctggccaggcccctggctctgtgcccggccctggcctggtgaaggacagccccctgctgctgcagcagatcagcgccatgaggctgcacatcagccagctgcagcacgagaacagcatcctgaagggggcccagatgaaggccagcctggccagcctgccccccctgcacgtggccaagctgagccatgagggccctggcagcgagctgcctgctggggccctgtacaggaagaccagccagctgctggagaccctgaaccagctgagcacccacacccacgtggtggacatcaccaggaccagccctgctgccaagagccccagcgcccagctgatggagcaggtggcccagctgaagagcctgagtgacacagtggagaagctgaaggatgaggtgctgaaggagaccgtgtcccagaggcctggggccaccgtgcccacagactttgccaccttccccagcagcgccttcctgcgggccaaggaggagcagcaggatgacacagtgtacatgggcaaggtgaccttcagctgtgccgccggcttcggccagaggcaccggctggtgctgacccaggagcagctgcaccagctgcacagccgcctcatctcctag

SEQ ID NO: 72985 - DNA, 2673 bp, Artificial Sequence
  derived and/or modified sequence
atgagcgccgaggccagcgcccggcccctgcgggtgggcagccgggtggaagtgattggtaaaggccaccgcggtactgtcgcatacgtcggggccacgctgttcgccacgggtaaatgggtaggggtcatcctggatgaggcaaagggaaagaacgacggaactgtccaaggaaggaagtattttacatgtgacgaaggccacggcatttttgttagacagtcacagatccaggtgttcgaggacggagctgataccacctcacctgaaacccccgactcctcagcaagtaaggtccttaagcgggaaggcacagacaccaccgctaagacgtctaagctccctacaagacctgccagcaccggggtagctggcgcgtctagtagtcttggtccgtctggcagcgcttctgctggagaactgtcaagctcagagccaagcacacccgcacagacccctttggctgcccccatcattcccaccccagtgttaactagtcctggggctgtgccgcccctgccatcaccctccaaagaagaggagggcttgagggcccaggtccgcgatctcgaggagaaattggaaaccttgcgcttaaaacgagccgaagacaaggccaagctcaaggagttagagaagcacaagatacagctggaacaggtgcaggaatggaagagcaagatgcaggagcaacaggcggatctgcagcgacgtctgaaggaggctaggaaggaggccaaggaggccctagaagccaaagaacgctacatggaggaaatggccgataccgcagacgcaatcgaaatggctaccctcgataaagagatggctgaggagcgggcagagtctttacaacaggaggttgaagcgcttaaagaacgagtggacgaactgactacggacctggagattctaaaagcagagatagaagagaaaggctctgacggagctgcctcctcttaccagctcaagcagcttgaagaacaaaatgctcggttgaaagatgctttggtccggatgagggacttatctagttctgagaagcaagaacacgtcaaactgcaaaaactgatggagaaaaaaaaccaagaactcgaggtggtgaggcagcagcgcgagcgcttacaagaggaattgtcccaggcagagtcaaccattgatgagctgaaggagcaggtggacgccgctctgggtgccgaagaaatggtcgagatgctaaccgacagaaatctgaacctcgaggaaaaagtccgcgagctgcgcgaaaccgtgggagacttagaagcaatgaacgagatgaacgacgagctccaggagaacgcccgggaaaccgaactggagctgagagaacagttagatatggcaggggcgcgggtgcgggaagcgcagaagcgggttgaggcggctcaggaaaccgtcgccgactatcaacagactattaagaaatatagacaactcactgctcacctgcaggatgttaaccgggagcttacaaaccaacaggaggctagcgtggagagacaacaacaaccacctcccgagaccttcgacttcaaaattaaattcgctgagacgaaggctcacgccaaagccattgaaatggaattaaggcaaatggaggtcgctcaggccaacagacacatgtctcttctgactgccttcatgccggatagctttcttcgtcctggcggcgaccatgactgcgttttggtgctgctccttatgccccggcttatctgcaaagctgagcttataaggaagcaggctcaagagaagtttgaactctccgaaaactgtagcgagaggcctgggctgagaggagcagcgggagagcaactttcctttgcggctggactggtttattcccttagtctccttcaggcaaccctccacagatacgaacatgccctgagccagtgctcggtggacgtttacaaaaaagttggctccctttatcccgaaatgtccgcccatgagcgttctctggatttccttattgagcttctccataaagatcagttggatgaaactgtcaacgttgagccgctgaccaaagctattaaatactaccagcacctatactcaatacacctggcagagcagcccgaggactgcaccatgcagctcgcagatcatatcaaatttactcagagcgctctggattgcatgagcgtggaggtaggaaggctgagggccttccttcagggagggcaggaagccaccgatattgcccttctcctccgggatttagagacgagttgcagcgacattagacaattttgcaaaaagattcggcgccggatgcctggcacagacgctcctggaatccccgcagctctggctttcggacctcaggttagcgatacactcctggattgtagaaagcacctgacctgggttgtcgcagtcttgcaggaggttgctgcggcagccgctcaactgatcgctcctctggctgaaaacgaagggctgctagtggcagccctggaggaactggccttcaaagcttctgagcaggtgggcctcgacggatgggtggagggtgtagggagagtttctgaccagtgcggcgcctttaccagcgcattgggctcctgtcggagtatggggccccctcccgctgcccccatgtcggtatgtgccagccacgcaactagcagttctgtgccatag

SEQ ID NO: 72986 - DNA, 3711 bp, Artificial Sequence
  derived and/or modified sequence
atgagcgccgaggccagcgcccggcccctgcgggtgggcagccgggtggaggttatcgggaagggccatcggggaactgtggcgtacgtgggagccactctctttgcaaccggtaaatgggtgggagttattctggacgaagccaagggcaagaatgacggtactgtgcaggggcggaaatactttacttgcgacgaaggtcatggtatttttgtccgccagtctcaaatacaggtatttgaagatggggcagacaccacaagcccggagaccccggactctagtgccagcaaggtcctcaagagggaggggacggacactactgctaaaacgagcaaactgcctacaagacccgccagtaccggggtagctggtgcctcgagttccctcggaccaagcgggtccgctagcgctggggaactgtcgtcaagcgaaccctccaccccagctcaaactcccctggcagctcctataattcccacacccgttctcacctcccctggtgctgtgccccctttgccatcccccagtaaagaggaagagggtctcagggcacaggtgagggatctggaggaaaaattggagacactcaggctgaagcgagccgaggacaaagccaagctgaaggagttggagaagcacaagatccagttggagcaggtgcaggagtggaaaagtaagatgcaggagcagcaggccgaccttcagagacgtttgaaggaagccaggaaagaggccaaagaggcacttgaggccaaggagcgctacatggaggaaatggcagatacggctgatgcgatagagatggccacattggacaaagagatggccgaggagagggccgagagcttgcaacaggaggtggaagcactgaaagagagagtcgacgagctgactactgacttggagattttgaaggctgaaattgaggagaaagggagtgatggcgccgctagctcttatcaacttaaacagttagaagagcagaatgcaaggctcaaagatgcattggtgcgaatgcgcgacttatcatccagtgagaagcaggagcacgtgaaactccaaaagttaatggagaagaagaatcaggaactggaggtggtgcggcagcaacgcgagcgtctccaggaggaactttcccaagccgagagcactattgatgaactcaaagaacaggttgacgccgccctgggcgcagaggaaatggtggaaatgctgaccgatcgtaacctcaatttggaggagaaggtccgggaactgcgcgagaccgtgggcgatctggaagccatgaacgagatgaatgacgagctccaggagaatgcacgggagacagagctggagctgagagagcagctcgatatggccggggctagggtccgggaggctcaaaaacgagtagaggcagcacaggagacagtcgctgattatcaacagactataaaaaagtaccgccaactaactgctcacctgcaagatgtgaacagagaacttacgaaccaacaagaggcctcggtggagagacaacagcagcctccccccgagacctttgatttcaagattaagttcgctgagacaaaggcccatgcaaaggccattgagatggaactccgacaaatggaagtcgcccaagcgaacaggcatatgtcactattgactgcattcatgccagattccttcctgaggcctggtggggatcacgattgcgttcttgttctccttctcatgcctcgtcttatctgtaaggctgaactgattcgaaaacaggcacaggaaaaatttgagctgtccgagaactgtagcgaaaggcctggactgaggggagccgcaggcgaacagttgagttttgcggccggcctcgtgtatagtttgagcctgctgcaggcaaccctccatagatacgaacacgccctctcccagtgctctgtcgacgtttacaagaaagtgggctcgctctatcctgagatgagcgcccacgagaggtctctcgacttcctgatcgaacttctgcataaagaccagctcgatgagacggtcaacgtagagccattgactaaggccattaagtactatcaacacctgtattccatacatctggccgaacagccagaagattgcactatgcagttagctgaccacatcaagttcacgcagtccgcccttgactgcatgtcggtcgaagtaggcagattgcgcgcctttcttcagggcggacaggaggctactgatattgccctcctcctccgcgacctggagactagctgtagtgacattaggcagttctgcaagaaaatcagaagaaggatgccgggtaccgatgcacccggcattccagctgctctcgccttcgggcctcaagtatctgacactctgctggattgtaggaagcacctcacttgggtcgttgccgtactgcaggaagttgctgctgcggcagcccagttgatagctccccttgctgagaacgaggggctcctagtggcggccctggaggagcttgcttttaaggctagtgagcagatttacgggaccccctctagcagtccctacgaatgtctgcgtcagtcctgtaatattctaatctccactatgaacaaacttgcgaccgcaatgcaggagggagaatatgacgccgaaagaccgccttccaagccaccacccgtggagctccgcgcggccgcactccgtgccgagattacagatgcggaggggttgggcctcaagcttgaagaccgggaaaccgtaattaaagagttaaagaagagtcttaagattaaaggggaggagctgtctgaggctaatgttcgcctgagcctgttggagaaaaagctcgactccgccgcaaaagatgcagacgagagaatagaaaaggtgcagaccagattggaagagactcaggctctcctcagaaagaaagaaaaagagttcgaagagaccatggacgcactccaagcggatatcgatcaacttgaggccgaaaaggccgagctcaagcagcgcctgaactcccagtctaagaggacaatcgaaggcttacgcggtccgcccccctccggtatcgccactctggttagcgggatcgccgggggcgctatcccaggtcaggcaccagggagtgttccgggcccagggctagtaaaggatagtcccctcctgttgcagcagatctctgctatgcgcctgcatatctctcagcttcaacacgagaattccattctgaaaggggcccagatgaaggcgtcgctggcatccctgcctcccctacacgtggcaaaattatcgcacgagggaccaggaagtgaacttccagcgggggctctgtataggaaaacgagccagctactggaaaccctgaaccagctgtccactcacacccacgtcgtggacatcacacgcacctctccggcagccaagagcccctccgctcagctgatggaacaggtcgcccaactaaaaagcctctcagatactgttgaaaaactgaaagatgaagtcctaaaggagacagtttcccagcgtccaggtgcgaccgtgccgacagatttcgcaacatttccatcaagtgcgtttttgagagcaaaggaggagcagcaggacgacactgtttatatgggtaaagtaacattcagctgtgctgctggattcggtcagcgccacaggctcgtcttgacccaggagcagctccatcagcttcattctcgcctcatctcttag

SEQ ID NO: 72987 - DNA, 2673 bp, Artificial Sequence
  derived and/or modified sequence
atgtccgctgaagcttccgctcgtccacttcgggttggaagcagagtagaggtcatagggaagggccatcgaggaaccgtggcatatgtgggtgctacattatttgcgactggcaagtgggttggtgtcatcctggatgaagccaagggaaagaatgacggaacggtgcagggtcggaagtactttacctgcgatgaaggacacggcatctttgtgcgacagtcacagattcaagtattcgaggacggagccgatactacttcccccgagacccctgacagtagcgctagcaaagtcctgaaaagagagggtacagatactaccgcgaagacttccaagctcccaacccgccctgcgtccaccggtgtggcgggagccagttcttccttggggcctagcgggagtgcttccgccggagaactgagcagctccgagcctagcacccccgcacagacacccctcgctgcaccaatcatcccaaccccagttctgactagccctggcgctgtccctcctctgccatctccctcgaaagaggaggaaggactcagagcgcaggtaagagacttggaggagaagctagaaacgctgcggctgaaacgggcagaggataaagcgaagctaaaagagctggaaaagcacaagattcagcttgagcaggtgcaagagtggaaaagtaaaatgcaggaacagcaggctgatctccagcgcagactgaaggaggctcgcaaggaagctaaagaagccctcgaagctaaagagagatacatggaagaaatggcagataccgccgacgctatcgaaatggctacactcgataaggaaatggccgaggagcgagctgaatctttgcagcaggaggtggaagcattgaaagaaagggtagacgagctgaccactgacctcgagatactgaaggcagagattgaagagaagggctcagacggggcagcctccagctaccagctcaagcagctagaggaacagaatgcccgacttaaagacgcacttgtgcggatgagagatctttcttcctccgagaagcaggagcacgtgaaactgcagaaacttatggagaaaaagaaccaagagctcgaagtggtacggcagcagcgcgagcgactgcaagaggagttgtctcaggcggagtccacaattgatgaactcaaggaacaagtagacgcggctctcggagcggaggagatggttgagatgctgactgataggaaccttaatttggaagaaaaggtccgggagctcagagagacagttggcgatctggaggctatgaatgagatgaatgacgaactccaagaaaacgctcgcgaaacagagctggaactgcgagaacagctggatatggccggtgcgagggtccgtgaagcccagaagagagtggaggccgctcaggagaccgtggcagattaccaacagacgatcaaaaagtaccgccagttaacagcccatctgcaagacgtgaaccgggaactaacaaatcaacaggaggcctctgtggaacgccaacagcagccgcctcctgaaacattcgatttcaagattaaattcgctgaaaccaaagcccacgcgaaagccatcgagatggagttgaggcagatggaagtggctcaggcgaaccgtcatatgtctctcttaacagctttcatgccagatagctttttgaggcccggaggtgatcacgactgcgttctagtgttgctactgatgccacggctcatctgtaaggctgagctgattcgcaagcaggcccaggaaaaatttgagctgagcgaaaactgctctgaaaggccgggtctgcgaggagcagcaggcgagcagttgtcattcgctgccggtctggtctactcgttgagccttctccaggccacacttcaccgatacgaacatgcgctgagccagtgcagtgtagacgtgtataaaaaggtgggcagcctgtatcctgaaatgagcgcacacgagagatccttggattttttaattgaacttctccataaggaccagttggacgaaactgtgaacgtggagcccctcactaaagccattaaatactaccaacacctttactcaatccacttggcggaacagcccgaagattgtaccatgcagctggccgatcatatcaaatttacacagtcagctttagactgtatgagtgtggaggtaggcaggctgcgggcttttctgcaaggcggacaagaggcaactgacatagccctgctactgagagacttagagacaagctgttctgacattcgacaattctgtaaaaagatacgccgaagaatgccagggacagatgcaccagggattcccgcagcactcgcctttgggcctcaggtatccgacacccttcttgactgtcggaaacacctgacctgggttgtggccgtgctccaggaagtcgccgctgcagctgcccagttaatagcccctctcgcagagaatgagggtcttctggtagcggctctggaagaactggccttcaaggcgagcgaacaagtgggtctggatgggtgggttgaaggcgttggaagagtttctgatcagtgtggggcattcacttcagcactgggctcttgtcgtagcatgggccctcctccagcagccccaatgtccgtgtgcgcttcacatgcgacaagcagctctgttccatag

SEQ ID NO: 72988 - DNA, 3711 bp, Artificial Sequence
  derived and/or modified sequence
atgtctgcagaagcttctgctcgcccactgcgtgtcggaagccgtgtggaagtcattggtaagggacatcgcggaaccgtcgcctacgttggggctaccctgttcgccacaggaaagtgggtcggagtgatccttgatgaagctaaaggaaagaatgatggaaccgttcaggggagaaagtatttcacatgcgacgagggtcatggaatattcgtcaggcaaagtcaaattcaagtttttgaagatggtgccgacactactagcccagagacaccggattcgagcgcctctaaagtgttgaagcgagaaggcacagacaccactgccaaaacaagcaaactgccaacaaggcctgcgtctaccggtgttgctggagccagctctagtctggggccatcaggctcagcctccgcaggtgagttatcctcctctgagcctagtacccccgcacagactccattagccgcacccattatccccacgcctgtgctcacctcacctggcgctgttccaccgctcccttccccaagtaaagaggaagagggtcttcgcgcacaggtgcgggacctcgaagaaaagcttgaaactcttcggctcaagcgagcggaggataaggcaaaactaaaagagctggagaaacataagatccagttggagcaagttcaggaatggaagagcaagatgcaagaacagcaggccgatttgcagcgcagactgaaagaggctcgtaaggaggctaaagaagcccttgaggcaaaagaacggtacatggaggaaatggctgacaccgcagacgcaattgagatggcaactttggataaagagatggctgaggagagagcagagagcctgcagcaggaagttgaggctttaaaggagcgggtggatgaactcactactgacctggagatcctgaaagcggagattgaggaaaagggatcggatggcgcagcttccagctatcaactgaagcagcttgaggagcagaacgcccgtctcaaagacgctttggttcgcatgagggacctcagttcatcagagaagcaggagcacgtcaagttacagaagctgatggagaagaaaaaccaggagctagaggtggtccgccaacagagagaaagactccaggaggaattgtcccaggccgaatctactattgacgagctgaaagagcaagttgatgccgcactgggcgcagaagagatggtggaaatgctcactgatcgaaacttaaacctggaagaaaaggtccgagaactgcgggaaactgtcggcgacctggaggcaatgaatgagatgaatgacgagttgcaagagaatgcacgcgaaacagaactggagctgagagagcaattggacatggcaggggctagagtgcgagaggcacaaaagcgggtggaggcggcacaggaaaccgtggctgactaccaacaaacaatcaagaaatatcggcagctgactgcccacctgcaggatgtgaatcgggagctgaccaatcagcaagaagcctctgttgagcgacagcaacagccaccgcctgaaactttcgacttcaagattaagtttgccgaaactaaggcgcacgcgaaggccatcgaaatggagctgcgccaaatggaggtcgcccaagcaaatcgacacatgtctcttctgactgcgttcatgccggattcattcctgaggcctggaggagatcatgattgtgtgctagtcctccttctgatgccaagactcatttgcaaagctgagttgattaggaagcaggctcaggagaagtttgagttaagtgaaaactgctcggaacgtcccggactcaggggtgctgctggagagcagcttagttttgcggctggcctggtttactcgctctcccttctgcaagccaccctgcaccgctacgagcatgcactctctcagtgctcagtggatgtgtacaagaaagtagggtccctttatccagagatgtctgcacacgagcgctccctggacttcctgattgagcttttacacaaagatcaattggacgagacagtgaatgtcgaacctttgactaaagccataaagtattatcagcacttgtactcgattcaccttgccgaacagcccgaagactgtacaatgcagctggccgaccacattaagttcacacagagcgcgctcgattgcatgtctgtagaggtggggagactgcgcgcatttctccagggtggtcaggaggcaacagacattgccctgctgctcagagatttagagacaagttgctctgacatcagacagttttgcaaaaaaatcagacgcaggatgcctggtaccgacgctcctggtatcccagctgcattagcctttggtccccaggtttctgatactctgctggattgcagaaagcacttgacctgggtggtcgccgttctgcaggaggtagccgctgccgctgcacagctgattgcccctctggccgaaaatgagggcctgctcgtcgctgccctggaagagttagcattcaaggcctccgaacagatatacggtacaccatcatcgtcaccctatgagtgtttaagacagtcttgtaatatcctgatcagcacaatgaataaactcgccaccgccatgcaggaaggggaatacgacgcagagagaccaccatcaaaaccccctcccgttgagctcagggccgctgccctgcgcgcagagatcaccgacgccgagggcttaggactaaagctcgaagacagagagactgttataaaggagctaaaaaaatcactcaaaattaagggggaagagttgagtgaggcaaacgttcgcttaagtctcttggagaaaaagctcgatagcgccgctaaagatgctgacgaaaggattgaaaaggtgcaaactaggctcgaggaaacacaggctctacttagaaaaaaagagaaagagtttgaagaaactatggacgcattgcaagcagatattgaccaactcgaggccgagaaggccgaactgaagcagcggctgaacagtcagagcaaaaggactatcgagggccttagggggcctccacctagtggaattgctactctagtgagtggcatcgccggtggagcaattcctggtcaggcacccggatccgtgcctggtcccggtttggtcaaggatagtcccctgctcctccagcagatcagcgctatgaggcttcacatctcccagctgcagcatgagaacagcatccttaaaggggcacaaatgaaggcatctctggcatctttaccccctttgcatgtcgccaagctgtcccatgaggggccaggctcagagcttcccgcaggggctctgtaccgtaaaacctcccagctgctcgaaacgctgaatcaattgagcacccacacacacgtagttgatattactcgcacctcaccggctgccaagtcaccatccgctcagcttatggaacaggtcgcccagttgaagtcattgagtgacaccgttgaaaaactgaaagatgaggtcctcaaggagaccgtctcacagcggcctggggcaaccgtgccaaccgattttgccaccttcccatccagcgcattcctgcgcgcaaaggaggagcagcaggatgacacagtttacatgggcaaggtgacattctcatgcgccgctggcttcgggcagcgccatcggctggtgctgacacaggaacagttgcaccagctgcactcccgtctgatcagctag

SEQ ID NO: 72989 - DNA, 2673 bp, Artificial Sequence
  derived and/or modified sequence
atgagcgccgaggccagcgccagacccctgagagtgggcagcagagtggaggtgatcggcaagggccacagaggcaccgtggcctacgtgggcgccaccctgttcgccaccggcaagtgggtgggcgtgatcctggacgaggccaagggcaagaacgacggcaccgtgcagggcagaaagtacttcacctgcgacgagggccacggcatcttcgtgagacagagccagatccaggtgttcgaggacggcgccgacaccaccagccccgagacccccgacagcagcgccagcaaggtgctgaagagagagggcaccgacaccaccgccaagaccagcaagctgcccaccagacccgccagcaccggcgtggccggcgccagcagcagcctgggccccagcggcagcgccagcgccggcgagctgagcagcagcgagcccagcacccccgcccagacccccctggccgcccccatcatccccacccccgtgctgaccagccccggcgccgtgccccccctgcccagccccagcaaggaggaggagggcctgagagcccaggtgagagacctggaggagaagctggagaccctgagactgaagagagccgaggacaaggccaagctgaaggagctggagaagcacaagatccagctggagcaggtgcaggagtggaagagcaagatgcaggagcagcaggccgacctgcagagaagactgaaggaggccagaaaggaggccaaggaggccctggaggccaaggagagatacatggaggagatggccgacaccgccgacgccatcgagatggccaccctggacaaggagatggccgaggagagagccgagagcctgcagcaggaggtggaggccctgaaggagagagtggacgagctgaccaccgacctggagatcctgaaggccgagatcgaggagaagggcagcgacggcgccgccagcagctaccagctgaagcagctggaggagcagaacgccagactgaaggacgccctggtgagaatgagagacctgagcagcagcgagaagcaggagcacgtgaagctgcagaagctgatggagaagaagaaccaggagctggaggtggtgagacagcagagagagagactgcaggaggagctgagccaggccgagagcaccatcgacgagctgaaggagcaggtggacgccgccctgggcgccgaggagatggtggagatgctgaccgacagaaacctgaacctggaggagaaggtgagagagctgagagagaccgtgggcgacctggaggccatgaacgagatgaacgacgagctgcaggagaacgccagagagaccgagctggagctgagagagcagctggacatggccggcgccagagtgagagaggcccagaagagagtggaggccgcccaggagaccgtggccgactaccagcagaccatcaagaagtacagacagctgaccgcccacctgcaggacgtgaacagagagctgaccaaccagcaggaggccagcgtggagagacagcagcagcccccccccgagaccttcgacttcaagatcaagttcgccgagaccaaggcccacgccaaggccatcgagatggagctgagacagatggaggtggcccaggccaacagacacatgagcctgctgaccgccttcatgcccgacagcttcctgagacccggcggcgaccacgactgcgtgctggtgctgctgctgatgcccagactgatctgcaaggccgagctgatcagaaagcaggcccaggagaagttcgagctgagcgagaactgcagcgagagacccggcctgagaggcgccgccggcgagcagctgagcttcgccgccggcctggtgtacagcctgagcctgctgcaggccaccctgcacagatacgagcacgccctgagccagtgcagcgtggacgtgtacaagaaggtgggcagcctgtaccccgagatgagcgcccacgagagaagcctggacttcctgatcgagctgctgcacaaggaccagctggacgagaccgtgaacgtggagcccctgaccaaggccatcaagtactaccagcacctgtacagcatccacctggccgagcagcccgaggactgcaccatgcagctggccgaccacatcaagttcacccagagcgccctggactgcatgagcgtggaggtgggcagactgagagccttcctgcagggcggccaggaggccaccgacatcgccctgctgctgagagacctggagaccagctgcagcgacatcagacagttctgcaagaagatcagaagaagaatgcccggcaccgacgcccccggcatccccgccgccctggccttcggcccccaggtgagcgacaccctgctggactgcagaaagcacctgacctgggtggtggccgtgctgcaggaggtggccgccgccgccgcccagctgatcgcccccctggccgagaacgagggcctgctggtggccgccctggaggagctggccttcaaggccagcgagcaggtgggcctggacggctgggtggagggcgtgggcagagtgagcgaccagtgcggcgccttcaccagcgccctgggcagctgcagaagcatgggccccccccccgccgcccccatgagcgtgtgcgccagccacgccaccagcagcagcgtgccctag

SEQ ID NO: 72990 - DNA, 3711 bp, Artificial Sequence
  derived and/or modified sequence
atgagcgccgaggccagcgccagacccctgagagtgggcagcagagtggaggtgatcggcaagggccacagaggcaccgtggcctacgtgggcgccaccctgttcgccaccggcaagtgggtgggcgtgatcctggacgaggccaagggcaagaacgacggcaccgtgcagggcagaaagtacttcacctgcgacgagggccacggcatcttcgtgagacagagccagatccaggtgttcgaggacggcgccgacaccaccagccccgagacccccgacagcagcgccagcaaggtgctgaagagagagggcaccgacaccaccgccaagaccagcaagctgcccaccagacccgccagcaccggcgtggccggcgccagcagcagcctgggccccagcggcagcgccagcgccggcgagctgagcagcagcgagcccagcacccccgcccagacccccctggccgcccccatcatccccacccccgtgctgaccagccccggcgccgtgccccccctgcccagccccagcaaggaggaggagggcctgagagcccaggtgagagacctggaggagaagctggagaccctgagactgaagagagccgaggacaaggccaagctgaaggagctggagaagcacaagatccagctggagcaggtgcaggagtggaagagcaagatgcaggagcagcaggccgacctgcagagaagactgaaggaggccagaaaggaggccaaggaggccctggaggccaaggagagatacatggaggagatggccgacaccgccgacgccatcgagatggccaccctggacaaggagatggccgaggagagagccgagagcctgcagcaggaggtggaggccctgaaggagagagtggacgagctgaccaccgacctggagatcctgaaggccgagatcgaggagaagggcagcgacggcgccgccagcagctaccagctgaagcagctggaggagcagaacgccagactgaaggacgccctggtgagaatgagagacctgagcagcagcgagaagcaggagcacgtgaagctgcagaagctgatggagaagaagaaccaggagctggaggtggtgagacagcagagagagagactgcaggaggagctgagccaggccgagagcaccatcgacgagctgaaggagcaggtggacgccgccctgggcgccgaggagatggtggagatgctgaccgacagaaacctgaacctggaggagaaggtgagagagctgagagagaccgtgggcgacctggaggccatgaacgagatgaacgacgagctgcaggagaacgccagagagaccgagctggagctgagagagcagctggacatggccggcgccagagtgagagaggcccagaagagagtggaggccgcccaggagaccgtggccgactaccagcagaccatcaagaagtacagacagctgaccgcccacctgcaggacgtgaacagagagctgaccaaccagcaggaggccagcgtggagagacagcagcagcccccccccgagaccttcgacttcaagatcaagttcgccgagaccaaggcccacgccaaggccatcgagatggagctgagacagatggaggtggcccaggccaacagacacatgagcctgctgaccgccttcatgcccgacagcttcctgagacccggcggcgaccacgactgcgtgctggtgctgctgctgatgcccagactgatctgcaaggccgagctgatcagaaagcaggcccaggagaagttcgagctgagcgagaactgcagcgagagacccggcctgagaggcgccgccggcgagcagctgagcttcgccgccggcctggtgtacagcctgagcctgctgcaggccaccctgcacagatacgagcacgccctgagccagtgcagcgtggacgtgtacaagaaggtgggcagcctgtaccccgagatgagcgcccacgagagaagcctggacttcctgatcgagctgctgcacaaggaccagctggacgagaccgtgaacgtggagcccctgaccaaggccatcaagtactaccagcacctgtacagcatccacctggccgagcagcccgaggactgcaccatgcagctggccgaccacatcaagttcacccagagcgccctggactgcatgagcgtggaggtgggcagactgagagccttcctgcagggcggccaggaggccaccgacatcgccctgctgctgagagacctggagaccagctgcagcgacatcagacagttctgcaagaagatcagaagaagaatgcccggcaccgacgcccccggcatccccgccgccctggccttcggcccccaggtgagcgacaccctgctggactgcagaaagcacctgacctgggtggtggccgtgctgcaggaggtggccgccgccgccgcccagctgatcgcccccctggccgagaacgagggcctgctggtggccgccctggaggagctggccttcaaggccagcgagcagatctacggcacccccagcagcagcccctacgagtgcctgagacagagctgcaacatcctgatcagcaccatgaacaagctggccaccgccatgcaggagggcgagtacgacgccgagagaccccccagcaagcccccccccgtggagctgagagccgccgccctgagagccgagatcaccgacgccgagggcctgggcctgaagctggaggacagagagaccgtgatcaaggagctgaagaagagcctgaagatcaagggcgaggagctgagcgaggccaacgtgagactgagcctgctggagaagaagctggacagcgccgccaaggacgccgacgagagaatcgagaaggtgcagaccagactggaggagacccaggccctgctgagaaagaaggagaaggagttcgaggagaccatggacgccctgcaggccgacatcgaccagctggaggccgagaaggccgagctgaagcagagactgaacagccagagcaagagaaccatcgagggcctgagaggccccccccccagcggcatcgccaccctggtgagcggcatcgccggcggcgccatccccggccaggcccccggcagcgtgcccggccccggcctggtgaaggacagccccctgctgctgcagcagatcagcgccatgagactgcacatcagccagctgcagcacgagaacagcatcctgaagggcgcccagatgaaggccagcctggccagcctgccccccctgcacgtggccaagctgagccacgagggccccggcagcgagctgcccgccggcgccctgtacagaaagaccagccagctgctggagaccctgaaccagctgagcacccacacccacgtggtggacatcaccagaaccagccccgccgccaagagccccagcgcccagctgatggagcaggtggcccagctgaagagcctgagcgacaccgtggagaagctgaaggacgaggtgctgaaggagaccgtgagccagagacccggcgccaccgtgcccaccgacttcgccaccttccccagcagcgccttcctgagagccaaggaggagcagcaggacgacaccgtgtacatgggcaaggtgaccttcagctgcgccgccggcttcggccagagacacagactggtgctgacccaggagcagctgcaccagctgcacagcagactgatcagctag

SEQ ID NO: 72991 - protein, 1271 aa, Artificial Sequence
  derived and/or modified sequence
MAQSKRHVYSRTPSGSRMSAEASARPLRVGSRVEVIGKGHRGTVAYVGATLFATGKWVGVILDEAKGKNDGTVQGRKYFTCDEGHGIFVRQSQIQVFEDGADTTSPETPDSSASKVLKREGTDTTAKTSKLAPTARKTTTRRPKPTRPASTGVAGASSSLGPSGSASAGELSSSEPSTPAQTPLAAPIIPTPVLTSPGAVPPLPSPSKEEEGLRAQVRDLEEKLETLRLKRAEDKAKLKELEKHKIQLEQVQEWKSKMQEQQADLQRRLKEARKEAKEALEAKERYMEEMADTADAIEMATLDKEMAEERAESLQQEVEALKERVDELTTDLEILKAEIEEKGSDGAASSYQLKQLEEQNARLKDALVRMRDLSSSEKQEHVKLQKLMEKKNQELEVVRQQRERLQEELSQAESTIDELKEQVDAALGAEEMVEMLTDRNLNLEEKVRELRETVGDLEAMNEMNDELQENARETELELREQLDMAGARVREAQKRVEAAQETVADYQQTIKKYRQLTAHLQDVNRELTNQQEASVERQQQPPPETFDFKIKFAETKAHAKAIEMELRQMEVAQANRHMSLLTAFMPDSFLRPGGDHDCVLVLLLMPRLICKAELIRKQAQEKFELSENCSERPGLRGAAGEQLSFAAGLVYSLSLLQATLHRYEHALSQCSVDVYKKVGSLYPEMSAHERSLDFLIELLHKDQLDETVNVEPLTKAIKYYQHLYSIHLAEQPEDCTMQLADHIKFTQSALDCMSVEVGRLRAFLQGGQEATDIALLLRDLETSCSDIRQFCKKIRRRMPGTDAPGIPAALAFGPQVSDTLLDCRKHLTWVVAVLQEVAAAAAQLIAPLAENEGLLVAALEELAFKASEQIYGTPSSSPYECLRQSCNILISTMNKLATAMQEGEYDAERPPSKPPPVELRAAALRAEITDAEGLGLKLEDRETVIKELKKSLKIKGEELSEANVRLSLLEKKLDSAAKDADERIEKVQTRLEETQALLRKKEKEFEETMDALQADIDQLEAEKAELKQRLNSQSKRTIEGLRGPPPSGIATLVSGIAGEEQQRGAIPGQAPGSVPGPGLVKDSPLLLQQISAMRLHISQLQHENSILKGAQMKASLASLPPLHVAKLSHEGPGSELPAGALYRKTSQLLETLNQLSTHTHVVDITRTSPAAKSPSAQLMEQVAQLKSLSDTVEKLKDEVLKETVSQRPGATVPTDFATFPSSAFLRAKEEQQDDTVYMGKVTFSCAAGFGQRHRLVLTQEQLHQLHSRLIS

SEQ ID NO: 72992 - DNA, 3816 bp, Artificial Sequence
  derived and/or modified sequence
atggcccaatcgaaacgtcacgtgtattcccggacaccgtcagggtcccgcatgtccgcggaggcaagcgctagacccctgagagtagggtcgcgcgtcgaagttatcggaaagggccaccggggaactgtcgcctatgtgggcgctactctgtttgctaccgggaagtgggtgggggtaatcctggatgaggccaagggtaagaatgatggaactgtgcaaggtagaaagtacttcacctgtgacgaagggcacggcatcttcgtgaggcagtctcagatacaggtgttcgaagatggcgctgatacaacctctccagagacgccagattcatcagcatcaaaagtgcttaagcgagaagggacagacacaaccgcgaaaacctctaaattggcccccacagccaggaaaaccaccacaagacggccaaaacccactcgtcctgcatctaccggtgtggccggtgccagttcatctctgggacccagtggttctgcttccgctggggagctctcatccagcgagccctccacccctgctcagactcctctggctgcacccatcattcctacccctgtgctgacttcgcctggggctgtgcctccattaccctctcccagtaaagaagaagagggcctaagggcgcaggttagggatcttgaagaaaaacttgaaaccctgcgcctgaagcgggctgaggataaggcaaagctgaaggagcttgagaaacataaaatccaactagaacaagtacaggagtggaaatcgaagatgcaggaacagcaggccgaccttcagagacggctgaaggaggctcgcaaagaggctaaggaggctctggaagctaaggagcgatatatggaagagatggccgacactgccgatgccattgagatggctactttagacaaggaaatggccgaggaacgcgctgaaagcctacaacaggaggtcgaggcgctgaaggagagggtagacgaactgacaactgacttggaaattttgaaagcagagattgaagagaagggctccgatggcgcagcctcctcataccagctgaagcagctggaagagcagaacgctagattgaaggacgcgctggtccgtatgagggatctttcttcttctgaaaaacaggaacacgtcaaattgcagaagctgatggaaaagaagaatcaggaacttgaagtggtccgccagcagagagaacggctacaggaagaattaagtcaggcggagtcaaccattgatgaacttaaggaacaggttgatgcagccttgggggccgaggagatggtggaaatgctcaccgaccgtaacctaaacctagaggaaaaagtacgcgagttgcgcgaaaccgtgggagatttagaagcaatgaacgaaatgaacgatgaactgcaggagaacgccagggagactgaactggagctgcgcgaacagctcgatatggcaggtgccagagtgcgagaagctcagaagagagtcgaggctgcacaggagaccgtggccgactaccaacagacaatcaagaaataccggcagctgacggcccacttgcaggatgtaaaccgcgaactgactaatcaacaagaggccagtgtcgaaagacagcagcaacctccccctgaaacatttgactttaaaataaaattcgccgagacaaaggctcacgcaaaagccattgagatggagcttcggcaaatggaggtagcccaagcaaaccgacatatgtcattattaaccgccttcatgcctgacagcttcttgcggcctggcggcgatcatgattgcgtcttagttttgctgctgatgccaaggctcatctgtaaagccgagctgatcagaaaacaagcacaagagaagtttgaactgtcggagaactgcagcgaaagacccggtctgcgtggcgccgctggtgagcagctttccttcgctgctgggctggtgtatagcctgtcactcctgcaggcaaccttacaccggtatgagcacgctctctcccagtgttcagtcgacgtgtacaaaaaggttggttccttgtaccccgaaatgtctgcgcacgagcgatcactggactttcttattgagctgctgcataaagaccagttggatgagaccgtgaacgttgagccgttgaccaaagctataaaatactaccagcatctctatagcatacatctcgccgaacagcctgaagactgcaccatgcaattagccgaccatatcaagtttacccagtctgcactcgattgtatgtctgtggaagtggggcgcctgagggcctttctccaaggcgggcaagaggcgaccgatattgccctgcttctgcgagatctcgagacttcgtgttccgacatcaggcagttttgcaagaaaattcgccgcaggatgcccggtaccgatgctcccggcatccctgcagcactcgctttcggaccacaagtgtcagatactttgttggactgtcgcaaacacctaacttgggtcgtggccgtgttacaggaggtggcggccgccgctgcccagttgattgctcctctcgccgagaacgaaggccttctcgtagctgccctagaggagcttgccttcaaggcaagcgaacaaatttacgggacacccagctcctccccttacgaatgtctcagacagagctgtaatattctaatttccacaatgaacaagctggctacagctatgcaggaaggtgagtatgatgcagaacggcccccaagcaaacctccacccgtggaactacgtgccgctgcgctgcgggcggagataacagatgccgaagggcttgggctgaaactggaggatcgggaaacggtcatcaaggagctgaagaagtccctaaagattaaaggagaagaactctccgaagccaatgtgcggctgagtctattagagaagaaattagactccgctgccaaggacgccgatgaacgcatcgaaaaagttcagacaagacttgaggaaacacaggccttgctcagaaaaaaggagaaggaattcgaggagacaatggatgccctgcaggctgacatcgatcaactggaggccgaaaaagcagaactaaaacaacggctgaacagccagtctaaaagaactatcgaaggcctcaggggacccccaccttccggtatcgccacccttgtatctggaatcgctggcgaagagcaacagagaggcgctatccctggacaagcccccggatcagtgcccggacccggtctggtgaaagatagtcctctcctgctgcagcagatttcggctatgcgcttacacatctcccagctccagcatgagaattcaatcctgaagggcgcccagatgaaagcttccctggcaagccttccacctctccacgttgccaagttatctcacgagggtcccggaagtgaacttcctgccggcgccctataccggaaaacaagtcagctgttggagacactaaaccagctgagcactcacactcatgtcgttgatataacacggacgagcccagctgctaaatcccctagcgctcaacttatggaacaagtcgctcagcttaagagcctttctgacacagttgaaaagttaaaagacgaggtgctaaaagagaccgtcagtcagagacccggcgcaactgtcccaaccgattttgccactttccctagctccgcctttctgcgagctaaggaagaacagcaggatgacaccgtgtacatgggtaaggttaccttttcctgtgctgcaggattcgggcagagacatcgtctggtgcttacccaggaacagctacaccagttgcactcgcgcctgatatcatag

SEQ ID NO: 72993 - DNA, 3816 bp, Artificial Sequence
  derived and/or modified sequence
atggcccagagcaagagacatgtgtacagcaggacccccagcggcagcaggatgtctgctgaggccagcgcccggcccctgcgggtgggcagccgggtggaggtgattggcaagggccaccggggcaccgtggcctacgtgggcgccaccctgtttgccaccgggaagtgggtgggcgtcatcctggatgaggccaagggcaagaatgatggcaccgtgcagggcaggaagtacttcacctgtgatgagggccacggcatctttgtgcggcagagccagatccaggtgtttgaagatggagctgacaccaccagccctgagaccccagacagcagcgccagcaaggtgctgaagcgggagggcacagacaccacagccaagaccagcaagctggcccccacagccaggaagaccaccacccggcggcccaagcccaccaggcctgccagcactggagtggccggggccagcagcagcctgggccccagcggcagcgccagcgctggggagctgagcagcagcgagcccagcaccccagcccagacccccctggccgcccccatcatccccacccctgtgctgaccagccctggagctgtgccccccctgcccagccccagcaaggaggaggagggcctgcgggcccaggtgcgggacctggaggagaagctggagaccctgcggctgaagagagctgaggacaaggccaagctgaaggagctggagaagcacaagatccagctggagcaggtgcaggagtggaagagcaagatgcaggagcagcaggccgacctgcagaggcggctgaaggaggccaggaaggaggccaaggaggccctggaggccaaggagcgctacatggaggagatggctgacacagcagatgccatcgagatggccaccctggacaaggagatggccgaggagagagctgagagcctgcagcaggaggtggaggccctgaaggagcgggtggatgagctgaccacagacctggagatcctgaaggccgagattgaggagaagggcagtgatggagctgccagcagctaccagctgaagcagctggaggagcagaatgcccggctgaaggatgccctggtgaggatgagggacctgagcagcagcgagaagcaggagcacgtgaagctgcagaagctgatggagaagaagaaccaggagctggaggtggtgcggcagcagcgggagcggctgcaggaggagctgagccaggccgagagcaccattgatgagctgaaggagcaggtggatgctgccctgggcgctgaggagatggtggagatgctgacagacaggaacctgaacctggaggagaaggtgcgggagctgcgggagaccgtgggggacctggaggccatgaatgagatgaatgatgagctgcaggagaatgcccgggagacagagctggagctgcgggagcagctggacatggccggggcccgggtgcgggaggcccagaagagggtggaggccgcccaggagaccgtggccgactaccagcagaccatcaagaagtaccggcagctgacagcccacctgcaggatgtgaaccgggagctgaccaaccagcaggaggcctctgtggagcggcagcagcagcccccacctgagacctttgacttcaagatcaagtttgctgagaccaaggcccacgccaaggccatcgagatggagctgcggcagatggaggtggcccaggccaacagacacatgagcctgctgacagccttcatgccagacagcttcctgcggcctggaggagaccatgactgtgtgctggtgctgctgctgatgcccaggctcatctgcaaggccgagctgatcaggaagcaggcccaggagaagtttgagctgtctgagaactgcagcgagaggcctggcctgcggggagctgctggggagcagctgagctttgctgctggcctggtgtacagcctgagcctgctgcaggccaccctgcacagatatgaacatgccctgagccagtgcagcgtggatgtgtacaagaaggtgggcagcctgtacccagagatgtctgcccacgagaggagcctggacttcctgattgagctgctgcacaaggaccagctggatgaaacagtgaatgtggagcccctgaccaaggccatcaagtactaccagcacctgtacagcatccacctggccgagcagcctgaggactgcaccatgcagctggccgaccacatcaagttcacccagagcgccctggactgcatgtctgtggaggtgggccgcctgcgggccttcctgcagggcggccaggaggccacagacatcgccctgctgctgcgggacctggagaccagctgcagcgacatccggcagttctgcaagaagatcagaagaaggatgcctggaacagatgcccctggcatcccagctgccctggccttcggcccccaggtgtctgacaccctgctggactgcaggaagcacctgacctgggtggtggccgtgctgcaggaggtggccgctgctgctgcccagctgattgcccccctggccgagaatgaaggcctgctggtggccgccctggaggagctggccttcaaggccagcgagcagatctacggcacccccagcagcagcccctatgagtgcctgcggcagagctgcaacatcctgatcagcaccatgaacaagctggccacagccatgcaggagggggagtatgatgctgagcggccccccagcaagcccccacctgtggagctgcgggccgccgccctgcgggcagagatcacagatgctgagggcctgggcctgaagctggaggaccgggagaccgtcatcaaggagctgaagaagagcctgaagatcaagggggaggagctgtctgaggccaacgtgcggctgagcctgctggagaagaagctggacagcgctgccaaggatgctgatgagcgcatcgagaaggtgcagacccggctggaggagacccaggccctgctgaggaagaaggagaaggagtttgaggagaccatggatgccctgcaggccgacatcgaccagctggaggccgagaaggccgagctgaagcagaggctgaacagccagagcaagaggaccatcgagggcctgcggggccccccaccttctggaattgccaccctggtgtctggaattgctggggaggagcagcagagaggagccatccctggccaggcccctggctctgtgcccggccctggcctggtgaaggacagccccctgctgctgcagcagatcagcgccatgaggctgcacatcagccagctgcagcatgaaaattccatcctgaagggggcccagatgaaggccagcctggccagcctgccccccctgcacgtggccaagctgagccatgagggccctggcagcgagctgcctgctggggccctgtacaggaagaccagccagctgctggagaccctgaaccagctgagcacccacacccacgtggtggacatcaccaggaccagccctgctgccaagagccccagcgcccagctgatggagcaggtggcccagctgaagagcctgagtgacacagtggagaagctgaaggatgaggtgctgaaggagaccgtgtcccagaggcctggggccaccgtgcccacagactttgccaccttccccagcagcgccttcctgcgggccaaggaggagcagcaggatgacacagtgtacatgggcaaggtgaccttcagctgtgccgccggcttcggccagaggcaccggctggtgctgacccaggagcagctgcaccagctgcacagccgcctcatctcctag

SEQ ID NO: 72994 - DNA, 3816 bp, Artificial Sequence
  derived and/or modified sequence
atggcccagagcaagcggcacgtgtacagccggacccccagcggctctcggatgagcgccgaggcctctgccagacccctgcgggtgggcagccgggtggaagtcatcggtaagggtcacaggggcactgttgcttacgtgggagcaaccctgtttgctactgggaagtgggtcggcgtcatattggatgaggccaaaggtaaaaacgatgggacggtgcagggccggaagtattttacctgcgatgagggacatggtatcttcgtgaggcaatcccagattcaggtctttgaggatggagccgacactactagtcccgagacccctgattcctctgcctctaaagtgttgaagcgagagggcacggacacaactgccaaaacttcaaagttagcacccaccgcccgcaagacaacgacaagacgtccaaaacctacgagacccgcaagcacgggtgtggccggtgcatcaagcagcctgggaccatccggaagcgcatctgccggagagctgtcttcatcagagccttccactcccgctcaaacacctctcgcagctccaatcatccccactcccgtgctcacatcacccggtgcggtgcctccgctcccttccccaagtaaagaggaggaaggcctccgggcacaggttcgtgatcttgaagaaaaactcgagactctgcgcttaaagcgtgctgaggacaaagcgaagcttaaggaactggagaaacataagattcagctcgagcaggtgcaggaatggaagagcaaaatgcaagagcagcaggccgacctccagcgcaggctcaaagaagccagaaaggaggctaaagaggccttagaggctaaagagagatacatggaggagatggcggacaccgctgacgcaatagagatggctacattggataaggagatggcagaagaaagagctgaaagtctccaacaggaggtagaagcgttgaaggagagagttgacgaactgaccacagacctggagatcctgaaggcagagatcgaagagaaaggttccgacggtgctgcctcctcttatcagctcaaacaactagaagaacagaacgctcgcttgaaggacgccttagtcagaatgagggacctcagttctagtgaaaaacaggagcacgtcaaactgcaaaagctcatggagaaaaagaaccaggaacttgaggtagtgcgccagcagcgtgagcgacttcaggaagagctctctcaggctgagtcaacgattgatgagctgaaagagcaggtggacgcggccctcggcgcagaggagatggtggagatgctgactgatcggaatctaaacctggaggagaaggtgcgcgagctgagagagacagttggcgaccttgaggcaatgaatgaaatgaacgacgagctccaggagaacgcacgtgaaaccgaattggaactgagggaacaattggacatggcaggcgcgagagtgcgagaagcccaaaaaagggtagaggctgcccaggaaaccgtagcagactatcagcagacgatcaagaaataccgccaactgacagcccacctccaggatgtgaatagggaattaacgaaccagcaagaagcatctgtcgaaagacagcagcagcccccccccgaaacattcgattttaagataaaattcgccgagacaaaggcccacgccaaagcaatagagatggagcttaggcaaatggaagtggctcaagccaatcgtcatatgagtctgttaactgcattcatgccggacagtttccttcgaccaggcggcgaccatgactgcgtgttggttcttttgttgatgccgagactgatctgtaaggccgagctgatcaggaagcaggcccaggagaaattcgagctgtcagagaattgcagcgagaggcccggactcaggggggcagcgggcgagcagctttctttcgcggctgggttggtgtattccctgtcactcctacaggctacgctacaccggtacgaacacgcactttcccaatgctccgtcgacgtatacaagaaggttggctccctgtatccagagatgagtgcccatgagcggtctcttgactttctgatcgaactgcttcataaagaccagttggacgaaacagtgaacgtggagccactgacgaaagcaatcaaatattaccaacatctgtattctattcacctggccgagcagccagaggactgtactatgcagttggccgaccacattaaatttacgcagtcagccctagattgcatgtctgtggaggttggcagacttcgcgccttcttgcaggggggacaggaagccacagacattgcgttactacttcgagatctggagacatcttgctccgatattaggcagttttgcaaaaaaatccgccgtcgcatgcctggaacagatgctcctgggattccggccgctctcgcctttggcccacaggtgagtgataccctgctagattgtcgcaaacacctcacttgggtggtggcggtgctgcaggaggtagccgctgccgctgctcagttgatagctcctttggccgaaaatgaaggactgctggttgcagcactagaagagctggcctttaaagcctccgaacagatatatggcaccccatcaagctctccatatgaatgcctgcgacagtcttgcaatatcctgatatccaccatgaacaaattagccacagctatgcaggagggcgagtatgacgcggagcgcccccctagtaagccaccgcccgtggagctccgggccgctgctctgagggccgagattacagatgccgagggcctcggtctgaagctggaggatcgggaaaccgtaatcaaggagttgaaaaagtcacttaagataaaaggagaagagttatccgaggctaacgttcggctgtctctgctggaaaaaaagctcgattccgcagcaaaggatgccgacgagaggattgaaaaggtgcaaactcggttagaggagacccaagctcttttaagaaaaaaagagaaggagtttgaggagactatggatgcgcttcaggcagacatcgaccaactggaagccgaaaaggcagagctgaagcagcgattgaattcacagtctaaacgtactatcgaagggctccgtggacccccaccatcaggcatcgcaacactcgtgagcggaattgccggagaggagcagcagcgcggcgcaatccccggccaagcgccaggctctgtaccaggccctggacttgtgaaagactcacctttgctgctccagcagatctccgccatgcgtcttcacatatcccagctgcagcatgaaaattctatacttaagggagcccagatgaaggcaagtctggcttctttgcctccgctccatgtcgcgaagctgtctcatgaaggacccggatccgaactgccggccggagccctgtaccgaaagacttcccagctgctggagacattaaaccagctgtcaacccacactcatgtcgttgacattacaagaacttcacccgccgctaagtcaccaagtgcacagctcatggaacaagtcgctcaacttaagtctctgtccgacacagtagagaaactcaaagacgaggtattgaaagaaactgtctcccagcgtcccggagctacagtgcctacagactttgccacattcccgtctagtgcctttcttagggccaaagaggaacagcaggacgataccgtgtacatgggcaaagtcacgttcagctgtgctgctggctttgggcagcgtcacagattggttcttacgcaggagcaactgcaccagcttcacagtcgtttgatctcctag

SEQ ID NO: 72995 - DNA, 3816 bp, Artificial Sequence
  derived and/or modified sequence
atggcccagtccaagaggcatgtctattctcgaaccccatctggatcaaggatgtcagctgaggccagtgcaagaccgctacgggtgggctcccgcgtggaggttatcggcaagggacatcgaggaacagtggcttacgttggtgccactctgtttgccaccggcaagtgggtgggcgtgattttagacgaagccaaaggaaaaaacgatggcacagtacaaggccgaaagtacttcacctgtgacgagggacacggcatttttgtgcggcaaagccagattcaggtatttgaggacggcgctgacacaactagtcccgagacccctgattcaagtgcctctaaagtgctaaaaagagaagggactgatacaaccgccaagaccagtaagctggcacctaccgcaagaaaaacaacaacaagaagacctaagcccacaaggcctgcgtctaccggagtggccggagccagttctagcctggggccaagcggctccgccagcgctggggagctctccagctccgagcccagcacccccgcacaaacacccctagctgctcccattatccctacccctgtgctcacctcacctggcgcagttcccccactcccctctccttctaaggaagaagaagggcttagggctcaggtccgggatcttgaagaaaagctggagactctcagactcaagcgggctgaggataaagccaaactcaaagaacttgagaagcacaaaattcagctcgagcaggtgcaggagtggaaaagcaaaatgcaggagcagcaagctgatctgcagcgccgactcaaggaggctcggaaagaggccaaggaggcactggaggccaaagaacgctacatggaagaaatggccgatacagccgacgcaatcgagatggccacactcgataaagaaatggcagaagaacgcgcagagtccctgcaacaagaggtcgaggctcttaaagagcgcgtggacgaactgaccacagatcttgagatcctgaaagcagaaatcgaagagaagggctccgatggcgcagcctcaagttatcaactcaagcagctggaagagcagaacgctcgattgaaagatgcactcgtccggatgcgggacctgtcttcctccgagaaacaggagcatgttaagctacagaaactcatggaaaaaaagaatcaggaactggaagtggtgcgtcagcagagagagagactgcaagaagagctttctcaggcagaatccactattgacgaacttaaagagcaggtagacgccgctctgggcgctgaggagatggtggaaatgttaaccgacaggaacctcaatctcgaggagaaggtcagggaactgcgcgaaaccgtgggagaccttgaggcgatgaacgagatgaacgacgaactccaagagaatgcacgggagactgaactggaactccgcgagcagctcgacatggccggagcgagagtacgtgaggcccagaaaagggtggaagccgcacaggagaccgtggccgattaccagcagactattaagaagtatagacaactgacggcccacctgcaagatgtgaaccgggagctcactaaccagcaggaggctagcgttgaaaggcaacaacagccacccccagagaccttcgatttcaagattaagtttgccgaaaccaaggcacacgccaaagccatcgaaatggagttgcgccaaatggaggttgctcaggcgaatcgtcatatgtccttactgaccgcattcatgcccgactccttcctccgccctggcggagaccacgattgtgtcctagttctgctgctgatgcccaggctcatctgcaaggccgagctgatcagaaaacaagctcaggagaaattcgagttgtccgagaattgtagcgaacggccaggccttcgcggtgctgcaggagagcagctgtcattcgcagcaggcttggtgtacagcctgtctctgttgcaggcgactctgcataggtacgagcacgctctgtctcagtgctcagtagacgtgtacaagaaggtaggatccctatatcccgaaatgtcagctcatgaacgctctctcgatttcctgattgagcttcttcacaaggaccaattggatgagacggtgaacgtggaaccattgactaaagcaatcaaatattaccagcacctgtactcgattcatcttgcggaacagcctgaggattgcacaatgcaattggctgatcatattaagttcactcaatccgccttggactgtatgtctgtagaggtcggacgcctgcgagcattcctgcaggggggacaggaagcaacggacattgcactactgctgcgggatttggagacgagctgtagcgatatccgacagttttgtaaaaagatcagacgccgaatgccaggcacagatgcaccaggaatcccggcagccctggcctttggaccacaggtatctgacaccttactggattgtcggaagcacctgacctgggttgtcgcagtcctgcaggaggtcgccgcagcagcagcacagttgatcgctcccctcgcagaaaatgagggcctgctggttgcagctctggaagagctcgcttttaaggcctcagaacagatctacggcacgccatcatcatctccctatgaatgtctgagacagtcctgcaacatcttgattagtaccatgaataagttagccaccgccatgcaggaaggagagtatgacgccgagcgcccaccctcaaagccccctcccgtggaactgcgcgctgccgctctcagggcagaaattactgatgccgagggcctgggattaaagctagaggatcgcgaaacagtgattaaagaactaaaaaagtcactgaagatcaagggtgaggaactgtccgaagcaaatgtgagactctcactgctcgagaaaaaacttgatagtgccgcaaaggatgcggacgaaagaattgagaaagtgcaaacccgattggaagagacccaagccctgctacggaaaaaggagaaggaatttgaggagacaatggatgccctgcaggccgatattgatcagctggaggcggaaaaggctgaactgaagcaacgtctgaacagccagagcaaaaggacgattgagggtttaagagggccacctccctccgggatcgctaccctggtcagcggcatcgcaggagaggagcagcaaagaggggcaatccctggacaggcaccaggtagcgtcccaggaccaggactggttaaggacagccccctgctgctgcagcaaatttctgcaatgcgactgcatatttctcagctgcagcacgaaaactcaatcttgaaaggcgcacagatgaaggcctccctggcaagcctgccgccattgcacgtggcaaagttgtcacacgaaggaccaggttcagagttgccggcaggcgcactgtacagaaaaaccagccaacttctggaaactctgaaccagctgtccacacatacgcacgtggtggacatcacccggacgagtccagccgcaaagagcccctctgcacagctcatggaacaggtggcccagctgaagtcactgagcgatacagtagagaaattaaaggatgaagtgctgaaggaaaccgtcagccagagacctggggcaaccgtacccactgatttcgccacctttccaagctccgcgttcctgcgagcgaaggaggagcagcaggacgatacggtgtatatgggtaaggtgaccttcagttgcgcagccggttttggccagagacatagattagtcctgactcaggaacaactgcaccagttacacagcaggctcatatcatag

SEQ ID NO: 72996 - DNA, 3816 bp, Artificial Sequence
  derived and/or modified sequence
atggcccagagcaagagacacgtgtacagcagaacccccagcggcagcagaatgagcgccgaggccagcgccagacccctgagagtgggcagcagagtggaggtgatcggcaagggccacagaggcaccgtggcctacgtgggcgccaccctgttcgccaccggcaagtgggtgggcgtgatcctggacgaggccaagggcaagaacgacggcaccgtgcagggcagaaagtacttcacctgcgacgagggccacggcatcttcgtgagacagagccagatccaggtgttcgaggacggcgccgacaccaccagccccgagacccccgacagcagcgccagcaaggtgctgaagagagagggcaccgacaccaccgccaagaccagcaagctggcccccaccgccagaaagaccaccaccagaagacccaagcccaccagacccgccagcaccggcgtggccggcgccagcagcagcctgggccccagcggcagcgccagcgccggcgagctgagcagcagcgagcccagcacccccgcccagacccccctggccgcccccatcatccccacccccgtgctgaccagccccggcgccgtgccccccctgcccagccccagcaaggaggaggagggcctgagagcccaggtgagagacctggaggagaagctggagaccctgagactgaagagagccgaggacaaggccaagctgaaggagctggagaagcacaagatccagctggagcaggtgcaggagtggaagagcaagatgcaggagcagcaggccgacctgcagagaagactgaaggaggccagaaaggaggccaaggaggccctggaggccaaggagagatacatggaggagatggccgacaccgccgacgccatcgagatggccaccctggacaaggagatggccgaggagagagccgagagcctgcagcaggaggtggaggccctgaaggagagagtggacgagctgaccaccgacctggagatcctgaaggccgagatcgaggagaagggcagcgacggcgccgccagcagctaccagctgaagcagctggaggagcagaacgccagactgaaggacgccctggtgagaatgagagacctgagcagcagcgagaagcaggagcacgtgaagctgcagaagctgatggagaagaagaaccaggagctggaggtggtgagacagcagagagagagactgcaggaggagctgagccaggccgagagcaccatcgacgagctgaaggagcaggtggacgccgccctgggcgccgaggagatggtggagatgctgaccgacagaaacctgaacctggaggagaaggtgagagagctgagagagaccgtgggcgacctggaggccatgaacgagatgaacgacgagctgcaggagaacgccagagagaccgagctggagctgagagagcagctggacatggccggcgccagagtgagagaggcccagaagagagtggaggccgcccaggagaccgtggccgactaccagcagaccatcaagaagtacagacagctgaccgcccacctgcaggacgtgaacagagagctgaccaaccagcaggaggccagcgtggagagacagcagcagcccccccccgagaccttcgacttcaagatcaagttcgccgagaccaaggcccacgccaaggccatcgagatggagctgagacagatggaggtggcccaggccaacagacacatgagcctgctgaccgccttcatgcccgacagcttcctgagacccggcggcgaccacgactgcgtgctggtgctgctgctgatgcccagactgatctgcaaggccgagctgatcagaaagcaggcccaggagaagttcgagctgagcgagaactgcagcgagagacccggcctgagaggcgccgccggcgagcagctgagcttcgccgccggcctggtgtacagcctgagcctgctgcaggccaccctgcacagatacgagcacgccctgagccagtgcagcgtggacgtgtacaagaaggtgggcagcctgtaccccgagatgagcgcccacgagagaagcctggacttcctgatcgagctgctgcacaaggaccagctggacgagaccgtgaacgtggagcccctgaccaaggccatcaagtactaccagcacctgtacagcatccacctggccgagcagcccgaggactgcaccatgcagctggccgaccacatcaagttcacccagagcgccctggactgcatgagcgtggaggtgggcagactgagagccttcctgcagggcggccaggaggccaccgacatcgccctgctgctgagagacctggagaccagctgcagcgacatcagacagttctgcaagaagatcagaagaagaatgcccggcaccgacgcccccggcatccccgccgccctggccttcggcccccaggtgagcgacaccctgctggactgcagaaagcacctgacctgggtggtggccgtgctgcaggaggtggccgccgccgccgcccagctgatcgcccccctggccgagaacgagggcctgctggtggccgccctggaggagctggccttcaaggccagcgagcagatctacggcacccccagcagcagcccctacgagtgcctgagacagagctgcaacatcctgatcagcaccatgaacaagctggccaccgccatgcaggagggcgagtacgacgccgagagaccccccagcaagcccccccccgtggagctgagagccgccgccctgagagccgagatcaccgacgccgagggcctgggcctgaagctggaggacagagagaccgtgatcaaggagctgaagaagagcctgaagatcaagggcgaggagctgagcgaggccaacgtgagactgagcctgctggagaagaagctggacagcgccgccaaggacgccgacgagagaatcgagaaggtgcagaccagactggaggagacccaggccctgctgagaaagaaggagaaggagttcgaggagaccatggacgccctgcaggccgacatcgaccagctggaggccgagaaggccgagctgaagcagagactgaacagccagagcaagagaaccatcgagggcctgagaggccccccccccagcggcatcgccaccctggtgagcggcatcgccggcgaggagcagcagagaggcgccatccccggccaggcccccggcagcgtgcccggccccggcctggtgaaggacagccccctgctgctgcagcagatcagcgccatgagactgcacatcagccagctgcagcacgagaacagcatcctgaagggcgcccagatgaaggccagcctggccagcctgccccccctgcacgtggccaagctgagccacgagggccccggcagcgagctgcccgccggcgccctgtacagaaagaccagccagctgctggagaccctgaaccagctgagcacccacacccacgtggtggacatcaccagaaccagccccgccgccaagagccccagcgcccagctgatggagcaggtggcccagctgaagagcctgagcgacaccgtggagaagctgaaggacgaggtgctgaaggagaccgtgagccagagacccggcgccaccgtgcccaccgacttcgccaccttccccagcagcgccttcctgagagccaaggaggagcagcaggacgacaccgtgtacatgggcaaggtgaccttcagctgcgccgccggcttcggccagagacacagactggtgctgacccaggagcagctgcaccagctgcacagcagactgatcagctag

SEQ ID NO: 72997 - DNA, 4479 bp, Artificial Sequence
  derived and/or modified sequence
agaggctagcacggttcctgacaagtctagagcagcactagcgcagagtgagactcatcagctggcaagcaggattctgtgtctctgggttcaggaatcctcaggcagcagaggggacttgctcctcagcccccatcactgcccccacccctacccgtgtaggccaccgagtgaggcccatggactggggagggctgtgcctgacgactcctgtgtccctctatgagggcccagcgccctgaccctcctgcctaggtttctaccttttctctctgtctttggccagctgggggagggggtagaggccgggtgagcaacatggcacagagcaagaggcacgtgtacagccggacgcccagcggcagcaggatgagtgcggaggcaagcgcccggcctctgcgggtgggctcccgtgtagaggtgattggaaaaggccaccgaggcactgtggcctatgttggagccacactgtttgccactggcaaatgggtaggcgtgattctggatgaagcaaagggcaaaaatgatggaactgttcaaggcaggaagtacttcacttgtgatgaagggcatggcatctttgtgcgccagtcccagatccaggtatttgaagatggagcagatactacttccccagagacacctgattcttctgcttcaaaagtcctcaaaagagagggaactgatacaactgcaaagactagcaaactggcaccgacagcccgaaagaccacaactcggcgacccaagcccacgcgcccagccagtactggggtggctggggccagtagctccctgggcccctctggctcagcgtcagcaggtgagctgagcagcagtgagcccagcaccccggctcagactccgctggcagcacccatcatccccacgccggtcctcacctctcctggagcagtccccccgcttccttccccatccaaggaggaggagggactaagggctcaggtgcgggacctggaggagaaactagagaccctgagactgaaacgggcagaagacaaagcaaagctaaaagagctggagaaacacaaaatccagctggagcaggtgcaggaatggaagagcaaaatgcaggagcagcaggccgacctgcagcggcgcctcaaggaggcgagaaaggaagccaaggaggcgctggaggcaaaggaacgctatatggaggagatggctgatactgctgatgccattgagatggccactttggacaaggagatggctgaagagcgggctgagtccctgcagcaggaggtggaggcactgaaggagcgggtggacgagctcactactgacttagagatcctcaaggctgagattgaagagaagggctcagatggcgctgcatccagttatcagctcaagcagcttgaggagcagaatgcccgcctgaaggatgccctggtgaggatgcgggatctttcttcctcagagaagcaggagcatgtgaagctccagaagctcatggaaaagaagaaccaagagctggaagttgtgaggcaacagcgggagcgtctgcaggaggagctaagccaggcagagagcaccattgatgagctcaaggagcaggtggatgctgctctgggtgctgaggagatggtggagatgctgacagatcggaacctgaatctggaagagaaagtgcgcgagttgagggagactgtgggagacttggaagcgatgaatgagatgaacgatgagctgcaggagaatgcacgtgagacagaactggagctgcgggagcagctggacatggcaggcgcgcgggttcgtgaggcccagaagcgtgtggaggcagcccaggagacggttgcagactaccagcagaccatcaagaagtaccgccagctgaccgcccatctacaggatgtgaatcgggaactgacaaaccagcaggaagcatctgtggagaggcaacagcagccacctccagagacctttgacttcaaaatcaagtttgctgagactaaggcccatgccaaggcaattgagatggaattgaggcagatggaggtggcccaggccaatcgacacatgtccctgctgacagccttcatgcctgacagcttccttcggccaggtggggaccatgactgcgttctggtgctgttgctcatgcctcgtctcatttgcaaggcagagctgatccggaagcaggcccaggagaagtttgaactaagtgagaactgttcagagcggcctgggctgcgaggagctgctggggagcaactcagctttgctgctggactggtgtactcgctgagcctgctgcaggccacgctacaccgctatgagcatgccctctctcagtgcagtgtggatgtgtataagaaagtgggcagcctgtaccctgagatgagtgcccatgagcgctccttggatttcctcattgaactgctgcacaaggatcagctggatgagactgtcaatgtggagcctctcaccaaggccatcaagtactatcagcatctgtacagcatccaccttgccgaacagcctgaggactgtactatgcagctggctgaccacattaagttcacgcagagtgctctggactgcatgagtgtggaggtaggacggctgcgtgccttcttgcagggtgggcaggaggctacagatattgccctcctgctccgggatctggaaacttcatgcagtgacatccgccagttctgcaagaagatccgaaggcgaatgccagggacagatgctcctgggatcccagctgcactggcctttggaccacaggtatctgacacgctcctagactgcaggaaacacttgacgtgggtcgtggctgtgctgcaggaggtggcagctgctgctgcccagctcattgccccactggcagagaatgaggggctacttgtggctgctctggaggaactggctttcaaagcaagcgagcagatctatgggaccccctccagcagcccctatgagtgtctgcgccagtcatgcaacatcctcatcagtaccatgaacaagctggccacagccatgcaggagggggagtatgatgcagagcggccccccagcaagcctccaccggttgaactgcgggctgctgcccttcgtgcagagatcacagatgctgaaggcctgggtttgaagctcgaagatcgagagacagttattaaggagttgaagaagtcactcaagattaagggagaggagctaagtgaggccaatgtgcggctgagcctcctggagaagaagttggacagtgctgccaaggatgcagatgagcgcatcgagaaagtccagactcggctggaggagacccaggcactgctgcgaaagaaggagaaagagtttgaggagacaatggatgcactccaggctgacatcgaccagctggaggcagagaaggcagaactaaagcagcgtctgaacagccagtccaaacgcacgattgagggactccggggccctcctccttcaggcattgctactctggtctctggcattgctggtgaagaacagcagcgaggagccatccctgggcaggctccagggtctgtgccaggcccagggctggtgaaggactcaccactgctgcttcagcagatctctgccatgaggctgcacatctcccagctccagcatgagaacagcatcctcaagggagcccagatgaaggcatccttggcatccctgccccctctgcatgttgcaaagctatcccatgagggccctggcagtgagttaccagctggagcgctgtatcgtaagaccagccagctgctggagacattgaatcaattgagcacacacacgcacgtagtagacatcactcgcaccagccctgctgccaagagcccgtcggcccaacttatggagcaagtggctcagcttaagtccctgagtgacaccgtcgagaagctcaaggatgaggtcctcaaggagacagtatctcagcgccctggagccacagtacccactgactttgccaccttcccttcatcagccttcctcagggccaaggaggagcagcaggatgacacagtctacatgggcaaagtgaccttctcatgtgcggctggttttggacagcgacaccggctggtgctgacccaggagcagctgcaccagcttcacagtcgcctcatctcctaagcactcctttcccctgctgtccccttcgaccctcagccctctggtgccgctctgcccgatgcacagccacctcagccagcccccaggtagaaacgtgggttaagctcttcctgccccgttcagcttcactcccaccctttcagcgtcctgccccttcaccttgacccgggttcccccactcccattccctggcctctgccataatttgttgttcaactgctccctccttcctgaggggcctcagggcttgtggggggtaggctgagaccccaccaccaaaggttaagtgaggtccccttgattgaggacttcaccccttgattaaagcaacttctgcttcagtgc

SEQ ID NO: 72998 - protein, 128 aa, Artificial Sequence
  derived and/or modified sequence
MKSLILLAILAALAVVTLCYGEWQKEENFGFDIVSVLSLNWHRAQESHESMESYELNPFINRRNANTFISPQQRWRAKVQERIRERSKPVHELNREACDDYRLCERYAMVYGYNAAYNRYFRKRRGTK

SEQ ID NO: 72999 - DNA, 1473 bp, Artificial Sequence
  derived and/or modified sequence
ctggttcctcccctctcaactgctctggttcttataaaaacctcacagccttccactaacatcccgtaggagcctctctccctactgctgctacacaagaccctgagactgacctgcaggacgaaaccatgaagagcctgatccttcttgccatcctggccgccttagcggtagtaactttgtgttatggagagtggcagaaagaagaaaacttcggctttgatatcgtttcagttctctctctgaactggcatcgtgcccaggaatcacatgaaagcatggaatcttatgaacttaatcccttcattaacaggagaaatgcaaataccttcatatcccctcagcagagatggagagctaaagtccaagagaggatccgagaacgctctaagcctgtccacgagctcaatagggaagcctgtgatgactacagactttgcgaacgctacgccatggtttatggatacaatgctgcctataatcgctacttcaggaagcgccgagggaccaaatgagactgagggaagaaaaaaaatctctttttttctggaggctggcacctgattttgtatccccctgtagcagcattactgaaatacataggcttatatacaatgcttctttcctgtatattctcttgtctggctgcacccctttttcccgcccccagattgataagtaatgaaagtgcactgcagtgagggtcaaaggagagtcaacatatgtgattgttccataataaacttctggtgtgatactttcatcttgtaaatctgctttcttttgggaagatattgagatatttaaatcatggcccaccttacccaaaataggagattctgttcatctcatatctagtattaattagaaaaataactacataaaaagaaggaagctaagaaggcactcactcagccataaattctctaaaccctctctaccttggaatccgtgaatggaatctggtatgttttttgcaggattttcctattgtaaattgtggcaaatacagggctcccttcatttgcttttcatctcttatgcatcaaagtcaaaaacatttctgaatcaagataatctagaagagaaaaaaggaggaaaaggaaaagagaaagcagaagggacaaataaaagcaattggcaaaaactgtcaataatagtttatacacttaactatatcaataatcacattatatgtaaatagtctaaacaatccaattattttttacttctacttatgttatatttttacttctacatttgttaaaggttccacgctacatttttactattcttgctttaaataattttaataatttcttttaaagtttagataataagaaaatatcccgggccaggcacagtggccacacctgtaatctcagtagccatgaccataccaatgcactccagcctgtgaaacagagtgagactctgtctctacagaaaaataaaaaagaaaagaaagaaaag

SEQ ID NO: 73000 - DNA, 387 bp, Artificial Sequence
  derived and/or modified sequence
atgaagtctctgatcctgctggccattctcgcggccctggccgtggtgaccctgtgttacggcgaatggcagaaagaggaaaattttgggttcgatattgtcagcgtactgagtctgaactggcacagagcacaggagtcacacgaaagcatggaatcctacgaactaaatccttttattaataggcgaaatgctaacacgtttatttccccccaacagcgatggcgggcaaaagtccaggagaggataagagaaaggtcgaaaccagtgcacgagctgaatcgggaagcgtgtgacgattatcggctttgtgaaaggtatgccatggtatatggctacaatgccgcttacaatcgatattttcggaagcggaggggcacaaagtag

SEQ ID NO: 73001 - DNA, 387 bp, Artificial Sequence
  derived and/or modified sequence
atgaagagcctcatcctgctggccatcctggccgccctggccgtggtgaccctgtgctacggggagtggcagaaggaggagaactttggatttgatattgtgtctgtgctgagcctgaactggcaccgggcccaggagagccatgagagcatggagagctatgagctgaaccccttcatcaacagaagaaatgccaacaccttcatcagcccccagcagcgctggagggccaaggtgcaggagcgcatccgggagaggagcaagcctgtgcatgagctgaaccgggaggcctgtgatgactaccgcctgtgtgaaagatatgccatggtgtatggctacaatgctgcctacaaccgctacttcaggaagaggcggggcaccaagtag

SEQ ID NO: 73002 - DNA, 694 bp, Artificial Sequence
  derived and/or modified sequence
cccgtaggagcctctctccctactgctgctacacaagaccctgagactgacctgcaggacgaaaccatgaagagcctgatccttcttgccatcctggccgccttagcggtagtaactttgtgttatggagagtggcagaaagaagaaaacttcggctttgatatcgtttcagttctctctctgaactggcatcgtgcccaggaatcacatgaaagcatggaatcttatgaacttaatcccttcattaacaggagaaatgcaaataccttcatatcccctcagcagagatggagagctaaagtccaagagaggatccgagaacgctctaagcctgtccacgagctcaatagggaagcctgtgatgactacagactttgcgaacgctacgccatggtttatggatacaatgctgcctataatcgctacttcaggaagcgccgagggaccaaatgagactgagggaagaaaaaaaatctctttttttctggaggctggcacctgattttgtatccccctgtagcagcattacagaaatacataggcttatatacaatgcttctttcctgtatattctcttgtctggctgcacccctttttcccgcccccagattgataagtaatgaaagtgcactgcagtgagggtcaaaggagagtcaacatatgtgattgttccataataaacttctggtgtgat

SEQ ID NO: 73003 - DNA, 387 bp, Artificial Sequence
  derived and/or modified sequence
atgaagagcctgatcctgctggccatcctggccgccctggccgtggtgaccctctgctacggagaatggcagaaagaggagaatttcggattcgacattgtatctgtcctgagtcttaactggcatagggcacaggagagtcatgagtcaatggaatcttacgagttaaacccctttatcaataggcgcaacgctaatacctttatatctccacagcagcgatggcgggctaaagtgcaggaacgcattagagagcgctccaaacctgtgcatgagcttaacagggaggcctgcgatgattaccgtttgtgtgagcgctatgccatggtgtatggctataacgcagcttacaatagatactttcgcaagagaagggggacgaagtag

SEQ ID NO: 73004 - DNA, 387 bp, Artificial Sequence
  derived and/or modified sequence
atgaaaagcctgattctcctcgcgatcctcgccgcactggcggttgtgacactctgctacggcgaatggcaaaaggaggagaacttcgggtttgatatagtgagtgtgctgagcctcaactggcacagggctcaggagagtcatgaatcaatggagtcttacgagctcaacccctttataaacagaaggaatgccaacacattcatcagtcctcagcagcgatggagagccaaagttcaggagcgcatacgagagcgctccaagcccgttcacgagttaaaccgggaggcatgtgacgattacaggctgtgcgaacggtacgcaatggtgtatggctacaatgcagcctataatcgatatttccgaaaaaggagaggaaccaagtag

SEQ ID NO: 73005 - DNA, 387 bp, Artificial Sequence
  derived and/or modified sequence
atgaagagcctgatcctgctggccatcctggccgccctggccgtggtgaccctgtgctacggcgagtggcagaaggaggagaacttcggcttcgacatcgtgagcgtgctgagcctgaactggcacagagcccaggagagccacgagagcatggagagctacgagctgaaccccttcatcaacagaagaaacgccaacaccttcatcagcccccagcagagatggagagccaaggtgcaggagagaatcagagagagaagcaagcccgtgcacgagctgaacagagaggcctgcgacgactacagactgtgcgagagatacgccatggtgtacggctacaacgccgcctacaacagatacttcagaaagagaagaggcaccaagtag

SEQ ID NO: 73006 - protein, 642 aa, Artificial Sequence
  derived and/or modified sequence
MSRSPDAKEDPVECPLCMEPLEIDDINFFPCTCGYQICRFCWHRIRTDENGLCPACRKPYPEDPAVYKPLSQEELQRIKNEKKQKQNERKQKISENRKHLASVRVVQKNLVFVVGLSQRLADPEVLKRPEYFGKFGKIHKVVINNSTSYAGSQGPSASAYVTYIRSEDALRAIQCVNNVVVDGRTLKASLGTTKYCSYFLKNMQCPKPDCMYLHELGDEAASFTKEEMQAGKHQEYEQKLLQELYKLNPNFLQLSTGSVDKNKNKVTPLQRYDTPIDKPSDSLSIGNGDNSQQISNSDTPSPPPGLSKSNPVIPISSSNHSARSPFEGAVTESQSLFSDNFRHPNPIPSGLPPFPSSPQTSSDWPTAPEPQSLFTSETIPVSSSTDWQAAFGFGSSKQPEDDLGFDPFDVTRKALADLIEKELSVQDQPSLSPTSLQNSSSHTTTAKGPGSGFLHPAAATNANSLNSTFSVLPQRFPQFQQHRAVYNSFSFPGQAARYPWMAFPRNSIMHLNHTANPTSNSNFLDLNLPPQHNTGLGGIPVAGIPASSGNSLDSLQDDNPPHWLKSLQALTEMDGPSAAPSQTHHSAPFSTQIPLHRASWNPYPPPSNPSSFHSPPPGFQTAFRPPSKTPTDLLQSSTLDRH

SEQ ID NO: 73007 - DNA, 1929 bp, Artificial Sequence
  derived and/or modified sequence
atgtcgcgaagtcccgacgccaaggaggacccggttgaatgtccactgtgtatggaaccattagaaatcgacgatatcaacttctttccctgcacttgtggataccagatctgtagattctgctggcaccgcattaggacagacgagaacgggttgtgccctgcgtgtcgaaaaccttatcctgaagaccctgccgtatataaaccgctgtcacaagaggaactgcagagaattaagaatgagaaaaaacagaagcagaatgagagaaagcaaaaaatcagcgagaaccgcaagcaccttgccagcgtccgtgtcgttcagaaaaatctggtcttcgttgttggactctcccaacggctggctgacccagaggtccttaagagaccagagtactttgggaagtttggtaaaatacacaaagtggttattaacaactctactagttacgctggtagccaggggcctagtgcctcagcctacgttacctacatcagatccgaagacgccctaagagcaattcaatgtgttaataacgttgtggtcgacggtcgcaccctgaaagccagcttgggcactacgaagtactgcagttactttctgaagaatatgcagtgtcccaagccggactgtatgtacctccacgagctgggagatgaagcggcctcattcaccaaagaagagatgcaagccggcaagcatcaggaatatgaacagaagctattgcaggagctctacaaactgaatcctaatttcctgcagctcagcacgggctcagtggacaagaacaaaaataaggtgactcctctccaacggtatgacacaccaatcgacaaacccagtgacagtctaagtataggaaatggggacaactcgcagcagatctcaaactctgatacacccagtcccccacctggtctctccaaaagcaaccccgtcatacccatttcttccagtaaccacagtgcaaggtcgccgttcgagggggcggttacagagtcccaatcccttttcagtgataactttcggcatccaaaccctatcccctccggactgccaccttttccatcgtccccacaaacaagctccgattggcctacggcccctgaaccacaaagcttgtttacctcggagacaattcccgtatcttccagtaccgattggcaagcagctttcggcttcggatccagcaaacagcccgaggatgatctcggtttcgatccattcgatgtcactcgaaaggccctggccgatctgattgaaaaggagctgtctgtgcaagaccaaccgagtttatcacccacatccctgcaaaatagctccagccacactaccacagcaaagggtcccggtagtgggtttctgcaccccgccgccgctaccaacgccaatagtctgaacagcaccttttctgtgctgccccagaggttccctcaatttcagcagcacagagcagtctacaacagtttctctttccccggccaggctgcacgctacccatggatggcctttccaaggaatagcatcatgcatctgaaccacactgctaatcctacttcaaattctaattttcttgatctaaatttgcccccccagcataatactgggctggggggtattccagtcgccggaattcccgcttcctcaggaaacagcctagacagcctccaggatgataatcccccccactggctaaagagcctccaggccctcacggagatggacggtccttcggccgcaccttctcaaacccaccacagtgccccctttagtacacaaattccattacaccgtgcctcctggaacccttatcctccaccaagcaacccatcgtccttccatagccctccacccgggtttcagactgcattcaggcccccctccaagacccccacagaccttcttcagagttccactctggacagacattag

SEQ ID NO: 73008 - DNA, 1929 bp, Artificial Sequence
  derived and/or modified sequence
atgagccgcagcccagatgccaaggaggaccctgtggagtgccccctgtgcatggagcccctggagattgatgacatcaacttcttcccctgcacctgtggctaccagatctgccgcttctgctggcaccgcatcagaacagatgaaaatggcctgtgcccagcctgcaggaagccctacccagaggaccctgctgtgtacaagcccctgagccaggaggagctgcagaggatcaagaatgagaagaagcagaagcagaatgaaaggaagcagaagatcagtgaaaataggaagcacctggcctctgtgcgggtggtgcagaagaacctggtgtttgtggtgggcctgagccagaggctggccgaccctgaggtgctgaagaggcctgagtactttgggaagtttgggaagatccacaaggtggtgatcaacaacagcaccagctatgccggcagccagggccccagcgccagcgcctacgtgacctacatccgctcagaagatgccctgcgggccatccagtgtgtgaacaacgtggtggtggatggccgcaccctgaaggccagcctgggcaccaccaagtactgcagctacttcctgaagaacatgcagtgccccaagccagactgcatgtacctgcacgagctgggagatgaggccgccagcttcaccaaggaggagatgcaggccggcaagcaccaggagtatgagcagaagctgctgcaggagctgtacaagctgaaccccaacttcctgcagctgagcacaggctctgtggacaagaacaagaacaaggtgacccccctgcagagatatgacacccccatcgacaagcccagcgacagcctgagcattggaaatggagacaacagccagcagatcagcaacagcgacacccccagccccccacctggcctgagcaagagcaaccctgtgatccccatcagcagcagcaaccacagcgcccggagcccctttgagggcgctgtgacagagagccagagcctcttcagtgacaacttccgccaccccaaccccatccccagcggcctgccccccttccccagcagcccccagaccagcagtgactggcccacagcccctgagccccagagcctcttcaccagcgagaccatccctgtgagcagcagcacagactggcaggccgcctttggatttggcagcagcaagcagccagaagatgacctgggctttgacccctttgatgtgaccaggaaggccctggccgacctgattgagaaggagctgtctgtgcaggaccagcccagcctgagccccaccagcctgcagaacagcagcagccacaccaccacagccaagggccctggcagcggcttcctgcaccctgctgctgccaccaatgccaacagcctgaacagcaccttctctgtgctgccccagcgcttcccccagttccagcagcacagagctgtgtacaacagcttctccttccctggccaggccgcccgctacccctggatggccttccccagaaattccatcatgcacctgaaccacacagccaaccccaccagcaacagcaacttcctggacctgaacctgcccccccagcacaacacaggcctgggcggcatccctgtggccggcatcccagccagcagcggcaacagcctggacagcctgcaggatgacaaccccccccactggctgaagagcctgcaggccctgacagagatggatggccccagcgctgcccccagccagacccaccacagcgcccccttcagcacccagatccccctgcaccgggcctcctggaacccctaccccccacccagcaaccccagcagcttccacagccccccacctggcttccagacagccttccggccccccagcaagacccccacagacctgctgcagagcagcaccctggacagacactag

SEQ ID NO: 73009 - DNA, 1929 bp, Artificial Sequence
  derived and/or modified sequence
atgagccggagccccgacgccaaggaggaccccgtggagtgccccttgtgcatggagccactcgagattgatgacatcaacttctttccctgcacatgtgggtaccagatttgtaggttttgttggcaccgtattcgaactgacgaaaacggcctgtgtccggcttgccggaaaccctaccccgaagatcctgccgtgtacaaacccttgtctcaagaagaactgcagagaatcaagaacgagaagaaacagaagcagaacgagaggaagcagaaaatcagcgagaatcgcaagcatctggccagcgtccgtgtcgtacagaagaatctggtgttcgtagtcggtctgagtcagaggctcgccgaccccgaagtgctgaagcgtcccgaatattttggcaaattcggtaagatccacaaggtcgtgataaataactccacatcctacgccggatcccagggaccctccgcctcggcttacgttacttacatacgaagtgaagatgccctgagggccatccaatgcgttaataatgttgtggttgacgggagaactttaaaagcgtccctcgggactacaaaatattgcagttacttcctgaaaaacatgcaatgtccaaagccagattgcatgtacttgcatgagcttggcgacgaggctgcttcatttaccaaagaggaaatgcaagctggcaagcaccaggagtatgagcagaagttgctgcaggagctctacaagttgaaccccaatttcttacagctaagcacaggttccgttgacaagaacaagaacaaggtcactccactgcaaagatatgatacacccatagataaaccaagcgatagtctctcaataggaaatggcgacaactcacagcaaatatcgaattcagataccccctccccacctccgggtttaagtaagtccaaccccgttatcccaatctcctcctctaaccacagtgcccggtcccctttcgaaggtgctgtgacagagtctcagtccctgtttagtgataattttcggcatcccaaccccatcccgagcggactcccacccttcccctcaagtccacagacatcaagcgattggccgactgcccctgagccacagtccttattcacctccgaaacaatccctgttagttcctcaaccgattggcaggctgcttttggctttggcagcagcaaacaacccgaggacgacctgggctttgacccatttgacgttacccgtaaggctttggcggacttgatcgaaaaagagctgtccgtccaggaccagccttctctgagccccacaagtctgcagaattcttcctcacatactaccacagcaaagggccccggctctgggttcctacacccagcagccgcaacaaacgctaattcacttaacagtacgttttccgtcctgcctcagcgttttccccagttccagcagcaccgtgcagtttacaattcattttccttccctggacaggctgccaggtacccgtggatggcattcccaaggaactccatcatgcacctgaatcacaccgctaaccccacaagtaactctaactttcttgatctgaacctacctccacaacataacacaggcctcggcggcatcccagtcgctggcattcccgcctcaagcggcaatagtcttgactcacttcaggacgacaatccaccccactggttaaagtcgctgcaagccctgactgagatggacggccccagcgccgctccatctcaaacccaccattccgcccccttttccacacagatcccgctgcatcgcgcaagttggaacccatatccccctccaagcaatcccagctcctttcactcccctcctcccggcttccagacagccttcagacctccatctaagacaccaacagatctgctccagtcatctaccttagatcgccactag

SEQ ID NO: 73010 - DNA, 1929 bp, Artificial Sequence
  derived and/or modified sequence
atgtccagatctcctgatgctaaggaggatccagtggagtgccctctttgtatggagcccctggagattgacgatatcaatttctttccctgcacttgcggctaccagatctgtagattttgctggcaccgcattaggactgatgagaacggcctgtgccccgcatgcaggaaaccctaccctgaggacccggctgtatacaagccactgtcgcaagaagagctccagagaataaaaaatgagaagaaacagaagcagaatgagagaaagcagaaaatcagtgaaaaccgcaaacatctggcgtctgtcagggtggttcaaaagaatctagtgttcgtggtgggactgtcccagcgacttgccgacccggaggtcctgaaaaggccagaatacttcggaaaattcgggaaaatccacaaggttgtgattaacaatagtacctcatatgctgggagccagggccctagcgcgtcagcttatgttacatatattcgtagcgaagacgcactacgggctatccagtgcgtgaacaatgtggtggttgacggcaggactctgaaagctagccttggtaccaccaaatattgctcttattttctaaagaatatgcagtgtcctaaacccgactgtatgtacctacatgaactcggtgatgaagccgcatcatttacaaaggaggagatgcaggcgggtaagcatcaggaatatgagcagaagttgctccaggaactgtacaaactgaatcctaactttttgcaattgtcaacggggtctgtggacaagaataagaacaaggtcacacccttacaaagatacgacacaccaatcgataagcctagcgactctctcagtattgggaatggtgataattcccagcagatctccaacagtgacacaccttctcctccacctggcctaagcaaaagtaatcctgttattcccatcagctcttctaaccactccgctcgctccccctttgagggcgctgtaaccgagtctcagtcactcttcagtgataatttcagacatcccaaccccattccctcaggtttgcctcctttccccagcagtccacagacatcttctgactggccaacagccccagagccccaaagcctgttcacatccgagacaatacccgtgagcagtagcaccgattggcaagccgctttcggtttcgggagttccaaacagccggaggatgatctgggcttcgacccatttgatgtcaccaggaaggccctcgccgacctaatagagaaggaactcagtgtgcaggaccaaccatctttgagtcccaccagcttgcagaatagcagttcccacacaactaccgctaaaggacccggaagcggctttctgcacccagccgcagcgactaacgcaaattccctgaattcaacttttagcgtcttgcctcaaagatttccccagttccaacagcaccgggcagtctataacagtttttcctttcctggccaggcagcccgatacccctggatggcctttccaagaaactcaatcatgcatctgaaccatacagctaacccaacatctaactctaactttcttgatttgaatctgccaccccaacataatactggcttgggaggcattcctgtggccggaattccagcgagcagcggaaattccttagacagtttacaagatgacaatccccctcattggcttaagtccttgcaggcactgaccgaaatggatggcccatcagccgcacccagccagacccaccactcagccccatttagcacacagataccactacatagagcctcctggaatccttaccctccacccagtaatccatctagtttccattcacccccacctggttttcagacagcatttcggccacccagcaaaacacccacagacttgctccaatcaagtacactggaccgacactag

SEQ ID NO: 73011 - DNA, 3297 bp, Artificial Sequence
  derived and/or modified sequence
tggtggcccgtctggctgtggaacccaccgaaagctgagagtctctctctcagccgtaaaggtcggactcgctgaagcaatcaggcccggttctgaagagttttttccccgacgctcgttcggtggtttcttgtgaggacgcggcagcccgtggagtcggctgagggaaaagcgaggcaaggcaggcgggtcgtcaaagtcctacattttagctttcagtgctgaacttccttctcccttaaattattataaacttttgctgctgtttaataaacgtgaagatgtctcgcagtcctgatgcgaaggaagaccctgtggagtgccctctttgcatggagcccttggagatagatgatatcaactttttcccttgcacctgtggctaccagatttgccgattttgttggcatcgaattcgcactgatgaaaatgggctttgtcctgcatgtagaaagccatatccagaagacccagcagtttataaaccactctcccaggaagagctgcaaaggataaagaatgagaaaaaacagaaacaaaatgagagaaaacagaaaatatcagaaaatcgcaaacatttggctagtgtacgtgtcgtacaaaaaaacctcgtctttgttgtaggtttatctcagcgcctagcagacccagaggttttaaaacgaccagaatattttgggaagtttggtaaaatacataaagttgtcatcaataatagcacatcatatgcaggctcacagggtccaagtgccagtgcttatgtaacctatatccggtcagaagacgctctcagagccatacagtgtgtcaacaatgtggtagtagatggcagaacacttaaggcatctctaggtacaacaaaatactgcagttacttcttaaagaatatgcagtgtccaaaacctgactgcatgtatcttcatgaattgggggatgaggcggccagcttcacaaaagaggaaatgcaggcgggtaaacaccaagaatatgaacagaagctacttcaagaattatataaattaaatcccaattttcttcagctatctacgggttcagttgataaaaataagaacaaagtgacaccactgcagaggtatgatacccccattgacaaaccttcagattctctcagtatagggaacggtgataattcccagcagatatctaacagtgatacgccttcaccaccacctggtttgtcaaaatccaatccagtcatccccatcagttcatccaatcacagtgcacggtccccttttgaaggggcagtaacagagtcacagtcgttattctcagacaattttcgccatcccaaccctatcccaagtgggcttcctcctttccccagctccccacagacatccagtgactggcctacagcaccagaaccacagagcctcttcacatcagaaacaatcccagtatcatcctctacagactggcaagcagcttttggctttggttcttctaaacaaccagaggatgacttgggttttgatcccttcgatgtcactcgaaaagccttagcagacctgattgagaaggaactgtccgttcaagaccaaccttccctttcgcccacatctcttcagaactcctcttcacacactacaaccgccaaaggtccaggctctggattcctgcatcctgctgcagctacaaatgccaattctctcaatagtaccttttcagtcttgccccagaggttccctcaatttcagcagcaccgagcggtttataattcattcagttttccaggccaggcagcccgctatccttggatggcctttccacgcaatagcatcatgcacttgaaccacacagcaaaccccacctcaaatagtaatttcttggacttgaatctcccgccacagcacaacacaggtctgggagggatccctgtagcaggtattccagcgtcttcaggaaacagtttagactctcttcaagatgacaatcctccacactggctaaaatcccttcaggccctcacagagatggacggccccagcgctgctccatcacagacccaccacagcgcccccttcagcacacagatcccgctgcacagagccagttggaatccctaccctcctccttcaaacccttccagcttccactccccacccccaggctttcagacagccttcagaccccccagcaaaacccccacagatttactacagagttcaacactggaccgccattaggcaaagaggagcaaccattagaaaatgcaggatttgtcccactctgttttctccctctcagcccaccacccacagctcccttctcatctcttatgttctgaagaatccagtacctgatcaattttttttctccctaaccccagatgcaatgcgatcacagggtcattaccatctctttattaattgtaaaaatttttgttgatccagcatttgagtgacactgttgaatgtttctaaaaatgcctttttaaggagagaaaaaaaaatcaaagggcagtctcaatacttagaaaattattgtttgtctgttgcgcataataatgacataatctgcttagcagaaaatgacgattaatctataggaaagctcaagtaaatgcattatcaactgcagaagtttgaaaaccaggttcatttacgtgagattgctaaatgcatgggggaaagcagtggtcctagcatccatcttgtattcagcttatcattattgcagggaaaatgcttttaatttaaattaatttttaattcttttggcaagttgatggcaaggacttgattgtgtcattaagcaaaagaatgtattggaagttgatggaaagacaaattcatctgtagtagtaactggccgattgctaaagagttcataaggaggtgagaagtaatttttttaaaggagaaaaattttttggctttagatttaaagtaaattgaaatgttttaaagaaaaaagtattcacagatttaatacctattaataatataagagctgaaatgtaagtcatttcttcagtccttctcctctgtcggaatcttttttgttttaccataaattcacctgacgagggcactctgagatagcactgctctggggccatctgatcaccatcgggagcaaatctctgacctccttgcctgcagcttttacttaaccctgtagtttctggacgtttgtgcagtattgaaaagacaggagaaaagaaaacagaaacctggttataacctgacgctaaaactaaaaacaaggaaatgtacctctttcttcagaattaaaactaaaatcttaaataaaacagaaaacttgatggtg

SEQ ID NO: 73012 - DNA, 1929 bp, Artificial Sequence
  derived and/or modified sequence
atgagcagaagccccgacgccaaggaggaccccgtggagtgccccctgtgcatggagcccctggagatcgacgacatcaacttcttcccctgcacctgcggctaccagatctgcagattctgctggcacagaatcagaaccgacgagaacggcctgtgccccgcctgcagaaagccctaccccgaggaccccgccgtgtacaagcccctgagccaggaggagctgcagagaatcaagaacgagaagaagcagaagcagaacgagagaaagcagaagatcagcgagaacagaaagcacctggccagcgtgagagtggtgcagaagaacctggtgttcgtggtgggcctgagccagagactggccgaccccgaggtgctgaagagacccgagtacttcggcaagttcggcaagatccacaaggtggtgatcaacaacagcaccagctacgccggcagccagggccccagcgccagcgcctacgtgacctacatcagaagcgaggacgccctgagagccatccagtgcgtgaacaacgtggtggtggacggcagaaccctgaaggccagcctgggcaccaccaagtactgcagctacttcctgaagaacatgcagtgccccaagcccgactgcatgtacctgcacgagctgggcgacgaggccgccagcttcaccaaggaggagatgcaggccggcaagcaccaggagtacgagcagaagctgctgcaggagctgtacaagctgaaccccaacttcctgcagctgagcaccggcagcgtggacaagaacaagaacaaggtgacccccctgcagagatacgacacccccatcgacaagcccagcgacagcctgagcatcggcaacggcgacaacagccagcagatcagcaacagcgacacccccagccccccccccggcctgagcaagagcaaccccgtgatccccatcagcagcagcaaccacagcgccagaagccccttcgagggcgccgtgaccgagagccagagcctgttcagcgacaacttcagacaccccaaccccatccccagcggcctgccccccttccccagcagcccccagaccagcagcgactggcccaccgcccccgagccccagagcctgttcaccagcgagaccatccccgtgagcagcagcaccgactggcaggccgccttcggcttcggcagcagcaagcagcccgaggacgacctgggcttcgaccccttcgacgtgaccagaaaggccctggccgacctgatcgagaaggagctgagcgtgcaggaccagcccagcctgagccccaccagcctgcagaacagcagcagccacaccaccaccgccaagggccccggcagcggcttcctgcaccccgccgccgccaccaacgccaacagcctgaacagcaccttcagcgtgctgccccagagattcccccagttccagcagcacagagccgtgtacaacagcttcagcttccccggccaggccgccagatacccctggatggccttccccagaaacagcatcatgcacctgaaccacaccgccaaccccaccagcaacagcaacttcctggacctgaacctgcccccccagcacaacaccggcctgggcggcatccccgtggccggcatccccgccagcagcggcaacagcctggacagcctgcaggacgacaaccccccccactggctgaagagcctgcaggccctgaccgagatggacggccccagcgccgcccccagccagacccaccacagcgcccccttcagcacccagatccccctgcacagagccagctggaacccctaccccccccccagcaaccccagcagcttccacagccccccccccggcttccagaccgccttcagaccccccagcaagacccccaccgacctgctgcagagcagcaccctggacagacactag

SEQ ID NO: 73013 - protein, 575 aa, Artificial Sequence
  derived and/or modified sequence
MSRSPDAKEDPVECPLCMEPLEIDDINFFPCTCGYQICRFCWHRIRTDENGLCPACRKPYPEDPAVYKPLSQEELQRIKNEKKQKQNERKQKISENRKHLASVRVVQKNLVFVVGLSQRLADPEVLKRPEYFGKFGKIHKVVINNSTSYAGSQGPSASAYVTYIRSEDALRAIQCVNNVVVDGRTLKASLGTTKYCSYFLKNMQCPKPDCMYLHELGDEAASFTKEEMQAGKHQEYEQKLLQELYKLNPNFLQLSTGSVDKNKNKVTPLQRYDTPIDKPSDSLSIGNGDNSQQISNSDTPSPPPGLSKSNPVIPISSSNHSARSPFEGAVTESQSLFSDNFRHPNPIPSGLPPFPSSPQTSSDWPTAPEPQSLFTSETIPVSSSTDWQAAFGFGSSKQPEDDLGFDPFDVTRKALADLIEKELSVQDQPSLSPTSLQNSSSHTTTAKGPGSGFLHPAAATNANSLNSTFSVLPQRFPQFQQHRAVYNSFSFPGQAARYPWMAFPRNSIMHLNHTANPTSNSNFLDLNLPPQHNTGLGGIPVAGEEEVKVSTMPLSTSSHSLQQGQQPTSLHTTVA

SEQ ID NO: 73014 - protein, 433 aa, Artificial Sequence
  derived and/or modified sequence
MSRSPDAKEDPVECPLCMEPLEIDDINFFPCTCGYQICRFCWHRIRTDENGLCPACRKPYPEDPAVYKPLSQEELQRIKNEKKQKQNERKQKISENRKHLASVRVVQKNLVFVVGLSQRLADPEVLKRPEYFGKFGKIHKVVINNSTSYAGSQGPSASAYVTYIRSEDALRAIQCVNNVVVDGRTLKASLGTTKYCSYFLKNMQCPKPDCMYLHELGDEAASFTKEEMQAGKHQEYEQKLLQELYKLNPNFLQLSTGSVDKNKNKVTPLQRYDTPIDKPSDSLSIGNGDNSQQISNSDTPSPPPGLSKSNPVIPISSSNHSARSPFEGAVTESQSLFSDNFRHPNPIPSGLPPFPSSPQTSSDWPTAPEPQSLFTSETIPVSSSTDWQAAFGFGSSKQPEDDLGFDPFDVTRKALADLTEPIERKRLAVLKRR

SEQ ID NO: 73015 - DNA, 1728 bp, Artificial Sequence
  derived and/or modified sequence
atgagccgtagtcccgacgccaaggaggaccctgtcgagtgccccctctgtatggagccattagagattgatgacatcaatttctttccttgtacttgcggataccagatttgcagattctgttggcaccggattcgcactgatgagaacggcctttgtcctgcttgccgcaaaccatatcccgaggaccccgccgtctataagcctctgagccaggaggagctccaaagaatcaagaacgagaagaagcagaaacagaatgaaagaaaacaaaagatcagcgaaaaccgcaaacatttggcgtccgtaagggtcgttcagaagaatttagttttcgttgtgggcctgtcccaacgcctggccgaccccgaagtgctgaagaggcccgagtacttcggcaagttcggtaaaatccataaagttgtgataaacaattccacttcatacgcgggatctcagggtccatctgcctcagcgtatgtgacttacataagatccgaagatgctctccgtgctatacagtgtgttaacaatgtggtggtcgacgggcgtacactcaaagctagcctgggtacaacgaaatattgctcctacttcctgaagaacatgcagtgccccaagcccgactgtatgtatctccacgaactcggcgacgaagccgcaagctttacaaaggaagagatgcaggccggaaagcaccaggaatacgagcagaaactgctgcaggaactgtataaattgaaccccaattttctacagctcagcacaggcagcgtggataaaaacaaaaataaagttacacccctacagaggtacgacacccccatcgacaagccgtctgattccctatccatcggcaacggtgacaactcgcaacaaatcagcaactccgacactccgtctcctccgcccggccttagcaagagtaatccagtcattccaatttcctcctcaaaccattcggctcgcagcccttttgaaggggccgtgaccgagtcacaatctctgttctcagacaactttcggcatccaaatcctattccttctgggctccctccatttccatcttcccctcagacctccagcgattggccaacagctcccgagccccagagcctgttcacatccgaaactatcccagtttcctcgtccactgactggcaggcggcatttggattcggcagtagcaaacagcccgaagacgaccttggctttgatccttttgacgtaaccagaaaagctctcgccgacttaatagagaaggagttgtcagtccaagatcaacccagcctctcgcctactagcctacagaacagttcttctcatactaccaccgccaagggtcccggatctggctttcttcacccagcggccgcgactaacgccaatagcctaaactctacattttcagtgctgcctcagcggttccctcagtttcagcagcatagagccgtatacaatagtttctcgttccctgggcaagcagcgagatatccttggatggctttccctcgcaacagcatcatgcatctcaatcacactgccaaccctacctccaatagtaacttccttgacctgaaccttccaccccaacataatactggcctcggagggattcctgtcgccggggaggaggaggtgaaggtgtccaccatgcccctgagtacatcttctcactcactgcagcaggggcagcagccaacgtctcttcacacgacagtggcatag

SEQ ID NO: 73016 - DNA, 1302 bp, Artificial Sequence
  derived and/or modified sequence
atgagtagatccccagacgctaaggaggatcctgtggagtgtccactgtgcatggagcctctcgaaattgacgacattaacttcttcccatgcacttgcggttaccagatttgtcgattctgctggcaccgaatccgcacggacgaaaacggtctgtgtcctgcctgccgcaaaccttatccagaagatccagctgtttacaaacctctaagccaggaagagttgcagcgaatcaagaacgagaagaagcagaaacaaaacgagaggaaacaaaagatatcagagaatcgtaaacatctagctagcgtgcgcgtggtacaaaagaatctggtcttcgttgtcgggctctcccaaaggctagcagatccggaggtccttaaaaggcctgagtatttcggcaagtttggcaaaatccataaagtggtaattaataactctacttcatatgccggatctcagggtccgtccgcttctgcatacgtgacctacataagaagcgaagacgcactgagggcaatccagtgcgtgaacaacgtggtggttgatggcaggacactgaaggccagccttggcactactaagtattgctcctattttttgaaaaacatgcagtgccccaaacctgattgcatgtacctccacgagctgggggacgaagccgcgtcgttcaccaaagaggaaatgcaagccgggaaacatcaggaatatgagcagaaactcctccaagagctatataaattaaacccgaattttctacagcttagcactggctcggtcgataaaaataagaacaaggttacccctttgcaaagatacgatacacccatagacaaacccagcgatagccttagcatagggaacggtgacaattctcagcagatttcaaactccgacacaccatcgcccccacctggcttgagtaaatcaaatccagtcatcccaattagtagcagcaaccattcagcccgatctccattcgagggagcagtgactgaatcacagtcattattctccgataattttcggcatcctaacccgatccctagcgggctgccgccatttcctagttcaccacaaacaagttctgattggccgactgcgccagagccccagtccctgttcacctccgagaccatccctgtgtcatcctctactgactggcaggccgcattcgggtttggaagctcaaagcagcccgaagacgacctgggctttgaccctttcgacgtaaccaggaaagcattggcagatctcactgagccaattgagcgaaagcggctggctgtcctgaagcgacgatag

SEQ ID NO: 73017 - DNA, 1302 bp, Artificial Sequence
  derived and/or modified sequence
atgtctcgctctccggacgctaaggaggaccctgttgaatgcccgctgtgcatggaacctttagagattgacgatatcaacttttttccgtgtacctgcggataccagatctgcaggttctgctggcacaggattcgcaccgatgaaaatggtctgtgccccgcgtgtcgaaaaccatatccagaggatcctgcagtgtacaagcccctgagccaggaggaactccagaggataaagaacgagaagaaacaaaagcagaacgagcgtaagcagaaaatctccgaaaacaggaagcacctcgcttcagtgcgcgttgtgcaaaagaaccttgtgttcgtggttggactgagccagaggctcgccgatcccgaggtcctgaagcgaccggagtatttcggaaagtttggtaagatccacaaggtggtaatcaataactctacctcctatgccggatcacaaggcccatccgcaagcgcgtacgtgacatacatacggagcgaagacgccctcagagcaatccagtgcgtgaacaacgttgttgtggacggccggacactgaaggctagcttggggacgacaaaatactgctcatacttccttaagaacatgcagtgtccaaaacccgactgtatgtacctgcatgagctgggcgatgaggctgcttcattcaccaaagaagagatgcaggctgggaagcaccaggagtacgagcaaaaactcttgcaggagctgtataagttgaaccccaatttcttgcagctctccacaggctctgtggacaagaacaagaacaaggttacgcctttacagcgctacgatacgcccatcgacaaaccttccgattcactgtcaattggtaacggagataattcccagcagatttccaatagtgatactcccagccccccaccgggtttaagtaagagcaaccctgtgattccgatcagcagctccaatcattccgcgaggtccccctttgaaggagccgtgaccgagagtcagagcctgttctcagacaactttcgacacccaaacccaattccatccgggttgcccccctttcccagcagcccacagactagtagtgactggcccaccgcgccggagcctcagtcactctttacctctgagactatccctgtgtcatcctctaccgactggcaggcggcctttgggtttggttctagtaagcagcctgaggacgacctgggcttcgacccttttgacgtgacccgtaaggcacttgcagacctcacggagcccatagagcgaaagcgtctagctgtattaaagaggcggtag

SEQ ID NO: 73018 - DNA, 1728 bp, Artificial Sequence
  derived and/or modified sequence
atgagccgcagcccagatgccaaggaggaccctgtggagtgccccctgtgcatggagcccctggagattgatgacatcaacttcttcccctgcacctgtggctaccagatctgccgcttctgctggcaccgcatcagaacagatgaaaatggcctgtgcccagcctgcaggaagccctacccagaggaccctgctgtgtacaagcccctgagccaggaggagctgcagaggatcaagaatgagaagaagcagaagcagaatgaaaggaagcagaagatcagtgaaaataggaagcacctggcctctgtgcgggtggtgcagaagaacctggtgtttgtggtgggcctgagccagaggctggccgaccctgaggtgctgaagaggcctgagtactttgggaagtttgggaagatccacaaggtggtgatcaacaacagcaccagctatgccggcagccagggccccagcgccagcgcctacgtgacctacatccgctcagaagatgccctgcgggccatccagtgtgtgaacaacgtggtggtggatggccgcaccctgaaggccagcctgggcaccaccaagtactgcagctacttcctgaagaacatgcagtgccccaagccagactgcatgtacctgcacgagctgggagatgaggccgccagcttcaccaaggaggagatgcaggccggcaagcaccaggagtatgagcagaagctgctgcaggagctgtacaagctgaaccccaacttcctgcagctgagcacaggctctgtggacaagaacaagaacaaggtgacccccctgcagagatatgacacccccatcgacaagcccagcgacagcctgagcattggaaatggagacaacagccagcagatcagcaacagcgacacccccagccccccacctggcctgagcaagagcaaccctgtgatccccatcagcagcagcaaccacagcgcccggagcccctttgagggcgctgtgacagagagccagagcctcttcagtgacaacttccgccaccccaaccccatccccagcggcctgccccccttccccagcagcccccagaccagcagtgactggcccacagcccctgagccccagagcctcttcaccagcgagaccatccctgtgagcagcagcacagactggcaggccgcctttggatttggcagcagcaagcagccagaagatgacctgggctttgacccctttgatgtgaccaggaaggccctggccgacctgattgagaaggagctgtctgtgcaggaccagcccagcctgagccccaccagcctgcagaacagcagcagccacaccaccacagccaagggccctggcagcggcttcctgcaccctgctgctgccaccaatgccaacagcctgaacagcaccttctctgtgctgccccagcgcttcccccagttccagcagcacagagctgtgtacaacagcttctccttccctggccaggccgcccgctacccctggatggccttccccagaaattccatcatgcacctgaaccacacagccaaccccaccagcaacagcaacttcctggacctgaacctgcccccccagcacaacacaggcctgggcggcatccctgtggccggggaggaggaggtgaaggtgtccaccatgcccctgagcaccagcagccacagcctgcagcagggccagcagcccaccagcctgcacaccaccgtggcctag

SEQ ID NO: 73019 - DNA, 1302 bp, Artificial Sequence
  derived and/or modified sequence
atgagccgcagcccagatgccaaggaggaccctgtggagtgccccctgtgcatggagcccctggagattgatgacatcaacttcttcccctgcacctgtggctaccagatctgccgcttctgctggcaccgcatcagaacagatgaaaatggcctgtgcccagcctgcaggaagccctacccagaggaccctgctgtgtacaagcccctgagccaggaggagctgcagaggatcaagaatgagaagaagcagaagcagaatgaaaggaagcagaagatcagtgaaaataggaagcacctggcctctgtgcgggtggtgcagaagaacctggtgtttgtggtgggcctgagccagaggctggccgaccctgaggtgctgaagaggcctgagtactttgggaagtttgggaagatccacaaggtggtgatcaacaacagcaccagctatgccggcagccagggccccagcgccagcgcctacgtgacctacatccgctcagaagatgccctgcgggccatccagtgtgtgaacaacgtggtggtggatggccgcaccctgaaggccagcctgggcaccaccaagtactgcagctacttcctgaagaacatgcagtgccccaagccagactgcatgtacctgcacgagctgggagatgaggccgccagcttcaccaaggaggagatgcaggccggcaagcaccaggagtatgagcagaagctgctgcaggagctgtacaagctgaaccccaacttcctgcagctgagcacaggctctgtggacaagaacaagaacaaggtgacccccctgcagagatatgacacccccatcgacaagcccagcgacagcctgagcattggaaatggagacaacagccagcagatcagcaacagcgacacccccagccccccacctggcctgagcaagagcaaccctgtgatccccatcagcagcagcaaccacagcgcccggagcccctttgagggcgctgtgacagagagccagagcctcttcagtgacaacttccgccaccccaaccccatccccagcggcctgccccccttccccagcagcccccagaccagcagtgactggcccacagcccctgagccccagagcctcttcaccagcgagaccatccctgtgagcagcagcacagactggcaggccgcctttggatttggcagcagcaagcagccagaagatgacctgggctttgacccctttgatgtgaccaggaaggccctggccgacctgacagagcccatcgagaggaagaggctggccgtgctgaagagaagatag

SEQ ID NO: 73020 - DNA, 1728 bp, Artificial Sequence
  derived and/or modified sequence
atgagccggagccccgacgccaaggaggaccccgtggagtgccccctgtgcatggaaccattagagatcgacgatataaatttcttcccatgcacatgcggttatcagatttgtcggttttgctggcaccgcattcgtaccgatgagaacggactttgtccagcatgcagaaagccttatccagaggacccagctgtatacaaaccactgtcacaggaggaactccagagaatcaagaacgagaaaaagcaaaaacagaatgaacgcaaacagaagattagcgagaacaggaagcacttggcatctgttcgcgttgtgcagaagaatttggtattcgtggtggggctttcacaacgattagccgatcccgaggtactcaagcgtccagaatacttcggcaaattcggaaagattcacaaggtcgtgattaataatagcactagctatgctggctcacagggcccttcggcttccgcttatgtcacatacattcgctctgaagatgcattgagggcaattcagtgcgtcaacaacgtagtggtggatggccggaccctgaaggcaagcctgggcaccacaaagtattgctcatatttcttgaaaaatatgcaatgcccaaagcccgactgcatgtatctgcacgaattgggcgatgaagctgccagttttaccaaggaggagatgcaagccggcaagcatcaggaatatgaacagaaactgctacaggagctgtataaactgaacccaaactttctgcagcttagcacgggcagtgtggataagaacaaaaacaaggtcacaccactgcagcgctatgataccccaattgacaaaccgtcagacagcctgtccatagggaatggcgataacagccagcagatttctaacagcgacacaccttccccaccccccggtctgtccaaatctaatccagtgatccctataagttcaagcaaccacagtgctaggtcaccattcgagggcgccgtgacggaaagccagtcactgttctctgataatttccggcaccctaatcccatcccgtcaggcctgcctcccttcccttcctccccacagaccagctcggattggcccactgcgccagagccgcaatctctgtttaccagcgagaccatcccagtcagctcttcaacagattggcaagccgcatttggtttcggctcctctaaacagcccgaggacgatctggggtttgacccatttgacgttacccgcaaggccctcgcagatctgattgaaaaggagctatccgtacaggaccaaccttccctctcccctacatccttgcagaatagttcttctcacacgaccacagcaaagggccccggctcagggtttctgcacccggcagccgcgaccaatgctaactcgctaaacagtacctttagcgtgcttcctcagcgctttcctcagtttcagcagcatcgggccgtttataacagttttagcttccctggacaggctgcccgctacccttggatggcttttcctcgcaactccatcatgcaccttaaccacactgctaatcccacaagcaattctaactttctggacttaaatttgccgcctcagcacaatactgggctgggcgggatcccggtggctggagaggaggaagtgaaggttagcacaatgccactcagcaccagtagtcatagtttacaacagggacagcaacccacaagcctgcatactactgtagcctag

SEQ ID NO: 73021 - DNA, 1302 bp, Artificial Sequence
  derived and/or modified sequence
atgagccggagccccgacgccaaggaggaccccgtggagtgccccctgtgtatggaacccctggaaatcgacgacattaacttttttccttgcacatgtggttatcagatctgcagattttgctggcacaggatccggactgacgagaatggcttatgtcccgcttgccggaagccgtatcccgaagatcccgcagtttacaaacctctgagccaggaagagctgcagcgcatcaagaatgagaaaaagcagaaacaaaatgagcgtaaacagaaaattagcgagaatcggaagcacctggcatccgtgcgggtggtgcaaaagaatctggtgtttgtggtgggactatcacaaagactggcagacccagaggtattaaagcgcccagaatactttggaaaatttggaaaaatacataaggtggttattaacaattcgacaagctacgcgggctcacagggcccatcagcctcagcatacgtgacatacatccgctctgaggatgccctccgggcaatccagtgcgtgaacaatgtggtcgtcgacggcagaactctgaaggccagtctgggaaccaccaagtattgtagttacttcttgaagaacatgcaatgtcccaagccagattgcatgtacctgcatgagttaggcgacgaagcggcttcctttacaaaggaggaaatgcaagctggtaagcatcaggaatatgagcaaaagctactacaggaactctacaagcttaatccgaactttttacagctgtccacagggtccgtggataagaacaagaacaaggtgacaccactgcagcgctacgacacaccgatcgataagccgagcgacagcctgagtatcgggaatggcgacaatagtcaacaaatcagcaactccgacacgccctccccaccccccggtctgtccaaatctaaccctgtaatcccgatcagttcgtctaatcacagcgcccgctctccatttgagggtgctgtgacagagagccagtccctatttagtgataatttccggcatcccaatcccatccccagcggtttgccaccgtttccctctagccctcagacttcaagtgattggcctacggcgccagagccccagagtctttttacatctgaaacaatccctgtctcttcctcaacagactggcaggcagcctttggctttgggtcttccaagcagccagaggacgatctgggcttcgacccatttgacgtcacacgtaaagctctggcggacctgacggagccaatcgaaagaaagcggctggcagtgctcaaacgcaggtag

SEQ ID NO: 73022 - DNA, 1302 bp, Artificial Sequence
  derived and/or modified sequence
atgagccggagccccgacgccaaggaggaccccgtggagtgccccctctgcatggagcccttggagattgatgacataaactttttcccatgcacctgtggataccagatctgcaggttttgttggcatcgaatccgaactgacgagaatggtctgtgtccagcttgcaggaaaccatatcctgaggatcctgctgtctacaaaccactgtcacaggaggagctccagcgtattaaaaacgagaaaaaacagaaacagaatgagcgcaaacagaagatctctgaaaataggaaacacctggccagtgtcagagtggtgcagaaaaatctggtgtttgtcgtgggcctcagtcagagactcgctgaccccgaggtgctgaagcgtcctgaatacttcggaaagtttggcaagatccataaggtagtgatcaacaactccacaagctatgccggctcgcagggcccctccgcgtccgcctatgttacttatatccggtcggaagatgcactcagggctatccagtgtgtcaacaatgtggtggtagacggccgcactctgaaggcctcactgggcacaaccaagtactgttcttattttctgaaaaacatgcaatgccctaaacctgattgcatgtacctgcacgaactgggggatgaggccgccagcttcacaaaagaggagatgcaggctggcaaacatcaggagtacgagcagaagttgctgcaggagttatataagctgaaccccaattttttgcaactgagcactggaagtgtagataaaaataagaacaaggtcactcccttacagcggtacgacactcccatcgacaaaccctccgattcactttccatcggaaacggagataactcacaacagatttctaactcggacacccccagtccacctccaggtctctctaagtcaaacccggtgattcctatcagtagtagcaatcactccgcccgctctccctttgagggcgccgtgaccgagtcgcagagtttgttttccgacaacttccgacaccccaatccaataccatctggacttcctccttttcctagctcaccacagacatcctctgattggcctaccgcccctgaaccacagtcactgtttacctccgaaacaatacctgtgtcaagctcaacagactggcaggccgcctttgggttcggctcgagcaaacagccggaggatgacctcgggttcgacccctttgacgtgacccgcaaggccctggcggatctgactgaacctatcgagagaaagcgactggctgtgctcaagaggaggtag

SEQ ID NO: 73023 - DNA, 1728 bp, Artificial Sequence
  derived and/or modified sequence
atgtcccgcagccccgacgccaaggaagatccggtcgagtgtccattgtgtatggagccattagagatagacgacattaacttctttccttgcacctgtggataccagatttgtaggttttgttggcatagaatcaggaccgacgagaacggactctgccctgcttgtagaaaaccgtatcccgaggaccctgcagtgtataagcccctgagccaggaagaactgcaaagaataaagaacgaaaaaaagcaaaaacagaatgaacgaaagcagaagatctccgagaatcgcaagcacctcgcttccgttcgggtggtgcagaagaatctggtttttgtggtagggttaagccaaagactggccgaccccgaggtactcaagcgcccagagtatttcggcaagttcgggaaaatccacaaggtcgtgattaacaattccacaagctacgctggctcacagggtcctagcgcttccgcatacgtgacatatattcgttccgaggatgccctgcgggcaatccaatgtgtcaataatgtggtggttgatgggcgaacacttaaggccagccttggaacaaccaagtattgtagttatttccttaaaaacatgcaatgccctaaacccgactgtatgtatctccacgagctgggtgacgaggcggcatccttcactaaagaagaaatgcaggcaggaaagcatcaggagtacgagcagaagctgttgcaggaactgtacaagttaaacccaaattttttgcagctgtccacagggtcggtggataagaacaaaaacaaagtgacccccctgcaaaggtatgacacacccatcgacaaacctagtgacagtctctccattggaaacggagataacagtcaacagatctccaacagcgatactcccagtcctccacccggactctctaaatcgaatcctgtcatacctatttcgtcgagcaatcattccgcgaggagtccctttgagggtgctgttaccgagagccaaagtctcttttccgacaactttcggcacccaaaccctattcctagcggactcccaccgttcccctccagccctcagacctcctctgactggccgactgcccctgaaccccaatccctgtttacttccgaaaccatccctgtcagctccagtaccgattggcaagccgcattcggatttggttcgtccaagcaacccgaagacgacttagggttcgaccccttcgacgtgacgaggaaagccctcgccgacctcatagagaaagaactcagcgttcaagaccaaccatcgctgtctcctacttctctacagaactcctcgagccacaccaccaccgccaaaggacccggttccgggtttctccaccccgcagccgctacaaacgctaactctttaaacagtacgttttccgtgcttccgcaacgcttcccccagttccagcagcatcgggctgtttataacagtttcagctttcccggtcaggcagccaggtacccctggatggccttcccacgcaactccattatgcacctgaaccatacagctaatcctacctccaacagcaactttttggatctaaacctgcctccacagcataacacaggcctaggcggaatacccgtcgctggggaggaggaggtaaaagtatccactatgccactgtcgacgagcagccattcgttgcaacaaggccaacagcctaccagcctacacaccactgtagcttag

SEQ ID NO: 73024 - DNA, 1302 bp, Artificial Sequence
  derived and/or modified sequence
atgtctagatctccagatgcaaaagaagatcccgtggaatgtcccctctgcatggagccactggagatcgatgacatcaacttcttcccatgtacctgtgggtaccagatttgtcgcttctgctggcatcgaatacggactgacgaaaatgggctttgcccagcatgccgtaagccatacccagaggacccagctgtgtacaaacctctgagtcaggaagaactccaacggatcaagaacgagaagaaacaaaagcagaacgagcggaagcaaaagatttccgagaacaggaagcacctcgcatccgtgcgcgtggtgcagaaaaatctcgtctttgtagtgggcttgtcccagaggttggccgatcccgaggtcctgaagaggcctgaatactttgggaaatttgggaaaatacacaaagtcgtgatcaacaatagcacttcctacgccggatcacagggccctagtgcttctgcgtatgtgacttacatccggagcgaggacgcccttcgcgcaattcagtgcgtcaacaacgttgtggtggacggccgaaccttgaaagctagcctcggcacaacaaaatattgcagctattttttaaagaatatgcagtgcccgaaacccgattgcatgtatttgcatgagctgggcgacgaagcagccagctttactaaagaggagatgcaagccggaaagcaccaagaatacgaacaaaaactgttgcaagagctctataaattaaacccaaatttcctgcagctgtctactgggtctgtggacaagaataagaacaaagtgacgcctctgcagcggtatgacactccgattgacaagccatctgattccctatctatcggtaacggcgataattcacaacagatctccaacagtgacaccccatcccctccgccagggttgtcaaagtccaatcccgtcatcccgatcagttctagcaatcattccgctcgctctccattcgagggtgccgtcacagagtcgcagagcctgttttcagataacttccgccatccgaacccaattccttccggcctacctccatttcccagctcaccccagaccagttccgattggcctaccgctccagaacctcagagcctcttcacatctgagacaattcctgtgtctagtagcacagactggcaagctgcctttgggttcggatcgtccaaacagcccgaagacgatcttggcttcgatccattcgatgtgacacgcaaagccctggctgatctaaccgagccaatcgaacggaaacggttagcggtcttaaaaagacggtag

SEQ ID NO: 73025 - DNA, 1302 bp, Artificial Sequence
  derived and/or modified sequence
atgtcaagatctccggacgccaaagaggacccagtggagtgccctctgtgcatggaaccattggagatagacgacatcaattttttcccgtgcacatgtgggtaccagatctgccggttctgctggcaccgcatccgaaccgacgaaaacggcctctgtcctgcttgccggaaaccttatcctgaagatcctgccgtttacaagcctttgtctcaagaggaactgcagcgcataaagaacgaaaaaaaacaaaagcaaaacgagagaaagcagaaaatctccgaaaacagaaaacacctagctagcgttcgggtggtgcagaagaacttagtatttgtggtcggcctgagccagaggctggcagacccagaagtcctgaagcggcctgaatactttggaaagtttggtaagattcataaagtcgtcattaataactcaaccagttacgccggatcgcagggtcccagtgcgtccgcgtatgtgacctacattcgttctgaggatgccctgcgcgcaattcaatgcgtaaacaacgtggttgtggacgggagaaccttaaaagccagcctcggcactaccaaatattgctcctacttcttaaaaaatatgcagtgcccaaaacccgattgtatgtatctgcatgaactgggtgacgaggccgcaagttttacaaaagaggaaatgcaggccggtaaacaccaggaatatgagcaaaagctgctccaggagctctacaaactgaaccccaatttcttacaactgagcacagggtccgtagataaaaataaaaataaggtgacacctctgcagaggtacgacacacccatcgacaagccctctgacagcctaagtattggaaacggagacaattctcagcagatttctaatagcgatacccctagcccacccccaggactttcaaaaagcaaccccgtgattccaataagctcgtctaaccactcggctaggagccccttcgagggagccgtgaccgaaagccagagtctctttagtgataatttcagacacccaaacccgataccatccggtctgcccccttttccgagttccccccagacctcttcggactggcccacagcaccagagccacagagcctctttactagcgagaccatccctgtcagcagctccaccgattggcaagccgcatttggtttcggttccagtaaacaaccggaggatgatctaggcttcgaccctttcgacgtcacccgcaaggcactggctgacctaaccgaacccattgagcgtaagcgcctcgcggtcctcaagaggcgctag

SEQ ID NO: 73026 - DNA, 4631 bp, Artificial Sequence
  derived and/or modified sequence
ggtggcccgtctggctgtggaacccaccgaaagctgagagtctctctctcagccgtaaaggtcggactcgctgaagcaatcaggcccggttctgaagagttttttccccgacgctcgttcggtggtttcttgtgaggacgcggcagcccgtggagtcggctgagggaaaagcgaggcaaggcaggcgggtcgtcaaagtcctacattttagctttcagtgctgaacttccttctcccttaaattattataaacttttgctgctgtttaataaacgtgaagatgtctcgcagtcctgatgcgaaggaagaccctgtggagtgccctctttgcatggagcccttggagatagatgatatcaactttttcccttgcacctgtggctaccagatttgccgattttgttggcatcgaattcgcactgatgaaaatgggctttgtcctgcatgtagaaagccatatccagaagacccagcagtttataaaccactctcccaggaagagctgcaaaggataaagaatgagaaaaaacagaaacaaaatgagagaaaacagaaaatatcagaaaatcgcaaacatttggctagtgtacgtgtcgtacaaaaaaacctcgtctttgttgtaggtttatctcagcgcctagcagacccagaggttttaaaacgaccagaatattttgggaagtttggtaaaatacataaagttgtcatcaataatagcacatcatatgcaggctcacagggtccaagtgccagtgcttatgtaacctatatccggtcagaagacgctctcagagccatacagtgtgtcaacaatgtggtagtagatggcagaacacttaaggcatctctaggtacaacaaaatactgcagttacttcttaaagaatatgcagtgtccaaaacctgactgcatgtatcttcatgaattgggggatgaggcggccagcttcacaaaagaggaaatgcaggcgggtaaacaccaagaatatgaacagaagctacttcaagaattatataaattaaatcccaattttcttcagctatctacgggttcagttgataaaaataagaacaaagtgacaccactgcagaggtatgatacccccattgacaaaccttcagattctctcagtatagggaacggtgataattcccagcagatatctaacagtgatacgccttcaccaccacctggtttgtcaaaatccaatccagtcatccccatcagttcatccaatcacagtgcacggtccccttttgaaggggcagtaacagagtcacagtcgttattctcagacaattttcgccatcccaaccctatcccaagtgggcttcctcctttccccagctccccacagacatccagtgactggcctacagcaccagaaccacagagcctcttcacatcagaaacaatcccagtatcatcctctacagactggcaagcagcttttggctttggttcttctaaacaaccagaggatgacttgggttttgatcccttcgatgtcactcgaaaagccttagcagacctgattgagaaggaactgtccgttcaagaccaaccttccctttcgcccacatctcttcagaactcctcttcacacactacaaccgccaaaggtccaggctctggattcctgcatcctgctgcagctacaaatgccaattctctcaatagtaccttttcagtcttgccccagaggttccctcaatttcagcagcaccgagcggtttataattcattcagttttccaggccaggcagcccgctatccttggatggcctttccacgcaatagcatcatgcacttgaaccacacagcaaaccccacctcaaatagtaatttcttggacttgaatctcccgccacagcacaacacaggtctgggagggatccctgtagcaggggaagaagaggtgaaggtttcgaccatgccactgtcaacctcttcccattcattacaacaaggacagcagcctacaagtctccacactactgtggcctgacaacagaactgagaggagaggattagactctggggtgcttgcatgggcaactggatttttgcatgattcctttatgattttgcttttaatgtatacacccagaagagccaatataaacgttcctcatgcctacagctagcgtgttacctcatagttgttgaagtatttcttcattaggcctttaacataatttattagtgtaataattttggcattgtttctcatgagtgatactatttctaactcataaaaataaacttgtagtactaagatcccaggtgagattagctagaattgttgttattttggctctattattgaaaaattatacaaaggtaatggtagtatcttgttttctggtttgtgaaaaaataatatcctaatctcctgaaaaatttgcaaattaacaagataatgtctattgcattctttgaatacttgagaagaaagaatacatataaaacaaaattggtggtgtcatttaatgctcagaaggatattgttggcgattgtttttagttgtctagatttatatcctataatatgcattacatgtgtagaaactgttttgttctctctcttttgcacttttgcactttctttttgaatggttgttaattatgcatagatggttaaaagataattattgtagcctaaatgcaatataatctcttttctaatgcactgcctagtataccaggaaatgcctcaaaaacagaacttcagtttatagttgacttatctgaaacttgaatacggagtaaacattgtatgtgaaaagcaaccatagtagtgtaacattgttactgaacaaacagtaattctgtgggatattgttttggaaatttcattgtttaataattaaaatgtgataataagataatattataagtacctgaccagaatgagactaaggcagaagagaagagattggatgtcctctaaaattaggccacctaaattgtaacagataattttaatcaagagaatagtggagtactttattaggacataatgtgaagtgatatttctgaaaacacatttcttgaaatagttttaaaactgataataaaggaaaagaaactgtacttagtttggagcagtggacaaaagctgattcagaaaacatgaccatattctgcctacatgaagcatctgggaagaaagggaaagtcacacctcctcttgagattttaaccattatgataaaaggtatgctttaatttgttaaaaaaaaaagtatgaaaggggataatgtgaatacaaaaaagaagcctagagattgaaaataataataatagaacatgttattaggagatggtacttaatgtcatgttggagttggagttttcaaggttacctctatataaaattggattattttctgttagatataatgtgacaaattaaatgactttatcccaaggtacagtgaggtaaacaaaaatctattcttagatatccttagatttggttaactgaggctgtagaagcagcgaattgtctagccatttaagttatttttgtaaaattcagcataaacatcaatctctaatttctatctagaagtgactttaagacattacaagaacattgccaatttggaaaatgccaataaaatactgtagacttattaatattgtagacttattatcagtcttttactatagcttaatttaattatggttttcatttttactgtaagaggccaagacttcacttatgtctcctgtggagctgaggctcctgggccttgttattataacaaactctggctccttgtaatgatgcttactagctcaaagccttctccagcattcagtgttagcctttcattgcctggatcttcttacaaagccatagcaagtggttagtgccatttgctccttggtgttgagagatatacctgttaaatgaggcttctttcctttctcattcatagccagcgtggaaaaatcatcaggtagtttgcccagatttgccagagccctaaataaaatggcaaaacgatctccctgcctgcttctcctccccacccccacttacatgcacaccgtaaatcaagaaatgctttttgggcaattagactttatcttctaaatttttgcatagaatggctaaacatgatcttttgcctcactttgtaattcctacaccttccttgtaagcttcaccttttgcttacctaatattttatttaaacatggttttttaaaaaacctgaagctttaaaatcatagtcataattaattttacactaaaggacagaagaaattatacaacacataaaagaagccactacttcacatagcaagcaaattgaaatcaaaatgacagaagaatgagaaattctttaaaagcttcaggttttttttgttgttgttgttaaattcctgcatgatgcatcatgtgcaagggaaacttaatatacttttacacccttaacctttataaagtgactagcttttcccttaacataggaatttttaacctggagcccagatttttgagagtacacacaaaattgtgggtttgtgtgcatgtacatatgtccatttttttctagggagaagatccatagttattagatttgtgaaggatttggtgatccccttctcccatc

SEQ ID NO: 73027 - DNA, 1609 bp, Artificial Sequence
  derived and/or modified sequence
cggaggagtcttaccctaatgtaagatggtggcccgtctggctgtggaacccaccgaaagctgagagtctctctctcagccgtaaaggtcggactcgctgaagcaatcaggcccggttctgaagagttttttccccgacgctcgttcggtggtttcttgtgaggacgcggcagcccgtggagtcggctgagggaaaagcgaggcaaggcaggcgggtcgtcaaagtcctacattttagctttcagtgctgaacttccttctcccttaaattattataaacttttgctgctgtttaataaacgtgaagatgtctcgcagtcctgatgcgaaggaagaccctgtggagtgccctctttgcatggagcccttggagatagatgatatcaactttttcccttgcacctgtggctaccagatttgccgattttgttggcatcgaattcgcactgatgaaaatgggctttgtcctgcatgtagaaagccatatccagaagacccagcagtttataaaccactctcccaggaagagctgcaaaggataaagaatgagaaaaaacagaaacaaaatgagagaaaacagaaaatatcagaaaatcgcaaacatttggctagtgtacgtgtcgtacaaaaaaacctcgtctttgttgtaggtttatctcagcgcctagcagacccagaggttttaaaacgaccagaatattttgggaagtttggtaaaatacataaagttgtcatcaataatagcacatcatatgcaggctcacagggtccaagtgccagtgcttatgtaacctatatccggtcagaagacgctctcagagccatacagtgtgtcaacaatgtggtagtagatggcagaacacttaaggcatctctaggtacaacaaaatactgcagttacttcttaaagaatatgcagtgtccaaaacctgactgcatgtatcttcatgaattgggggatgaggcggccagcttcacaaaagaggaaatgcaggcgggtaaacaccaagaatatgaacagaagctacttcaagaattatataaattaaatcccaattttcttcagctatctacgggttcagttgataaaaataagaacaaagtgacaccactgcagaggtatgatacccccattgacaaaccttcagattctctcagtatagggaacggtgataattcccagcagatatctaacagtgatacgccttcaccaccacctggtttgtcaaaatccaatccagtcatccccatcagttcatccaatcacagtgcacggtccccttttgaaggggcagtaacagagtcacagtcgttattctcagacaattttcgccatcccaaccctatcccaagtgggcttcctcctttccccagctccccacagacatccagtgactggcctacagcaccagaaccacagagcctcttcacatcagaaacaatcccagtatcatcctctacagactggcaagcagcttttggctttggttcttctaaacaaccagaggatgacttgggttttgatcccttcgatgtcactcgaaaagccttagcagaccttacagagccaattgagaggaagagactggcagtgctgaagagaagatag

SEQ ID NO: 73028 - DNA, 1687 bp, Artificial Sequence
  derived and/or modified sequence
atgtctcgcagtcctgatgcgaaggaagaccctgtggagtgccctctttgcatggagcccttggagatagatgatatcaactttttcccttgcacctgtggctaccagatttgccgattttgttggcatcgaattcgcactgatgaaaatgggctttgtcctgcatgtagaaagccatatccagaagacccagcagtttataaaccactctcccaggaagagctgcaaaggataaagaatgagaaaaaacagaaacaaaatgagagaaaacagaaaatatcagaaaatcgcaaacatttggctagtgtacgtgtcgtacaaaaaaacctcgtctttgttgtaggtttatctcagcgcctagcagacccagaggttttaaaacgaccagaatattttgggaagtttggtaaaatacataaagttgtcatcaataatagcacatcatatgcaggctcacagggtccaagtgccagtgcttatgtaacctatatccggtcagaagacgctctcagagccatacagtgtgtcaacaatgtggtagtagatggcagaacacttaaggcatctctaggtacaacaaaatactgcagttacttcttaaagaatatgcagtgtccaaaacctgactgcatgtatcttcatgaattgggggatgaggcggccagcttcacaaaagaggaaatgcaggcgggtaaacaccaagaatatgaacagaagctacttcaagaattatataaattaaatcccaattttcttcagctatctacgggttcagttgataaaaataagaacaaagtgacaccactgcagaggtatgatacccccattgacaaaccttcagattctctcagtatagggaacggtgataattcccagcagatatctaacagtgatacgccttcaccaccacctggtttgtcaaaatccaatccagtcatccccatcagttcatccaatcacagtgcacggtccccttttgaaggggcagtaacagagtcacagtcgttattctcagacaattttcgccatcccaaccctatcccaagtgggcttcctcctttccccagctccccacagacatccagtgactggcctacagcaccagaaccacagagcctcttcacatcagaaacaatcccagtatcatcctctacagactggcaagcagcttttggctttggttcttctaaacaaccagaggatgacttgggttttgatcccttcgatgtcactcgaaaagccttagcagaccttacagagccaattgagaggaagagactggcagtgctgaagagaagataggctcattcagtaggataatagatgtcgttgggtggtgggaagagataagctcctgagacgagcatgtggtatagcttaagagaggtgggtggccaggcgcggtggctcacgcctgtaatcccaacactttgggaggccaaggcaggcagatcacaaggtcaggagatcgagaccatcctggctaacacggtgaaaccccgtctctactaaaaatacaaaaaaattagctgggcgtggtggcgggcacctgtagccccagctactcgggaggctgaggcaggagaatggcgcgaacccaggaggtggagcttgcagtgagccgagatggtgccactgtgctccagcctgggcaacagagcgagactccgtctaaaaaaaaaaaaaa

SEQ ID NO: 73029 - DNA, 1728 bp, Artificial Sequence
  derived and/or modified sequence
atgagcagaagccccgacgccaaggaggaccccgtggagtgccccctgtgcatggagcccctggagatcgacgacatcaacttcttcccctgcacctgcggctaccagatctgcagattctgctggcacagaatcagaaccgacgagaacggcctgtgccccgcctgcagaaagccctaccccgaggaccccgccgtgtacaagcccctgagccaggaggagctgcagagaatcaagaacgagaagaagcagaagcagaacgagagaaagcagaagatcagcgagaacagaaagcacctggccagcgtgagagtggtgcagaagaacctggtgttcgtggtgggcctgagccagagactggccgaccccgaggtgctgaagagacccgagtacttcggcaagttcggcaagatccacaaggtggtgatcaacaacagcaccagctacgccggcagccagggccccagcgccagcgcctacgtgacctacatcagaagcgaggacgccctgagagccatccagtgcgtgaacaacgtggtggtggacggcagaaccctgaaggccagcctgggcaccaccaagtactgcagctacttcctgaagaacatgcagtgccccaagcccgactgcatgtacctgcacgagctgggcgacgaggccgccagcttcaccaaggaggagatgcaggccggcaagcaccaggagtacgagcagaagctgctgcaggagctgtacaagctgaaccccaacttcctgcagctgagcaccggcagcgtggacaagaacaagaacaaggtgacccccctgcagagatacgacacccccatcgacaagcccagcgacagcctgagcatcggcaacggcgacaacagccagcagatcagcaacagcgacacccccagccccccccccggcctgagcaagagcaaccccgtgatccccatcagcagcagcaaccacagcgccagaagccccttcgagggcgccgtgaccgagagccagagcctgttcagcgacaacttcagacaccccaaccccatccccagcggcctgccccccttccccagcagcccccagaccagcagcgactggcccaccgcccccgagccccagagcctgttcaccagcgagaccatccccgtgagcagcagcaccgactggcaggccgccttcggcttcggcagcagcaagcagcccgaggacgacctgggcttcgaccccttcgacgtgaccagaaaggccctggccgacctgatcgagaaggagctgagcgtgcaggaccagcccagcctgagccccaccagcctgcagaacagcagcagccacaccaccaccgccaagggccccggcagcggcttcctgcaccccgccgccgccaccaacgccaacagcctgaacagcaccttcagcgtgctgccccagagattcccccagttccagcagcacagagccgtgtacaacagcttcagcttccccggccaggccgccagatacccctggatggccttccccagaaacagcatcatgcacctgaaccacaccgccaaccccaccagcaacagcaacttcctggacctgaacctgcccccccagcacaacaccggcctgggcggcatccccgtggccggcgaggaggaggtgaaggtgagcaccatgcccctgagcaccagcagccacagcctgcagcagggccagcagcccaccagcctgcacaccaccgtggcctag

SEQ ID NO: 73030 - DNA, 1302 bp, Artificial Sequence
  derived and/or modified sequence
atgagcagaagccccgacgccaaggaggaccccgtggagtgccccctgtgcatggagcccctggagatcgacgacatcaacttcttcccctgcacctgcggctaccagatctgcagattctgctggcacagaatcagaaccgacgagaacggcctgtgccccgcctgcagaaagccctaccccgaggaccccgccgtgtacaagcccctgagccaggaggagctgcagagaatcaagaacgagaagaagcagaagcagaacgagagaaagcagaagatcagcgagaacagaaagcacctggccagcgtgagagtggtgcagaagaacctggtgttcgtggtgggcctgagccagagactggccgaccccgaggtgctgaagagacccgagtacttcggcaagttcggcaagatccacaaggtggtgatcaacaacagcaccagctacgccggcagccagggccccagcgccagcgcctacgtgacctacatcagaagcgaggacgccctgagagccatccagtgcgtgaacaacgtggtggtggacggcagaaccctgaaggccagcctgggcaccaccaagtactgcagctacttcctgaagaacatgcagtgccccaagcccgactgcatgtacctgcacgagctgggcgacgaggccgccagcttcaccaaggaggagatgcaggccggcaagcaccaggagtacgagcagaagctgctgcaggagctgtacaagctgaaccccaacttcctgcagctgagcaccggcagcgtggacaagaacaagaacaaggtgacccccctgcagagatacgacacccccatcgacaagcccagcgacagcctgagcatcggcaacggcgacaacagccagcagatcagcaacagcgacacccccagccccccccccggcctgagcaagagcaaccccgtgatccccatcagcagcagcaaccacagcgccagaagccccttcgagggcgccgtgaccgagagccagagcctgttcagcgacaacttcagacaccccaaccccatccccagcggcctgccccccttccccagcagcccccagaccagcagcgactggcccaccgcccccgagccccagagcctgttcaccagcgagaccatccccgtgagcagcagcaccgactggcaggccgccttcggcttcggcagcagcaagcagcccgaggacgacctgggcttcgaccccttcgacgtgaccagaaaggccctggccgacctgaccgagcccatcgagagaaagagactggccgtgctgaagagaagatag

SEQ ID NO: 73031 - protein, 710 aa, Artificial Sequence
  derived and/or modified sequence
MSRSPDAKEDPVECPLCMEPLEIDDINFFPCTCGYQICRFCWHRIRTDENGLCPACRKPYPEDPAVYKPLSQEELQRIKNEKKQKQNERKQKISENRKHLASVRVVQKNLVFVVGLSQRLADPEVLKRPEYFGKFGKIHKVVINNSTSYAGSQGPSASAYVTYIRSEDALRAIQCVNNVVVDGRTLKASLGTTKYCSYFLKNMQCPKPDCMYLHELGDEAASFTKEEMQAGKHQEYEQKLLQELYKLNPNFLQLSTGSVDKNKNKVTPLQSPIDKPSDSLSIGNGDNSQQISNSDTPSPPPGLSKSNPVIPISSSNHSARSPFEGAVTESQSLFSDNFRHPNPIPSGLPPFPSSPQTSSDWPTAPEPQSLFTSETIPVSSSTDWQAAFGFGSSKQPEDDLGFDPFDVTRKALADLIEKELSVQDQPSLSPTSLQNSSSHTTTAKGPGSGFLHPAAATNANSLNSTFSVLPQRFPQFQQHRAVYNSFSFPGQAARYPWMAFPRNSIMHLNHTANPTSNSNFLDLNLPPQHNTGLGGIPVADNSSSVESLNMKEWQDGLRALLPNININFGGLPNSSSPSNANHSAPTSNTATTDSLSWDSPGSWTDPAIITGIPASSGNSLDSLQDDNPPHWLKSLQALTEMDGPSAAPSQTHHSAPFSTQIPLHRASWNPYPPPSNPSSFHSPPPGFQTAFRPPSKTPTDLLQSSTLDRH

SEQ ID NO: 73032 - DNA, 2133 bp, Artificial Sequence
  derived and/or modified sequence
atgtctaggtcccctgacgcgaaagaagatccagtggagtgtcctctttgcatggagccactcgagatagatgatataaattttttcccgtgtacttgtgggtaccagatttgcagattctgttggcaccgcatccggacagacgagaacggtctatgccctgcctgtcgtaaaccctatcctgaggatcctgccgtttataaaccgctgagtcaggaagaactccagcgcattaagaacgagaagaaacagaagcagaacgagaggaagcaaaagatcagcgagaataggaaacaccttgcaagcgtgagggtagtgcaaaaaaacttagtatttgtggttggactatcccaacgtttagccgatcccgaagtcttaaagaggccagaatatttcgggaagtttggcaagatccataaggtcgtgattaacaacagcacgtcctacgcaggctcccaggggccaagcgccagcgcatacgtgacctacattcgctcggaggatgcactgagagccatccagtgtgtcaataatgtcgtggtggatgggagaacgctcaaagcctccctgggcactacaaagtactgctcctacttcttaaaaaacatgcagtgtccaaagccagattgtatgtacttgcacgagctgggcgacgaagctgcatcatttaccaaggaggagatgcaagccgggaaacaccaggagtacgaacagaagttgcttcaggaactttacaagctgaatcccaatttcctgcagttgtccaccggtagcgtagataagaataaaaataaggtaaccccactacagagcccgatcgataagccctccgacagcctttcgatagggaatggcgacaactcccaacagatctcaaatagtgatactccttcaccacctcctggcctgtctaaatctaatcctgttattcccatctctagctccaaccacagtgctaggagtccctttgagggcgccgtcaccgagtcgcagtctctgttttcagacaattttcgacacccaaatcccatcccaagtgggttacctcccttcccaagctcaccgcagacgagcagcgattggccaaccgcccctgagccacagtccctgtttactagtgaaactatacccgtcagctctagtacagactggcaggccgcgttcggcttcggcagcagcaagcaaccagaggatgatctaggcttcgatccatttgacgttacaaggaaggcactggccgatctgatcgaaaaggaattgagcgtacaggatcagccctccctgtcacccactagtctccagaattctagcagccacaccacaaccgcgaaaggccccggcagtggatttcttcatcctgccgcagccactaatgcaaattccctgaacagcacattctcagtcctgccacagaggttcccccaatttcagcagcatagagcagtgtataactcgttttctttcccaggccaggctgcacgatacccgtggatggcgtttcctaggaattccatcatgcacctaaaccatactgcaaatccgacgtccaacagtaatttcttggacctcaacctgccaccgcagcacaatactggattagggggaatccctgtggcagataatagcagcagtgtggaatcgcttaatatgaaagagtggcaggatggccttagggccctactgcccaatatcaacatcaatttcggcgggctgcccaattcttcctccccttctaatgcaaaccatagcgctccgacctcaaacaccgccaccacagacagtctgagctgggactcacccgggagttggacagatcccgctatcatcacagggattcctgcctcgtcggggaactccctagacagcctgcaagatgataacccgccccattggcttaaatctttgcaggccctgactgagatggacggcccttcggccgccccaagccagacccatcactcagcccctttttctacccaaatccctctccaccgggcgtcctggaacccgtatccgcccccttctaacccgtcatcattccattcaccgccacccggcttccaaactgccttccgacctccaagtaaaactcccacagatctgctgcaatccagcacactagacagacactag

SEQ ID NO: 73033 - DNA, 2133 bp, Artificial Sequence
  derived and/or modified sequence
atgagccgcagcccagatgccaaggaggaccctgtggagtgccccctgtgcatggagcccctggagattgatgacatcaacttcttcccctgcacctgtggctaccagatctgccgcttctgctggcaccgcatcagaacagatgaaaatggcctgtgcccagcctgcaggaagccctacccagaggaccctgctgtgtacaagcccctgagccaggaggagctgcagaggatcaagaatgagaagaagcagaagcagaatgaaaggaagcagaagatcagtgaaaataggaagcacctggcctctgtgcgggtggtgcagaagaacctggtgtttgtggtgggcctgagccagaggctggccgaccctgaggtgctgaagaggcctgagtactttgggaagtttgggaagatccacaaggtggtgatcaacaacagcaccagctatgccggcagccagggccccagcgccagcgcctacgtgacctacatccgctcagaagatgccctgcgggccatccagtgtgtgaacaacgtggtggtggatggccgcaccctgaaggccagcctgggcaccaccaagtactgcagctacttcctgaagaacatgcagtgccccaagccagactgcatgtacctgcacgagctgggagatgaggccgccagcttcaccaaggaggagatgcaggccggcaagcaccaggagtatgagcagaagctgctgcaggagctgtacaagctgaaccccaacttcctgcagctgagcacaggctctgtggacaagaacaagaacaaggtgacccccctgcagagccccatcgacaagcccagcgacagcctgagcattggaaatggagacaacagccagcagatcagcaacagcgacacccccagccccccacctggcctgagcaagagcaaccctgtgatccccatcagcagcagcaaccacagcgcccggagcccctttgaaggagctgtgacagagagccagagcctcttcagtgacaacttccgccaccccaaccccatccccagcggcctgccccccttccccagcagcccccagaccagcagtgactggcccacagcccctgagccccagagcctcttcaccagcgagaccatccctgtgagcagcagcacagactggcaggccgccttcggcttcggcagcagcaagcagccagaagatgacctgggctttgacccctttgatgtgaccaggaaggccctggccgacctgattgagaaggagctgtctgtgcaggaccagcccagcctgagccccaccagcctgcagaacagcagcagccacaccaccacagccaagggccctggcagcggcttcctgcaccctgctgctgccaccaatgccaacagcctgaacagcaccttctctgtgctgccccagcgcttcccccagttccagcagcacagagctgtgtacaacagcttctccttccctggccaggccgcccgctacccctggatggccttccccaggaacagcatcatgcacctgaaccacacagccaaccccaccagcaacagcaacttcctggacctgaacctgcccccccagcacaacacaggcctgggcggcatccctgtggccgacaacagcagctctgtggagagcctgaacatgaaggagtggcaggacggcctgcgggccctgctgcccaacatcaacatcaactttggaggcctgcccaacagcagcagccccagcaatgccaaccacagcgcccccaccagcaacacagccaccacagacagcctgtcctgggacagccctggctcctggacagatcctgccatcatcaccggcatcccagccagcagcggcaacagcctggacagcctgcaggatgacaaccccccccactggctgaagagcctgcaggccctgacagagatggatggccccagcgctgcccccagccagacccaccacagcgcccccttcagcacccagatccccctgcaccgggcctcctggaacccctaccccccacccagcaaccccagcagcttccacagccccccacctggcttccagacagccttccggccccccagcaagacccccacagacctgctgcagagcagcaccctggacagacactag

SEQ ID NO: 73034 - DNA, 2133 bp, Artificial Sequence
  derived and/or modified sequence
atgagccggagccccgacgccaaggaggaccccgtggagtgccccctgtgcatggagcccttggagattgacgatatcaacttcttcccatgcacctgtggctaccagatttgccgtttctgttggcaccggattaggacggacgagaacgggttatgtccggcttgcagaaagccatacccagaggatccggccgtgtataaacctctatcccaggaggaattgcagcgtatcaagaacgaaaagaagcagaaacaaaacgagcggaaacagaagatttctgagaacagaaaacatctcgctagcgtcagggtggtgcagaaaaatctggtgttcgtcgtgggtctgagccagcggctggccgaccccgaggtgctgaagaggccggagtattttgggaagtttgggaagattcacaaagtggtaataaataatagcacctcctacgcagggagccagggcccctcagcaagcgcctatgtgacttacattcgttccgaagacgcactgagagctattcaatgtgtgaacaacgtcgtggtcgacggccgaaccctgaaggctagtcttggaacaacaaaatattgcagctattttcttaagaacatgcagtgccccaaacccgattgcatgtacttgcatgagctcggcgacgaggcggcatcgttcaccaaagaggaaatgcaggccgggaaacatcaggagtatgagcagaaactgctccaggaactctataaattgaaccctaactttctacagttgagcaccggttccgtggacaagaataagaacaaggtaactccactgcagagccctatcgacaaaccttccgatagcctgagtattggaaacggggacaattctcagcagatttctaacagcgacacaccatctcccccaccagggttgagcaagagcaacccagtgattcccatttcttcgtctaatcactcggctaggagtcctttcgaaggcgcagtgactgagagtcagagcctgttttcagataactttcgtcaccctaatccaatccctagcggcctgcctccttttccatcgagcccccagaccagttcagattggcccacagcacccgaacctcaatcactgtttaccagcgagacaatacctgtatcaagctccaccgactggcaggcagcctttggtttcgggtccagcaagcagcccgaggatgaccttggattcgatccattcgacgtgactagaaaagcccttgcggacttgatagaaaaggagctgagcgtgcaagatcagccctctctgtctccgacaagtctacagaattctagctctcacacaacaacagctaaaggccccggttcagggttcctgcaccctgctgccgctacaaacgcgaactctctgaacagtactttcagtgtcctgccccagagattcccccagttccaacaacatagggctgtttacaactccttttctttccctggccaggcagccagatacccctggatggcattcccaagaaacagcatcatgcacctgaatcatactgcaaacccaacctcgaactctaactttttggatttaaatctcccaccgcaacataacacaggcctcgggggcattccagtggctgacaatagctcctccgtagagagtcttaatatgaaggagtggcaggacggacttagagccctcctgcccaatataaatattaatttcggaggactgcctaactcaagctcccccagcaacgctaatcactccgcaccgaccagtaacactgcgaccaccgatagtcttagctgggacagtccggggtcatggaccgaccccgctatcattacgggcatccccgccagcagcggcaatagcctggactctctgcaggacgacaaccctccccattggctgaaaagtctgcaggctctgacagaaatggatggcccctcagccgctccctcacagacccaccattccgcaccctttagcacccagataccacttcatagggcttcatggaacccctacccccccccctcgaatccatcttcattccatagtcctcctccaggtttccagacagcctttcgaccgcccagtaagacccccacagacttactgcagtcgtctaccctggatcggcactag

SEQ ID NO: 73035 - DNA, 2133 bp, Artificial Sequence
  derived and/or modified sequence
atgtctcggtcaccagacgcgaaggaggacccagtcgaatgtccactctgcatggagcccctagagatcgatgacatcaacttcttcccctgcacttgcggttatcagatttgcaggttctgttggcaccgtatccgtacagacgagaacgggctgtgccctgcctgcagaaaaccttatccagaggatccggcagtctacaaacctctcagtcaagaagagctccagcggatcaaaaacgaaaaaaagcagaaacagaatgagaggaaacagaagataagtgaaaacagaaagcatctggcaagcgtcagggtcgtgcagaagaatctggtcttcgtggtcggccttagccagagactggctgaccccgaggttctgaaaagacccgaatacttcgggaagttcgggaagatccacaaggtggtcattaataactctacctcatacgctggatcacagggaccaagcgcctcagcatacgtgacctatatccgcagtgaagatgcgctacgggctattcagtgcgtgaacaacgtggtagtggatggtagaacactaaaggcatctttgggcacaactaagtactgctcttattttctaaagaatatgcaatgcccaaagccagattgcatgtacctgcacgagctgggcgatgaagctgcctcttttactaaagaggagatgcaggccggaaaacaccaggaatacgagcaaaaactcctccaggagctttacaagcttaaccccaacttccttcagcttagtacaggaagtgtcgacaaaaataagaacaaggtaactcccctgcaatcgcctatcgataaaccttctgattccctcagcattggcaacggagacaattctcagcagatttccaattcagacacaccgagtcccccacccggtttgtcaaagtctaaccccgtgattcctatcagttcatccaaccacagcgccaggtccccattcgagggcgcagtcacagagtcacagtccctgttctctgacaatttcaggcaccccaaccccatcccctccggtcttccgccatttcccagcagccctcagacctcctccgattggccgacagctccagagccccaatcactgtttacttcggaaacaattccagtgtcatcgtcaacagactggcaggccgcatttggattcgggtcctcaaaacagcctgaggatgatctgggctttgaccctttcgatgtgaccaggaaggcactcgcggatcttattgaaaaggagctgagtgttcaggaccaaccctcactatcccccactagcctccagaatagttcatctcataccaccactgccaaagggcctggcagcggatttttacatcctgccgctgcaaccaatgccaactcactgaattcgacttttagcgtgttgccacagagattccctcagttccagcagcaccgcgcagtttataactcattttctttcccaggtcaggccgctcgttacccttggatggccttcccgcgtaacagtataatgcacttgaaccacactgccaacccaacttccaacagcaattttctcgatcttaatctgccgcctcagcacaatactggtctcgggggtatccctgtggccgataactccagtagtgtggagagtctgaacatgaaggaatggcaggacggtctgcgggcattgctacccaatattaatatcaactttggcggtctacccaacagctcgtcaccctccaacgccaatcattcagccccaacttcaaacaccgcaactaccgattccctgagttgggattccccaggatcgtggactgacccggctatcatcacgggcatcccggcaagcagtgggaactctctcgatagtcttcaggacgataaccctcctcactggcttaaatctctacaggcgcttaccgaaatggacggccctagcgccgcacctagtcagactcaccatagcgccccttttagcacgcaaattcctctgcaccgtgcctcttggaacccctacccccctccaagcaacccaagctcttttcatagcccccctcccggattccaaactgcttttagaccaccttcaaaaacacctactgacttgctccaatcaagcacgttagacaggcactag

SEQ ID NO: 73036 - DNA, 3505 bp, Artificial Sequence
  derived and/or modified sequence
agatggtggcccgtctggctgtggaacccaccgaaagctgagagtctctctctcagccgtaaaggtcggactcgctgaagcaatcaggcccggttctgaagagttttttccccgacgctcgttcggtggtttcttgtgaggacgcggcagcccgtggagtcggctgagggaaaagcgaggcaaggcaggcgggtcgtcaaagtcctacattttagctttcagtgctgaacttccttctcccttaaattattataaacttttgctgctgtttaataaacgtgaagatgtctcgcagtcctgatgcgaaggaagaccctgtggagtgccctctttgcatggagcccttggagatagatgatatcaactttttcccttgcacctgtggctaccagatttgccgattttgttggcatcgaattcgcactgatgaaaatgggctttgtcctgcatgtagaaagccatatccagaagacccagcagtttataaaccactctcccaggaagagctgcaaaggataaagaatgagaaaaaacagaaacaaaatgagagaaaacagaaaatatcagaaaatcgcaaacatttggctagtgtacgtgtcgtacaaaaaaacctcgtctttgttgtaggtttatctcagcgcctagcagacccagaggttttaaaacgaccagaatattttgggaagtttggtaaaatacataaagttgtcatcaataatagcacatcatatgcaggctcacagggtccaagtgccagtgcttatgtaacctatatccggtcagaagacgctctcagagccatacagtgtgtcaacaatgtggtagtagatggcagaacacttaaggcatctctaggtacaacaaaatactgcagttacttcttaaagaatatgcagtgtccaaaacctgactgcatgtatcttcatgaattgggggatgaggcggccagcttcacaaaagaggaaatgcaggcgggtaaacaccaagaatatgaacagaagctacttcaagaattatataaattaaatcccaattttcttcagctatctacgggttcagttgataaaaataagaacaaagtgacaccactgcagagccccattgacaaaccttcagattctctcagtatagggaacggtgataattcccagcagatatctaacagtgatacgccttcaccaccacctggtttgtcaaaatccaatccagtcatccccatcagttcatccaatcacagtgcacggtccccttttgaaggggcagtaacagagtcacagtcgttattctcagacaattttcgccatcccaaccctatcccaagtgggcttcctcctttccccagctccccacagacatccagtgactggcctacagcaccagaaccacagagcctcttcacatcagaaacaatcccagtatcatcctctacagactggcaagcagcttttggctttggttcttctaaacaaccagaggatgacttgggttttgatcccttcgatgtcactcgaaaagccttagcagacctgattgagaaggaactgtccgttcaagaccaaccttccctttcgcccacatctcttcagaactcctcttcacacactacaaccgccaaaggtccaggctctggattcctgcatcctgctgcagctacaaatgccaattctctcaatagtaccttttcagtcttgccccagaggttccctcaatttcagcagcaccgagcggtttataattcattcagttttccaggccaggcagcccgctatccttggatggcctttccacgcaatagcatcatgcacttgaaccacacagcaaaccccacctcaaatagtaatttcttggacttgaatctcccgccacagcacaacacaggtctgggagggatccctgtagcagacaacagcagttctgtagagagtttaaatatgaaggaatggcaggacgggctaagggcacttctacccaacattaacatcaactttggtggactgcccaattcttcttccccctccaacgccaaccacagtgcaccaacgtccaacactgccaccaccgacagcctgagttgggacagccctggcagctggacagacccagccatcatcacaggtattccagcgtcttcaggaaacagtttagactctcttcaagatgacaatcctccacactggctaaaatcccttcaggccctcacagagatggacggccccagcgctgctccatcacagacccaccacagcgcccccttcagcacacagatcccgctgcacagagccagttggaatccctaccctcctccttcaaacccttccagcttccactccccacccccaggctttcagacagccttcagaccccccagcaaaacccccacagatttactacagagttcaacactggaccgccattaggcaaagaggagcaaccattagaaaatgcaggatttgtcccactctgttttctccctctcagcccaccacccacagctcccttctcatctcttatgttctgaagaatccagtacctgatcaattttttttctccctaaccccagatgcaatgcgatcacagggtcattaccatctctttattaattgtaaaaatttttgttgatccagcatttgagtgacactgttgaatgtttctaaaaatgcctttttaaggagagaaaaaaaaatcaaagggcagtctcaatacttagaaaattattgtttgtctgttgcgcataataatgacataatctgcttagcagaaaatgacgattaatctataggaaagctcaagtaaatgcattatcaactgcagaagtttgaaaaccaggttcatttacgtgagattgctaaatgcatgggggaaagcagtggtcctagcatccatcttgtattcagcttatcattattgcagggaaaatgcttttaatttaaattaatttttaattcttttggcaagttgatggcaaggacttgattgtgtcattaagcaaaagaatgtattggaagttgatggaaagacaaattcatctgtagtagtaactggccgattgctaaagagttcataaggaggtgagaagtaatttttttaaaggagaaaaattttttggctttagatttaaagtaaattgaaatgttttaaagaaaaaagtattcacagatttaatacctattaataatataagagctgaaatgtaagtcatttcttcagtccttctcctctgtcggaatcttttttgttttaccataaattcacctgacgagggcactctgagatagcactgctctggggccatctgatcaccatcgggagcaaatctctgacctccttgcctgcagcttttacttaaccctgtagtttctggacgtttgtgcagtattgaaaagacaggagaaaagaaaacagaaacctggttataacctgacgctaaaactaaaaacaaggaaatgtacctctttcttcagaattaaaactaaaatcttaaataaaacagaaaacttgatggtga

SEQ ID NO: 73037 - DNA, 2133 bp, Artificial Sequence
  derived and/or modified sequence
atgagcagaagccccgacgccaaggaggaccccgtggagtgccccctgtgcatggagcccctggagatcgacgacatcaacttcttcccctgcacctgcggctaccagatctgcagattctgctggcacagaatcagaaccgacgagaacggcctgtgccccgcctgcagaaagccctaccccgaggaccccgccgtgtacaagcccctgagccaggaggagctgcagagaatcaagaacgagaagaagcagaagcagaacgagagaaagcagaagatcagcgagaacagaaagcacctggccagcgtgagagtggtgcagaagaacctggtgttcgtggtgggcctgagccagagactggccgaccccgaggtgctgaagagacccgagtacttcggcaagttcggcaagatccacaaggtggtgatcaacaacagcaccagctacgccggcagccagggccccagcgccagcgcctacgtgacctacatcagaagcgaggacgccctgagagccatccagtgcgtgaacaacgtggtggtggacggcagaaccctgaaggccagcctgggcaccaccaagtactgcagctacttcctgaagaacatgcagtgccccaagcccgactgcatgtacctgcacgagctgggcgacgaggccgccagcttcaccaaggaggagatgcaggccggcaagcaccaggagtacgagcagaagctgctgcaggagctgtacaagctgaaccccaacttcctgcagctgagcaccggcagcgtggacaagaacaagaacaaggtgacccccctgcagagccccatcgacaagcccagcgacagcctgagcatcggcaacggcgacaacagccagcagatcagcaacagcgacacccccagccccccccccggcctgagcaagagcaaccccgtgatccccatcagcagcagcaaccacagcgccagaagccccttcgagggcgccgtgaccgagagccagagcctgttcagcgacaacttcagacaccccaaccccatccccagcggcctgccccccttccccagcagcccccagaccagcagcgactggcccaccgcccccgagccccagagcctgttcaccagcgagaccatccccgtgagcagcagcaccgactggcaggccgccttcggcttcggcagcagcaagcagcccgaggacgacctgggcttcgaccccttcgacgtgaccagaaaggccctggccgacctgatcgagaaggagctgagcgtgcaggaccagcccagcctgagccccaccagcctgcagaacagcagcagccacaccaccaccgccaagggccccggcagcggcttcctgcaccccgccgccgccaccaacgccaacagcctgaacagcaccttcagcgtgctgccccagagattcccccagttccagcagcacagagccgtgtacaacagcttcagcttccccggccaggccgccagatacccctggatggccttccccagaaacagcatcatgcacctgaaccacaccgccaaccccaccagcaacagcaacttcctggacctgaacctgcccccccagcacaacaccggcctgggcggcatccccgtggccgacaacagcagcagcgtggagagcctgaacatgaaggagtggcaggacggcctgagagccctgctgcccaacatcaacatcaacttcggcggcctgcccaacagcagcagccccagcaacgccaaccacagcgcccccaccagcaacaccgccaccaccgacagcctgagctgggacagccccggcagctggaccgaccccgccatcatcaccggcatccccgccagcagcggcaacagcctggacagcctgcaggacgacaaccccccccactggctgaagagcctgcaggccctgaccgagatggacggccccagcgccgcccccagccagacccaccacagcgcccccttcagcacccagatccccctgcacagagccagctggaacccctaccccccccccagcaaccccagcagcttccacagccccccccccggcttccagaccgccttcagaccccccagcaagacccccaccgacctgctgcagagcagcaccctggacagacactag

SEQ ID NO: 73038 - protein, 767 aa, Artificial Sequence
  derived and/or modified sequence
MSRSPDAKEDPVECPLCMEPLEIDDINFFPCTCGYQICRFCWHRIRTDENGLCPACRKPYPEDPAVYKPLSQEELQRIKNEKKQKQNERKQKISENRKHLASVRVVQKNLVFVVGLSQRLADPEVLKRPEYFGKFGKIHKVVINNSTSYAGSQGPSASAYVTYIRSEDALRAIQCVNNVVVDGRTLKASLGTTKYCSYFLKNMQCPKPDCMYLHELGDEAASFTKEEMQAGKHQEYEQKLLQELYKLNPNFLQLSTGSVDKNKNKVTPLQRYDTPIDKPSDSLSIGNGDNSQQISNSDTPSPPPGLSKSNPVIPISSSNHSARSPFEGAVTESQSLFSDNFRHPNPIPSGLPPFPSSPQTSSDWPTAPEPQSLFTSETIPVSSSTDWQAAFGFGSSKQPEDDLGFDPFDVTRKALADLIEKELSVQDQPSLSPTSLQNSSSHTTTAKGPGSGFLHPAAATNANSLNSTFSVLPQRFPQFQQHRAVYNSFSFPGQAARYPWMAFPRNSIMHLNHTANPTSNSNFLDLNLPPQHNTGLGGIPVADNSSSVESLNMKEWQDGLRALLPNININFGGLPNSSSPSNANHSAPTSNTATTDSLSWDSPGSWTDPAIITGIPASSGNSLDSLQDDNPPHWLKSLQALTEMDGPSAAPSQTHHSAPFSTQIPLHRASWNPYPPPSNPSSFHSPPPGIYYRVQHWTAIRQRGATIRKCRICPTLFSPSQPTTHSSLLISYVLKNPVPDQFFFSLTPDAMRSQGHYHLFINCKNFC

SEQ ID NO: 73039 - protein, 713 aa, Artificial Sequence
  derived and/or modified sequence
MSRSPDAKEDPVECPLCMEPLEIDDINFFPCTCGYQICRFCWHRIRTDENGLCPACRKPYPEDPAVYKPLSQEELQRIKNEKKQKQNERKQKISENRKHLASVRVVQKNLVFVVGLSQRLADPEVLKRPEYFGKFGKIHKVVINNSTSYAGSQGPSASAYVTYIRSEDALRAIQCVNNVVVDGRTLKASLGTTKYCSYFLKNMQCPKPDCMYLHELGDEAASFTKEEMQAGKHQEYEQKLLQELYKLNPNFLQLSTGSVDKNKNKVTPLQRYDTPIDKPSDSLSIGNGDNSQQISNSDTPSPPPGLSKSNPVIPISSSNHSARSPFEGAVTESQSLFSDNFRHPNPIPSGLPPFPSSPQTSSDWPTAPEPQSLFTSETIPVSSSTDWQAAFGFGSSKQPEDDLGFDPFDVTRKALADLIEKELSVQDQPSLSPTSLQNSSSHTTTAKGPGSGFLHPAAATNANSLNSTFSVLPQRFPQFQQHRAVYNSFSFPGQAARYPWMAFPRNSIMHLNHTANPTSNSNFLDLNLPPQHNTGLGGIPVADNSSSVESLNMKEWQDGLRALLPNININFGGLPNSSSPSNANHSAPTSNTATTDSLSWDSPGSWTDPAIITGIPASSGNSLDSLQDDNPPHWLKSLQALTEMDGPSAAPSQTHHSAPFSTQIPLHRASWNPYPPPSNPSSFHSPPPGFQTAFRPPSKTPTDLLQSSTLDRH

SEQ ID NO: 73040 - DNA, 2304 bp, Artificial Sequence
  derived and/or modified sequence
atgagcaggtcccccgacgccaaggaggatcctgtggagtgccctttatgtatggagccactggaaattgacgacattaatttttttccttgtacctgcggctaccagatttgccggttttgttggcacaggattcgtacagacgagaacggactgtgtcctgcctgtaggaaaccatatccagaagacccggcagtatacaaaccactgagccaggaagagttgcagcgcataaagaacgagaagaaacagaaacagaatgaaagaaagcagaagatttccgaaaatagaaagcatctggcgtcggtgcgggtcgtgcagaaaaacctagtctttgtcgtgggcctgagccagagattggctgacccggaagtgcttaaaaggccagaatacttcggaaagttcggcaagattcataaagtcgtcattaacaactccacgagttatgcaggctcccaaggtccaagtgccagcgcgtatgtgacgtatattagatctgaagacgctttgcgtgccatacagtgcgtgaacaacgtggtggttgatgggcgaacactcaaggcgtccctgggcaccaccaaatattgcagctacttcctgaaaaatatgcagtgtccaaagccagactgcatgtacctgcacgagctgggagatgaggccgcgtcttttacaaaggaagaaatgcaggcaggcaaacaccaggagtatgaacagaaattgctacaggaattatacaagctgaacccgaatttcctgcaactatccactggtagcgttgacaagaataagaataaggtaactcccctgcagcgatacgatactccgatcgacaagccatccgacagcttatcaattggaaacggggacaatagccaacagatctctaattctgatactccctcacctccccctgggctgtccaagtcgaacccggtgattcctataagttcatccaatcactcagcccggagcccatttgaaggtgctgttaccgagtctcaaagcctgttctctgacaacttcaggcaccccaaccccatcccctccgggctgcccccattcccctctagcccacagactagcagcgattggccgacagcacccgagcctcaaagcctgttcacttcagaaaccattcccgtgtcttccagcactgactggcaggccgctttcggcttcggctcctcaaagcagccagaagacgacctgggttttgacccattcgacgtgacacggaaggcacttgccgacttgatagaaaaggaactgagtgtgcaagaccagccatccttgtctccgactagcctgcagaacagcagcagtcacacaaccactgcgaagggtcccggtagtggctttctccaccctgccgccgcaacaaatgctaactccctcaactccaccttctctgtgctgccccagcggtttccccagttccagcagcaccgcgccgtctataatagtttctccttcccaggacaggcagcccgatacccctggatggcctttcctcggaactctatcatgcacctcaaccatacagctaaccccaccagcaactccaactttctggacttgaacctgccccctcaacataacacgggactgggaggaatcccagtcgcagataattcctcttcggttgagtccttaaacatgaaagaatggcaggacggtttgcgagcattattgcccaatataaacatcaactttggcggactgcctaactcttcatctccctccaacgccaaccattctgctcccacttccaacacagctaccacggactccttgtcgtgggatagcccaggttcatggacagaccctgctattattacaggcataccagccagcagtggcaacagcttggattctctgcaggatgataaccccccccactggctgaaatcattgcaagcgctgacagagatggacggaccgtctgccgcaccctcgcagacccatcatagtgcacccttcagtacacagattcctctgcaccgtgcatcctggaatccctacccacctccctctaatccatcctcattccattcaccaccgcctgggatctactatcgcgttcaacactggaccgccatccggcagcggggcgcaacaatccggaagtgtaggatttgcccaactctgttcagcccctcacagcccacaacacacagctccctgctcatttcttatgtgcttaaaaatccagtgccggaccagttcttcttctccctgacaccagatgcaatgcgctcccagggacactaccatctcttcatcaactgtaaaaacttctgttag

SEQ ID NO: 73041 - DNA, 2142 bp, Artificial Sequence
  derived and/or modified sequence
atgagccggtcccctgatgccaaggaggacccagtggaatgtcccctgtgtatggagcctctcgaaatcgacgacatcaatttttttccatgcacttgtggttatcaaatctgccggttttgctggcaccggatcagaaccgacgagaacggcctttgcccggcctgtaggaaaccctaccccgaggaccctgcagtctataagcctctgagtcaagaggagcttcaacgtatcaagaatgaaaaaaagcagaaacagaacgaacgtaaacagaagatctcggaaaaccgaaagcacctggcctctgtccgtgtcgtgcagaaaaacctggtgttcgtggttggactcagccagcgcctggcagaccctgaggtgctaaagcggccggaatatttcggcaaattcgggaaaatccacaaggtggtgattaacaactctacctcctatgctggctctcagggcccttcggcaagtgcttacgtcacctatatcagatctgaagacgctctacgcgcgattcaatgcgtgaacaatgtcgtggtagacggccgaactcttaaagcttccctgggcacgacaaaatactgctcgtacttcctgaagaacatgcagtgtcccaagccagattgtatgtatctgcacgaattgggggacgaagccgcttcatttactaaggaggagatgcaggctgggaagcaccaggaatacgagcagaagctactgcaggagctgtacaagcttaatcccaattttctgcagctcagtacgggatctgtggacaaaaataagaataaagtcacccccctccaacgttacgacacacccatcgataagccctcagacagcctctcgatcggcaacggagacaattcgcagcaaatttcaaattcagataccccttcgcccccacctggcttgagtaagagcaaccctgtgatccccatatcatcctctaaccattcagcccgcagcccattcgaaggagccgtaacagagtctcagagtcttttttctgacaatttccgccaccctaatccgattccctcaggtctgccgcctttcccatctagtccacaaacttcatccgactggcccactgcccctgagcctcagtcacttttcacatctgagacgatcccggttagcagctccactgattggcaggcggccttcggattcggttcatccaagcaacctgaagacgacctcggatttgatccattcgacgtgacacgcaaggctcttgccgacctgatcgagaaggagctgagcgtccaggaccagccatctctttcgcccacctcattgcagaattcgtcctcacatacaacaaccgccaagggcccgggttcaggcttcctgcaccctgccgcggcaacaaatgccaacagtctgaactcaacgttcagcgtcctgcctcaacgttttcctcagttccaacagcacagggcagtttacaactccttctcatttccggggcaggcagccaggtacccctggatggcctttcctagaaattcaataatgcacctcaaccataccgctaatcccacgtctaactcgaacttcctggaccttaatctgcctccacaacacaacacaggcctgggtggtattcctgttgcagataatagcagttctgtcgagtcgcttaacatgaaggaatggcaggacggcctgcgtgcactgctcccaaatatcaatataaactttggggggctgcctaactcgagttcccccagcaatgcaaatcactctgcacccactagcaacacagcgacaaccgattccctgtcttgggactctcccggctcttggaccgacccagccatcatcacaggcatcccagcctcatccgggaactcactggactcccttcaagacgacaatccgccgcactggctcaagagtctgcaagcactgacagaaatggacggaccatccgccgctcccagccagacacaccacagcgcaccttttagtactcagattcctttgcacagagcttcctggaatccgtatcccccgccgagcaacccgtctagttttcactcccccccgccagggtttcagactgcttttagacctccatccaagacacctactgacctgctccagtcatcaactcttgatcggcattag

SEQ ID NO: 73042 - DNA, 2304 bp, Artificial Sequence
  derived and/or modified sequence
atgagccgcagcccagatgccaaggaggaccctgtggagtgccccctgtgcatggagcccctggagattgatgacatcaacttcttcccctgcacctgtggctaccagatctgccgcttctgctggcaccgcatcagaacagatgaaaatggcctgtgcccagcctgcaggaagccctacccagaggaccctgctgtgtacaagcccctgagccaggaggagctgcagaggatcaagaatgagaagaagcagaagcagaatgaaaggaagcagaagatcagtgaaaataggaagcacctggcctctgtgcgggtggtgcagaagaacctggtgtttgtggtgggcctgagccagaggctggccgaccctgaggtgctgaagaggcctgagtactttgggaagtttgggaagatccacaaggtggtgatcaacaacagcaccagctatgccggcagccagggccccagcgccagcgcctacgtgacctacatccgctcagaagatgccctgcgggccatccagtgtgtgaacaacgtggtggtggatggccgcaccctgaaggccagcctgggcaccaccaagtactgcagctacttcctgaagaacatgcagtgccccaagccagactgcatgtacctgcacgagctgggagatgaggccgccagcttcaccaaggaggagatgcaggccggcaagcaccaggagtatgagcagaagctgctgcaggagctgtacaagctgaaccccaacttcctgcagctgagcacaggctctgtggacaagaacaagaacaaggtgacccccctgcagagatatgacacccccatcgacaagcccagcgacagcctgagcattggaaatggagacaacagccagcagatcagcaacagcgacacccccagccccccacctggcctgagcaagagcaaccctgtgatccccatcagcagcagcaaccacagcgcccggagcccctttgagggcgctgtgacagagagccagagcctcttcagtgacaacttccgccaccccaaccccatccccagcggcctgccccccttccccagcagcccccagaccagcagtgactggcccacagcccctgagccccagagcctcttcaccagcgagaccatccctgtgagcagcagcacagactggcaggccgcctttggatttggcagcagcaagcagccagaagatgacctgggctttgacccctttgatgtgaccaggaaggccctggccgacctgattgagaaggagctgtctgtgcaggaccagcccagcctgagccccaccagcctgcagaacagcagcagccacaccaccacagccaagggccctggcagcggcttcctgcaccctgctgctgccaccaatgccaacagcctgaacagcaccttctctgtgctgccccagcgcttcccccagttccagcagcacagagctgtgtacaacagcttctccttccctggccaggccgcccgctacccctggatggccttccccagaaattccatcatgcacctgaaccacacagccaaccccaccagcaacagcaacttcctggacctgaacctgcccccccagcacaacacaggcctgggcggcatccctgtggccgacaacagcagctctgtggagagcctgaacatgaaggagtggcaggacggcctgcgggccctgctgcccaacatcaacatcaactttggaggcctgcccaacagcagcagccccagcaatgccaaccacagcgcccccaccagcaacacagccaccacagacagcctgtcctgggacagccctggctcctggacagatcctgccatcatcaccggcatcccagccagcagcggcaacagcctggacagcctgcaggatgacaaccccccccactggctgaagagcctgcaggccctgacagagatggatggccccagcgctgcccccagccagacccaccacagcgcccccttcagcacccagatccccctgcaccgggcctcctggaacccctaccccccacccagcaaccccagcagcttccacagccccccacctggcatctactacagagtgcagcactggacagccatccggcagagaggagccaccatcagaaaatgtcgcatctgccccaccctcttcagccccagccagcccaccacccacagcagcctgctgatctcctatgtgctgaagaaccctgtgcctgaccagttcttcttcagcctgaccccagatgccatgaggagccagggccactaccacctgttcatcaactgcaagaacttctgctag

SEQ ID NO: 73043 - DNA, 2142 bp, Artificial Sequence
  derived and/or modified sequence
atgagccgcagcccagatgccaaggaggaccctgtggagtgccccctgtgcatggagcccctggagattgatgacatcaacttcttcccctgcacctgtggctaccagatctgccgcttctgctggcaccgcatcagaacagatgaaaatggcctgtgcccagcctgcaggaagccctacccagaggaccctgctgtgtacaagcccctgagccaggaggagctgcagaggatcaagaatgagaagaagcagaagcagaatgaaaggaagcagaagatcagtgaaaataggaagcacctggcctctgtgcgggtggtgcagaagaacctggtgtttgtggtgggcctgagccagaggctggccgaccctgaggtgctgaagaggcctgagtactttgggaagtttgggaagatccacaaggtggtgatcaacaacagcaccagctatgccggcagccagggccccagcgccagcgcctacgtgacctacatccgctcagaagatgccctgcgggccatccagtgtgtgaacaacgtggtggtggatggccgcaccctgaaggccagcctgggcaccaccaagtactgcagctacttcctgaagaacatgcagtgccccaagccagactgcatgtacctgcacgagctgggagatgaggccgccagcttcaccaaggaggagatgcaggccggcaagcaccaggagtatgagcagaagctgctgcaggagctgtacaagctgaaccccaacttcctgcagctgagcacaggctctgtggacaagaacaagaacaaggtgacccccctgcagagatatgacacccccatcgacaagcccagcgacagcctgagcattggaaatggagacaacagccagcagatcagcaacagcgacacccccagccccccacctggcctgagcaagagcaaccctgtgatccccatcagcagcagcaaccacagcgcccggagcccctttgagggcgctgtgacagagagccagagcctcttcagtgacaacttccgccaccccaaccccatccccagcggcctgccccccttccccagcagcccccagaccagcagtgactggcccacagcccctgagccccagagcctcttcaccagcgagaccatccctgtgagcagcagcacagactggcaggccgcctttggatttggcagcagcaagcagccagaagatgacctgggctttgacccctttgatgtgaccaggaaggccctggccgacctgattgagaaggagctgtctgtgcaggaccagcccagcctgagccccaccagcctgcagaacagcagcagccacaccaccacagccaagggccctggcagcggcttcctgcaccctgctgctgccaccaatgccaacagcctgaacagcaccttctctgtgctgccccagcgcttcccccagttccagcagcacagagctgtgtacaacagcttctccttccctggccaggccgcccgctacccctggatggccttccccagaaattccatcatgcacctgaaccacacagccaaccccaccagcaacagcaacttcctggacctgaacctgcccccccagcacaacacaggcctgggcggcatccctgtggccgacaacagcagctctgtggagagcctgaacatgaaggagtggcaggacggcctgcgggccctgctgcccaacatcaacatcaactttggaggcctgcccaacagcagcagccccagcaatgccaaccacagcgcccccaccagcaacacagccaccacagacagcctgtcctgggacagccctggctcctggacagatcctgccatcatcaccggcatcccagccagcagcggcaacagcctggacagcctgcaggatgacaaccccccccactggctgaagagcctgcaggccctgacagagatggatggccccagcgctgcccccagccagacccaccacagcgcccccttcagcacccagatccccctgcaccgggcctcctggaacccctaccccccacccagcaaccccagcagcttccacagccccccacctggcttccagacagccttccggccccccagcaagacccccacagacctgctgcagagcagcaccctggacagacactag

SEQ ID NO: 73044 - DNA, 2304 bp, Artificial Sequence
  derived and/or modified sequence
atgagccggagccccgacgccaaggaggaccccgtggagtgccccctgtgcatggaaccccttgaaattgacgacatcaactttttcccttgcacatgcggctaccagatttgtaggttctgttggcaccggattagaactgacgaaaacggtctgtgccctgcatgccgaaagccctaccccgaagatccagctgtatataagcccctgagccaggaagaacttcagaggatcaaaaatgagaagaaacaaaagcagaatgaacggaagcaaaagatcagcgaaaatagaaaacacttggcctctgttagagtagtacagaagaatttggtgttcgtggttggactgtcacaaaggctcgccgacccagaggtgctgaagaggcccgaatacttcgggaagtttggaaagattcataaagtggtgattaacaattctacttcctacgcaggatcccaggggccatccgcctccgcctatgtaacttacatccgatcagaagatgcgcttcgggccattcagtgcgtcaacaatgtggttgtggacggccggacactgaaggctagtctgggcactacgaagtactgctcttattttctcaaaaacatgcagtgccccaaacccgattgcatgtaccttcatgagctgggggatgaggctgcctcatttaccaaagaggaaatgcaggctggaaagcaccaggagtatgagcaaaaactgctgcaggaactttacaaattgaatcccaatttcctccagttgtcaactggtagcgtcgacaaaaataagaataaggttacacctctccagaggtacgacacccctattgataaaccatcagattccctgagtataggcaacggagacaattcacagcagataagcaattcagatacgccatcaccacctccaggactgtccaagtcaaacccggtgatccctatcagctcctccaatcacagcgcccggagcccctttgaaggggctgtcactgagtcccaatcattgttttcggataactttcgacatcctaatcctatccccagtggcttgcctccctttccaagttccccgcagacctcctctgattggcccacagctcccgaacctcagtcactcttcacctctgaaacaattcctgtctcctcaagcacagattggcaagccgctttcggatttgggtcctcgaagcagccagaagacgacctgggctttgacccgttcgacgtcactcgaaaagccctggccgatttgattgaaaaagagctaagtgttcaggatcaacccagcctttcacctacatctctccagaattcctcctcgcataccacgactgctaaagggcctggttctggttttctacatcctgccgcggctacaaatgccaatagtttaaattctacctttagtgttttgccccaaaggttccctcaatttcagcagcatcgggctgtttacaattccttctcttttccagggcaggcagcccgctatccctggatggcctttccccgcaactctataatgcaccttaaccataccgccaaccctacctccaacagtaactttctagacctgaacctgcctccccagcataatactgggctgggaggcatcccggttgcagataactcaagcagcgtcgaatccctgaatatgaaggaatggcaagacggactcagagcattactccctaacataaacattaattttggcggcctgcctaactccagtagcccctcgaatgcaaatcattccgcacctacgtctaacaccgctactacagactctctttcttgggatagtcctgggagctggactgaccctgccataattacaggtatccccgcctctagcggaaattccctcgacagcttgcaggacgacaatccacctcattggctcaagtctctccaggccctgactgagatggacggaccatcggccgctccctcccagacacaccactctgcaccattcagcactcagattcctctgcacagagcctcctggaacccttacccccctcccagtaacccctcctcattccatagcccaccaccagggatttattatcgtgtgcaacactggacagcgatccgccagcgaggcgcaactattcgaaagtgccgcatttgcccaacactttttagcccatctcagcccaccacacattcgtcattgctcatctcatacgtccttaaaaatccagtgcctgaccagtttttcttttcattgactccagacgcaatgaggtcacagggtcattaccatctcttcataaattgcaaaaatttttgttag

SEQ ID NO: 73045 - DNA, 2142 bp, Artificial Sequence
  derived and/or modified sequence
atgagccggagccccgacgccaaggaggaccccgtggagtgccccctgtgtatggaacctctggaaatcgatgacattaacttcttcccgtgcacatgtggctatcaaatctgtagattctgctggcatcgtataaggactgatgagaatggcttgtgtccagcatgtcgcaaaccataccccgaagatcctgccgtatacaagcctctgagccaggaggaactccagcggattaagaacgagaaaaaacagaaacaaaacgaaagaaaacagaagatttcagagaaccggaaacatctggctagtgtccgcgtcgtgcagaagaaccttgtgtttgtggtcggcttgtcccagagactggcggaccctgaagtgctgaagagacccgagtactttggaaaatttggcaagatccacaaagtggtaatcaacaattccacctcctacgccggctctcagggacctagtgcctcagcatatgtcacatatattaggtccgaggacgccctccgagcaatccagtgcgtcaataatgtggtggtcgatggccggacactgaaagcgagcctgggtacaacaaagtattgttcatattttctaaagaacatgcagtgtccaaagcctgattgtatgtacctgcacgagctgggcgatgaggcagcttctttcaccaaagaggagatgcaggctggaaaacaccaggaatacgagcagaaactccttcaggaattgtataagctaaacccgaattttctgcagttgagcacgggctcggtggataagaacaagaataaggtgactcctttgcagaggtatgacacaccaatcgacaagccatcagactcactgtctattggaaatggggacaactcacagcagatcagcaattctgacaccccaagccctccacccggactgtcaaaaagcaaccccgttattcccatatcctcttccaatcattctgcaaggtcacctttcgagggcgcagttaccgagagtcaaagccttttctccgacaatttccgccatccgaaccctattccttctggcctccctcccttcccctcttcccctcagacctcttccgactggcctacagcgccagagcctcaatctctgtttacatccgagaccattcccgtgtcgtcatccaccgactggcaggcagcattcggatttgggtcctcaaagcagccagaagatgacttaggcttcgatccattcgacgtaacgagaaaagctctcgcggatctgatcgaaaaggagctctcggtgcaagaccagccctccctgtcacccacctccctgcagaactcatcttctcacaccaccacagcgaaagggccaggaagcggtttcctgcacccagcggctgccacaaatgctaactctctgaattcaactttttcagtgcttcctcagcgcttccctcaatttcagcagcaccgggccgtctataatagtttctccttcccaggccaggccgcccggtacccctggatggcatttcccagaaattctatcatgcacctgaaccacaccgcaaatcccacttccaatagcaactttctcgacttgaacctgccgccgcaacataacactggcctgggcggcatccccgtggcagataactcttcaagcgtggagagcctcaatatgaaagaatggcaggatggccttcgggcattacttcccaatattaacataaatttcggtggcctgcccaacagctcctcccctagtaacgctaatcacagcgctcctactagcaacacagcaaccacagactcgctgtcttgggactctccgggcagttggacggaccctgcaattatcacagggatacctgcatcaagtgggaactcactggactctcttcaggatgacaacccgccccactggttgaagtccctgcaggccttgactgaaatggacgggccctccgccgcaccaagccagactcaccattcagctcctttctctacgcaaattcccctgcacagagcctcttggaatccttatcccccaccatctaacccatcttcctttcattctccgcctccagggttccagactgctttcaggccgccttccaaaacccccacagacctcctacagagcagcactctggaccgccactag

SEQ ID NO: 73046 - DNA, 2304 bp, Artificial Sequence
  derived and/or modified sequence
atgtctaggagccctgacgccaaggaggatcccgtggaatgcccgttgtgtatggagcctctggaaatcgacgacatcaacttctttccctgcacatgtggctatcagatctgtcgcttctgctggcataggattcgcacagacgagaatgggctctgccccgcttgcagaaagccataccctgaggatccggcagtctataagccactgagccaagaggaactccagagaatcaagaacgagaagaagcagaagcagaacgagagaaagcaaaagatatcagagaataggaaacacctggcctccgttcgggtcgtgcagaagaacctagtttttgtggtgggtctgagccagagactcgccgatccagaagtcctcaagagacccgaatacttcggtaaatttgggaaaatccacaaagttgtgatcaacaacagcacctcttacgcgggtagccagggcccatcagcaagcgcctacgtcacgtacatccgctcggaggatgccctccgagctatccagtgcgtaaacaacgtggtagtggatggcagaactttaaaggcttctctgggcactactaagtattgttcctactttctcaagaatatgcagtgccctaaacctgattgtatgtacctacacgagctgggtgatgaggccgcttctttcaccaaggaggaaatgcaagcaggtaagcaccaggagtacgaacaaaagctacttcaggagctgtataagctcaaccctaactttcttcagctctctactgggtctgtagacaagaataaaaacaaagtaaccccccttcagagatatgacacaccaatagacaagccatctgactccctctcaattggaaacggggacaattctcaacagatctccaattctgacactccctcacctccacccggacttagcaaatctaaccctgtaatccccattagctcgtcaaaccactccgctcggagcccatttgaaggtgccgtcaccgaaagccaatccctattctccgacaactttcgccatcccaatccaattccgtcaggtctaccaccttttccgagttctccacaaacaagttctgactggcccacagctcccgagccgcaatcgttgtttacctctgagaccattccagttagttcctcaaccgattggcaggcggcttttgggttcggcagctccaagcaacccgaggacgatctaggcttcgatcccttcgacgttacacgcaaagccctggcagacctgattgagaaagagctgtcggtgcaggaccagcctagcctctcgcctacaagcctgcaaaatagtagctcacataccacgacggctaaggggcctgggtctgggttccttcatcctgccgctgctacaaacgccaattccctgaactccaccttcagcgtgttaccacaacgtttcccacagtttcaacagcaccgcgctgtgtacaactccttcagctttcccggacaagccgcaaggtacccttggatggcttttccaagaaatagcatcatgcacctcaatcacacagcaaaccctacaagcaattcaaatttccttgacctgaatttgccccctcagcacaacactggccttggtggaatccccgtagctgacaattcctcgtccgtcgaatccttaaatatgaaagagtggcaggacggcctccgagcactgctccctaacatcaacatcaactttggtggacttccaaattccagtagtccctccaatgcaaaccatagcgcccctacctctaacaccgccactactgattccctgtcttgggacagtccgggatcgtggactgatcctgccatcatcaccggtatccctgcctcctccggcaattcgctggattctctgcaggatgataacccaccccactggctgaaaagcctgcaagcgctgacagagatggatgggcctagtgccgctccatctcagacacaccactccgccccattttcaacgcagattcccctccatcgagctagctggaatccgtatcctccccctagtaacccaagtagttttcatagcccccctcctggtatttattatcgagtccagcattggaccgctatcagacagcgaggcgcaacgatacggaaatgtcgaatctgccccacactgttttcccctagccagccgacaacccatagtagtctgttgattagctacgtgcttaaaaaccccgttcctgatcaatttttcttctcgttaacccctgacgccatgcgctctcagggacattaccaccttttcattaattgcaagaacttttgttag

SEQ ID NO: 73047 - DNA, 2142 bp, Artificial Sequence
  derived and/or modified sequence
atgagccgctctcccgatgccaaggaggatcccgtggaatgtcctctatgcatggagcccctcgaaatagacgatattaacttcttcccatgcacctgtggctatcaaatatgtcgcttctgttggcatcggatacgcactgacgagaacggactgtgtcctgcctgtcgcaagccgtatcctgaagaccctgctgtttacaaaccactttcccaggaggagctccaacgcatcaaaaatgagaagaagcaaaaacagaacgaaaggaagcagaaaatctcagagaatagaaagcatctcgctagcgtgcgggtggtccaaaagaacctggtgttcgttgttggcctgtcgcagcgcctcgctgatccggaagttctaaagagaccagaatatttcggaaaatttggtaagatccataaagttgttatcaacaactcgacgagctatgccggatctcagggccctagcgcgtcagcatacgtgacctatattcgtagtgaagatgcattgagggccatccagtgcgtcaacaacgtcgtggtggacgggaggacgctgaaggcaagcttagggaccacaaagtattgttcctacttccttaagaacatgcagtgccctaagcccgactgtatgtacctgcatgagctcggcgatgaggcagcttcattcacaaaagaggaaatgcaggctgggaagcaccaggagtacgagcaaaaactactccaggagctgtataagctcaaccccaacttcctgcagctgtcaacgggcagcgtggacaagaacaagaataaggtaaccccgcttcagaggtacgacacacccatagataaacctagcgatagtctgtcgattggcaatggagacaattcgcaacagatctccaacagcgatacaccttccccaccaccaggactcagcaagtccaacccagtcattccgatctcatcctccaaccattctgccaggtcccctttcgagggcgctgttacggagtctcagtcgctgttctcggataattttcgacatcccaaccctattccctccggcttgccgccttttcccagcagcccccagaccagctctgactggccaactgctcccgaaccccaaagtctcttcacctcagaaacaatccctgttagcagttccacagactggcaggctgcctttgggttcggcagtagtaagcagccagaagatgatttgggcttcgatccctttgatgtgactcggaaggccttggctgatctaattgaaaaggaactgtcagtgcaggatcaaccatcgctaagccccaccagcctgcagaacagtagctcccatactaccactgctaaggggcctggctcaggctttttgcacccagccgcagccactaatgctaattcattaaacagcacatttagcgtgttgccacagcgcttccctcagttccagcagcaccgggcagtatataatagcttctcttttccgggacaagcagccagatatccgtggatggcttttcccagaaacagtattatgcacttgaatcacacagcaaaccccacctctaattccaactttctggacctgaatctgccgccacagcacaacacaggactgggcggtattccagttgccgacaactcttcaagtgtggagagtttgaacatgaaagagtggcaggatggcctgagggctttgcttccaaatataaacatcaactttggcggtcttccaaacagttctagcccttctaatgcgaatcatagcgcccctactagcaacaccgcaacgacagatagcttaagctgggacagtcccggatcctggacagacccagccataattactggaattccggcttcaagcgggaatagcctggattctctgcaagatgacaacccaccccactggctgaagtccctgcaagcactgaccgagatggacggaccatccgccgcaccatcccagacacatcacagtgcaccattttctacgcagatccccctgcatcgcgctagctggaacccatatcctccgccttcgaacccatcttccttccactctccgcctcccggattccaaaccgcgtttcgcccaccaagtaaaacccctaccgatctgcttcaatccagcaccctggataggcactag

SEQ ID NO: 73048 - DNA, 2611 bp, Artificial Sequence
  derived and/or modified sequence
cggaggagtcttaccctaatgtaagatggtggcccgtctggctgtggaacccaccgaaagctgagagtctctctctcagccgtaaaggtcggactcgctgaagcaatcaggcccggttctgaagagttttttccccgacgctcgttcggtggtttcttgtgaggacgcggcagcccgtggagtcggctgagggaaaagcgaggcaaggcaggcgggtcgtcaaagtcctacattttagctttcagtgctgaacttccttctcccttaaattattataaacttttgctgctgtttaataaacgtgaagatgtctcgcagtcctgatgcgaaggaagaccctgtggagtgccctctttgcatggagcccttggagatagatgatatcaactttttcccttgcacctgtggctaccagatttgccgattttgttggcatcgaattcgcactgatgaaaatgggctttgtcctgcatgtagaaagccatatccagaagacccagcagtttataaaccactctcccaggaagagctgcaaaggataaagaatgagaaaaaacagaaacaaaatgagagaaaacagaaaatatcagaaaatcgcaaacatttggctagtgtacgtgtcgtacaaaaaaacctcgtctttgttgtaggtttatctcagcgcctagcagacccagaggttttaaaacgaccagaatattttgggaagtttggtaaaatacataaagttgtcatcaataatagcacatcatatgcaggctcacagggtccaagtgccagtgcttatgtaacctatatccggtcagaagacgctctcagagccatacagtgtgtcaacaatgtggtagtagatggcagaacacttaaggcatctctaggtacaacaaaatactgcagttacttcttaaagaatatgcagtgtccaaaacctgactgcatgtatcttcatgaattgggggatgaggcggccagcttcacaaaagaggaaatgcaggcgggtaaacaccaagaatatgaacagaagctacttcaagaattatataaattaaatcccaattttcttcagctatctacgggttcagttgataaaaataagaacaaagtgacaccactgcagaggtatgatacccccattgacaaaccttcagattctctcagtatagggaacggtgataattcccagcagatatctaacagtgatacgccttcaccaccacctggtttgtcaaaatccaatccagtcatccccatcagttcatccaatcacagtgcacggtccccttttgaaggggcagtaacagagtcacagtcgttattctcagacaattttcgccatcccaaccctatcccaagtgggcttcctcctttccccagctccccacagacatccagtgactggcctacagcaccagaaccacagagcctcttcacatcagaaacaatcccagtatcatcctctacagactggcaagcagcttttggctttggttcttctaaacaaccagaggatgacttgggttttgatcccttcgatgtcactcgaaaagccttagcagacctgattgagaaggaactgtccgttcaagaccaaccttccctttcgcccacatctcttcagaactcctcttcacacactacaaccgccaaaggtccaggctctggattcctgcatcctgctgcagctacaaatgccaattctctcaatagtaccttttcagtcttgccccagaggttccctcaatttcagcagcaccgagcggtttataattcattcagttttccaggccaggcagcccgctatccttggatggcctttccacgcaatagcatcatgcacttgaaccacacagcaaaccccacctcaaatagtaatttcttggacttgaatctcccgccacagcacaacacaggtctgggagggatccctgtagcagacaacagcagttctgtagagagtttaaatatgaaggaatggcaggacgggctaagggcacttctacccaacattaacatcaactttggtggactgcccaattcttcttccccctccaacgccaaccacagtgcaccaacgtccaacactgccaccaccgacagcctgagttgggacagccctggcagctggacagacccagccatcatcacaggtattccagcgtcttcaggaaacagtttagactctcttcaagatgacaatcctccacactggctaaaatcccttcaggccctcacagagatggacggccccagcgctgctccatcacagacccaccacagcgcccccttcagcacacagatcccgctgcacagagccagttggaatccctaccctcctccttcaaacccttccagcttccactccccacccccaggcatttactacagagttcaacactggaccgccattaggcaaagaggagcaaccattagaaaatgcaggatttgtcccactctgttttctccctctcagcccaccacccacagctcccttctcatctcttatgttctgaagaatccagtacctgatcaattttttttctccctaaccccagatgcaatgcgatcacagggtcattaccatctctttattaattgtaaaaatttttgttga

SEQ ID NO: 73049 - DNA, 3563 bp, Artificial Sequence
  derived and/or modified sequence
agcgtgcgcctgcgcacgggaggccggaggagtcttaccctaatgtaagatggtggcccgtctggctgtggaacccaccgaaagctgagagtctctctctcagccgtaaaggtcggactcgctgaagcaatcaggcccggttctgaagagttttttccccgacgctcgttcggtggtttcttgtgaggacgcggcagcccgtggagtcggctgagggaaaagcgaggcaaggcaggcgggtcgtcaaagtcctacattttagctttcagtgctgaacttccttctcccttaaattattataaacttttgctgctgtttaataaacgtgaagatgtctcgcagtcctgatgcgaaggaagaccctgtggagtgccctctttgcatggagcccttggagatagatgatatcaactttttcccttgcacctgtggctaccagatttgccgattttgttggcatcgaattcgcactgatgaaaatgggctttgtcctgcatgtagaaagccatatccagaagacccagcagtttataaaccactctcccaggaagagctgcaaaggataaagaatgagaaaaaacagaaacaaaatgagagaaaacagaaaatatcagaaaatcgcaaacatttggctagtgtacgtgtcgtacaaaaaaacctcgtctttgttgtaggtttatctcagcgcctagcagacccagaggttttaaaacgaccagaatattttgggaagtttggtaaaatacataaagttgtcatcaataatagcacatcatatgcaggctcacagggtccaagtgccagtgcttatgtaacctatatccggtcagaagacgctctcagagccatacagtgtgtcaacaatgtggtagtagatggcagaacacttaaggcatctctaggtacaacaaaatactgcagttacttcttaaagaatatgcagtgtccaaaacctgactgcatgtatcttcatgaattgggggatgaggcggccagcttcacaaaagaggaaatgcaggcgggtaaacaccaagaatatgaacagaagctacttcaagaattatataaattaaatcccaattttcttcagctatctacgggttcagttgataaaaataagaacaaagtgacaccactgcagaggtatgatacccccattgacaaaccttcagattctctcagtatagggaacggtgataattcccagcagatatctaacagtgatacgccttcaccaccacctggtttgtcaaaatccaatccagtcatccccatcagttcatccaatcacagtgcacggtccccttttgaaggggcagtaacagagtcacagtcgttattctcagacaattttcgccatcccaaccctatcccaagtgggcttcctcctttccccagctccccacagacatccagtgactggcctacagcaccagaaccacagagcctcttcacatcagaaacaatcccagtatcatcctctacagactggcaagcagcttttggctttggttcttctaaacaaccagaggatgacttgggttttgatcccttcgatgtcactcgaaaagccttagcagacctgattgagaaggaactgtccgttcaagaccaaccttccctttcgcccacatctcttcagaactcctcttcacacactacaaccgccaaaggtccaggctctggattcctgcatcctgctgcagctacaaatgccaattctctcaatagtaccttttcagtcttgccccagaggttccctcaatttcagcagcaccgagcggtttataattcattcagttttccaggccaggcagcccgctatccttggatggcctttccacgcaatagcatcatgcacttgaaccacacagcaaaccccacctcaaatagtaatttcttggacttgaatctcccgccacagcacaacacaggtctgggagggatccctgtagcagacaacagcagttctgtagagagtttaaatatgaaggaatggcaggacgggctaagggcacttctacccaacattaacatcaactttggtggactgcccaattcttcttccccctccaacgccaaccacagtgcaccaacgtccaacactgccaccaccgacagcctgagttgggacagccctggcagctggacagacccagccatcatcacaggtattccagcgtcttcaggaaacagtttagactctcttcaagatgacaatcctccacactggctaaaatcccttcaggccctcacagagatggacggccccagcgctgctccatcacagacccaccacagcgcccccttcagcacacagatcccgctgcacagagccagttggaatccctaccctcctccttcaaacccttccagcttccactccccacccccaggctttcagacagccttcagaccccccagcaaaacccccacagatttactacagagttcaacactggaccgccattaggcaaagaggagcaaccattagaaaatgcaggatttgtcccactctgttttctccctctcagcccaccacccacagctcccttctcatctcttatgttctgaagaatccagtacctgatcaattttttttctccctaaccccagatgcaatgcgatcacagggtcattaccatctctttattaattgtaaaaatttttgttgatccagcatttgagtgacactgttgaatgtttctaaaaatgcctttttaaggagagaaaaaaaaatcaaagggcagtctcaatacttagaaaattattgtttgtctgttgcgcataataatgacataatctgcttagcagaaaatgacgattaatctataggaaagctcaagtaaatgcattatcaactgcagaagtttgaaaaccaggttcatttacgtgagattgctaaatgcatgggggaaagcagtggtcctagcatccatcttgtattcagcttatcattattgcagggaaaatgcttttaatttaaattaatttttaattcttttggcaagttgatggcaaggacttgattgtgtcattaagcaaaagaatgtattggaagttgatggaaagacaaattcatctgtagtagtaactggccgattgctaaagagttcataaggaggtgagaagtaatttttttaaaggagaaaaattttttggctttagatttaaagtaaattgaaatgttttaaagaaaaaagtattcacagatttaatacctattaataatataagagctgaaatgtaagtcatttcttcagtccttctcctctgtcggaatcttttttgttttaccataaattcacctgacgagggcactctgagatagcactgctctggggccatctgatcaccatcgggagcaaatctctgacctccttgcctgcagcttttacttaaccctgtagtttctggacgtttgtgcagtattgaaaagacaggagaaaagaaaacagaaacctggttataacctgacgctaaaactaaaaacaaggaaatgtacctctttcttcagaattaaaactaaaatcttaaataaaacagaaaacttgatggtgaca

SEQ ID NO: 73050 - DNA, 2304 bp, Artificial Sequence
  derived and/or modified sequence
atgagcagaagccccgacgccaaggaggaccccgtggagtgccccctgtgcatggagcccctggagatcgacgacatcaacttcttcccctgcacctgcggctaccagatctgcagattctgctggcacagaatcagaaccgacgagaacggcctgtgccccgcctgcagaaagccctaccccgaggaccccgccgtgtacaagcccctgagccaggaggagctgcagagaatcaagaacgagaagaagcagaagcagaacgagagaaagcagaagatcagcgagaacagaaagcacctggccagcgtgagagtggtgcagaagaacctggtgttcgtggtgggcctgagccagagactggccgaccccgaggtgctgaagagacccgagtacttcggcaagttcggcaagatccacaaggtggtgatcaacaacagcaccagctacgccggcagccagggccccagcgccagcgcctacgtgacctacatcagaagcgaggacgccctgagagccatccagtgcgtgaacaacgtggtggtggacggcagaaccctgaaggccagcctgggcaccaccaagtactgcagctacttcctgaagaacatgcagtgccccaagcccgactgcatgtacctgcacgagctgggcgacgaggccgccagcttcaccaaggaggagatgcaggccggcaagcaccaggagtacgagcagaagctgctgcaggagctgtacaagctgaaccccaacttcctgcagctgagcaccggcagcgtggacaagaacaagaacaaggtgacccccctgcagagatacgacacccccatcgacaagcccagcgacagcctgagcatcggcaacggcgacaacagccagcagatcagcaacagcgacacccccagccccccccccggcctgagcaagagcaaccccgtgatccccatcagcagcagcaaccacagcgccagaagccccttcgagggcgccgtgaccgagagccagagcctgttcagcgacaacttcagacaccccaaccccatccccagcggcctgccccccttccccagcagcccccagaccagcagcgactggcccaccgcccccgagccccagagcctgttcaccagcgagaccatccccgtgagcagcagcaccgactggcaggccgccttcggcttcggcagcagcaagcagcccgaggacgacctgggcttcgaccccttcgacgtgaccagaaaggccctggccgacctgatcgagaaggagctgagcgtgcaggaccagcccagcctgagccccaccagcctgcagaacagcagcagccacaccaccaccgccaagggccccggcagcggcttcctgcaccccgccgccgccaccaacgccaacagcctgaacagcaccttcagcgtgctgccccagagattcccccagttccagcagcacagagccgtgtacaacagcttcagcttccccggccaggccgccagatacccctggatggccttccccagaaacagcatcatgcacctgaaccacaccgccaaccccaccagcaacagcaacttcctggacctgaacctgcccccccagcacaacaccggcctgggcggcatccccgtggccgacaacagcagcagcgtggagagcctgaacatgaaggagtggcaggacggcctgagagccctgctgcccaacatcaacatcaacttcggcggcctgcccaacagcagcagccccagcaacgccaaccacagcgcccccaccagcaacaccgccaccaccgacagcctgagctgggacagccccggcagctggaccgaccccgccatcatcaccggcatccccgccagcagcggcaacagcctggacagcctgcaggacgacaaccccccccactggctgaagagcctgcaggccctgaccgagatggacggccccagcgccgcccccagccagacccaccacagcgcccccttcagcacccagatccccctgcacagagccagctggaacccctaccccccccccagcaaccccagcagcttccacagccccccccccggcatctactacagagtgcagcactggaccgccatcagacagagaggcgccaccatcagaaagtgcagaatctgccccaccctgttcagccccagccagcccaccacccacagcagcctgctgatcagctacgtgctgaagaaccccgtgcccgaccagttcttcttcagcctgacccccgacgccatgagaagccagggccactaccacctgttcatcaactgcaagaacttctgctag

SEQ ID NO: 73051 - DNA, 2142 bp, Artificial Sequence
  derived and/or modified sequence
atgagcagaagccccgacgccaaggaggaccccgtggagtgccccctgtgcatggagcccctggagatcgacgacatcaacttcttcccctgcacctgcggctaccagatctgcagattctgctggcacagaatcagaaccgacgagaacggcctgtgccccgcctgcagaaagccctaccccgaggaccccgccgtgtacaagcccctgagccaggaggagctgcagagaatcaagaacgagaagaagcagaagcagaacgagagaaagcagaagatcagcgagaacagaaagcacctggccagcgtgagagtggtgcagaagaacctggtgttcgtggtgggcctgagccagagactggccgaccccgaggtgctgaagagacccgagtacttcggcaagttcggcaagatccacaaggtggtgatcaacaacagcaccagctacgccggcagccagggccccagcgccagcgcctacgtgacctacatcagaagcgaggacgccctgagagccatccagtgcgtgaacaacgtggtggtggacggcagaaccctgaaggccagcctgggcaccaccaagtactgcagctacttcctgaagaacatgcagtgccccaagcccgactgcatgtacctgcacgagctgggcgacgaggccgccagcttcaccaaggaggagatgcaggccggcaagcaccaggagtacgagcagaagctgctgcaggagctgtacaagctgaaccccaacttcctgcagctgagcaccggcagcgtggacaagaacaagaacaaggtgacccccctgcagagatacgacacccccatcgacaagcccagcgacagcctgagcatcggcaacggcgacaacagccagcagatcagcaacagcgacacccccagccccccccccggcctgagcaagagcaaccccgtgatccccatcagcagcagcaaccacagcgccagaagccccttcgagggcgccgtgaccgagagccagagcctgttcagcgacaacttcagacaccccaaccccatccccagcggcctgccccccttccccagcagcccccagaccagcagcgactggcccaccgcccccgagccccagagcctgttcaccagcgagaccatccccgtgagcagcagcaccgactggcaggccgccttcggcttcggcagcagcaagcagcccgaggacgacctgggcttcgaccccttcgacgtgaccagaaaggccctggccgacctgatcgagaaggagctgagcgtgcaggaccagcccagcctgagccccaccagcctgcagaacagcagcagccacaccaccaccgccaagggccccggcagcggcttcctgcaccccgccgccgccaccaacgccaacagcctgaacagcaccttcagcgtgctgccccagagattcccccagttccagcagcacagagccgtgtacaacagcttcagcttccccggccaggccgccagatacccctggatggccttccccagaaacagcatcatgcacctgaaccacaccgccaaccccaccagcaacagcaacttcctggacctgaacctgcccccccagcacaacaccggcctgggcggcatccccgtggccgacaacagcagcagcgtggagagcctgaacatgaaggagtggcaggacggcctgagagccctgctgcccaacatcaacatcaacttcggcggcctgcccaacagcagcagccccagcaacgccaaccacagcgcccccaccagcaacaccgccaccaccgacagcctgagctgggacagccccggcagctggaccgaccccgccatcatcaccggcatccccgccagcagcggcaacagcctggacagcctgcaggacgacaaccccccccactggctgaagagcctgcaggccctgaccgagatggacggccccagcgccgcccccagccagacccaccacagcgcccccttcagcacccagatccccctgcacagagccagctggaacccctaccccccccccagcaaccccagcagcttccacagccccccccccggcttccagaccgccttcagaccccccagcaagacccccaccgacctgctgcagagcagcaccctggacagacactag

SEQ ID NO: 73052 - DNA, 231 bp, Artificial Sequence
  derived and/or modified sequence
atggccgccgacctgaacctggagtggatcagcctgcccagaagctggacctacggcatcaccagaggcggcagagtgttcttcatcaacgaggaggccaagagcaccacctggctgcaccccgtgaccggcgaggccgtggtgaccggccacagaagacagagcaccgacctgcccaccggctgggaggaggcctacaccttcgagggcgccagatactacatcaactag

SEQ ID NO: 73053 - DNA, 231 bp, Artificial Sequence
  derived and/or modified sequence
atggccgccgacttaaaccttgagtggatttcattgccacgcagctggacatacggaataacaagaggcggacgcgtattcttcataaatgaggaagccaagagtactacctggctccacccagtcacaggggaagctgtggtgactggccaccggaggcagagcaccgatctaccaacaggatgggaggaggcgtacacattcgagggcgctaggtactatatcaattag

SEQ ID NO: 73054 - DNA, 231 bp, Artificial Sequence
  derived and/or modified sequence
atggctgctgacctgaacctggagtggatcagcctgcccaggtcctggacctacggcatcacccggggcggccgggtcttcttcatcaatgaggaggccaagagcaccacctggctgcaccctgtgactggagaggccgtggtgacaggccaccggcggcagagcacagacctgcccaccggctgggaggaggcctacacctttgagggcgcccgctactacatcaactag

SEQ ID NO: 73055 - DNA, 231 bp, Artificial Sequence
  derived and/or modified sequence
atggccgccgacctgaacctggagtggatcagcctgccccggagctggacatatggaatcacaaggggcggaagggtgttctttattaacgaggaggcaaagtccaccacatggctgcatccagttaccggtgaggccgtggtcacaggccaccggcgtcagagcacagatcttcccactggctgggaggaggcatacacttttgagggcgccagatattacatcaactag

SEQ ID NO: 73056 - DNA, 1954 bp, Artificial Sequence
  derived and/or modified sequence
gccgcggcggcagcaggagaaggcggcggcggcggctagggatcagacatggcggcggatctgaacctggagtggatctccctgccccggtcctggacttacgggatcaccaggggcggccgagtcttcttcatcaacgaggaggccaagagcaccacctggctgcaccccgtcaccggcgaggcggtggtcaccggacaccggcggcagagcacagatttgcctactggctgggaagaagcatatacttttgaaggtgcaagatactatataaactgaatagatttccttttcattcttcctgggaatagaagatgtaatggaagttccagtatctgtatgcaggcctatgactagcttcacttcttggtgactaatactagttgacaaaacagcatattctaaactgattgtcttcgttatccagtagctttcctattctccataacaaatgttccaaatctttgattactcacctcagaatgcttgtctcactcctcttttcctcattcctagtagatcataccttggagaagaaagtagaaactatcaggcctgaacttcattagctttttcttcctcttcaatccaaatctgtctgtatcttcattcatttttcttaaccctttccttgcttgctatttctgctttccaaaaccaaggaaggaattttgacagaggtacccaaggaattcactgggggaaaatgaatgattcaataaatgatgttatgataattagatagatagctatatgtaagcataaaaaatttttaaaaccttaggcccttattatcatatcatgcacaaaaattaagtggattattgatttaaatgtaaaaacaaaaagtataaaacttttagaaaaaagagattatttgtgacattgggtctggcaaagatttcttagatgcgattaaagatttacaaaagaaaaaattgataaattagacttcatcaaaatttagaaattttgctttatctgtgtaggatactgaagagaatgaaaagacaagtcacagactgggagaaagtacaggcaaatcacatatttgtcaaataactcatatccagaatttttaaagaacttttacaactcaataataacaagacaaacagctcaattttttaaatgagggaaaaatttaaatatatttcacatgagaatatactcaaatagccagtgagcacatgaaaagatgttcagcatcattagacattagcaaattgcaaattaaaaccacactgaggaacccactaggaatggctataatcaaagacgatcagtatcaagtattgcggagaatgtggagaaactcaaactctgttacactagtaatagaaatataaaatgttagaaccactttggaaagagattggcagtttctggaaaaaattaattgtaaatttgaccaagcaattttactacgtaagtatgttaagaatgaaaacgtgtgcacacaaagatctgtactaaaatgttgatagcattattcataacagcctaacagtgcaaatgtctgtcaactactgtgaatggagagacaaaatgtgtttattaatacaataaaactacccagcaataaaaagaaataattgactgataaatggtatacgatgactgaactttaaaaccttgatgctgcctaaaagagccagacacagactacacattgtataattccatttttatgaatttcccagaaaggcaaattatagagacaaaacaaatcagtggttgcctagggctggtggtggacgtggagattgactgtaaatgggacatgagggaatttttttgtggtgatagaaatgttataaaactagatgtggtaatagttgcacaactctgtaaattcactaaaagtcactgaactgtacacttaaccataggtgggtttaatgaaatgtgaattacactgcaataaaactaaataaaagctgagttagtacca

SEQ ID NO: 73057 - DNA, 231 bp, Artificial Sequence
  derived and/or modified sequence
atggccgcagacttgaacctggagtggatttccctgccaagaagctggacatacggcattacaaggggaggacgtgttttcttcatcaacgaggaggcgaagtctacaacttggctccaccccgtcacgggcgaagccgttgtgactggccaccgcagacagtcaaccgatctgcccacggggtgggaggaagcttataccttcgagggcgcacggtactacatcaattag

SEQ ID NO: 73058 - DNA, 1059 bp, Artificial Sequence
  derived and/or modified sequence
atggaaatcgaggaggtctcagaaaacgttctccaggtgcacctgaatggtttacttcagatcaacgacaaaattgcgctcaaggaaatcacacggcagctgaatctcgagaacgtagttggggataaggttttcggaagtttcgctgagaacctgtcttttttactcgaagccctcaaaaagggcgataggacctctagctgccccgtgattttcatccttgatgagtttgatctgttcgcccatcacaagaaccaaacgctgctctacaatttgtttgatatttcccagagtgcgcagactcccattgcagtcatcggtcttacatgccgcctggacatcctggaattactggaaaaaagggtcaagtcacggtttagtcaccgacagatccacttgatgaacagcttcgggttcccccagtacgttaagatctttaaggaacagcttagcctgcccgcagagttccccgacaaggtttttgcagagaagtggaacgagaacgtgcagtatctttcagaagatagatcagtgcaggaggtgctgcagaagcactttaacatttccaagaatctgcgatccctacacatgctgctcatgctagccctcaaccgcgtgaccgcatcacatccctttatgacagctgtggacctgatggaggcatcgcagctgtgctctatggactcaaaggccaatatcgtgcatggcctgagcgtccttgagatctgtcttatcatcgccatgaagcatctcaacgacatttacgaggaagagccattcaattttcaaatggtgtacaacgagttccagaagttcgtgcagcgtaaggcccattccgtctacaatttcgaaaaaccggtggtgatgaaggccttcgagcacctgcagcaattagagctgatcaaaccgatggagaggacctccgggaattcccagagagaatatcagctgatgaaactgctgttggacaatacccaaattatgaacgcgctccagaaatatcccaattgccccacggatgtgaggcagtgggctacgagttcactgagctggctgtag

SEQ ID NO: 73059 - DNA, 660 bp, Artificial Sequence
  derived and/or modified sequence
atgaacagcttcgggttcccccaatatgtcaaaatcttcaaagaacaactgagccttccagccgaattccctgataaggtgtttgccgagaaatggaacgagaatgtgcaatatctcagtgaagaccgctctgttcaggaagttctgcagaaacactttaacatctccaaaaatcttaggtccttgcacatgctgctgatgctggccttgaatcgcgtgaccgctagtcatccattcatgactgctgtcgatctgatggaagcatctcagctctgctccatggacagtaaagctaacatagtgcacggcctttcagtcctggagatctgcctgataattgctatgaaacaccttaacgatatctatgaagaagagcctttcaattttcagatggtgtacaacgagttccaaaagttcgtgcagagaaaggcccattcagtatacaactttgagaagcctgtggtgatgaaggccttcgagcacctgcagcagcttgagttgataaaacctatggaacggaccagtgggaactcccaacgagaatatcagctgatgaagctcctcctggataacacccagataatgaacgcactgcagaagtatcctaattgcccaactgatgtgcgtcagtgggcaactagttcattatcatggttgtag

SEQ ID NO: 73060 - DNA, 1059 bp, Artificial Sequence
  derived and/or modified sequence
atggagattgaggaggtgtctgaaaatgtgctgcaggtgcacctgaatggcctgctgcagatcaatgacaagatcgccctgaaggagatcacccggcagctgaacctggagaatgtggtgggggacaaggtgtttggcagctttgctgagaacctgtccttcctgctggaggccctgaagaagggggacaggaccagcagctgccctgtgatcttcatcctggatgaatttgacctgtttgcccaccacaagaaccagaccctgctgtacaacctgtttgacatcagccagagcgcccagacccccatcgccgtcatcggcctgacctgccgcctggacatcctggagctgctggagaagagggtgaagagccgcttcagccaccggcagatccacctgatgaacagctttggcttcccccagtatgtgaagatcttcaaggagcagctgagcctgcctgctgagttcccagacaaggtgtttgctgagaagtggaatgaaaatgtgcagtacctgtctgaggacagatctgtgcaggaggtgctgcagaagcacttcaacatcagcaagaacctgcggagcctgcacatgctgctgatgctggccctgaacagagtgacagccagccaccccttcatgacagctgtggacctgatggaggccagccagctgtgcagcatggacagcaaggccaacatcgtgcacggcctgtctgtgctggagatctgcctgatcatcgccatgaagcacctgaatgacatctatgaggaggagcccttcaacttccagatggtgtacaatgagttccagaagtttgtgcagaggaaggcccacagcgtgtacaactttgagaagcctgtggtgatgaaggcctttgagcacctgcagcagctggagctgatcaagcccatggagaggaccagcggcaacagccagcgggagtaccagctgatgaagctgctgctggacaacacccagatcatgaatgccctgcagaagtaccccaactgccccacagatgtgcggcagtgggccaccagcagcctgtcctggctgtag

SEQ ID NO: 73061 - DNA, 660 bp, Artificial Sequence
  derived and/or modified sequence
atgaacagctttggcttcccccagtatgtgaagatcttcaaggagcagctgagcctgcctgctgagttcccagacaaggtgtttgctgagaagtggaatgaaaatgtgcagtacctgtctgaagatagatctgtgcaggaggtgctgcagaagcacttcaacatcagcaagaacctgcggagcctgcacatgctgctgatgctggccctgaacagagtgacagccagccaccccttcatgacagctgtggacctgatggaggccagccagctgtgcagcatggacagcaaggccaacatcgtgcacggcctgtctgtgctggagatctgcctgatcatcgccatgaagcacctgaatgacatctatgaggaggagcccttcaacttccagatggtgtacaatgagttccagaagtttgtgcagaggaaggcccacagcgtgtacaactttgagaagcctgtggtgatgaaggcctttgagcacctgcagcagctggagctgatcaagcccatggagaggaccagcggcaacagccagcgggagtaccagctgatgaagctgctgctggacaacacccagatcatgaatgccctgcagaagtaccccaactgccccacagatgtgcggcagtgggccaccagcagcctgtcctggctgtag

SEQ ID NO: 73062 - DNA, 1059 bp, Artificial Sequence
  derived and/or modified sequence
atggagatcgaggaggtgagcgagaacgtgctgcaggtgcacctgaacggcctgctgcagatcaacgataagatcgcactgaaagagatcacccgacagctgaacctcgagaatgttgtcggggataaagtatttggctcctttgccgagaacctgtcctttctgctggaggccttgaaaaaaggggatcggacctcctcatgtcccgtcatttttatcctggacgaattcgacctgtttgcccaccacaagaatcagaccctgctgtataacctatttgatatttctcagagtgcacagaccccaattgctgtaataggcctgacctgtcgcctggatatcctggaattgctggagaagagggtcaagtctaggtttagccatcgtcagatccacctgatgaattcatttgggttcccccaatacgtgaagatatttaaggagcagctgtcccttccagctgagttccccgataaggtatttgcggaaaaatggaacgaaaatgtccagtacctctcagaggaccggagcgtccaagaagtgctacagaagcatttcaacatcagtaagaatctccggagtttgcacatgctgctgatgttggccttgaaccgggtaaccgcctcccacccttttatgactgcagtcgatctgatggaggctagccagctgtgctccatggactccaaggcaaacatagtccatggtctgagtgttctcgagatctgtctgattatcgccatgaaacatttgaatgacatctacgaagaagagccatttaacttccagatggtttacaacgagttccagaaattcgtccagcggaaagcccatagcgtttacaactttgagaagcctgtggtcatgaaggccttcgagcacctccagcagctggaacttatcaagcccatggagaggacgtcagggaattcacagcgtgaataccaattaatgaaattactgctggacaatacccagatcatgaacgcacttcaaaagtacccaaattgccccaccgatgtccgccagtgggcgacgagttcactttcctggctctag

SEQ ID NO: 73063 - DNA, 660 bp, Artificial Sequence
  derived and/or modified sequence
atgaacagcttcggcttcccccagtacgtgaagatcttcaaggagcaactctccctgccagctgagtttccagataaggtctttgccgaaaaatggaacgaaaacgtgcagtatctgagtgaggacaggtccgtgcaggaagtattacagaagcacttcaacatcagtaagaacttacggagtctgcacatgctcttgatgctggccctgaacagggtcaccgcctcccacccattcatgacagccgtggacctcatggaggcatcccagctgtgtagtatggatagtaaggccaatatcgtgcacggcctcagcgtcctagaaatatgcttgataattgctatgaagcatctaaatgacatttacgaggaggaaccatttaattttcaaatggtgtacaatgagtttcagaaatttgtgcaacggaaggctcactccgtgtacaactttgagaaacctgtggtgatgaaagcgttcgagcacctccagcagctggagctgatcaaacccatggagcgaacttctgggaactctcagagggaataccagttaatgaagcttctgttggataatacccagattatgaatgccctgcagaagtatccgaattgtcccactgacgtgcgacagtgggcaaccagctctcttagctggctctag

SEQ ID NO: 73064 - DNA, 1441 bp, Artificial Sequence
  derived and/or modified sequence
ggggcatgccgggagtggttgtgtacggtccgcagcggcaggtgaagtctagcagaggacgcggccaggcgattcggtgaagcgattcctgcaggcgttggttcccctctttgacctggatttgaatttgttgaaatgagcagtcgtaaatcaaagagtaacagcttaattcacacagagtgcctttcacaggtacaaagaattttacgtgaaagattttgtcgtcagagtccacatagtaacctatttggagtgcaagtacaatacaaacacttaagtgagctgctgaaaagaactgctctccatggagagagtaactctgtccttattatcggaccccgaggatcaggaaaaactatggactgctgcagatcaatgacaaaatcgccctaaaggaaatcacaaggcagttaaatctggaaaatgtagttggagataaagtttttggaagctttgctgaaaacctttcatttcttctggaagctttaaaaaaaggatattttggaactcttagaaaaaagagtgaagtcaagattttctcaccggcagatacacttaatgaattcatttggttttccacagtatgttaaaatatttaaagaacagttatctctacctgcagagtttccagacaaggtttttgctgagaagtggaatgaaaatgttcagtatctctcagaagatagaagtgtgcaagaagtactacagaagcatttcaatatcagcaaaaacctgcggtcattacacatgctattgatgcttgctttaaatcgagtaacagcatcgcacccatttatgactgccgtagatctaatggaagcaagccaactgtgtagcatggactcgaaagcaaatattgtacatggtctatcagtcttggaaatctgtcttataatagcaatgaaacatttaaatgacatctatgaggaagagccatttaattttcaaatggtctataatgagtttcagaagtttgttcaaaggaaagcacattccgtttataattttgaaaaacctgttgtcatgaaggcttttgaacacttgcagcaattagaattaataaagcccatggaaagaacttcaggaaattcacagagagagtaccagctgatgaaactgcttttggataatactcaaattatgaatgctctgcagaaatatcccaactgtcctacagatgtgaggcagtgggcaacatcctcactaagctggttatgaatataaccagtgacttcaactttggcatttcattcatacttctgtagagaacggaaaactattgtccattaacatgatatgctaaacattctataaacattcttgtatttatgtgagacttgcccatctactgtcttggctgtgtcttgccttttaatcatgaacagttacatgatttataatttcactgattgagattactttgtaagtagctgttcagaag

SEQ ID NO: 73065 - DNA, 1059 bp, Artificial Sequence
  derived and/or modified sequence
atggagattgaagaggttagcgaaaatgtgttacaggtacacctgaatggacttttgcagatcaacgataagatcgccctgaaggagataacccgccagcttaacctggaaaatgtagtcggggacaaagtgtttgggagtttcgcagagaatctgtccttcctacttgaagctctgaaaaagggggaccgcacctcctcttgccctgtgatatttattctggatgagtttgacctgtttgcgcatcacaagaatcagacccttctctacaacttattcgacataagtcaatcagcgcagacccccatcgccgtgataggcctgacatgcagactggatattctggaactcttggaaaagagggtaaagtcccgtttctcgcaccgacagatccacctcatgaactcttttggatttccacagtacgtgaagatctttaaggaacagctcagcctgcccgcagaatttcctgacaaggtgttcgctgaaaaatggaacgagaacgtgcaatacttgagcgaggacagatctgtccaggaggtgctgcagaagcactttaacattagcaagaatttgagatcattacacatgcttctgatgctggctctgaatagagtcacagcctcccacccatttatgacggccgtggacctgatggaagcctcacaactgtgcagcatggactcaaaggccaacatcgtacacggactgagcgtgttggaaatctgtctgatcatcgctatgaagcaccttaatgacatctacgaggaagagccatttaacttccagatggtctataacgagtttcagaagttcgtgcaaaggaaagcccactcagtatacaattttgaaaaacctgtagtcatgaaggccttcgagcacttacagcagctggagctaattaaacctatggagcgcaccagtgggaacagtcagcgcgaataccagctgatgaaactgctgctggacaatactcagatcatgaatgctttacagaaataccccaattgtcctaccgacgtaaggcaatgggccacctcatctctatcttggctgtag

SEQ ID NO: 73066 - DNA, 660 bp, Artificial Sequence
  derived and/or modified sequence
atgaattctttcggtttcccgcagtatgtcaagattttcaaagagcagctcagcttaccagccgagttcccggataaggtgttcgctgagaagtggaacgagaacgtgcagtatttatccgaagatagaagtgtccaggaagtgctgcagaaacatttcaacatctctaagaacctgcgttccttgcacatgctcctaatgctggcgttaaatagagtgacagcgagtcatccctttatgaccgccgttgacctcatggaggcgagtcagctgtgtagcatggactctaaagctaatattgtccatgggctgagcgtgctcgagatttgtcttatcattgccatgaagcacctgaatgacatctacgaggaggagccctttaacttccaaatggtatataacgagttccagaagttcgtgcaaagaaaggcacatagtgtgtataacttcgagaagccagtggtcatgaaggcatttgagcacctgcagcagctcgaattaatcaagccaatggaaaggactagcggtaatagtcagcgggagtatcagttgatgaaactgctgctggacaatacccagatcatgaacgctcttcagaagtatccaaactgtcccaccgacgttcggcaatgggcgacaagtagcctgtcttggctctag

SEQ ID NO: 73067 - DNA, 1059 bp, Artificial Sequence
  derived and/or modified sequence
atggagatcgaggaggtgagcgagaacgtgctgcaggtgcacctgaacggcctgctgcagatcaacgacaagatcgccctgaaggagatcaccagacagctgaacctggagaacgtggtgggcgacaaggtgttcggcagcttcgccgagaacctgagcttcctgctggaggccctgaagaagggcgacagaaccagcagctgccccgtgatcttcatcctggacgagttcgacctgttcgcccaccacaagaaccagaccctgctgtacaacctgttcgacatcagccagagcgcccagacccccatcgccgtgatcggcctgacctgcagactggacatcctggagctgctggagaagagagtgaagagcagattcagccacagacagatccacctgatgaacagcttcggcttcccccagtacgtgaagatcttcaaggagcagctgagcctgcccgccgagttccccgacaaggtgttcgccgagaagtggaacgagaacgtgcagtacctgagcgaggacagaagcgtgcaggaggtgctgcagaagcacttcaacatcagcaagaacctgagaagcctgcacatgctgctgatgctggccctgaacagagtgaccgccagccaccccttcatgaccgccgtggacctgatggaggccagccagctgtgcagcatggacagcaaggccaacatcgtgcacggcctgagcgtgctggagatctgcctgatcatcgccatgaagcacctgaacgacatctacgaggaggagcccttcaacttccagatggtgtacaacgagttccagaagttcgtgcagagaaaggcccacagcgtgtacaacttcgagaagcccgtggtgatgaaggccttcgagcacctgcagcagctggagctgatcaagcccatggagagaaccagcggcaacagccagagagagtaccagctgatgaagctgctgctggacaacacccagatcatgaacgccctgcagaagtaccccaactgccccaccgacgtgagacagtgggccaccagcagcctgagctggctgtag

SEQ ID NO: 73068 - DNA, 660 bp, Artificial Sequence
  derived and/or modified sequence
atgaacagcttcggcttcccccagtacgtgaagatcttcaaggagcagctgagcctgcccgccgagttccccgacaaggtgttcgccgagaagtggaacgagaacgtgcagtacctgagcgaggacagaagcgtgcaggaggtgctgcagaagcacttcaacatcagcaagaacctgagaagcctgcacatgctgctgatgctggccctgaacagagtgaccgccagccaccccttcatgaccgccgtggacctgatggaggccagccagctgtgcagcatggacagcaaggccaacatcgtgcacggcctgagcgtgctggagatctgcctgatcatcgccatgaagcacctgaacgacatctacgaggaggagcccttcaacttccagatggtgtacaacgagttccagaagttcgtgcagagaaaggcccacagcgtgtacaacttcgagaagcccgtggtgatgaaggccttcgagcacctgcagcagctggagctgatcaagcccatggagagaaccagcggcaacagccagagagagtaccagctgatgaagctgctgctggacaacacccagatcatgaacgccctgcagaagtaccccaactgccccaccgacgtgagacagtgggccaccagcagcctgagctggctgtag

SEQ ID NO: 73069 - DNA, 1089 bp, Artificial Sequence
  derived and/or modified sequence
atgctgattaatcatgccctaaaggagctgatggaaatagaagaagtctccgagaatgtgctacaggtgcacttaaatggcttgctccagattaacgacaaaatcgctctgaaagaaatcactagacagctgaacctggaaaacgtggtgggggataaagtctttggtagttttgctgagaatctgagcttccttctcgaggccctcaaaaagggcgataggaccagcagctgcccagtgatattcatcctggacgaattcgacctttttgcccaccataagaatcagacactgctgtacaacttgttcgatatttctcaatccgcacagacccccatcgccgtgattggtctgacatgtcggttggatatcttggaactgttggagaagcgggttaaatcccgcttctcacacagacagatccacctgatgaattctttcggtttcccacaatacgtgaagattttcaaagagcagctgagtctgccagctgaattccctgataaagtcttcgcagaaaaatggaatgagaatgtccaatatctttctgaggatcgatctgtgcaggaggtgcttcagaagcattttaacatctctaaaaatttgagatctctgcatatgctacttatgctagcactcaacagagtgaccgcctcccatcctttcatgacagccgtggatctgatggaagctagtcaactgtgtagtatggattctaaagccaacattgtgcacgggctgagcgtgctggaaatctgcctgatcattgctatgaagcatctgaacgatatctatgaggaagaaccattcaactttcagatggtgtacaatgaatttcagaagttcgtgcagagaaaagctcattcagtttacaactttgagaaacccgttgtcatgaaggctttcgagcacctgcagcagttggagcttatcaagcccatggagcgaacctccggcaacagccagcgggagtaccagctcatgaaactgctcctggataatactcagatcatgaacgcacttcagaaatacccaaactgtccgaccgacgtgagacaatgggcgacatcaagcctgtcctggttgtag

SEQ ID NO: 73070 - DNA, 1089 bp, Artificial Sequence
  derived and/or modified sequence
atgctgatcaaccacgccctgaaggagctgatggagattgaggaggtgtctgaaaatgtgctgcaggtgcacctgaatggcctgctgcagatcaatgacaagatcgccctgaaggagatcacccggcagctgaacctggagaatgtggtgggggacaaggtgtttggcagctttgctgagaacctgtccttcctgctggaggccctgaagaagggggacaggaccagcagctgccctgtgatcttcatcctggatgaatttgacctgtttgcccaccacaagaaccagaccctgctgtacaacctgtttgacatcagccagagcgcccagacccccatcgccgtcatcggcctgacctgccgcctggacatcctggagctgctggagaagagggtgaagagccgcttcagccaccggcagatccacctgatgaacagctttggcttcccccagtatgtgaagatcttcaaggagcagctgagcctgcctgctgagttcccagacaaggtgtttgctgagaagtggaatgaaaatgtgcagtacctgtctgaggacagatctgtgcaggaggtgctgcagaagcacttcaacatcagcaagaacctgcggagcctgcacatgctgctgatgctggccctgaacagagtgacagccagccaccccttcatgacagctgtggacctgatggaggccagccagctgtgcagcatggacagcaaggccaacatcgtgcacggcctgtctgtgctggagatctgcctgatcatcgccatgaagcacctgaatgacatctatgaggaggagcccttcaacttccagatggtgtacaatgagttccagaagtttgtgcagaggaaggcccacagcgtgtacaactttgagaagcctgtggtgatgaaggcctttgagcacctgcagcagctggagctgatcaagcccatggagaggaccagcggcaacagccagcgggagtaccagctgatgaagctgctgctggacaacacccagatcatgaatgccctgcagaagtaccccaactgccccacagatgtgcggcagtgggccaccagcagcctgtcctggctgtag

SEQ ID NO: 73071 - DNA, 1089 bp, Artificial Sequence
  derived and/or modified sequence
atgctgatcaaccacgccctgaaggagctgatggagatcgaggaggtctccgagaatgtccttcaggtgcacctcaatggcctcctccaaatcaacgacaaaatcgcccttaaagagatcacacggcaactgaacttagagaacgtggtgggtgataaggtattcggttcctttgctgagaacctgagcttcctcctcgaagctctgaagaagggagacagaactagtagctgtccagttatctttatcttagatgaatttgacctatttgcccatcataagaatcagactctgctttataacctttttgacatctcccaaagtgcacaaacgcctatcgcagttatcggcctgacatgccggctggacattctcgaactgctggagaagagggtgaaaagcagattttcccatcgccagatccatctgatgaactcttttggattcccacagtacgtaaaaatctttaaggagcagttgtctttgccagccgagtttcctgacaaagttttcgccgaaaaatggaatgagaacgtgcaatacctgtccgaggatcggagcgttcaggaagtcttgcagaagcactttaacattagtaagaatttgcgctccttgcacatgctgctcatgctggctctgaatagggtcacagcatctcacccctttatgacggcagtcgacctaatggaagcgagccagttgtgctccatggactcgaaagccaacatcgtacacggactgtctgttctggagatctgcctgattatcgcgatgaaacacttgaacgacatctatgaagaggagcccttcaatttccaaatggtatataacgaatttcaaaagtttgtgcagagaaaggcacactccgtgtataacttcgaaaagccggtagttatgaaagcttttgaacacttacagcaactcgagctcatcaagcctatggaacgaacgtctggcaattcacagagggaatatcagctgatgaaactactgctagataatactcagatcatgaacgcgttgcagaaataccctaattgtcctactgacgtacgacagtgggcaacctcaagcttgagctggctgtag

SEQ ID NO: 73072 - DNA, 2695 bp, Artificial Sequence
  derived and/or modified sequence
ggaagtcgctacgcttttaacacccccagctccctcctccttcctaagggaaagtggaggaacggaagtgggcgtggacggagacgaaaggaggtcacgtgtttgggcgggagaggggcggggtgggagaggtagtgcgtgcgcggggcatgccgggagtggttgtgtacggtccgcagcggcaggtgaagtctagcagaggacgcggccaggcgattcggtgaagcgattcctgcaggcgttggttcccctctttgacctgttaataaatcatgctttgaaagaactcatggaaatagaagaagtgagtgaaaatgtattacaagttcacttaaatggactgctgcagatcaatgacaaaatcgccctaaaggaaatcacaaggcagttaaatctggaaaatgtagttggagataaagtttttggaagctttgctgaaaacctttcatttcttctggaagctttaaaaaaaggtgaccgaactagcagttgcccagtgatcttcatattagatgaatttgatctttttgctcatcataaaaaccaaacacttctctataatctttttgacatttctcagtctgcacagaccccaatagcagttattggtcttacatgtagattggatattttggaactcttagaaaaaagagtgaagtcaagattttctcaccggcagatacacttaatgaattcatttggttttccacagtatgttaaaatatttaaagaacagttatctctacctgcagagtttccagacaaggtttttgctgagaagtggaatgaaaatgttcagtatctctcagaagatagaagtgtgcaagaagtactacagaagcatttcaatatcagcaaaaacctgcggtcattacacatgctattgatgcttgctttaaatcgagtaacagcatcgcacccatttatgactgccgtagatctaatggaagcaagccaactgtgtagcatggactcgaaagcaaatattgtacatggtctatcagtcttggaaatctgtcttataatagcaatgaaacatttaaatgacatctatgaggaagagccatttaattttcaaatggtctataatgagtttcagaagtttgttcaaaggaaagcacattccgtttataattttgaaaaacctgttgtcatgaaggcttttgaacacttgcagcaattagaattaataaagcccatggaaagaacttcaggaaattcacagagagagtaccagctgatgaaactgcttttggataatactcaaattatgaatgctctgcagaaatatcccaactgtcctacagatgtgaggcagtgggcaacatcctcactaagctggttatgaatataaccagtgacttcaactttggcatttcattcatacttctgtagagaacggaaaactattgtccattaacatgatatgctaaacattctataaacattcttgtatttatgtgagacttgcccatctactgtcttggctgtgtcttgccttttaatcatgaacagttacatgatttataatttcactgattgagattactttgtaagtagctgttcagaagaataaaatatgactgttttagggactagaccatgtgcttttttaacacttatatatataatggtctatttgaagagctcacttcaacctaacagctagatgtctttacaaaccttaaaccaaaggagtaaaaaaaacaatggtaagcactgaagtataataagtaacctttggtacagcaggtttgctgcagtgtttttttctgtccacatgcaaattttggattctatcccagacccaggttttctagttcagaagactaaccagcttagtcagaagatggttccatggaagaaaaaggccaaggagtttgaagatttttcttctagacatctcaaaatgtggtactcataccatccacatcagaatcccttgtaggattttctaaaattacagattgttgagcctaccataggtcaaaaggactggaattttccttcttaacaagtatagtcatggcaccacgtaacattttggtcaatgacattgtataaagggtggtctcataagattataccatatttttactgtaccttttctatgtctaaatatacaaatgttttaccattgtgttacagttgcctacagtatgattacagtaacattctgtacagtgctatagctgaagagtaataggctaggctatctgtatagcctaagtgtgtaacaggctatatacatatcatcagggtctgtgtaagtatactctgtgatgttcatacagtgatgaaatcacccaaagacacatttctcagaacgtagccccatcatgaagtgacgtgactaccagagatttctggaaaagcactcccaaaagtaatgagatgtgtatggcaatgttaactgaacctgtttgtattaaaaagtaaatccctatgaggaatgtggaaatgtccgtcaaagcattgtcttttaagtaagttccaagatccatgaattaacagaggcatatatttaaaatgaaatttaatgagcacttagtgacttcatttgttcaagaatatttgatttcctattgtgtgcatgggaggtttacaaaagacagactgtccctatgcttgtgcagcttacaatctatttaactattagaggccctgtgagatgtaggcagttatttacagatga

SEQ ID NO: 73073 - DNA, 1089 bp, Artificial Sequence
  derived and/or modified sequence
atgctgataaatcacgccctcaaagaactgatggagatcgaagaagtgtcggaaaacgtcctccaagtccacttgaatggacttctccagatcaacgacaaaatcgcccttaaagaaatcactcgccagctgaatctggaaaacgtggtgggtgataaagttttcggaagtttcgctgagaacctttccttcctattagaggcactgaagaagggcgatcgaacttcttcatgccccgtgatatttattctcgatgagttcgatttgtttgctcaccacaagaatcagaccttgctgtataatctttttgacatctcacagtcagctcagacccccatcgccgtaattggactgacttgcaggttggatatactggagctgctggaaaaacgcgttaagagcaggttttcacacaggcagattcatctgatgaactctttcggatttccacaatacgttaaaattttcaaagagcagctttcactgcccgcagagtttcccgataaagtgttcgccgagaagtggaatgaaaatgtgcagtacctgtcagaggatcggagcgtgcaggaagtgttacagaaacattttaacatttctaaaaatctcagaagtctgcatatgctgctgatgctggctttaaatcgtgtcacagcctcacatccctttatgactgccgtcgatttgatggaagcttcccagttatgctccatggactccaaagccaacatcgtgcatggtctgtccgtactcgaaatctgcttgattatcgccatgaaacacctgaacgatatttacgaagaggagcccttcaacttccagatggtgtacaatgagttccagaaatttgtgcaacgaaaggctcactcagtctacaactttgagaagcctgtggtgatgaaggcgttcgaacacctgcagcagttagagcttataaagccgatggagcgaaccagtgggaacagccagagggagtaccagctaatgaagctgctgctggataatacccagatcatgaatgccctgcagaagtatccgaactgtcctaccgatgtgagacagtgggcaacttcgagtctcagttggctgtag

SEQ ID NO: 73074 - DNA, 1089 bp, Artificial Sequence
  derived and/or modified sequence
atgctgatcaaccacgccctgaaggagctgatggagatcgaggaggtgagcgagaacgtgctgcaggtgcacctgaacggcctgctgcagatcaacgacaagatcgccctgaaggagatcaccagacagctgaacctggagaacgtggtgggcgacaaggtgttcggcagcttcgccgagaacctgagcttcctgctggaggccctgaagaagggcgacagaaccagcagctgccccgtgatcttcatcctggacgagttcgacctgttcgcccaccacaagaaccagaccctgctgtacaacctgttcgacatcagccagagcgcccagacccccatcgccgtgatcggcctgacctgcagactggacatcctggagctgctggagaagagagtgaagagcagattcagccacagacagatccacctgatgaacagcttcggcttcccccagtacgtgaagatcttcaaggagcagctgagcctgcccgccgagttccccgacaaggtgttcgccgagaagtggaacgagaacgtgcagtacctgagcgaggacagaagcgtgcaggaggtgctgcagaagcacttcaacatcagcaagaacctgagaagcctgcacatgctgctgatgctggccctgaacagagtgaccgccagccaccccttcatgaccgccgtggacctgatggaggccagccagctgtgcagcatggacagcaaggccaacatcgtgcacggcctgagcgtgctggagatctgcctgatcatcgccatgaagcacctgaacgacatctacgaggaggagcccttcaacttccagatggtgtacaacgagttccagaagttcgtgcagagaaaggcccacagcgtgtacaacttcgagaagcccgtggtgatgaaggccttcgagcacctgcagcagctggagctgatcaagcccatggagagaaccagcggcaacagccagagagagtaccagctgatgaagctgctgctggacaacacccagatcatgaacgccctgcagaagtaccccaactgccccaccgacgtgagacagtgggccaccagcagcctgagctggctgtag

SEQ ID NO: 73075 - protein, 285 aa, Artificial Sequence
  derived and/or modified sequence
MDLSAASHRIPLSDGNSIPIIGLGTYSEPKSTPKGACATSVKVAIDTGYRHIDGAYIYQNEHEVGEAIREKIAEGKVRREDIFYCGKLWATNHVPEMVRPTLERTLRVLQLDYVDLYIIEVPMAFKPGDEIYPRDENGKWLYHKSNLCATWEVECHPYFTQPKLLKFCQQHDIVITAYSPLGTSRNPIWVNVSSPPLLKDALLNSLGKRYNKTAAQIVLRFNIQRGVVVIPKSFNLERIKENFQIFDFSLTEEEMKDIEALNKNVRFVELLMWRDHPEYPFHDEY

SEQ ID NO: 73076 - DNA, 858 bp, Artificial Sequence
  derived and/or modified sequence
atggacttatcagcagctagtcacagaattcctcttagtgacggaaattcgatcccgatcatcgggctgggaacatattctgagcctaagtcaacacctaagggagcgtgcgcaaccagtgtcaaggttgctatagatacagggtatcggcacattgatggcgcctacatttatcaaaacgaacacgaagttggagaagccattcgtgaaaagatagctgagggaaaagtgcgccgggaggacattttctattgcggaaagctgtgggcaacaaatcacgtgcccgagatggtccggcctacattagagagaacactgcgtgtgctccagctcgattacgttgatctgtatatcatcgaggtgcctatggccttcaagccaggcgacgaaatctatccccgagatgagaatggcaaatggctgtatcacaaatccaatctctgtgccacttgggaagtcgagtgccacccgtattttactcagcctaaactgctcaaattctgccaacagcacgatattgtgatcaccgcttattctcccctcggtacttctcgtaaccccatctgggtgaacgtgtccagccctccccttctgaaggatgccttactgaactcattgggcaagcggtataataagacagccgcacagatcgtgctgcggtttaacatccagaggggcgtcgtggtgatccccaagtcattcaacctggaacgaatcaaggagaatttccaaatttttgatttctctctaacagaggaggaaatgaaggatatcgaggccctgaataagaatgtcaggtttgtggagctgctaatgtggcgcgaccatccggagtacccattccacgacgagtactag

SEQ ID NO: 73077 - DNA, 858 bp, Artificial Sequence
  derived and/or modified sequence
atggacctgtctgctgccagccaccgcatccccctgagtgatggcaacagcatccccatcatcggcctgggcacctacagcgagcccaagagcacccccaagggggcctgtgccacctctgtgaaggtggccatcgacaccggctaccgccacattgatggagcctacatctaccagaatgagcacgaggtgggggaggccatccgggagaagattgctgagggcaaggtgcggcgggaggacatcttctactgcggcaagctgtgggccaccaaccacgtgcctgagatggtgcggcccaccctggagaggaccctgcgggtgctgcagctggactatgtggacctgtacatcatcgaggtgcccatggccttcaagccaggagatgagatctaccccagagatgaaaatggcaagtggctgtaccacaagagcaacctgtgtgccacctgggaggtggagtgccacccctacttcacccagcccaagctgctgaagttctgccagcagcacgacatcgtcatcacagcctacagccccctgggcaccagcaggaaccccatctgggtgaatgtgagcagcccccccctgctgaaggatgccctgctgaacagcctgggcaagcgctacaacaagacagctgcccagatcgtgctgcgcttcaacatccagaggggcgtggtggtgatccccaagagcttcaacctggagcgcatcaaggagaacttccagatctttgacttcagcctgacagaggaggagatgaaggacatcgaggccctgaacaagaatgtgcgctttgtggagctgctgatgtggagggaccaccctgagtaccccttccatgatgagtactag

SEQ ID NO: 73078 - DNA, 2234 bp, Artificial Sequence
  derived and/or modified sequence
aaaaagactccctgtggtgttcagaatcactcctacagtcaggttctccacaatggatctcagtgctgcaagtcaccgcatacctctaagtgatggaaacagcattcccatcatcggacttggtacctactcagaacctaaatcgacccctaagggagcctgtgcaacatcggtgaaggttgctattgacacagggtaccgacatattgatggggcctacatctaccaaaatgaacacgaagttggggaggccatcagggagaagatagcagaaggaaaggtgcggagggaagatatcttctactgtggaaagctatgggctacaaatcatgtcccagagatggtccgcccaaccctggagaggacactcagggtcctccagctagattatgtggatctttacatcattgaagtacccatggcctttaagccaggagatgaaatataccctagagatgagaatggcaaatggttatatcacaagtcaaatctgtgtgccacttgggaggttgagtgccatccgtatttcacccagccaaaactcttgaaattttgccaacaacatgacattgtcattactgcatatagccctttggggaccagtaggaatccaatctgggtgaatgtttcttctccacctttgttaaaggatgcacttctaaactcattggggaaaaggtacaataagacagcagctcaaattgttttgcgtttcaacatccagcgaggggtggttgtcattcctaaaagctttaatcttgaaaggatcaaagaaaattttcagatctttgacttttctctcactgaagaagaaatgaaggacattgaagccttgaataaaaatgtccgctttgtagaattgctcatgtggcgcgatcatcctgaatacccatttcatgatgaatactgactgcagggagttcctgaacagatttttcactcccacgagtgccaagacggtgcaatgggtagtcccctagatgtgaaaatgaagagagagggttttaccatcctgagaagaaataatgatggaaacatgtttaatgtttgtgcagtgtaaatgactttgactcagtcacattgaagtaaaaatattaaaatctgttgaaataactcttaggaaattatcaactaattttttcagatcagtatcttctagattccagacagaaaaaaattacacttcagaaaagacatcaaaggcaacatatgacaacaagtaatttatgaatctgggtagtagcgttggtaatctgagttctttaagggttaacaggacaacgaagtgcatgtggcagtgtgctggcagtggccttgaggctttggaccattggttacaaaacagacacagccaagataagatccacacacacattattaacaaggaagtgatttgctgcaccttgagttgagagggctacatgtagaaaagtcttaaaatagagctaaacaccacagtggtcaacaaagccatcataatgttggtgtttgtttccctccaatgtatgtatgtttagtttttatccaacctgaggaatgaaaacttaactggatctctcttgcatccttaaagggcctgagtctcaacatggctgctgatccatacttacacatcttactgtcaatcttgcctacattgattatagaaccactattacgtgaaaaggcttgaaacaaccaacatatacaaataaaaccctgccttgtaaaatagtaaaagagaagccatatattggcttttcttcttaacttgggagatatattgaaacaaggtgctttataagattattgtacttaagactttaatagtgttacttggatagcttatatgaattttgagaattttatatgaattttgagaaagcaagttcaaaagaactctggtaattttcctgtatgtacaatttaaagagtgaataagattattagaattcagcaatagagatatatctattttcaattcaactacagaaatatattttattggccgggtgcggtggctcatgcctataatcccagcactttgggaggccaaggtgggcagatcaggaggtcaggagatcgagaccatcttggctaacaaggtgaaaccccgtctctactaaaaatacaaaaaattagccaggcgcggtggcgggggcctgtaatcccagctactcaggaggctgaggcagaagaatggcatgaacccgggaggaggagcttgcagtgagccgagatagcgccactgcagt

SEQ ID NO: 73079 - DNA, 858 bp, Artificial Sequence
  derived and/or modified sequence
atggacctgagcgccgccagccaccggatccccctgagcgacggcaatagcataccaataattggactgggaacttacagcgagccaaagtccacgcccaagggcgcctgtgctacttcagtgaaagtcgcaatcgatacaggctacaggcacattgacggggcgtatatctaccagaacgaacatgaagttggcgaagcaataagagagaagattgcagaggggaaagtgcggcgtgaggacatcttctattgcggtaagctgtgggcaactaaccacgttccggaaatggtccggcctactctggaacgtactttgagagtgctccagctggactatgtggacctgtatatcatagaggttcctatggcgttcaagcctggggatgaaatttatccccgggatgagaacggcaaatggttgtaccataagagcaacctctgcgcgacatgggaggtggagtgccacccttacttcacacagccaaaactgctgaaattttgccaacagcacgatatcgtcattactgcttattctccgctgggtacaagccggaaccctatctgggtaaacgtctcctcccctccccttctgaaagacgctctgctgaactcgctcgggaagagatacaataagactgctgcccagattgtgttacgcttcaacatccagcggggcgtagtggtaattcctaaatccttcaatcttgaacgaattaaggagaattttcagattttcgacttttcactcacagaggaggaaatgaaagatatagaggccttgaataaaaacgtccgattcgtggagctgctgatgtggcgggatcatccggagtatccgttccatgatgagtactag

SEQ ID NO: 73080 - DNA, 858 bp, Artificial Sequence
  derived and/or modified sequence
atggatctttcagcagccagtcacagaatcccactgtcagacggtaattctataccaatcatcggcctcggcacttattctgaacccaaaagtacccccaaaggagcctgcgccaccagcgtgaaagtagctattgacactggttacaggcacatagatggggcttacatctatcagaacgaacatgaagtcggcgaggccattcgcgaaaaaatagcggaaggtaaggtgcgcagagaagatatattctactgtggcaaactgtgggccaccaatcatgtgccagaaatggtgagacctaccctcgagcggacacttagggttctccagctggactacgtagacttgtacatcatcgaggttccgatggcttttaagccaggcgatgaaatttaccccagagacgagaatggaaaatggctatatcacaagagcaacctgtgcgctacctgggaagttgagtgtcacccgtactttacgcagcctaagctgctaaagttctgtcaacagcacgatatcgtgattacagcttattctcctctgggcacttcgcgaaatcctatctgggttaacgttagtagcccgccattgctcaaggatgctctgctaaactcccttggcaaaaggtataataaaacggctgcccagatcgttctgagattcaacatacagcgtggggtggtggtcatccctaaaagcttcaatctggagaggatcaaagagaatttccagattttcgacttttccctaactgaggaggaaatgaaagacatcgaggctctcaataagaacgtccgttttgtagaactgctgatgtggcgcgaccatcccgagtaccccttccacgatgagtactag

SEQ ID NO: 73081 - DNA, 858 bp, Artificial Sequence
  derived and/or modified sequence
atggacctgagcgccgccagccacagaatccccctgagcgacggcaacagcatccccatcatcggcctgggcacctacagcgagcccaagagcacccccaagggcgcctgcgccaccagcgtgaaggtggccatcgacaccggctacagacacatcgacggcgcctacatctaccagaacgagcacgaggtgggcgaggccatcagagagaagatcgccgagggcaaggtgagaagagaggacatcttctactgcggcaagctgtgggccaccaaccacgtgcccgagatggtgagacccaccctggagagaaccctgagagtgctgcagctggactacgtggacctgtacatcatcgaggtgcccatggccttcaagcccggcgacgagatctaccccagagacgagaacggcaagtggctgtaccacaagagcaacctgtgcgccacctgggaggtggagtgccacccctacttcacccagcccaagctgctgaagttctgccagcagcacgacatcgtgatcaccgcctacagccccctgggcaccagcagaaaccccatctgggtgaacgtgagcagcccccccctgctgaaggacgccctgctgaacagcctgggcaagagatacaacaagaccgccgcccagatcgtgctgagattcaacatccagagaggcgtggtggtgatccccaagagcttcaacctggagagaatcaaggagaacttccagatcttcgacttcagcctgaccgaggaggagatgaaggacatcgaggccctgaacaagaacgtgagattcgtggagctgctgatgtggagagaccaccccgagtaccccttccacgacgagtactag

SEQ ID NO: 73082 - protein, 290 aa, Artificial Sequence
  derived and/or modified sequence
MDLSAASHRIPLSDGNSIPIIGLGTYSEPKSTPKGACATSVKVAIDTGYRHIDGAYIYQNEHEVGEAIREKIAEGKVRREDIFYCGKLWATNHVPEMVRPTLERTLRVLQLDYVDLYIIEVPMAFKPGDEIYPRDENGKWLYHKSNLCATWEAMEACKDAGLVKSLGVSNFNRRQLELILNKPGLKHKPVSNQVECHPYFTQPKLLKFCQQHDIVITAYSPLGTSRNPIWVNVSSPPLLKDALLNSLGKRYNKTAAQIVLRFNIQRGVVVIPKSFNLERIKENFQVARSS

SEQ ID NO: 73083 - protein, 146 aa, Artificial Sequence
  derived and/or modified sequence
MAFKPGDEIYPRDENGKWLYHKSNLCATWEAMEACKDAGLVKSLGVSNFNRRQLELILNKPGLKHKPVSNQVECHPYFTQPKLLKFCQQHDIVITAYSPLGTSRNPIWRQLHKLALLDLPILRVTLHSVHTLHSEKLVTGDLQCPG

SEQ ID NO: 73084 - DNA, 873 bp, Artificial Sequence
  derived and/or modified sequence
atggatttgagcgcagcctcccacaggattcccctcagcgacggaaatagcatccccattatcggtttgggcacctacagcgaaccgaagagtacccctaaaggagcgtgtgccaccagcgtcaaggtcgctatcgatactgggtaccgtcacatcgacggcgcatacatctaccagaacgaacacgaagttggcgaggccattcgggagaaaatcgctgagggcaaagtgcgccgcgaggacatattctattgtgggaaactatgggccaccaatcatgttcctgagatggtgcggcccactctggagcggactctgagagtgctgcaattagactacgttgacctgtatattatcgaagtacctatggcctttaaacccggagatgagatctaccccagagacgagaatggcaagtggctgtatcacaagagcaacctttgcgctacctgggaagccatggaagcttgtaaggatgccggtctggtcaaaagcctgggcgtttcaaacttcaacagacggcagcttgaactcatactgaataagcctggtcttaagcataagccagtaagtaatcaagtcgagtgtcatccgtacttcacacaacctaaactgttaaagttttgtcagcagcacgacatcgttatcaccgcctacagcccgctagggacatccaggaaccctatttgggtgaatgtgtcttccccacctctgttgaaggacgccttgttgaatagcctagggaagcggtataataaaacagctgcccagattgtcctgaggttcaatattcagcgcggggtcgtagtgattcctaaatctttcaaccttgagcggatcaaagagaactttcaggtggcacggtccagttag

SEQ ID NO: 73085 - DNA, 441 bp, Artificial Sequence
  derived and/or modified sequence
atggcatttaagccgggtgatgaaatctatcccagggatgagaacggcaagtggctataccacaagagtaatctttgcgccacttgggaagccatggaagcctgcaaggacgctgggcttgtcaagtctcttggtgtaagcaactttaacaggcgccagctggagctgatcttaaataagcctggcctcaaacataaacccgtgagtaaccaggtcgagtgtcacccctactttacccagccaaagctgctgaagttctgccaacagcacgacatcgtgattacagcctattcgccactggggacctcacgcaatcccatatggcgacagctccataagctggccctcttggacctgccaatcctcagggtcacattgcactccgttcataccctgcactccgagaaactggtaacgggcgaccttcagtgtcctgggtag

SEQ ID NO: 73086 - DNA, 873 bp, Artificial Sequence
  derived and/or modified sequence
atggacctgtctgctgccagccaccgcatccccctgagtgatggcaacagcatccccatcatcggcctgggcacctacagcgagcccaagagcacccccaagggggcctgtgccacctctgtgaaggtggccatcgacaccggctaccgccacattgatggagcctacatctaccagaatgagcacgaggtgggggaggccatccgggagaagattgctgagggcaaggtgcggcgggaggacatcttctactgcggcaagctgtgggccaccaaccacgtgcctgagatggtgcggcccaccctggagaggaccctgcgggtgctgcagctggactatgtggacctgtacatcatcgaggtgcccatggccttcaagccaggagatgagatctaccccagagatgaaaatggcaagtggctgtaccacaagagcaacctgtgtgccacctgggaggccatggaggcctgcaaggatgctggcctggtgaagagcctgggcgtgagcaacttcaacagacggcagctggagctgatcctgaacaagccaggcctgaagcacaagcctgtgagcaaccaggtggagtgccacccctacttcacccagcccaagctgctgaagttctgccagcagcacgacatcgtcatcacagcctacagccccctgggcaccagcaggaaccccatctgggtgaatgtgagcagcccccccctgctgaaggatgccctgctgaacagcctgggcaagcgctacaacaagacagctgcccagatcgtgctgcgcttcaacatccagaggggcgtggtggtgatccccaagagcttcaacctggagcgcatcaaggagaacttccaggtggcccggagcagctag

SEQ ID NO: 73087 - DNA, 441 bp, Artificial Sequence
  derived and/or modified sequence
atggccttcaagccaggagatgagatctaccccagagatgaaaatggcaagtggctgtaccacaagagcaacctgtgtgccacctgggaggccatggaggcctgcaaggatgctggcctggtgaagagcctgggcgtgagcaacttcaacagacggcagctggagctgatcctgaacaagccaggcctgaagcacaagcctgtgagcaaccaggtggagtgccacccctacttcacccagcccaagctgctgaagttctgccagcagcacgacatcgtcatcacagcctacagccccctgggcaccagcaggaaccccatctggaggcagctgcacaagctggccctgctggacctgcccatcctgcgggtgaccctgcacagcgtgcacaccctgcacagcgagaagctggtgactggagacctgcagtgccctggatag

SEQ ID NO: 73088 - DNA, 1236 bp, Artificial Sequence
  derived and/or modified sequence
tttctttgatggaataggccctaggacacctttctaaaaagactccctgtggtgttcagaatcactcctacagtcaggttctccacaatggatctcagtgctgcaagtcaccgcatacctctaagtgatggaaacagcattcccatcatcggacttggtacctactcagaacctaaatcgacccctaagggagcctgtgcaacatcggtgaaggttgctattgacacagggtaccgacatattgatggggcctacatctaccaaaatgaacacgaagttggggaggccatcagggagaagatagcagaaggaaaggtgcggagggaagatatcttctactgtggaaagctatgggctacaaatcatgtcccagagatggtccgcccaaccctggagaggacactcagggtcctccagctagattatgtggatctttacatcattgaagtacccatggcctttaagccaggagatgaaatataccctagagatgagaatggcaaatggttatatcacaagtcaaatctgtgtgccacttgggaggcgatggaagcttgcaaagacgctggcttggtgaaatccctgggagtgtccaattttaaccgcaggcagctggagctcatcctgaacaagccaggactcaaacacaagccagtcagcaaccaggttgagtgccatccgtatttcacccagccaaaactcttgaaattttgccaacaacatgacattgtcattactgcatatagccctttggggaccagtaggaatccaatctgggtgaatgtttcttctccacctttgttaaaggatgcacttctaaactcattggggaaaaggtacaataagacagcagctcaaattgttttgcgtttcaacatccagcgaggggtggttgtcattcctaaaagctttaatcttgaaaggatcaaagaaaattttcaggtggcgcgatcatcctgaatacccatttcatgatgaatactgactgcagggagttcctgaacagatttttcactcccacgagtgccaagacggtgcaatgggtagtcccctagatgtgaaaatgaagagagagggttttaccatcctgagaagaaataatgatggaaacatgtttaatgtttgtgcagtgtaaatgactttgactcagtcacattgaagtaaaaatattaaaatctgttgaaataactcttaggaaattatcaactaattttttcagatcagtatcttctagat

SEQ ID NO: 73089 - DNA, 1208 bp, Artificial Sequence
  derived and/or modified sequence
aatagagggcttgggtccggaagtgatggactggaggcttgactaatgtgaaaggggcgtctgaaagagaagccagctgccatgccatgaactgcaatgtgaaaaggccaatgtagcaaggatatgtccagccaacagccagtgaggatctgaggccctcagaccagcagcccatgagcaactgaattttgctaataaccatgtaagtgaacacagaagtggacactcagggtcctccagctagattatgtggatctttacatcattgaagtacccatggcctttaagccaggagatgaaatataccctagagatgagaatggcaaatggttatatcacaagtcaaatctgtgtgccacttgggaggcgatggaagcttgcaaagacgctggcttggtgaaatccctgggagtgtccaattttaaccgcaggcagctggagctcatcctgaacaagccaggactcaaacacaagccagtcagcaaccaggttgagtgccatccgtatttcacccagccaaaactcttgaaattttgccaacaacatgacattgtcattactgcatatagccctttggggaccagtaggaatccaatctggaggcagctccataaacttgccttgcttgatcttcccatactacgagtaactctccattcagtgcatactctgcactcagagaaactggttacaggtgacctgcagtgtcctgggtgaatgtttcttctccacctttgttaaaggatgcacttctaaactcattggggaaaaggtacaataagacagcagctcaaattgttttgcgtttcaacatccagcgaggggtggttgtcattcctaaaagctttaatcttgaaaggatcaaagaaaattttcagatctttgacttttctctcactgaagaagaaatgaaggacattgaagccttgaataaaaatgtccgctttgtagaattgctcatgtggcgcgatcatcctgaatacccatttcatgatgaatactgactgcagggagttcctgaacagatttttcactcccacgagtgccaagacggtgcaatgggtagtcccctagatgtgaaaatgaagagagagggttttaccatcctgagaagaaataatgatggaaacatgtttaatgtttgtgcagtgtaaatgactttgactcagtcacattgaagtaaaaatattaaaatctgttgaaataac

SEQ ID NO: 73090 - DNA, 873 bp, Artificial Sequence
  derived and/or modified sequence
atggacctgagcgccgccagccaccggatccccctgagcgacggcaactctatcccgattatcggtctgggcacatactccgagccaaaaagtacaccgaagggtgcatgcgcgacaagtgtgaaagtggccatagatactgggtaccgccatatagatggcgcctatatttaccagaacgaacatgaggtgggagaggctatccgcgaaaagatcgctgagggcaaagtgaggagggaggacatcttctactgcggaaagctatgggctacaaaccacgtgccggagatggtgcgccctacactagaaagaacattgcgagtcctccagctcgattatgtcgacctgtacatcatagaggtgcccatggcttttaagcctggcgatgagatctatcccagagacgaaaatggcaaatggttgtatcataagtctaatctgtgcgctacgtgggaggcgatggaagcttgcaaagatgctggactggttaaatcgctcggcgtttctaactttaatcgcagacagcttgagctgatactgaataaacctggcctaaagcacaaaccggtgagcaaccaagtggaatgccatccttattttacccagccgaagttactgaagttttgtcagcagcacgacatcgttatcactgcttactctccactagggacaagtaggaaccctatttgggttaatgttagttcacctcctttgctgaaggatgctctcctcaacagtctggggaagagatacaacaaaaccgctgcccaaattgttcttcgctttaacattcagcgaggggttgttgtgatccctaaaagtttcaaccttgagagaatcaaggagaacttccaagtcgcgcgatcaagctag

SEQ ID NO: 73091 - DNA, 441 bp, Artificial Sequence
  derived and/or modified sequence
atggccttcaagcccggcgacgagatctacccccgggacgagaacgggaaatggctgtaccataagtctaacttgtgcgccacgtgggaggccatggaagcttgcaaggatgcaggcctcgtcaagagtttgggggtttccaactttaaccgacggcagctggaattaattctgaataagcccggcctcaaacataaacctgtcagcaatcaggtcgaatgccacccgtatttcacacagcctaaacttttgaagttctgtcagcagcacgacattgtcattactgcctattctcctctgggcacttcaaggaatccaatttggaggcagttgcacaaactggccctgcttgatctacctatactgcgcgtgacgctccattcagtgcacacacttcactcggaaaagcttgtgacgggtgacttgcagtgcccgggttag

SEQ ID NO: 73092 - DNA, 873 bp, Artificial Sequence
  derived and/or modified sequence
atggacctgagcgccgcaagccaccggatcccccttagtgacggtaatagcatccctatcatagggcttggcacttacagcgagccaaagtccacaccgaagggagcatgtgcaacatctgttaaagtggcaatcgacactgggtataggcacattgacggcgcttatatttaccaaaatgaacacgaggtaggtgaggcgattagggagaagatcgccgaaggtaaggtacgaagagaagatattttttactgcgggaagctatgggccacgaaccacgtcccagaaatggtgcgaccaaccctcgaacggacacttagagttcttcaattagactacgtggacctctatattatcgaagttcctatggcgtttaagccgggagatgagatataccctagagatgaaaatgggaagtggctgtaccacaagtcgaacctgtgtgctacttgggaggcaatggaggcctgtaaggacgccggtctcgtcaagagtctgggcgttagcaattttaaccggcgtcagctcgaactgattctgaataaacctggcctcaagcacaagcctgtttctaaccaggtggaatgccacccctacttcacgcagccaaaactactgaagttctgccaacagcatgacatcgtgattactgcctatagcccgctgggtaccagtcgtaatcctatttgggtaaacgtgtcaagcccccctttgctaaaggatgctcttttgaatagcctcggaaagcgctataacaagaccgctgctcagattgtcttgcgttttaatatccagagaggagtagtcgtgattcccaagtctttcaatctggaaagaattaaagaaaacttccaggtcgctcgcagctcttag

SEQ ID NO: 73093 - DNA, 441 bp, Artificial Sequence
  derived and/or modified sequence
atggccttcaagccaggcgatgaaatataccctcgggacgagaacggaaagtggctgtaccacaaatctaacttgtgcgctacctgggaggctatggaggcttgtaaggacgccggactcgtgaaaagtctgggggtgtctaattttaatagacggcaactggagttgatcctgaataagccaggactgaaacacaaaccagtgagcaaccaggtggagtgtcacccctatttcacccagcccaagctgctcaagttttgtcagcaacacgatatagtcatcaccgcctactcccccttgggcacatctaggaaccccatctggcgacagctgcacaaacttgcactgctggaccttcctatcctccgggtgacacttcactcggtgcataccttgcattcggaaaagctggtaaccggtgacctgcaatgcccaggatag

SEQ ID NO: 73094 - DNA, 873 bp, Artificial Sequence
  derived and/or modified sequence
atggacctgagcgccgccagccacagaatccccctgagcgacggcaacagcatccccatcatcggcctgggcacctacagcgagcccaagagcacccccaagggcgcctgcgccaccagcgtgaaggtggccatcgacaccggctacagacacatcgacggcgcctacatctaccagaacgagcacgaggtgggcgaggccatcagagagaagatcgccgagggcaaggtgagaagagaggacatcttctactgcggcaagctgtgggccaccaaccacgtgcccgagatggtgagacccaccctggagagaaccctgagagtgctgcagctggactacgtggacctgtacatcatcgaggtgcccatggccttcaagcccggcgacgagatctaccccagagacgagaacggcaagtggctgtaccacaagagcaacctgtgcgccacctgggaggccatggaggcctgcaaggacgccggcctggtgaagagcctgggcgtgagcaacttcaacagaagacagctggagctgatcctgaacaagcccggcctgaagcacaagcccgtgagcaaccaggtggagtgccacccctacttcacccagcccaagctgctgaagttctgccagcagcacgacatcgtgatcaccgcctacagccccctgggcaccagcagaaaccccatctgggtgaacgtgagcagcccccccctgctgaaggacgccctgctgaacagcctgggcaagagatacaacaagaccgccgcccagatcgtgctgagattcaacatccagagaggcgtggtggtgatccccaagagcttcaacctggagagaatcaaggagaacttccaggtggccagaagcagctag

SEQ ID NO: 73095 - DNA, 441 bp, Artificial Sequence
  derived and/or modified sequence
atggccttcaagcccggcgacgagatctaccccagagacgagaacggcaagtggctgtaccacaagagcaacctgtgcgccacctgggaggccatggaggcctgcaaggacgccggcctggtgaagagcctgggcgtgagcaacttcaacagaagacagctggagctgatcctgaacaagcccggcctgaagcacaagcccgtgagcaaccaggtggagtgccacccctacttcacccagcccaagctgctgaagttctgccagcagcacgacatcgtgatcaccgcctacagccccctgggcaccagcagaaaccccatctggagacagctgcacaagctggccctgctggacctgcccatcctgagagtgaccctgcacagcgtgcacaccctgcacagcgagaagctggtgaccggcgacctgcagtgccccggctag

SEQ ID NO: 73096 - protein, 451 aa, Artificial Sequence
  derived and/or modified sequence
MEQKPSKVECGSDPEENSARSPDGKRKRKNGQCSLKTSMSGYIPSYLDKDEQCVVCGDKATGYHYRCITCEGCKGFFRRTIQKNLHPTYSCKYDSCCVIDKITRNQCQLCRFKKCIAVGMAMDLVLDDSKRVAKRKLIEQNRERRRKEEMIRSLQQRPEPTPEEWDLIHIATEAHRSTNAQGSHWKQRRKFLPDDIGQSPIVSMPDGDKVDLEAFSEFTKIITPAITRVVDFAKKLPMFSELPCEDQIILLKGCCMEIMSLRAAVRYDPESDTLTLSGEMAVKREQLKNGGLGVVSDAIFELGKSLSAFNLDDTEVALLQAVLLMSTDRSGLLCVDKIEKSQEAYLLAFEHYVNHRKHNIPHFWPKLLMKGPQVRQLEQQLGEAGSLQGPVLQHQSPKSPQQRLLELLHRSGILHARAVCGEDDSSEADSPSSSEEEPEVCEDLAGNAASP

SEQ ID NO: 73097 - DNA, 1356 bp, Artificial Sequence
  derived and/or modified sequence
atggagcagaagcccagcaaggtggagtgcggcagcgaccccgaggagaacagcgccagaagccccgacggcaagagaaagagaaagaacggccagtgcagcctgaagaccagcatgagcggctacatccccagctacctggacaaggacgagcagtgcgtggtgtgcggcgacaaggccaccggctaccactacagatgcatcacctgcgagggctgcaagggcttcttcagaagaaccatccagaagaacctgcaccccacctacagctgcaagtacgacagctgctgcgtgatcgacaagatcaccagaaaccagtgccagctgtgcagattcaagaagtgcatcgccgtgggcatggccatggacctggtgctggacgacagcaagagagtggccaagagaaagctgatcgagcagaacagagagagaagaagaaaggaggagatgatcagaagcctgcagcagagacccgagcccacccccgaggagtgggacctgatccacatcgccaccgaggcccacagaagcaccaacgcccagggcagccactggaagcagagaagaaagttcctgcccgacgacatcggccagagccccatcgtgagcatgcccgacggcgacaaggtggacctggaggccttcagcgagttcaccaagatcatcacccccgccatcaccagagtggtggacttcgccaagaagctgcccatgttcagcgagctgccctgcgaggaccagatcatcctgctgaagggctgctgcatggagatcatgagcctgagagccgccgtgagatacgaccccgagagcgacaccctgaccctgagcggcgagatggccgtgaagagagagcagctgaagaacggcggcctgggcgtggtgagcgacgccatcttcgagctgggcaagagcctgagcgccttcaacctggacgacaccgaggtggccctgctgcaggccgtgctgctgatgagcaccgacagaagcggcctgctgtgcgtggacaagatcgagaagagccaggaggcctacctgctggccttcgagcactacgtgaaccacagaaagcacaacatcccccacttctggcccaagctgctgatgaagggcccccaggtgagacagctggagcagcagctgggcgaggccggcagcctgcagggccccgtgctgcagcaccagagccccaagagcccccagcagagactgctggagctgctgcacagaagcggcatcctgcacgccagagccgtgtgcggcgaggacgacagcagcgaggccgacagccccagcagcagcgaggaggagcccgaggtgtgcgaggacctggccggcaacgccgccagcccctag

SEQ ID NO: 73098 - DNA, 1356 bp, Artificial Sequence
  derived and/or modified sequence
atggagcaaaaaccgagtaaagttgagtgcggatctgaccctgaggaaaactcggccaggtctcctgatggcaaaaggaaacgcaagaacggccaatgttcattgaaaacctcaatgagcgggtatataccaagctacctagacaaggacgagcagtgtgtggtctgtggtgataaggctacgggatatcattatcgatgtattacgtgcgaaggctgcaaggggttcttcagacgcacgatccaaaaaaacctacacccgacatacagctgcaaatacgactcgtgttgcgtaatcgataaaatcaccagaaaccagtgccaattatgcagatttaagaaatgtatcgctgtcggaatggccatggatcttgtccttgatgattctaaaagagttgctaaaaggaaactgatcgagcaaaacagggagcggcgtcggaaggaagagatgatccgcagcctgcagcaacggccagaacccacccccgaggaatgggatttaattcatatcgcaacggaggcccatagaagcaccaacgcccagggtagtcattggaagcagaggcgcaaatttctccccgacgacattggccagtctcccattgtgtccatgcccgatggcgacaaggtggacttggaagccttttcggaattcaccaaaatcatcacacctgccataacaagagttgtcgactttgccaagaagctgcctatgttttccgaactcccatgcgaggatcaaataatcttattaaaaggctgttgcatggagattatgtctctgagagcggcagtgcgatacgatcctgagagcgacactctgactctttccggcgagatggccgtaaagcgggaacagctcaaaaatggagggctgggcgttgtttccgacgccatttttgagttagggaaaagcctctctgcattcaacctggatgacacagaagtggctctgctgcaggctgttctgctcatgagcactgaccgatccggactactctgcgtggataagattgaaaaatcccaggaagcttacctcctggcctttgaacattatgtgaaccaccggaagcataatatccctcatttctggcccaaactcctcatgaaaggaccacaggtgcgacagctagaacagcagctgggagaggcaggcagtctccaaggtccggtgcttcaacaccagtccccaaaatccccacaacaaaggctcctggaactgctgcaccggtctggcatcctccacgccagggccgtatgtggtgaagacgattccagcgaagccgactcaccatcatcctccgaagaggaacccgaggtgtgcgaagatttggcgggaaacgctgcaagcccatag

SEQ ID NO: 73099 - DNA, 1356 bp, Artificial Sequence
  derived and/or modified sequence
atggagcagaagcccagcaaggtggagtgtggcagtgaccctgaggagaacagcgcccggagcccagatggcaagaggaagaggaagaatggccagtgcagcctgaagacctccatgagcggctacatccccagctacctggacaaggatgagcagtgtgtggtgtgtggggacaaggccaccggctaccactaccgctgcatcacctgtgagggctgcaagggcttcttccggaggaccatccagaagaacctgcaccccacctacagctgcaagtatgacagctgctgcgtgattgacaagatcaccaggaaccagtgccagctgtgccgcttcaagaagtgcatcgctgtgggcatggccatggacctggtgctggatgacagcaagagggtggccaagaggaagctgattgagcagaaccgggagaggaggaggaaggaggagatgatccgcagcctgcagcagaggcctgagcccaccccagaggagtgggacctgatccacatcgccacagaggcccacaggagcaccaatgcccagggcagccactggaagcagaggaggaagttcctgcctgatgacatcggccagagccccatcgtgtccatgccagatggagacaaggtggacctggaggccttcagcgagttcaccaagatcatcaccccagccatcaccagggtggtggactttgccaagaagctgcccatgttcagcgagctgccctgtgaggaccagatcatcctgctgaagggctgctgcatggagatcatgagcctgcgggctgctgtgcgctatgaccctgagagtgacaccctgaccctgtctggagagatggctgtgaagcgggagcagctgaagaatggaggcctgggcgtggtgtctgatgccatctttgagctgggcaagagcctgagcgccttcaacctggatgacacagaggtggccctgctgcaggccgtgctgctgatgagcacagacaggagcggcctgctgtgtgtggacaagattgagaagagccaggaggcctacctgctggcctttgagcactacgtgaaccacaggaagcacaacatcccccacttctggcccaagctgctgatgaagggcccccaggtgcggcagctggagcagcagctgggggaggccggcagcctgcagggccctgtgctgcagcaccagagccccaagagcccccagcagaggctgctggagctgctgcacaggagcggcatcctgcacgcccgggctgtgtgtggggaggatgacagcagcgaggccgacagccccagcagcagcgaggaggagcctgaggtgtgtgaggacctggccggaaatgctgccagcccctag

SEQ ID NO: 73100 - DNA, 1356 bp, Artificial Sequence
  derived and/or modified sequence
atggagcagaagcccagcaaggtggagtgcggcagcgaccccgaggaaaactctgctaggtcccccgatggaaaaagaaagagaaagaacggacagtgcagcctcaagacgtccatgagtggttatattccaagttaccttgacaaggacgaacagtgcgtagtgtgcggcgacaaagcaaccggctaccactataggtgcataacatgcgagggctgtaaggggttcttccgacggactatccagaagaatctgcacccaacatacagctgcaagtacgactcttgctgtgtgatagacaagattacacgcaatcagtgtcaattatgccggtttaagaagtgtatcgccgtggggatggccatggacttggtgctggacgatagcaagagagtggccaagaggaagctgatagagcaaaatcgggaaagacgcagaaaagaagagatgatcaggtccctgcagcagaggcccgagcctacccccgaggaatgggacctcatccacattgccaccgaggctcacaggtcaaccaacgctcagggctctcattggaagcagcggagaaagtttctcccagacgatatagggcagagccctattgtatcaatgcccgatggggataaagtcgatctggaagcattctcagagtttacaaagatcatcacccccgctatcacccgggtagtagattttgctaaaaagctccccatgttctctgagttaccatgtgaggaccaaatcattctcctaaagggatgctgtatggagataatgtccctgagggcagccgttaggtacgatcctgagagtgacacattgacactctccggagagatggccgtgaagcgggaacagctcaaaaacgggggattgggagtggtgtccgacgccatctttgagctgggaaagagcttatccgcgtttaatcttgacgatacggaggtcgcattgctgcaagctgtgctgcttatgagtaccgaccgttctggactgctctgtgtcgacaaaatcgagaagagtcaggaggcctatctgttggcatttgaacattatgtgaatcacaggaaacacaacattccccatttctggccaaagctgctcatgaaagggcctcaagtgagacagcttgaacagcagctgggagaggccgggtcgttacagggcccagtcctgcaacatcagagtccaaagagcccccagcagcggttactggagctattacatcggagcgggattctgcatgcccgcgcagtgtgcggggaggatgatagttcagaggccgactctccgagctcatccgaagaggagcccgaggtttgcgaggatctcgcagggaacgcagcaagtccgtag

SEQ ID NO: 73101 - DNA, 1356 bp, Artificial Sequence
  derived and/or modified sequence
atggaacagaagccgagtaaagtcgaatgcggcagcgacccggaagagaattctgcgcgttcccctgacggaaaaagaaagagaaaaaacggtcagtgcagccttaaaaccagcatgagtggctacatcccttcatatcttgataaagacgaacagtgtgttgtctgcggagacaaagctactgggtaccactaccgctgtatcacgtgtgaaggttgcaagggctttttccggaggacaattcagaagaatcttcatcctacctattcatgcaagtatgattcctgctgtgtgattgacaaaatcacccggaaccagtgtcagttgtgtagattcaagaagtgcattgcagttgggatggctatggaccttgtgcttgatgactctaagagagtagccaaaagaaagctgatagaacaaaatcgggagaggaggaggaaggaagaaatgatccggagcctgcagcagaggcccgaacctacacccgaggaatgggatctgattcatattgcaacagaggcgcatcggagcactaatgcacagggctcacactggaaacagaggcgaaaattcctgcccgatgatatcggccaatctcctatagttagtatgcccgacggagacaaggtggacctggaagctttcagtgagtttaccaaaataattacacccgctattaccagagttgtggactttgccaaaaagctgccaatgttttccgaacttccatgtgaagatcagattattctgttaaaaggttgctgcatggagatcatgagtctccgcgctgcagtgcggtacgatcccgaatcggataccttaacccttagcggagaaatggcagttaaaagagagcagctgaaaaatggcggtctgggagtcgtgagtgatgcgatcttcgagttgggaaaatcccttagcgcttttaaccttgatgacactgaagtcgcactactacaagccgtgctccttatgtctactgatcgatccgggctgctctgtgtcgacaagattgaaaagagccaggaggcttacctccttgccttcgaacactatgtgaaccaccgtaagcataatattccacacttttggccaaagctgcttatgaaaggcccacaggtgcgccagctagagcagcagctgggagaggccggaagtctgcaggggcctgtgctgcagcaccagtctccaaagagcccccaacagcggttacttgaattactacaccggtctggaatcctgcatgccagggcagtttgcggcgaagacgactcgagtgaagccgactccccgtcctccagtgaggaagaacccgaggtctgtgaagatctggctgggaatgccgcaagcccttag

SEQ ID NO: 73102 - DNA, 2421 bp, Artificial Sequence
  derived and/or modified sequence
gaggcggcctgcagggagcagccgcgagccggccgggcgcgccgagcccgagccccagccggagcggggcgggggagggaggagccagagcggccgccgcctctgccggaggagccgcggggccgccacactcgccccccgccccccccgcgctcactcgcactcacacccgggcgcaggaggcgggcggcccgggccccaccggccccccatggacgcccccagcacggggcgctgagacccccgcgtcgctgcccagcccggtccggcgcgccacgccgagggatctctggacaggacaagactccgaagctactcccccagcacacagcccgggacccacaaacccagcttgcccccagccctcccacctgccactccctggcccctcccaccgcccgccccccttggggcgcagggcatggtgtgaaaggccaagtgctgaggcgggtatcatgggtgctgtgccctagggcctgggtggcagggggtgggtggcctgtgggtgtgccgggggggccagtgtgcccaccccagtctcttggcgtgctggagggcatcctggatggaattgaagtgaatggaacagaagccaagcaaggtggagtgtgggtcagacccagaggagaacagtgccaggtcaccagatggaaagcgaaaaagaaagaacggccaatgttccctgaaaaccagcatgtcagggtatatccctagttacctggacaaagacgagcagtgtgtcgtgtgtggggacaaggcaactggttatcactaccgctgtatcacttgtgagggctgcaagggcttctttcgccgcacaatccagaagaacctccatcccacctattcctgcaaatatgacagctgctgtgtcattgacaagatcacccgcaatcagtgccagctgtgccgcttcaagaagtgcatcgccgtgggcatggccatggacttggttctagatgactcgaagcgggtggccaagcgtaagctgattgagcagaaccgggagcggcggcggaaggaggagatgatccgatcactgcagcagcgaccagagcccactcctgaagagtgggatctgatccacattgccacagaggcccatcgcagcaccaatgcccagggcagccattggaaacagaggcggaaattcctgcccgatgacattggccagtcacccattgtctccatgccggacggagacaaggtggacctggaagccttcagcgagtttaccaagatcatcaccccggccatcacccgtgtggtggactttgccaaaaaactgcccatgttctccgagctgccttgcgaagaccagatcatcctcctgaaggggtgctgcatggagatcatgtccctgcgggcggctgtccgctacgaccctgagagcgacaccctgacgctgagtggggagatggctgtcaagcgggagcagctcaagaatggcggcctgggcgtagtctccgacgccatctttgaactgggcaagtcactctctgcctttaacctggatgacacggaagtggctctgctgcaggctgtgctgctaatgtcaacagaccgctcgggcctgctgtgtgtggacaagatcgagaagagtcaggaggcgtacctgctggcgttcgagcactacgtcaaccaccgcaaacacaacattccgcacttctggcccaagctgctgatgaagggtccgcaggtccggcagcttgagcagcagcttggtgaagcgggaagtctccaagggccggttcttcagcaccagagcccgaagagcccgcagcagcgtctcctggagctgctccaccgaagcggaattctccatgcccgagcggtctgtggggaagacgacagcagtgaggcggactccccgagctcctctgaggaggaaccggaggtctgcgaggacctggcaggcaatgcagcctctccctgaagccccccagaaggccgatggggaaggagaaggagtgccataccttctcccaggcctctgccccaagagcaggaggtgcctgaaagctgggagcgtgggctcagcagggctggtcacctcccatcccgtaagaccaccttcccttcctcagcaggccaaacatggccagactcccttgctttttgctgtgtagttccctctgcctgggatgcccttccccctttctctgcctggcaacatcttacttgtcctttgaggccccaactcaagtgtcacctccttccccagctcccccaggcagaaatagttgtctgtgcttccttggttcatgcttctactgtgacacttatctcactgttttataattagtcgggcatgagtctgtttcccaagctagactgtgtctgaatcatgtctgtatccccagtgcccggtgcagggcctggcatagagtaggtactccataaaaggtgtgttgaattgaa

SEQ ID NO: 73103 - protein, 101 aa, Artificial Sequence
  derived and/or modified sequence
MAMMEVQGGPSLGQTCVLIVIFTVLLQSLCVAVTYVYFTNELKQMQDKYSKSGIACFLKEDDSYWDPNDEESMNSPCWQVKWQLRQLVRKTPRMKRLWAAK

SEQ ID NO: 73104 - DNA, 306 bp, Artificial Sequence
  derived and/or modified sequence
atggccatgatggaggtgcagggcggccccagcctgggccagacctgcgtgctgatcgtgatcttcaccgtgctgctgcagagcctgtgcgtggccgtgacctacgtgtacttcaccaacgagctgaagcagatgcaggacaagtacagcaagagcggcatcgcctgcttcctgaaggaggacgacagctactgggaccccaacgacgaggagagcatgaacagcccctgctggcaggtgaagtggcagctgagacagctggtgagaaagacccccagaatgaagagactgtgggccgccaagtag

SEQ ID NO: 73105 - DNA, 306 bp, Artificial Sequence
  derived and/or modified sequence
atggcaatgatggaggttcaagggggcccttcgctcggtcaaacgtgcgtactcattgtgattttcacagttttgcttcagtctctgtgtgtggctgtgacctacgtgtattttacaaacgagctcaaacagatgcaagataaatatagcaagtccggaatagcctgcttcctgaaggaggatgacagctattgggatccaaatgatgaggagagtatgaatagcccctgttggcaagtgaagtggcagctgaggcagctggtccggaaaactcctagaatgaagcgactgtgggcagctaaatag

SEQ ID NO: 73106 - DNA, 306 bp, Artificial Sequence
  derived and/or modified sequence
atggccatgatggaggtgcagggcggccccagcctgggccagacctgtgtgctgattgtcatcttcaccgtgctgctgcagagcctgtgtgtggccgtgacctacgtgtacttcaccaatgagctgaagcagatgcaggacaagtacagcaagagcggcatcgcctgcttcctgaaggaggatgacagctactgggaccccaatgatgaggagagcatgaacagcccctgctggcaggtgaagtggcagctgcggcagctggtgaggaagacccccaggatgaagaggctgtgggccgccaagtag

SEQ ID NO: 73107 - DNA, 306 bp, Artificial Sequence
  derived and/or modified sequence
atggccatgatggaggtgcagggcggccccagcctgggccagacctgtgtgctgattgtaatctttacggttctattgcagagcctgtgtgtcgcggtgacctacgtatatttcactaacgagctgaaacagatgcaggataagtactcaaaatccggaatcgcctgttttctgaaagaggacgatagttactgggacccaaatgacgaggagagcatgaactccccttgctggcaggtcaagtggcagttgcgccagcttgtgagaaaaaccccccgtatgaaaaggctgtgggcagcaaaatag

SEQ ID NO: 73108 - DNA, 306 bp, Artificial Sequence
  derived and/or modified sequence
atggcaatgatggaggtgcagggtgggccaagtcttggccaaacctgcgtgcttatcgtcatttttactgtcctgttacagagcctgtgtgtggctgtgacatacgtttactttacgaatgagctgaagcagatgcaggacaagtactctaagagtgggattgcatgcttcctgaaggaagacgacagctactgggatcctaatgacgaggagagtatgaattctccctgctggcaggtgaagtggcaactgcgccagttagtgcgcaaaaccccccgaatgaagcgcctctgggcagccaagtag

SEQ ID NO: 73109 - protein, 822 aa, Artificial Sequence
  derived and/or modified sequence
MTRRRSRPSGGAGRRERARAAGPQKPQAPEPPPPPSLEAGAGAGPPEAPAEPDHDGPREDDEPNLVPGPQVPPASSQPVQTCCLLCHRERKGWEEGPSQNGLVLQGEKLPPDFMPKLVKNLLGEMPLWVCQSCRKSMEEDERQTGREHAVAISLSHTSCKSQSCGDDSHSSSSSSSSSSSSSSSSCPGNSGDWDPSSFLSAHKLSGLWNSPHSSGAMPGSSLGSPPTIPGEAFPVSEHHQHSDLTAPPNSPTGHHPQPASLIPSHPSSFGSPPHPHLLPTTPAAPFPAQASECPVAAATAPHTPGPCQSSHLPSTSMPLLKMPPPFSGCSHPCSGHCGGHCSGPLLPPPSSQPLPSTHRDPGCKGHKFAHSGLACQLPQPCEADEGLGEEEDSSSERSSCTSSSTHQRDGKFCDCCYCEFFGHNAEKEKAQLAAEALKQANRVSGSREPRPARERLLEWPDRELDRVNSFLSSRLQEIKNTVKDSIRASFSVCELSMDSNGFSKEGAAEPEPQSLPPSNLSGSSEQQPDINLDLSPLTLGSPQNHTLQAPGEPAPPWAEMRGPHPPWTEVRGPPPGIVPENGLVRRLNTVPNLSRVIWVKTPKPGYPSSEEPSSKEVPSCKQELPEPVSSGGKPQKGKRQGSQAKKSEASPAPRPPASLEVPSAKGQVAGPKQPGRVLELPKVGSCAEAGEGSRGSRPGPGWAGSPKTEKEKGSSWRNWPGEAKARPQEQESVQPSGPARPQSLPQGKGRSRRSRNKQEKPASSLDDVFLPKDMDGVEMDETDREVEYFKRFCLDSAKQTRQKVAVNWTNFSLKKTTPSTAQ

SEQ ID NO: 73110 - DNA, 2469 bp, Artificial Sequence
  derived and/or modified sequence
atgaccagaagaagaagcagacccagcggcggcgccggcagaagagagagagccagagccgccggcccccagaagccccaggcccccgagcccccccccccccccagcctggaggccggcgccggcgccggcccccccgaggcccccgccgagcccgaccacgacggccccagagaggacgacgagcccaacctggtgcccggcccccaggtgccccccgccagcagccagcccgtgcagacctgctgcctgctgtgccacagagagagaaagggctgggaggagggccccagccagaacggcctggtgctgcagggcgagaagctgccccccgacttcatgcccaagctggtgaagaacctgctgggcgagatgcccctgtgggtgtgccagagctgcagaaagagcatggaggaggacgagagacagaccggcagagagcacgccgtggccatcagcctgagccacaccagctgcaagagccagagctgcggcgacgacagccacagcagcagcagcagcagcagcagcagcagcagcagcagcagcagcagctgccccggcaacagcggcgactgggaccccagcagcttcctgagcgcccacaagctgagcggcctgtggaacagcccccacagcagcggcgccatgcccggcagcagcctgggcagcccccccaccatccccggcgaggccttccccgtgagcgagcaccaccagcacagcgacctgaccgccccccccaacagccccaccggccaccacccccagcccgccagcctgatccccagccaccccagcagcttcggcagccccccccacccccacctgctgcccaccacccccgccgcccccttccccgcccaggccagcgagtgccccgtggccgccgccaccgccccccacacccccggcccctgccagagcagccacctgcccagcaccagcatgcccctgctgaagatgcccccccccttcagcggctgcagccacccctgcagcggccactgcggcggccactgcagcggccccctgctgcccccccccagcagccagcccctgcccagcacccacagagaccccggctgcaagggccacaagttcgcccacagcggcctggcctgccagctgccccagccctgcgaggccgacgagggcctgggcgaggaggaggacagcagcagcgagagaagcagctgcaccagcagcagcacccaccagagagacggcaagttctgcgactgctgctactgcgagttcttcggccacaacgccgagaaggagaaggcccagctggccgccgaggccctgaagcaggccaacagagtgagcggcagcagagagcccagacccgccagagagagactgctggagtggcccgacagagagctggacagagtgaacagcttcctgagcagcagactgcaggagatcaagaacaccgtgaaggacagcatcagagccagcttcagcgtgtgcgagctgagcatggacagcaacggcttcagcaaggagggcgccgccgagcccgagccccagagcctgccccccagcaacctgagcggcagcagcgagcagcagcccgacatcaacctggacctgagccccctgaccctgggcagcccccagaaccacaccctgcaggcccccggcgagcccgcccccccctgggccgagatgagaggcccccaccccccctggaccgaggtgagaggccccccccccggcatcgtgcccgagaacggcctggtgagaagactgaacaccgtgcccaacctgagcagagtgatctgggtgaagacccccaagcccggctaccccagcagcgaggagcccagcagcaaggaggtgcccagctgcaagcaggagctgcccgagcccgtgagcagcggcggcaagccccagaagggcaagagacagggcagccaggccaagaagagcgaggccagccccgcccccagaccccccgccagcctggaggtgcccagcgccaagggccaggtggccggccccaagcagcccggcagagtgctggagctgcccaaggtgggcagctgcgccgaggccggcgagggcagcagaggcagcagacccggccccggctgggccggcagccccaagaccgagaaggagaagggcagcagctggagaaactggcccggcgaggccaaggccagaccccaggagcaggagagcgtgcagcccagcggccccgccagaccccagagcctgccccagggcaagggcagaagcagaagaagcagaaacaagcaggagaagcccgccagcagcctggacgacgtgttcctgcccaaggacatggacggcgtggagatggacgagaccgacagagaggtggagtacttcaagagattctgcctggacagcgccaagcagaccagacagaaggtggccgtgaactggaccaacttcagcctgaagaagaccacccccagcaccgcccagtag

SEQ ID NO: 73111 - DNA, 2469 bp, Artificial Sequence
  derived and/or modified sequence
atgacccgccgtcgctcacgcccttccggaggagctggtagacgcgagagagcccgcgccgcaggaccccagaaaccacaagccccggagcccccccctcctcctagtttggaggcgggcgccggtgccggtccaccggaagcccccgccgaacctgaccatgatgggccaagagaggatgatgaacccaacttggtgccgggcccacaggtgccacctgccagcagtcagccggtgcagacctgctgcctgctgtgccatagagagaggaaaggctgggaggaggggccatcccagaacgggttagtcctgcagggtgagaaattgcctccggactttatgcccaagctggtgaagaacctgctcggggagatgccactctgggtgtgtcagtcctgccgaaagtcaatggaggaggacgagagacagacaggcagggaacacgctgtggccatctctctaagccatactagctgtaaaagccagtcctgcggagatgacagccactcttcctcgagctcctctagctcctccagcagtagtagtagcagcagctgtccaggcaatagcggcgattgggatcctagctcattcctgagtgctcataaactgagcggactatggaatagccctcactcgtcaggggctatgcccggcagctctctggggagccccccgaccatcccaggcgaggcatttccggtgtcggagcatcaccagcacagcgatctgacagcacctcctaactcgcctactggccatcaccctcagccggcttccctcatcccatcccatcctagttcatttggctcccctccgcatccgcacttgctgccaaccacacccgctgcaccatttccagctcaggcatccgagtgtcccgtggccgccgctacagctcctcatactccagggccatgccagagttctcacctcccatctacttctatgccactgcttaagatgccacctcctttctccggctgttcacatccatgtagtggtcactgcggcgggcattgctccggtccactgctccctccaccctctagccaacccttaccttctacccatcgggaccctggctgtaagggacacaagtttgcacattccggcctggcctgccagctccctcagccgtgcgaggcagatgagggcctcggagaggaggaggattcatcctcagaaaggagctcttgcaccagttcttctactcaccagcgtgacggaaaattttgtgactgctgttattgtgagttctttggccacaacgctgagaaggagaaagcccagctggcagctgaagccctgaaacaagccaaccgcgtctccggttcccgggagcctcggcccgctcgagaacgcctgctcgagtggccagaccgcgaattggacagagtgaactccttcctatcctcacgcttgcaggaaatcaagaacactgtcaaagattctatcagagcctcattctcagtttgcgaacttagcatggacagtaacggattcagcaaggaaggggctgccgagccggaaccccaatctctgccacccagtaacctctcaggcagtagcgagcagcagcccgatatcaatctcgacctgagtcctctgaccctcggatctccacagaatcatactctgcaagctccaggtgaacctgcccctccatgggcagaaatgagggggccacaccctccttggactgaggtccgcggtcctcctccaggtatcgtccccgaaaacgggctggtaaggcgactgaatactgtcccaaacctgtctcgggttatatgggtcaagactcctaaaccaggttaccccagctccgaggaaccaagctctaaagaagttccatcctgtaagcaagaattgcctgaacccgtgtcatcagggggcaaaccccagaaaggcaaacggcagggatcccaggccaagaaatctgaagcctctcccgcacctaggccgccggcctcgctggaagttccttctgccaaggggcaggtcgctgggccaaagcagccgggtagggtactcgagctgcccaaggttggcagctgtgctgaggcaggagaagggtcacgcggaagtaggccaggtccgggatgggccgggtcccccaagacggagaaggagaagggcagttcctggcgtaattggcctggggaagcgaaagctaggcctcaagagcaggagtcggttcagccatctggacctgcgagacctcagtccttgcctcagggcaaaggtcggtccaggcggtcgcgaaataaacaagaaaagcccgctagctccttagatgatgtgtttctcccaaaggacatggatggagtggaaatggatgagaccgatagggaggttgaatattttaagagattctgcctcgattctgccaaacaaaccaggcagaaggtggcagtaaactggactaatttttccctaaagaaaaccacgccttctacagctcagtag

SEQ ID NO: 73112 - DNA, 2913 bp, Artificial Sequence
  derived and/or modified sequence
gcggcggcggcggcggcgtgtggagcgagggagcggcgcgagcggcggcatgacgcggaggcggagcaggccgagcggcggtgcgggcaggcgcgagcgggctcgggccgcggggccgcagaagccccaggcgcccgagcccccgccgccgccaagcctggaggcgggagcgggtgcaggccctccggaggcgccggcggagcccgaccacgacggccccagggaggatgacgaacccaacctggtgcccggcccgcaggtcccccccgcctccagccagcctgtgcagacttgctgcctgctgtgtcaccgggaacgcaaaggctgggaagaaggcccttctcaaaatggactggtgttgcagggtgagaagctgccccctgacttcatgccaaagctcgtcaagaatctcctaggcgagatgcctctgtgggtctgccagagttgccgaaagagcatggaggaagatgaaaggcagacaggtcgagaacatgcagtggcgatctccttgtcacacacatcctgcaaatcacagtcttgtggagatgactctcattcgtcctcgtcttcctcctcatcatcctcatcctcgtcctcctcttcctgccctgggaactcgggagactgggatcctagctcgttcctgtcggcacataagctctcgggcctctggaattccccacattccagtggggccatgccaggcagctctcttgggagtcctcctaccatccccggtgaggctttccccgtctcggagcaccaccagcactcagacctcactgctccccctaacagccccaccggccaccacccgcagccagcatctctaatcccgtctcaccccagctcctttggctccccaccccacccacacctgctgcccaccaccccggcagcacctttccctgcccaggcttcagagtgccctgttgctgctgccactgccccccacactccagggccatgtcagagctcccatctaccctccaccagcatgccgctcctgaagatgcccccaccattctcggggtgcagccacccctgcagcgggcactgtggtgggcactgcagtgggcctctcctcccacccccgagctctcagccactccctagcactcacagggatcccgggtgcaaggggcacaagtttgcacacagtggcctggcttgccagctgccccagccctgcgaggcagatgaggggctgggtgaggaagaggatagcagctctgagcgaagctcctgcacctcatcctccacccaccagagagatgggaagttctgtgactgctgctactgtgagttcttcggccacaatgcggaaaaggagaaggcccagttggcagcagaagctctaaagcaggcaaatcgtgtttctggaagccgggagccaaggcctgccagggagaggctcttggagtggcccgaccgggaactggatcgggtcaacagcttcctgagcagccgtctgcaggagatcaaaaacactgtcaaagactccatccgtgccagcttcagtgtgtgtgagctcagcatggacagcaatggcttctctaaggagggggctgctgagcctgagcctcagagtctacccccctcaaacctcagtggctcctcagagcagcagcctgacatcaaccttgacctgtcccctttgactttgggctcccctcagaaccacacgttacaagctccaggcgagccagccccaccatgggcagaaatgagaggcccccacccaccatggacagaggtgagggggccccctcccggtatcgtccccgagaacgggctcgtgaggagactcaacaccgtgcccaacctatcccgggtgatctgggtcaagacacccaagccgggctaccccagctccgaggagccaagctcaaaggaagttcccagttgcaagcaggagctgcctgagcctgtgtcctcaggtgggaagccacagaagggcaagaggcagggcagtcaggccaagaagagcgaggcaagcccagccccccggcccccagccagcctagaggttcccagtgccaagggccaggtcgctggccccaagcagccaggcagggtcctagagcttcccaaagtaggcagctgtgctgaggctggagaggggagccgggggagccggccaggaccaggttgggctggcagtcccaaaactgagaaggagaagggcagctcctggcgaaactggccaggcgaggccaaggcacggcctcaggagcaggagtctgtgcagccctcaggcccagcaaggccacagagcttgccccagggcaagggccgcagccgccggagccgcaacaagcaggagaagccagcctcctccttggacgatgtgttcctgcccaaggacatggacggggtggagatggatgagactgaccgagaggtggagtactttaagaggttctgtttggattctgcaaagcagactcgtcagaaagttgctgtgaactggaccaacttcagcctcaagaaaaccactcctagcacagctcagtgaggccctgcccaggctgagctgcttcagggcgtcctgaggccctgactgccagctgaaggcgtataatttttccctccgtgtgccccacctacccgtccaagaccctctgtgctccccaccatcctggaccaaccaaaagctgaacggatgccacactgtgctggggccccttgacctcagcagagccgcttcctggtgctacgcagcctccacactcagagcccgtggactgggctggcctaagggccagggctgatggtactgctggcccaacactgctctctttgtgtttggtttttttgtttttgtttttattttgtttttttccaattctttacttttgatactgtgaagatctttcgtgccgaaagataaagcaacatttggacacagag

SEQ ID NO: 73113 - DNA, 2469 bp, Artificial Sequence
  derived and/or modified sequence
atgacccggcggcgcagccggcccagcggcggggccggccggcgggagcgggcccgggctgctggcccccagaagccccaggcccctgagcccccacctccacccagcctggaggccggggccggggccggccccccagaggccccagctgagccagaccatgatggccccagagaagatgatgagcccaacctggtgcccggcccccaggtgcccccagccagcagccagcctgtgcagacctgctgcctgctgtgccaccgggagaggaagggctgggaggagggccccagccagaatggcctggtgctgcagggcgagaagctgcccccagacttcatgcccaagctggtgaagaacctgctgggggagatgcccctgtgggtgtgccagagctgcaggaagtccatggaggaggatgagcggcagacaggccgggagcacgctgtggccatcagcctgagccacaccagctgcaagagccagagctgtggagatgacagccacagcagcagcagcagcagcagcagcagcagcagcagcagcagcagcagctgccccggcaacagcggggactgggaccccagcagcttcctgagcgcccacaagctgagcggcctgtggaacagcccccacagcagcggggccatgcctggcagcagcctgggcagcccccccaccatccctggagaggccttccctgtgtctgagcaccaccagcacagcgacctgacagccccacccaacagccccaccggccaccacccccagcctgccagcctcatccccagccaccccagcagctttggcagccccccccacccccacctgctgcccaccaccccagctgcccccttccctgcccaggccagcgagtgccctgtggccgccgccacagccccccacaccccaggcccctgccagagcagccacctgcccagcacctccatgcccctgctgaagatgcccccacccttcagcggctgcagccacccctgcagcggccactgcggcggccactgcagcggccccctgctgcccccacccagcagccagcccctgcccagcacccaccgggaccccggctgcaagggccacaagtttgcccacagcggcctggcctgccagctgccccagccctgtgaggctgatgagggcctgggggaggaggaggacagcagcagcgagaggagcagctgcaccagcagcagcacccaccagagagatggcaagttctgtgactgctgctactgtgagttcttcggccacaatgctgagaaggagaaggcccagctggccgctgaggccctgaagcaggccaacagagtgtctggcagccgggagcccaggcctgcccgggagcggctgctggagtggccagaccgggagctggacagagtgaacagcttcctgagcagccggctgcaggagatcaagaacacagtgaaggacagcatccgggccagcttctctgtgtgtgagctgtccatggacagcaatggcttcagcaaggagggcgctgctgagcctgagccccagagcctgccccccagcaacctgagcggcagcagcgagcagcagcctgacatcaacctggacctgagccccctgaccctgggcagcccccagaaccacaccctgcaggcccctggagagcccgccccaccctgggccgagatgaggggcccccaccccccctggacagaggtgcggggccccccacctggcatcgtgcctgaaaatggcctggtgcggcggctgaacacagtgcccaacctgagcagggtcatctgggtgaagacccccaagccaggctaccccagcagcgaggagcccagcagcaaggaggtgcccagctgcaagcaggagctgcctgagcctgtgagcagcggcggcaagccccagaagggcaagaggcagggcagccaggccaagaagtctgaggccagccctgccccccggcccccagccagcctggaggtgcccagcgccaagggccaggtggccggccccaagcagcccggccgggtgctggagctgcccaaggtgggcagctgtgccgaggccggggagggcagccggggcagccggcccggccctggctgggccggcagccccaagacagagaaggagaagggcagctcctggaggaactggccaggagaggccaaggcccggccccaggagcaggagagcgtgcagcccagcggccctgcccggccccagagcctgccccagggcaagggccgcagccgccgcagcaggaacaagcaggagaagccagccagcagcctggatgatgtgttcctgcccaaggacatggatggagtggagatggatgaaacagaccgggaggtggagtacttcaagcgcttctgcctggacagcgccaagcagacccggcagaaggtggccgtgaactggaccaacttcagcctgaagaagaccacccccagcacagcccagtag

SEQ ID NO: 73114 - DNA, 2469 bp, Artificial Sequence
  derived and/or modified sequence
atgacccggcggcggagccggcccagcggcggcgccggccggcgggaaagggccagggccgccgggccacagaagccccaggctccagaacctcctcccccgccctcactcgaagcgggggccggggccggaccacctgaagcacccgccgagccagaccacgacggacctcgcgaagatgatgaacccaaccttgtccctgggcctcaggtgcctcctgcaagtagtcaacccgtgcaaacctgctgtttgttgtgccacagggaacggaaaggctgggaagagggaccttcccagaacggcttagtgctccaaggcgagaaactccctcctgatttcatgcctaaattggtaaagaacctgctgggagagatgccactgtgggtctgccagtcctgccgtaagtcaatggaggaagacgagaggcagacagggcgagagcatgccgtggccatttctctgagccacacaagctgtaaatctcagtcctgcggcgacgatagccacagcagcagctcatcctcgtcctcatcaagctcttctagctcttcttcctgtcctgggaattcaggggattgggacccttcttcctttctctcggcacataaacttagcggattgtggaattctcctcactcatctggggcgatgccgggctccagccttggctcaccgcccactatccctggtgaagcattccccgtgagcgagcaccaccagcattccgatctaactgccccccctaactccccaacaggccatcacccacaacccgccagtttgatcccttcccaccccagctctttcggctctcctccacacccgcatttgctgcctactacccccgcggcaccgtttccagcccaggctagtgaatgcccagtagctgcggccacagctccacacactcccggcccatgtcagtcgtcgcatctgccgagtacctccatgcctctgctgaaaatgcctccacccttctccggttgctcacacccttgcagcggccactgcgggggtcattgttcaggtcccctccttccgccaccttcttcccagcccctcccatctactcaccgcgatcccgggtgtaaaggacataagttcgcgcactccggattggcgtgtcagctcccacagccatgcgaggccgacgaagggcttggggaggaggaagattcgtcatctgaacggagcagctgtaccagcagctccacccatcaaagagatggaaaattctgtgactgctgctactgtgaatttttcggccataacgcggaaaaagagaaggcacagctcgccgccgaggcactgaagcaagcaaatcgtgtcagcggatcaagggagccccgtcccgcccgggaaagactcctggaatggcccgatcgagaacttgacagagtgaacagcttcctgtcatccaggctgcaggaaataaaaaacacagtgaaggattcaatacgggcaagcttttctgtttgcgaactctccatggactctaacggttttagcaaggaaggcgccgccgagccagagccgcagagcctgcctccctccaacctgtctggttcttccgagcaacaaccagatatcaatctggatctcagccccctgaccctgggcagcccacagaaccatacactgcaagccccaggagagcctgcccccccttgggctgagatgcgcggacctcaccctccctggaccgaggtccggggccctcctcctggcatcgtgccggagaacgggcttgtacgccggctgaacacagtccctaatttgtctcgagtaatttgggtaaaaacgcctaaacccggttaccccagtagtgaggagccttcttctaaagaggtgccatcttgtaagcaggaacttcccgagccagtgtcatccgggggcaagcctcagaaagggaagcgacagggttcgcaggccaaaaaatctgaagcctctcctgccccacggcctcccgcatccctggaggtcccaagtgcaaaaggtcaggtcgctggccccaagcagcctgggcgcgtgctcgagctgcctaaagtggggtcttgcgccgaggcaggtgaagggtcccgaggttcaaggccggggcctgggtgggccggaagcccaaaaactgaaaaggaaaagggcagttcatggcgaaactggcctggagaggccaaggccaggccccaggagcaggagtcagtacagccctccgggcctgccagaccacagtcactgccacaggggaaagggaggtcacgcaggtctagaaataagcaggagaagcctgcatcttctcttgatgacgtgtttctgccaaaggatatggatggggtggagatggatgaaaccgaccgagaagtagaatatttcaagagattctgcctcgattccgccaaacagacccggcagaaggtggcggtgaattggacaaattttagcctgaaaaagacgaccccatccaccgcacagtag

SEQ ID NO: 73115 - DNA, 2469 bp, Artificial Sequence
  derived and/or modified sequence
atgactcggcgacgaagccggccaagcggcggtgccggacgcagagagagggctagggccgcaggaccgcagaagccacaagcgccagagccgcctccacctccaagcctggaggccggagctggagccggaccgcctgaagcgccagctgaaccggatcatgatggccctcgggaagacgatgagccaaatctggtgccgggacctcaggttccccctgcttccagccagccagtgcagacctgttgcctgttgtgtcaccgcgaacggaaaggctgggaggagggcccaagccagaatggcttagtgcttcagggggaaaagctgccgcctgattttatgcccaagcttgtcaagaacctgctgggcgaaatgccactgtgggtgtgtcagtcctgccgcaagagtatggaggaggacgaacgacagacgggcagagaacatgccgtagctatctcgttaagccataccagctgtaagtcacagtcctgcggggatgatagccattcttcttcttcttcaagtagttcaagcagctcatcctcatcctcgtcttgccccggtaactccggggattgggaccccagctctttcctttctgcgcacaagctgagcggattatggaacagcccccactccagcggcgctatgccaggctcctccttaggctctccccctaccattcctggggaggccttcccagttagcgaacaccaccaacatagtgacttgacagccccacctaattctcctactggccaccatcctcaaccagctagcctcatccccagccacccgagttcttttggttctcctccccaccctcacctattacccactacccccgctgcacctttcccagctcaagcttccgaatgccctgtggctgccgcaacggcaccccatacccccggaccgtgccagtcctcgcacctgccttcaacatctatgccattgcttaaaatgcctccacccttttcaggatgtagccacccctgttctgggcactgtggcggacattgttcaggcccactattgccaccaccaagttcgcagcccctaccctcaacccacagggacccgggatgcaaggggcataaatttgcccactctgggctcgcatgtcagttgccgcaaccctgcgaggctgatgagggtctaggagaggaggaggactcaagcagcgagcgaagctcatgtacgtctagttccacccaccagagagatggaaaattctgtgactgttgctattgtgagttttttggtcacaacgccgagaaagagaaggcacagctcgctgccgaggcactgaaacaggcaaatcgtgtgtcaggatctagagagccaaggcctgccagagagcggctactcgagtggccagaccgcgaactggaccgggttaactcctttctctcgtcccgactacaggagatcaaaaatacagtcaaggattcaattcgtgcttcgttcagcgtctgcgagttgtccatggattccaacggttttagtaaagaaggagccgctgaaccagagccccagagtcttcccccttccaacctctcaggaagtagcgaacagcagccagatatcaacctcgacctgagcccgctaacgttgggcagcccccagaaccacacactgcaggcgcctggcgaaccggctcctccgtgggccgagatgcgaggtccccatcctccttggacagaggtgagagggccaccaccaggaattgtccctgaaaatggtctagtaaggaggctgaacacagtgccaaacctgtctagagtgatctgggtgaaaacgcctaagcccggttacccttcctccgaagagccatcctctaaggaagtgccaagctgtaaacaggagcttccagaacctgtctcttcagggggaaagccccagaagggaaaacggcagggatcacaagccaagaagtcggaagcatcccccgcacctagacccccagcttccctggaagtaccttctgccaaaggacaggtggccggaccaaagcagcccggacgagtgctagaactccctaaggtgggatcctgcgcggaggccggagagggctctcggggaagtaggcccggacccggatgggccggtagtccgaagacagagaaggaaaagggcagctcctggcgaaactggcccggagaggcaaaggctagacctcaggaacaggaaagcgtgcagccttctggacccgcacggccacagagccttcctcagggtaagggaagatctaggagaagcagaaataaacaggagaagccagcgtcttcactggatgacgtgtttctccctaaggacatggacggcgtcgagatggacgaaaccgacagggaagttgaatacttcaagcggttctgcctggactctgcgaaacaaactagacagaaagtagctgtgaactggaccaacttctctctgaagaagacaacaccaagtactgcccagtag

SEQ ID NO: 73116 - protein, 294 aa, Artificial Sequence
  derived and/or modified sequence
MKQWKARLGCGLESGPMALEQNLSDLQLQAAVEVAGDLEVDCYRAPCSESQEELALQHFMKEKLLAELEGKLRVFENIVAVLNKEVEASHLALATSIHQSQLDRERILSLEQRVVELQQTLAQKDQALGKLEQSLRLMEEASFDGTFLWKITNVTRRCHESACGRTVSLFSPAFYTAKYGYKLCLRLYLNGDGTGKRTHLSLFIVIMRGEYDALLPWPFRNKVTFMLLDQNNREHAIDAFRPDLSSASFQRPQSETNVASGCPLFFPLSKLQSPKHAYVKDDTMFLKCIVETST

SEQ ID NO: 73117 - DNA, 885 bp, Artificial Sequence
  derived and/or modified sequence
atgaagcagtggaaggccagactgggctgcggcctggagagcggccccatggccctggagcagaacctgagcgacctgcagctgcaggccgccgtggaggtggccggcgacctggaggtggactgctacagagccccctgcagcgagagccaggaggagctggccctgcagcacttcatgaaggagaagctgctggccgagctggagggcaagctgagagtgttcgagaacatcgtggccgtgctgaacaaggaggtggaggccagccacctggccctggccaccagcatccaccagagccagctggacagagagagaatcctgagcctggagcagagagtggtggagctgcagcagaccctggcccagaaggaccaggccctgggcaagctggagcagagcctgagactgatggaggaggccagcttcgacggcaccttcctgtggaagatcaccaacgtgaccagaagatgccacgagagcgcctgcggcagaaccgtgagcctgttcagccccgccttctacaccgccaagtacggctacaagctgtgcctgagactgtacctgaacggcgacggcaccggcaagagaacccacctgagcctgttcatcgtgatcatgagaggcgagtacgacgccctgctgccctggcccttcagaaacaaggtgaccttcatgctgctggaccagaacaacagagagcacgccatcgacgccttcagacccgacctgagcagcgccagcttccagagaccccagagcgagaccaacgtggccagcggctgccccctgttcttccccctgagcaagctgcagagccccaagcacgcctacgtgaaggacgacaccatgttcctgaagtgcatcgtggagaccagcacctag

SEQ ID NO: 73118 - DNA, 885 bp, Artificial Sequence
  derived and/or modified sequence
atgaaacagtggaaggccagactcgggtgtggattggagtccggcccaatggctctggaacagaacctttccgaccttcaactacaggccgctgtggaagttgcaggggacctcgaagtggactgctaccgggccccgtgctcagaaagtcaagaggagttagcgctgcagcactttatgaaggaaaagctcctggcagagttagaagggaagctgagggtgtttgagaacattgttgccgtgctaaataaggaggtcgaggcctcacatctggcactcgcaacctcaattcaccagtcgcagctagacagggagagaattctgtctctggaacagcgggttgtggaactccaacagaccctcgcccagaaagatcaagctctgggcaaactcgagcaatccttacgccttatggaggaggcctcgtttgacgggacatttctatggaagatcacgaacgtgacccgacgctgccacgagagtgcgtgcggaaggaccgtgtcactcttttcccccgccttttacaccgctaagtacggctataaactgtgcctgcgcttataccttaacggcgatggcacagggaaacggacgcacctatccctgtttatcgttataatgaggggggagtacgatgctctgctaccctggccatttcgcaataaagtgacatttatgctgctggatcagaacaatagagagcatgctatcgatgccttcaggccggacctcagtagtgcctccttccagcgtccccagtctgagacaaatgtggcgtctggctgcccgttgttctttccactctccaaattgcaatcccccaaacacgcatatgttaaggacgataccatgttccttaagtgcatagtggagacctcaacatag

SEQ ID NO: 73119 - DNA, 885 bp, Artificial Sequence
  derived and/or modified sequence
atgaagcagtggaaggcccggctgggctgcggcctggagagcggccccatggccctggagcagaacctgagtgacctgcagctgcaggccgctgtggaggtggccggggacctggaggtggactgctaccgggccccctgcagcgagagccaggaggagctggccctgcagcacttcatgaaggagaagctgctggccgagctggagggcaagctgcgggtgtttgagaacatcgtggccgtgctgaacaaggaggtggaggccagccacctggccctggccaccagcatccaccagagccagctggaccgggagcgcatcctgagcctggagcagagggtggtggagctgcagcagaccctggcccagaaggaccaggccctgggcaagctggagcagagcctgcggctgatggaggaggccagctttgatggcaccttcctgtggaagatcaccaacgtgacccggcgctgccatgaaagtgcctgtggccgcacagtgtccctcttcagccctgccttctacacagccaagtatggctacaagctgtgcctgcggctgtacctgaatggagatggcaccgggaagaggacccacctgagcctcttcatcgtcatcatgagaggagaatatgatgccctgctgccctggcccttcaggaacaaggtgaccttcatgctgctggaccagaacaaccgggagcacgccattgatgccttccggccagacctgagcagcgccagcttccagaggccccagagcgagaccaacgtggccagcggctgccccctcttcttccccctgagcaagctgcagagccccaagcacgcctacgtgaaggatgacaccatgttcctgaagtgcatcgtggagaccagcacctag

SEQ ID NO: 73120 - DNA, 885 bp, Artificial Sequence
  derived and/or modified sequence
atgaagcagtggaaggcccggctgggctgcggcctggagagcggcccaatggcactggagcaaaacctcagtgatcttcagctacaggcagccgtcgaagtggcgggcgacttggaggtggattgttaccgcgcaccttgtagtgagtcacaggaggaactggctcttcaacatttcatgaaggagaagctgctggcagagctcgaagggaaactccgggtctttgagaacatcgttgccgtactgaacaaggaagtagaggccagccacctggcactcgctacctctatccaccagtcacagctggaccgagagcgtatactctctctggaacaacgcgtcgtcgagctgcagcagactctggcccagaaggaccaggctcttggcaagctggagcagagcctacgcctgatggaggaggcatcctttgacggcacattcctttggaaaatcacaaacgtgacaagaaggtgccacgagtccgcgtgtggccgaactgtgagtctgttcagtcccgccttctataccgcaaagtatggatataagttatgtcttaggctgtacttgaacggtgacggcaccggcaaacgcactcatctgtctctgtttatcgtcattatgaggggagaatacgacgctctgttgccctggccattcaggaacaaagtgaccttcatgctgctagatcagaataacagagagcacgctatcgatgctttcaggcctgacctctcctctgctagcttccagaggcctcagtccgagaccaatgtggcgtccggctgccccctctttttccccctgagtaagctccagtccccaaaacacgcttatgtgaaagacgacaccatgtttcttaagtgtattgtagaaacatccacatag

SEQ ID NO: 73121 - DNA, 885 bp, Artificial Sequence
  derived and/or modified sequence
atgaagcagtggaaggctcgactgggatgcggactggagtccggcccaatggccctcgagcagaatctcagcgatctgcaacttcaggccgcagtggaggtggccggagatttggaagttgattgttaccgggcaccgtgttccgaatcacaggaagaattagcgctgcagcatttcatgaaagaaaaactactggccgaactggaagggaaactgagagtctttgaaaacattgtggccgtcttgaataaggaggtagaggctagccacttagctcttgccaccagcatacatcagagccagctcgaccgcgagaggatactgagcttggaacagcgggtggtcgagcttcagcagaccctggcgcagaaggaccaggctcttgggaagctagaacagtcacttaggttgatggaggaagcatcctttgacggtactttcctgtggaagatcacaaatgtgactcggagatgtcatgagagcgcctgcggtcgaacggtgtctctattctcccctgctttttatacggccaagtacggatataagctgtgcctccggttgtacttaaacggggatggcactggtaagaggacacacctgtctttgtttatcgtaatcatgagaggcgagtacgacgccctgctgccgtggccttttcggaacaaggtaacgttcatgttgctggaccaaaacaacagagagcatgcgatcgacgctttccgcccagacctctcctccgcaagtttccagaggccacagagtgagaccaacgtcgcttctggctgccctctgttcttccctctgtccaaactccagagccccaaacacgcctatgtcaaggacgacactatgttcttaaagtgtatcgtggagacatccacgtag

SEQ ID NO: 73122 - protein, 150 aa, Artificial Sequence
  derived and/or modified sequence
MTGRARARARGRARGQETAQLVGSTASQQPGYIQPRPQPPPAEGELFGRGRQRGTAGGTAKSQGLQISAGFQELSLAERGGRRRDFHDLGVNTRQNLDHVKESKTGSSGIIVRLSTNHFRLTSRPQWALYQYHIDYNPLMEARRLRSALL

SEQ ID NO: 73123 - protein, 172 aa, Artificial Sequence
  derived and/or modified sequence
MTGRARARARGRARGQETAQLVGSTASQQPGYIQPRPQPPPAEGELFGRGRQRGTAGGTAKSQGLQISAGFQELSLAERGGRRRDFHDLGVNTRQNLDHVKESKTGSSGIIVRLSTNHFRLTSRPQWALYQYHIDYNPLMEARRLRSALLFQHEDLIGKCHAFDGTILFLPK

SEQ ID NO: 73124 - protein, 165 aa, Artificial Sequence
  derived and/or modified sequence
MTGRARARARGRARGQETAQLVGSTASQQPGYIQPRPQPPPAEGELFGRGRQRGTAGGTAKSQGLQISAGFQELSLAERGGRRRDFHDLGVNTRQNLDHVKESKTGSSGIIVRLSTNHFRLTSRPQWALYQYHIDYNPLMEARRLRSALLFQHEDLIGKCHAFDG

SEQ ID NO: 73125 - protein, 857 aa, Artificial Sequence
  derived and/or modified sequence
MLTLQTWLVQALFIFLTTESTGELLDPCGYISPESPVVQLHSNFTAVCVLKEKCMDYFHVNANYIVWKTNHFTIPKEQYTIINRTASSVTFTDIASLNIQLTCNILTFGQLEQNVYGITIISGLPPEKPKNLSCIVNEGKKMRCEWDGGRETHLETNFTLKSEWATHKFADCKAKRDTPTSCTVDYSTVYFVNIEVWVEAENALGKVTSDHINFDPVYKVKPNPPHNLSVINSEELSSILKLTWTNPSIKSVIILKYNIQYRTKDASTWSQIPPEDTASTRSSFTVQDLKPFTEYVFRIRCMKEDGKGYWSDWSEEASGITYEDRPSKAPSFWYKIDPSHTQGYRTVQLVWKTLPPFEANGKILDYEVTLTRWKSHLQNYTVNATKLTVNLTNDRYLATLTVRNLVGKSDAAVLTIPACDFQGNLAESKCYLITVTPVYADGPGSPESIKAYLKQAPPSKGPTVRTKKVGKNEAVLEWDQLPVDVQNGFIRNYTIFYRTIIGNETAVNVDSSHTEYTLSSLTSDTLYMVRMAAYTDEGGKDGPEFTFTTPKFAQGEIEAIVVPVCLAFLLTTLLGVLFCFNKRDLIKKHIWPNVPDPSKSHIAQWSPHTPPRHNFNSKDQMYSDGNFTDVSVVEIEANDKKPFPEDLKSLDLFKKEKINTEGHSSGIGGSSCMSSSRPSISSSDENESSQNTSSTVQYSTVVHSGYRHQVPSVQVFSRSESTQPLLDSEERPEDLQLVDHVDGGDGILPRQQYFKQNCSQHESSPDISHFERSKQVSSVNEEDFVRLKQQISDHISQSCGSGQMKMFQEVSAADAFGPGTEGQVERFETVGMEAATDEGMPKSYLPQTVRQGGYMPQ

SEQ ID NO: 73126 - protein, 329 aa, Artificial Sequence
  derived and/or modified sequence
MLTLQTWLVQALFIFLTTESTGELLDPCGYISPESPVVQLHSNFTAVCVLKEKCMDYFHVNANYIVWKTNHFTIPKEQYTIINRTASSVTFTDIASLNIQLTCNILTFGQLEQNVYGITIISGLPPEKPKNLSCIVNEGKKMRCEWDGGRETHLETNFTLKSEWATHKFADCKAKRDTPTSCTVDYSTVYFVNIEVWVEAENALGKVTSDHINFDPVYKVKPNPPHNLSVINSEELSSILKLTWTNPSIKSVIILKYNIQYRTKDASTWSQIPPEDTASTRSSFTVQDLKPFTEYVFRIRCMKEDGKGYWSDWSEEASGITYEDTIFSF

SEQ ID NO: 73127 - DNA, 2574 bp, Artificial Sequence
  derived and/or modified sequence
atgctaaccctccagacatggttggttcaggctctatttatttttctaactactgagagcactggggagctgctggatccctgcggttacattagccccgaatctccagtggtgcaactacatagcaatttcaccgcagtttgtgtcctcaaagaaaagtgcatggactacttccatgtaaatgccaactacatcgtgtggaaaactaaccattttaccatccctaaggagcaatacactataataaaccggactgcttcctctgtcacctttactgacattgcaagcttgaacatacaactgacctgtaacatcctgacattcggccagctcgagcagaacgtgtatgggattacaataataagcggacttccccctgagaaacctaagaacctctcctgcattgtaaatgaaggcaagaaaatgcgctgcgagtgggacggtggcagggagacccacctggaaactaactttaccttgaaaagcgagtgggctactcacaagtttgctgactgcaaagcaaagcgcgacactcctacctcttgcacagtcgattactcaaccgtgtacttcgttaacattgaggtgtgggtggaggccgagaacgccctggggaaagtgacatctgaccatatcaacttcgaccccgtctacaaggtgaaacccaatcctccacacaatttaagcgtgatcaactccgaagaactgtcctccatcttgaaactgacatggaccaacccaagcatcaagtctgttattatacttaaatacaacatccaatataggaccaaggatgcctccacctggagtcagatcccccctgaggatacagccagcacacgctctagctttacggttcaagatctcaaaccattcacggaatacgtttttcgtatccggtgtatgaaggaagatgggaagggttactggtccgactggtcagaggaagcgagcggcatcacctatgaggacagaccctcaaaagctccttccttttggtataaaatcgatccttcacatacgcagggttataggaccgtccagctagtttggaagactctgccaccattcgaggctaatgggaaaattttggattacgaggtgaccttgacccggtggaagtcccatctgcaaaactacaccgtcaacgctactaagctgactgtgaatttaaccaacgaccgttaccttgcgaccctgacagtccgaaacctggtagggaaatccgacgctgctgttctaacgatccccgcttgtgacttccagggaaacctggccgagtccaagtgctatcttattactgtcacaccagtgtatgctgatgggcctggctcccctgaatctattaaagcctatctgaagcaagcacctccctccaagggtcccaccgttcgcacgaagaaagtcggcaagaatgaagctgttcttgagtgggaccagctgcccgtagacgtacaaaacgggtttatccgcaactataccattttctatagaaccatcattggaaacgagaccgctgtcaatgtggatagctctcacactgagtataccctgtcctcactaacaagtgataccctctacatggtacggatggcagcctacaccgatgagggcggaaaggatgggccagagttcacatttacaacaccaaagtttgctcagggcgaaattgaggcgatcgtggttccagtttgcctcgccttcctcctcacaacgttactgggggtgttgttctgctttaacaaaagagatctgattaagaagcacatctggccaaatgtcccagatccttccaaatcccacattgctcagtggtctccacacacccccccccgccacaactttaactcaaaggaccaaatgtactccgatgggaatttcaccgacgtttctgttgtggaaattgaagccaacgacaagaagcccttccccgaggacctcaaatctctggatctgtttaaaaaagagaaaattaacacggaagggcactcttcaggaatcggtggatctagttgcatgagcagttcccgtcctagtatcagcagcagcgatgagaacgagtcctctcaaaacacgagtagtactgtgcagtacagtacagtagtacattcagggtatcggcaccaggtccctagcgtgcaggtgtttagccgttctgagtctactcagcctttgcttgatagtgaggagcgtcctgaagatcttcagctcgtggatcatgtggacgggggcgacggcatactgcctagacagcaatactttaagcagaattgctcccagcacgagagctctcctgacatttcacattttgagcgatctaagcaggtcagtagcgtgaacgaagaggacttcgtacgtctcaaacagcaaatttctgatcacatttcacagtcttgtggatcaggacagatgaagatgtttcaggaagtgtcagctgcagacgcgtttggaccgggaactgaaggacaggtggagcgtttcgagactgttgggatggaagctgcaaccgacgaaggaatgccaaagagctatctgccacagaccgttcggcaaggcggctacatgccacagtag

SEQ ID NO: 73128 - DNA, 8567 bp, Artificial Sequence
  derived and/or modified sequence
tattacatgtgtctgttgcagaaatatccgcgcaagatgttgacgttgcagacttggctagtgcaagccttgtttattttcctcaccactgaatctacaggtgaacttctagatccatgtggttatatcagtcctgaatctccagttgtacaacttcattctaatttcactgcagtttgtgtgctaaaggaaaaatgtatggattattttcatgtaaatgctaattacattgtctggaaaacaaaccattttactattcctaaggagcaatatactatcataaacagaacagcatccagtgtcacctttacagatatagcttcattaaatattcagctcacttgcaacattcttacattcggacagcttgaacagaatgtttatggaatcacaataatttcaggcttgcctccagaaaaacctaaaaatttgagttgcattgtgaacgaggggaagaaaatgaggtgtgagtgggatggtggaagggaaacacacttggagacaaacttcactttaaaatctgaatgggcaacacacaagtttgctgattgcaaagcaaaacgtgacacccccacctcatgcactgttgattattctactgtgtattttgtcaacattgaagtctgggtagaagcagagaatgcccttgggaaggttacatcagatcatatcaattttgatcctgtatataaagtgaagcccaatccgccacataatttatcagtgatcaactcagaggaactgtctagtatcttaaaattgacatggaccaacccaagtattaagagtgttataatactaaaatataacattcaatataggaccaaagatgcctcaacttggagccagattcctcctgaagacacagcatccacccgatcttcattcactgtccaagaccttaaaccttttacagaatatgtgtttaggattcgctgtatgaaggaagatggtaagggatactggagtgactggagtgaagaagcaagtgggatcacctatgaagatagaccatctaaagcaccaagtttctggtataaaatagatccatcccatactcaaggctacagaactgtacaactcgtgtggaagacattgcctccttttgaagccaatggaaaaatcttggattatgaagtgactctcacaagatggaaatcacatttacaaaattacacagttaatgccacaaaactgacagtaaatctcacaaatgatcgctatctagcaaccctaacagtaagaaatcttgttggcaaatcagatgcagctgttttaactatccctgcctgtgactttcaagggaacttagcagagagcaaatgctatttgataacagttactccagtatatgctgatggaccaggaagccctgaatccataaaggcataccttaaacaagctccaccttccaaaggacctactgttcggacaaaaaaagtagggaaaaacgaagctgtcttagagtgggaccaacttcctgttgatgttcagaatggatttatcagaaattatactatattttatagaaccatcattggaaatgaaactgctgtgaatgtggattcttcccacacagaatatacattgtcctctttgactagtgacacattgtacatggtacgaatggcagcatacacagatgaaggtgggaaggatggtccagaattcacttttactaccccaaagtttgctcaaggagaaattgaagccatagtcgtgcctgtttgcttagcattcctattgacaactcttctgggagtgctgttctgctttaataagcgagacctaattaaaaaacacatctggcctaatgttccagatccttcaaagagtcatattgcccagtggtcacctcacactcctccaaggcacaattttaattcaaaagatcaaatgtattcagatggcaatttcactgatgtaagtgttgtggaaatagaagcaaatgacaaaaagccttttccagaagatctgaaatcattggacctgttcaaaaaggaaaaaattaatactgaaggacacagcagtggtattggggggtcttcatgcatgtcatcttctaggccaagcatttctagcagtgatgaaaatgaatcttcacaaaacacttcgagcactgtccagtattctaccgtggtacacagtggctacagacaccaagttccgtcagtccaagtcttctcaagatccgagtctacccagcccttgttagattcagaggagcggccagaagatctacaattagtagatcatgtagatggcggtgatggtattttgcccaggcaacagtacttcaaacagaactgcagtcagcatgaatccagtccagatatttcacattttgaaaggtcaaagcaagtttcatcagtcaatgaggaagattttgttagacttaaacagcagatttcagatcatatttcacaatcctgtggatctgggcaaatgaaaatgtttcaggaagtttctgcagcagatgcttttggtccaggtactgagggacaagtagaaagatttgaaacagttggcatggaggctgcgactgatgaaggcatgcctaaaagttacttaccacagactgtacggcaaggcggctacatgcctcagtgaaggactagtagttcctgctacaacttcagcagtacctataaagtaaagctaaaatgattttatctgtgaattcagattttaaaaagtcttcactctctgaagatgatcatttgcccttaaggacaaaaatgaactgaagtttcacatgagctatttccattccagaatatctgggattctactttaagcactacataaactgactttatcctcagactagctgaatgattttgtgctgtttcaggatgtttgcactgaagaaaaacagaaagcttatctgaaatttataaaactttttgttttgctacatagaaaacagaaggtatttgaataataagcagtgatatgcttagtgagcacagctatactgattttgattagaatagtcatcagagtggcttagggacagttaatataaaagaggagcaaggtgtagaccatcatctacttctgctaaaataacttaaaaagaggtccataggccataactacatgagcccagcttttgtaatctgacaaaaaaatgaggagcagcttcgtgtatatcagtgtacacggtattccttaggtcccttccattggtagtgatgctgcgagttattactggagaaaaggaattctagagctttaacttggcagattaaaagtactcattttttattcatcaataattagtaatctcactagttttcaaaaatttgcatattattgacaacctctttgaagatgcatttcacaaactcaacagagtgccatgataagagctagggatcccccaaactatctcaagcatctaaaaaattgccatttttaaaggcttaaattgtagtagtaaaggggaaaacaggaagtagtagtaaaggggaaaaaaaaccaataaagcatctaaaaaattggcatgttaaaaggcttaaattgctaatgtgtgtatatatatatatatatatacacacacatatcattgacttttcttaagacttcagagtactgggtagatgaacactttatacagtatatatcttcagcttaaatttgttttgagtattttttttatttttaaataagtaggcaaagatttaaatttttttatttttagtaaatgtttgaggcacactaagacaacttgggcaatatttgccaaaacaaaacagaaccccaaaaaatgtacatcttgttcttagcaaatatcattattgtagagacacttaataaagagatggtattttaatgtctgcagttctgaggtagggtggaacttagttctacattgtgatttaggaatttttaaaaccttttttcttcaagggagaagtgacccaggcctcgagtttagtgctaaagccgctagtgtacttatgctgtcccctaaccaccacgtgcgatatggaagcagatgctaaatataggggttttcttagaaagtaagaggaaattagcaagcgttattagtgattgactactgctatcaagtgaattcaaaggaaacaggtttttatgccatatttaagttacagaaaccaggcatgcttagaatagtttctagaggttattggagaatagaaagctaagaaaacttggtatacatttacaatggaaatataattacactttttactctcagaatattgttcacattagacttcctgtttatcttttatattcttgcatttatataatgcctcatcctttcaaagttctttcacatattatatgatcttctttatgaaaaaaatagatgtttcattctgatatattcagtttcccactttaggcaaaagtagattaatagaatgacgaattcaaagtagatgaggaaaatcaggcacagagaagtaaaggtagggatagacccaaatttacacaacaagataatgacatctccagcttttaagttgatcatcaaaggctgggctggatttgtcttgctgtatgtgtcaggaaatttatacctattacattttccattttctcaaaatttaagtcacatgactaatatttagctgcaactttcctcataacaaatagtgtcatgaagaatgttgtagtgtgaagtttgtacatttcagggtcagatatacaatatgaactcttaatctacaggaatgagaatggaggatcattgaaggccatgatataaacaaatttgcatgttgaagcctgtataaaacatggtacagtgagtgaatatacccccatccccaagaacactttatacatattaaatggatatatgattactgtgcaaaaattcattctggaaatgaacatatatttgagcactaatatgtaatgtacacctgccctaaggagaaaataaattataaaactttttacattcaaaattactttcccaagcatgtcttagaataatctatgtgttgatgcatgtaaattgtactttaggtaggcaaagaaatctggttatttatgtaaaaactagtctaataaagttagttagtggctttatcactttaaatctttagtgtccaaaagtggtgtttaaagtaatagcacatcagaaaaccttgtctggacaaaactagttcactcactgcttctgcacctgcagttgctccctttagggttataaaataatgacccaaatgttacatgtgttgatattataacttgtcagttactgatgtctgtggtatcctaccctcatctctgaaagggataatactgaataattattagaaaactataaaacttcacactttgtaccattaaaacctaaaattttaatcttgtccttttttactatggatcagtcggcactcgggaacagcagcaaggaaaaaaagcaaatttcattcacatgttctgtgttcatacctcttctctacctaattgttcatttaaatttcagccttattccttgataagggattttaccacatgaagtcatccagtgaccctagctcttattgtgaagttagtggagtatacttagaaatgttacaactttaaaatgttacaaaacattcattaaagctcatatttaaagtagagcatctagtttgagaaatagaaatcaattattaaagatgtcttttttctacccatttaactagttaaaaccatgacatgtaaatgtagaagtagaataatcatagaattccctaaaatatttctgtttactaacatatattgaccaagtacatcaagcaggagagatcttccttcattctgttatagtccacatcattctaattttgctcagttgttattaagagcatattcctaaaccatacacttttgtttcaataaagttttattttgttgagatgaataaaataacaaagttataagctgcataagacaaaagttcaattgttcaaaaaaaatttactgggatagctttctattacaggtattgttagattatattgtgctgataagattactttctaaaaaatttgtacttttctgtaaattaaaagaatatggagtcataaaatggcaagtgttttaggattagcctaaaattggacattgtcattgatttcaaagaaggtatgaactagcagtcttacagcctaattcttctttggactggtccttggcagcagttccttttcagactcgataaacagaattcagatgatgtaagtcaaaacaaaactttacaaagccaagcgtattatcttttgcattaacctatttttttccatcatacatgctactagtatgtgcattagcatgatattctcatatacattgcattaaaaattaaaaggtggcagctcagggtgagctcttctgttgctcatttgttcctaaatttttaagggctttttctcagtcaatagtttgtacaaactggttagtttaacttcattacccatttcattaaagttgatgggtcgtgtgatgagatgcatttaaggccgatagtgatagatgttttttttatttcttgaacacaggctttgtctgaatgatgttcttttatctcttgaacacaagctttgaatgataactacaggttttaagtgctgttacattaataccataatgtgatgtgttagaaacaaagggatatttcaaaggtagatatttgaaaattctctagtctcaatatgtatgtgtattgaatatactctaaaaataaatgtgcaatttgctagtaggacaatgcagtgactgactagcattaggtatgtttcttttatatcctagctatgtcccactttcttctaagtgcaatcctttcatgttcacttgctgttttaccccatctactctaacttcatttggaaggcttgtctagagtatagcatgtatttttacctttgcagtgaattgcatgtgctaattgtaaccacagctatttttatgttgacataactccaaatgttatattaaatgttctattatatattagctctaatcccttaagtaaattttaagaaataaatacttgttcaaattttttttctgtatgtggttactatcatctgactatgcatatttgtaacagcatttatcattagtggtgttagctaaataagcatcttagtgtaaatgagatgcttcgtgtgggttttgtgacattttaaatgacataatggaatgtgatttaaaagaaaaccagtacactatcttggtcttaataacatagaatggagatggcaaatttatccactagttttccagatttactatttaatagctgaggtctgaaatcgtagcatcctccctcctagtggacattaaaaaaaaaaaaaaaaaaaaaaacctacttggttgtcaagagcccaagtatggaggtgctgcgccatcttgtggcctgtctgtgcccaccctgcactctgctggagtctccatccttgttgcagtgagacttgaagttcaagattgatacatggcatcctcctgctacttcttgaggttactaagtagtatatgaaactaatcagtcagcaagtccacctggaaggaaaagaaaatctcaactattaatgtgccttcacattgtgattttgtctaaaaaaatgtagtgagtcaaaaaacccacaagccagccaacagtaactccttcacatatataccagagtttatagaaataacatgtcagctttgggctatgtgctcctttgtttaaaatcttctatttggttatggcttgtataggctcaagcctgatttctttaaggtgtggtggctcatcttatcctaatgtgtatgatagatacagtccatcctgctttggaaaagattatgtaactccttgagagcatactctttctctagcccaaaggcagtgagagagttttcttgttcaggattgcttaactttccatttaagctttttctttttaaattaatacaaacttctacactttcaaaatacgaaatatattacaactgcgtataggctcttccatacttaagtccagtgcttgggcaagttaatggagtgaaagactacaagcaaagaggaactgaggtagaaaaagaagaatgtgtgaaagcagcaggaagctcagccaactcgaaagcagggtgaacagcttgagtcctgttgctgctgatcggggttggctcttggacaacttagtaagatcatggaaaggctgcttgggttctccatagaaaagttctgtctccatcaagggaggaaaatgtacctttcaactcaaaattcaatatttgtttttaaatatagctattttccccaaccgctaaagattttcaacagatacgaagccagagcttagttttagaaacctgtggacattcaaacctgattctttattccctgtgactatggttatgtcattttacatgtcaaaaaagtgtatctagaattgtcatttcttatttttgagctttttttagtgagaattatcccctcacttaaatggctttttatttaaacatctgtgcattctgtatgaaattgtagtctttctgggataacatggtgagctatatggtggtaatccacacac

SEQ ID NO: 73129 - DNA, 2491 bp, Artificial Sequence
  derived and/or modified sequence
atgttgacgttgcagacttggctagtgcaagccttgtttattttcctcaccactgaatctacaggtgaacttctagatccatgtggttatatcagtcctgaatctccagttgtacaacttcattctaatttcactgcagtttgtgtgctaaaggaaaaatgtatggattattttcatgtaaatgctaattacattgtctggaaaacaaaccattttactattcctaaggagcaatatactatcataaacagaacagcatccagtgtcacctttacagatatagcttcattaaatattcagctcacttgcaacattcttacattcggacagcttgaacagaatgtttatggaatcacaataatttcaggcttgcctccagaaaaacctaaaaatttgagttgcattgtgaacgaggggaagaaaatgaggtgtgagtgggatggtggaagggaaacacacttggagacaaacttcactttaaaatctgaatgggcaacacacaagtttgctgattgcaaagcaaaacgtgacacccccacctcatgcactgttgattattctactgtgtattttgtcaacattgaagtctgggtagaagcagagaatgcccttgggaaggttacatcagatcatatcaattttgatcctgtatataaagtgaagcccaatccgccacataatttatcagtgatcaactcagaggaactgtctagtatcttaaaattgacatggaccaacccaagtattaagagtgttataatactaaaatataacattcaatataggaccaaagatgcctcaacttggagccagattcctcctgaagacacagcatccacccgatcttcattcactgtccaagaccttaaaccttttacagaatatgtgtttaggattcgctgtatgaaggaagatggtaagggatactggagtgactggagtgaagaagcaagtgggatcacctatgaagataacattgcctccttttgaagccaatggaaaaatcttggattatgaagtgactctcacaagatggaaatcacatttacaaaattacacagttaatgccacaaaactgacagtaaatctcacaaatgatcgctatctagcaaccctaacagtaagaaatcttgttggcaaatcagatgcagctgttttaactatccctgcctgtgactttcaagggaacttagcagagagcaaatgctatttgataacagttactccagtatatgctgatggaccaggaagccctgaatccataaaggcataccttaaacaagctccaccttccaaaggacctactgttcggacaaaaaaagtagggaaaaacgaagctgtcttagagtgggaccaacttcctgttgatgttcagaatggatttatcagaaattatactatattttatagaaccatcattggaaatgaaactgctgtgaatgtggattcttcccacacagaatatacattgtcctctttgactagtgacacattgtacatggtacgaatggcagcatacacagatgaaggtgggaaggatggtccagaattcacttttactaccccaaagtttgctcaaggagaaattgaagccatagtcgtgcctgtttgcttagcattcctattgacaactcttctgggagtgctgttctgctttaataagcgagacctaattaaaaaacacatctggcctaatgttccagatccttcaaagagtcatattgcccagtggtcacctcacactcctccaaggcacaattttaattcaaaagatcaaatgtattcagatggcaatttcactgatgtaagtgttgtggaaatagaagcaaatgacaaaaagccttttccagaagatctgaaatcattggacctgttcaaaaaggaaaaaattaatactgaaggacacagcagtggtattggggggtcttcatgcatgtcatcttctaggccaagcatttctagcagtgatgaaaatgaatcttcacaaaacacttcgagcactgtccagtattctaccgtggtacacagtggctacagacaccaagttccgtcagtccaagtcttctcaagatccgagtctacccagcccttgttagattcagaggagcggccagaagatctacaattagtagatcatgtagatggcggtgatggtattttgcccaggcaacagtacttcaaacagaactgcagtcagcatgaatccagtccagatatttcacattttgaaaggtcaaagcaagtttcatcagtcaatgaggaagattttgttagacttaaacagcagatttcagatcatatttcacaatcctgtggatctgggcaaatgaaaatgtttcaggaagtttctgcagcagatgcttttggtccaggtactgagggacaagtagaaagatttgaaacagttggcatggaggctgcgactgatgaaggcatgcctaaaagttacttaccacagactgtacggcaaggcggctacatgcctcagtga

SEQ ID NO: 73130 - DNA, 2574 bp, Artificial Sequence
  derived and/or modified sequence
atgctgaccctgcagacctggctggtgcaggccctcttcatcttcctgaccacagagagcactggagagctgctggacccctgtggctacatcagccctgagagccctgtggtgcagctgcacagcaacttcaccgctgtgtgtgtgctgaaggagaagtgcatggactacttccacgtgaatgccaactacatcgtgtggaagaccaaccacttcaccatccccaaggagcagtacaccatcatcaacagaacagccagctctgtgaccttcacagacatcgccagcctgaacatccagctgacctgcaacatcctgaccttcggccagctggagcagaatgtgtatggcatcaccatcatcagcggcctgcccccagagaagcccaagaacctgagctgcatcgtgaatgaaggcaagaagatgagatgtgagtgggatggcggccgggagacccacctggagaccaacttcaccctgaagtctgagtgggccacccacaagtttgctgactgcaaggccaagagggacacccccaccagctgcaccgtggactacagcacagtgtactttgtgaacatcgaggtgtgggtggaggctgaaaatgccctgggcaaggtgaccagtgaccacatcaactttgatcctgtgtacaaggtgaagcccaaccccccccacaacctgagcgtcatcaacagcgaggagctgagcagcatcctgaagctgacctggaccaaccccagcatcaagagcgtcatcatcctgaagtacaacatccagtaccgcaccaaggatgccagcacctggagccagatccccccagaggacacagccagcaccaggagcagcttcaccgtgcaggacctgaagcccttcacagaatatgtgttccgcatccgctgcatgaaggaggatggcaagggctactggagcgactggagcgaggaggccagcggcatcacctatgaagatcggcccagcaaggcccccagcttctggtacaagattgaccccagccacacccagggctacagaacagtgcagctggtgtggaagaccctgcccccatttgaggccaacgggaagatcctggactatgaggtgaccctgacccgctggaagagccacctgcagaactacacagtgaatgccaccaagctgactgtgaacctgaccaatgaccgctacctggccaccctgactgtgaggaacctggtgggcaagagtgatgctgctgtgctgaccatcccagcctgtgacttccagggcaacctggccgagagcaagtgctacctgatcaccgtgacccctgtgtatgcagatggccctggcagccctgagagcatcaaggcctacctgaagcaggccccacccagcaagggccccaccgtgaggaccaagaaggtgggcaagaatgaggccgtgctggagtgggaccagctgcctgtggatgtgcagaatggcttcatccggaactacaccatcttctaccgcaccatcattggaaatgaaacagctgtgaatgtggacagcagccacacagagtacaccctgagcagcctgaccagtgacaccctgtacatggtgaggatggccgcctacacagatgagggcggcaaggatggccctgagttcaccttcaccacccccaagtttgcccagggcgagattgaggccatcgtggtgcctgtgtgcctggccttcctgctgaccaccctgctgggcgtgctcttctgcttcaacaagagggacctgatcaagaagcacatctggcccaacgtgcctgaccccagcaagagccacatcgcccagtggagcccccacaccccacccaggcacaacttcaacagcaaggaccagatgtacagtgatggcaacttcacagatgtgtctgtggtggagattgaggccaatgacaagaagcccttccctgaggacctgaagagcctggacctcttcaagaaggagaagatcaacacagagggccacagcagcggcattggaggcagcagctgcatgagcagcagccggcccagcatcagcagcagtgatgaaaatgaaagcagccagaacaccagcagcacagtgcagtacagcacagtggtgcacagcggctaccgccaccaggtgcccagcgtgcaggtgttcagccgctctgagagcacccagcccctgctggacagcgaggagaggcctgaggacctgcagctggtggaccacgtggatggaggagatggcatcctgccccggcagcagtacttcaagcagaactgcagccagcacgagagcagcccagacatcagccactttgagaggagcaagcaggtgtcctctgtgaatgaggaggactttgtgcggctgaagcagcagatcagtgaccacatcagccagagctgtggcagcggccagatgaagatgttccaggaggtgtctgctgctgatgccttcggccctggaacagagggccaggtggagagatttgaaacagtgggcatggaggccgccacagatgagggcatgcccaagagctacctgccccagacagtgcggcagggcggctacatgccccagtag

SEQ ID NO: 73131 - DNA, 2574 bp, Artificial Sequence
  derived and/or modified sequence
atgctgaccctgcagacctggctggtgcaggccctgttcatcttcctgactaccgaaagtacaggagagctgctggacccttgtgggtatatttctccagagtctcctgttgtccagttgcactctaattttacagctgtgtgtgtattaaaggagaagtgtatggattactttcacgtcaacgcaaactacattgtgtggaaaacaaatcattttaccattccaaaggagcagtatactatcattaatagaaccgccagctctgttacttttacggatatagcctctctgaatatccagttgacttgcaacatcctgacattcggccagctggaacagaatgtctacggtattacaatcattagcgggctgccacccgagaagccaaagaacctgagttgtatcgtaaacgaagggaaaaagatgcggtgcgaatgggatggcggacgggagacccacttggaaacaaactttacgctgaaaagcgagtgggcgactcacaaatttgcagactgtaaagccaaacgggatacacctaccagctgtacggttgattatagcaccgtttactttgtgaacatcgaggtgtgggtcgaagccgagaatgctctgggaaaggtgacatccgaccatatcaattttgaccctgtttataaagtgaagcccaaccctccacacaatctctctgttatcaacagtgaagagctttcctcaattttaaagcttacatggaccaatcccagtattaagtccgtgattatcctcaaatataacatccagtacaggactaaggatgctagcacatggagccagatccctcccgaggataccgcaagtacacgtagctcatttaccgtgcaggacctgaagccgttcactgagtacgtgtttcgaataagatgcatgaaagaggatggcaagggatattggtccgactggagcgaagaggcctcaggcattacatatgaggataggccttcgaaggcgcctagtttttggtacaaaatcgacccatcacatacccaggggtacagaacagtgcagttggtgtggaaaactctccccccttttgaggcgaacggaaaaattttggattatgaggtgactcttactaggtggaaatcgcatctgcagaactacaccgtaaatgcgaccaaactgactgttaacctgacaaatgatcgctacctagctacactgactgtgagaaacctggtcgggaagagcgatgctgccgtcttgaccataccagcttgcgacttccagggtaatttggcagaaagtaagtgttacttgattactgtgactcccgtatatgcagatggtcctggatctccagaaagcattaaggcctacttgaaacaagcacccccttctaaggggccaacagtaagaaccaaaaaagtcggcaagaatgaggctgtgctggagtgggatcagctgccagtcgacgtgcagaacggatttataagaaattataccatattctaccgcacgattatagggaacgagacagctgtgaatgttgacagttcgcatactgaatatacactgagctctctcacgagtgataccctgtatatggtcaggatggctgcttatacagatgaaggaggcaaggatgggcccgagtttacattcacgactcctaagttcgctcaaggggaaatcgaggccatcgtggtccccgtatgcttggcctttctcctgactactctgctgggagtgcttttttgctttaataaacgggacctgatcaaaaaacatatttggcccaacgtgccagatccctcgaagtctcatatagctcagtggtctccccatactccaccgcgacacaactttaatagcaaggatcaaatgtactcagatgggaatttcactgatgtgagcgtcgttgagatcgaggcaaatgataaaaagcccttccctgaagacctaaagtccctagatttattcaagaaagagaagatcaacaccgagggccattcgtcgggaataggcggctcttcttgcatgagttcttcccgcccatcaatttcaagctctgatgaaaatgagtcctcacagaacacatcctccactgtgcaatatagcaccgtagtccattcagggtatcggcaccaggtcccatccgtgcaggtgtttagtcggtccgagagcacacagcctttactcgacagcgaggaacggccagaggacctccaactcgtcgaccatgtggacggcggcgatggcatcctcccgcgacaacagtactttaagcagaactgctctcagcatgagagttctccagatatcagccacttcgagagatccaaacaggtctccagtgtcaacgaagaagacttcgtgcggctgaaacagcaaatctcagatcacatctctcagtcatgtggctccgggcagatgaaaatgttccaggaggttagcgccgccgacgctttcggtcctgggaccgagggccaggtggaaagattcgagaccgtgggaatggaagccgctaccgacgagggcatgcccaagagctatctaccgcagactgtgcgccagggggggtacatgccgcagtag

SEQ ID NO: 73132 - DNA, 2574 bp, Artificial Sequence
  derived and/or modified sequence
atgttgacattgcaaacctggctggttcaggctctgtttatcttcctgacaacagagtcaactggcgaattattggacccatgtggctacatctctccagaatcaccagtggtacagcttcactccaactttacagccgtctgcgtactaaaggaaaaatgtatggactattttcatgtgaatgctaactacatcgtctggaaaaccaaccacttcaccatcccaaaagaacagtatacaataatcaaccgcacagctagttctgtgaccttcacggacatcgcttcgctgaatatacagcttacctgtaatatactcacattcggtcagctcgagcagaacgtgtacggcatcaccatcatctcaggattacccccagagaagcccaagaacctcagttgcatcgtgaatgagggaaaaaagatgcgctgtgaatgggacggcggaagggagactcatttagagactaattttaccctgaaaagtgagtgggctactcataagttcgccgattgtaaggcaaagcgggatactccaacctcctgtacagtggactattctactgtgtatttcgtgaacatcgaagtttgggttgaagctgagaatgctcttgggaaggtgacatcggatcacatcaattttgaccctgtatacaaagtgaaacctaacccacctcacaacttgtccgtgattaactcagaggaactctcatcaattctcaagctaacctggacgaatccatctatcaaatcggtgataatcctgaagtacaacattcagtacaggactaaggatgcaagtacatggagccaaataccaccagaagatacagccagcaccaggagttcatttacggtgcaagatctgaaaccgtttactgagtatgtcttccgtatccgctgcatgaaagaagatggtaaagggtactggtccgattggtctgaggaagcgtccggcatcacatatgaggaccgtccctctaaagcaccttcgttctggtacaaaattgacccatcccacacacagggatatagaacagtgcagctcgtctggaaaacactcccacccttcgaggctaacggaaagatactggattatgaggtgaccttgacaagatggaagagtcacttgcagaattacactgttaacgccacaaaactaaccgtgaatctcaccaacgatcggtacctagctaccttaacagtgcgtaacctcgttggaaaaagtgatgccgcagtccttacaatacccgcttgtgatttccagggtaatctggctgagtccaagtgctatcttattaccgtgacccctgtgtacgcagacgggccagggtcacctgagtcaattaaagcctacctgaaacaggcacccccatctaagggtccaactgtcagaactaagaaagtgggaaagaacgaggccgttctggagtgggaccagctgcctgtcgatgtccaaaacgggtttatccgcaactatactatcttctacaggactattattgggaacgaaacagcagttaatgtggactcatcacacacagagtatactttaagtagcctgacaagcgacactctgtacatggtaagaatggccgcatacactgacgagggaggtaaggacggacccgagtttactttcaccacacctaagttcgcccaaggcgagatcgaggctattgtcgtaccagtgtgtctcgcttttcttttgacaacactgctgggggtgctcttttgctttaataagcgggatcttatcaagaagcacatttggcctaatgttcccgatccgagcaaatcccacatcgcccagtggtcccctcatacgccaccacggcataatttcaactccaaagatcagatgtatagcgacggaaacttcacagacgtcagtgtcgttgaaatcgaagctaacgacaagaagccatttcctgaggatttgaaatccttggacctgttcaagaaggagaagatcaacaccgagggacacagttctggcattgggggatcatcttgcatgagcagttcacggccatccataagcagttctgacgagaatgaaagtagccaaaacacttcttcaaccgtccaatattccactgtcgtacattccggttataggcatcaagtgccgtcagtgcaggtgttcagtcgcagcgaatctacccagccactattggactccgaagagcgcccagaggacctgcagctggtggatcacgtggacggcggtgacggtatcctgcccaggcagcagtattttaagcagaattgctcccagcacgagtcttcaccggatatcagccattttgagcgatccaagcaggtctcttctgtgaatgaagaggatttcgtaagactaaaacagcagatttctgatcacatcagccaaagttgcggctctggccagatgaaaatgttccaagaggtgagcgctgccgatgcgtttggacctgggacagaaggtcaggtggagagatttgagaccgtcggcatggaagccgctactgatgagggaatgccaaagtcatatctaccacagactgtgagacagggcggatatatgccccagtag

SEQ ID NO: 73133 - DNA, 2574 bp, Artificial Sequence
  derived and/or modified sequence
atgctgaccctgcagacctggctggtgcaggccctgttcatcttcctgaccaccgagagcaccggcgagctgctggacccctgcggctacatcagccccgagagccccgtggtgcagctgcacagcaacttcaccgccgtgtgcgtgctgaaggagaagtgcatggactacttccacgtgaacgccaactacatcgtgtggaagaccaaccacttcaccatccccaaggagcagtacaccatcatcaacagaaccgccagcagcgtgaccttcaccgacatcgccagcctgaacatccagctgacctgcaacatcctgaccttcggccagctggagcagaacgtgtacggcatcaccatcatcagcggcctgccccccgagaagcccaagaacctgagctgcatcgtgaacgagggcaagaagatgagatgcgagtgggacggcggcagagagacccacctggagaccaacttcaccctgaagagcgagtgggccacccacaagttcgccgactgcaaggccaagagagacacccccaccagctgcaccgtggactacagcaccgtgtacttcgtgaacatcgaggtgtgggtggaggccgagaacgccctgggcaaggtgaccagcgaccacatcaacttcgaccccgtgtacaaggtgaagcccaaccccccccacaacctgagcgtgatcaacagcgaggagctgagcagcatcctgaagctgacctggaccaaccccagcatcaagagcgtgatcatcctgaagtacaacatccagtacagaaccaaggacgccagcacctggagccagatcccccccgaggacaccgccagcaccagaagcagcttcaccgtgcaggacctgaagcccttcaccgagtacgtgttcagaatcagatgcatgaaggaggacggcaagggctactggagcgactggagcgaggaggccagcggcatcacctacgaggacagacccagcaaggcccccagcttctggtacaagatcgaccccagccacacccagggctacagaaccgtgcagctggtgtggaagaccctgccccccttcgaggccaacggcaagatcctggactacgaggtgaccctgaccagatggaagagccacctgcagaactacaccgtgaacgccaccaagctgaccgtgaacctgaccaacgacagatacctggccaccctgaccgtgagaaacctggtgggcaagagcgacgccgccgtgctgaccatccccgcctgcgacttccagggcaacctggccgagagcaagtgctacctgatcaccgtgacccccgtgtacgccgacggccccggcagccccgagagcatcaaggcctacctgaagcaggccccccccagcaagggccccaccgtgagaaccaagaaggtgggcaagaacgaggccgtgctggagtgggaccagctgcccgtggacgtgcagaacggcttcatcagaaactacaccatcttctacagaaccatcatcggcaacgagaccgccgtgaacgtggacagcagccacaccgagtacaccctgagcagcctgaccagcgacaccctgtacatggtgagaatggccgcctacaccgacgagggcggcaaggacggccccgagttcaccttcaccacccccaagttcgcccagggcgagatcgaggccatcgtggtgcccgtgtgcctggccttcctgctgaccaccctgctgggcgtgctgttctgcttcaacaagagagacctgatcaagaagcacatctggcccaacgtgcccgaccccagcaagagccacatcgcccagtggagcccccacaccccccccagacacaacttcaacagcaaggaccagatgtacagcgacggcaacttcaccgacgtgagcgtggtggagatcgaggccaacgacaagaagcccttccccgaggacctgaagagcctggacctgttcaagaaggagaagatcaacaccgagggccacagcagcggcatcggcggcagcagctgcatgagcagcagcagacccagcatcagcagcagcgacgagaacgagagcagccagaacaccagcagcaccgtgcagtacagcaccgtggtgcacagcggctacagacaccaggtgcccagcgtgcaggtgttcagcagaagcgagagcacccagcccctgctggacagcgaggagagacccgaggacctgcagctggtggaccacgtggacggcggcgacggcatcctgcccagacagcagtacttcaagcagaactgcagccagcacgagagcagccccgacatcagccacttcgagagaagcaagcaggtgagcagcgtgaacgaggaggacttcgtgagactgaagcagcagatcagcgaccacatcagccagagctgcggcagcggccagatgaagatgttccaggaggtgagcgccgccgacgccttcggccccggcaccgagggccaggtggagagattcgagaccgtgggcatggaggccgccaccgacgagggcatgcccaagagctacctgccccagaccgtgagacagggcggctacatgccccagtag

SEQ ID NO: 73134 - DNA, 540 bp, Artificial Sequence
  derived and/or modified sequence
atgactctggataatatcagcagagccgccgtggatagaattatccgagtggaccacgctggggagtacggcgcgaaccgcatatatgccggacaaatggccgtgctcggccgcacgtcggtcggacctgtgattcagaagatgtgggatcaagaaaaggaccatcttaagaagtttaatgagctgatggtcacatttcgggtccggcccaccgtcttaatgcctctttggaacgttctcggctttgcgctgggcgctggaaccgcgctattgggaaaagagggtgcaatggcctgcaccgttgcggttgaagagtcaatcgctcaccattacaataatcagattcggacgcttatggaggaggaccccgagaaatatgaagagttactgcagctcatcaaaaagttcagagacgaggagctggagcatcacgatataggcctcgatcacgatgcagagctagcacctgcgtatgcagttcttaaatcaatcattcaagcgggctgtcgggtggccatctacctttccgagcgactgtag

SEQ ID NO: 73135 - DNA, 540 bp, Artificial Sequence
  derived and/or modified sequence
atgaccctggacaacatcagcagagctgctgtggaccgcatcatccgggtggaccacgccggggagtatggagccaaccgcatctatgccggccagatggctgtgctgggccgcacctctgtgggccctgtgatccagaagatgtgggaccaggagaaggaccacctgaagaagttcaatgagctgatggtgaccttccgggtgcggcccaccgtgctgatgcccctgtggaatgtgctgggctttgccctgggcgccggcacagccctgctgggcaaggagggcgccatggcctgcaccgtggccgtggaggagagcatcgcccaccactacaacaaccagatccgcaccctgatggaggaggaccctgagaagtatgaggagctgctgcagctgatcaagaagttcagagatgaggagctggagcaccacgacatcggcctggaccatgatgctgagctggccccagcctatgctgtgctgaagagcatcatccaggccggctgccgggtggccatctacctgtctgagcggctgtag

SEQ ID NO: 73136 - DNA, 540 bp, Artificial Sequence
  derived and/or modified sequence
atgaccctggacaacatcagccgggccgccgtggaccggatcatcagagtggatcacgcgggtgaatatggcgctaatcggatctatgcgggtcagatggcggtgcttggccgcacaagcgtgggtcctgtaattcagaagatgtgggaccaggaaaaggatcatttgaaaaaattcaatgagctgatggttacctttcgggtgcgcccaaccgtgctgatgcctctgtggaatgttctcggcttcgccctgggcgccggcacggcgttgctagggaaggaaggtgccatggcctgcacggtcgccgtagaggaatccattgcccatcattacaacaatcaaatccgaacactgatggaagaagatcctgagaaatacgaagaactccttcagctaatcaagaagtttcgagatgaagaactagaacatcatgatataggactagatcacgacgccgagctcgcccctgcttacgcggtgctgaagtcaattatccaggcaggatgtagggtcgccatttatctcagcgaaaggctgtag

SEQ ID NO: 73137 - DNA, 540 bp, Artificial Sequence
  derived and/or modified sequence
atgacactcgacaacattagtagagccgctgtcgaccgaataattcgggttgaccacgctggcgaatacggtgcaaataggatctatgccggtcagatggcggtgctcgggagaacatccgtgggccctgtgatacaaaaaatgtgggatcaggagaaggatcacctcaagaagttcaatgaactcatggtaaccttcagagtgagacccacagtccttatgcctctctggaacgtccttggattcgcgcttggggctggaacagctcttctgggtaaagaaggggcaatggcctgcacggtcgcagtcgaagaaagcattgcccaccactacaacaatcagattaggactctgatggaagaagatcccgagaagtatgaagaactgttacagttgataaaaaagttccgcgacgaagaattggagcaccacgacatcggactggatcacgatgcagaactagcacctgcttacgccgtcctgaaaagcattatccaggccggatgtagggtcgctatctacctttctgagaggctttag

SEQ ID NO: 73138 - DNA, 540 bp, Artificial Sequence
  derived and/or modified sequence
atgaccctggacaacatcagcagagccgccgtggacagaatcatcagagtggaccacgccggcgagtacggcgccaacagaatctacgccggccagatggccgtgctgggcagaaccagcgtgggccccgtgatccagaagatgtgggaccaggagaaggaccacctgaagaagttcaacgagctgatggtgaccttcagagtgagacccaccgtgctgatgcccctgtggaacgtgctgggcttcgccctgggcgccggcaccgccctgctgggcaaggagggcgccatggcctgcaccgtggccgtggaggagagcatcgcccaccactacaacaaccagatcagaaccctgatggaggaggaccccgagaagtacgaggagctgctgcagctgatcaagaagttcagagacgaggagctggagcaccacgacatcggcctggaccacgacgccgagctggcccccgcctacgccgtgctgaagagcatcatccaggccggctgcagagtggccatctacctgagcgagagactgtag

SEQ ID NO: 73139 - protein, 276 aa, Artificial Sequence
  derived and/or modified sequence
MKQILHPALETTACTNHFNADPCSTGFVFPAMTLFPVLLFLVAGLLPSFPANEDKDPAFTALLTTQTQVQREIVNKHNELRRAVSPPARNMLKMEWNKEAAANAQKWANQCNYRHSNPKDRMTSLKCGENLYMSSASSSWSQAIQSWFDEYNDFDFGVGPKTPNAVVGHYTQVVWYSSYLVGCGNAYCPNQKVLKYYYVCQYCPAGNWANRLYVPYEQGAPCASCPDNCDDGLCTNGCKYEDLYSNCKSLKLTLTCKHQLVRDSCKASCNCSNSIY

SEQ ID NO: 73140 - protein, 268 aa, Artificial Sequence
  derived and/or modified sequence
MKQILHPALETTDPCSTGFVFPAMTLFPVLLFLVAGLLPSFPANEDKDPAFTALLTTQTQVQREIVNKHNELRRAVSPPARNMLKMEWNKEAAANAQKWANQCNYRHSNPKDRMTSLKCGENLYMSSASSSWSQAIQSWFDEYNDFDFGVGPKTPNAVVGHYTQVVWYSSYLVGCGNAYCPNQKVLKYYYVCQYCPAGNWANRLYVPYEQGAPCASCPDNCDDGLCTNGCKYEDLYSNCKSLKLTLTCKHQLVRDSCKASCNCSNSIY

SEQ ID NO: 73141 - DNA, 831 bp, Artificial Sequence
  derived and/or modified sequence
atgaagcagattctccatccagcattagagacaacagcttgtaccaatcacttcaatgcagatccatgctccaccggatttgtcttcccagctatgacccttttccctgtgctgctttttctcgtggctgggctgttaccaagcttccccgctaacgaagacaaggatcccgcattcacggcgttgttgactacgcaaacccaagttcagcgcgagatcgttaataagcacaacgagctgcggagggccgtatctccccctgccagaaacatgcttaaaatggagtggaataaagaagccgcagctaatgcacagaaatgggctaaccagtgcaactataggcacagtaatcctaaggaccgcatgactagcctcaaatgtggagagaatttgtatatgtcaagcgcatcttcctcctggagtcaggctattcagtcctggtttgacgaatacaatgactttgactttggggtaggtcctaagactcccaatgcagttgtgggccactatactcaagtggtatggtacagcagctacctggttggctgtggtaacgcctactgccccaatcagaaggtgctaaagtattactatgtctgccagtactgcccggcagggaactgggctaacaggctgtatgtcccatatgaacagggagctccttgcgcctcctgtccagacaattgcgacgacggactgtgcaccaacgggtgcaagtatgaggatctgtactcaaactgcaagtcactaaaattgacccttacctgcaaacatcaactcgtgagagactcctgtaaggcgtcctgtaattgttcaaatagcatctactag

SEQ ID NO: 73142 - DNA, 807 bp, Artificial Sequence
  derived and/or modified sequence
atgaagcagatcctgcatccagcactcgagacgacagacccgtgctccaccggatttgtgttccccgctatgacgttatttccagtactgttgtttttggttgcgggactgctgccctccttccccgcaaatgaggataaagatccggctttcactgccctgttgacaacccagacgcaggtgcaaagggaaatcgtgaacaaacacaacgagctgagacgggctgtctcccccccagccagaaacatgttgaaaatggaatggaataaggaagctgccgctaatgcgcagaaatgggccaaccagtgtaattatcgccattcgaacccaaaagaccgcatgaccagtctgaaatgtggtgaaaacctctacatgtcctctgcctcctcaagctggtctcaggctatccagtcctggttcgacgaatataacgatttcgactttggagtgggcccaaaaacccccaacgcggtagttggacactacacacaagtagtctggtacagctcttatctggtgggctgcggcaacgcttattgccccaaccaaaaagtgctgaaatactattatgtttgtcagtactgtcccgcagggaactgggccaaccggctgtacgtgccctatgagcagggtgctccatgcgcgagctgccccgataattgcgacgatggactgtgcactaatggatgcaaatatgaggatctctactcgaactgtaagtctttgaagctgacgctcacttgcaagcaccagctcgtgagagatagttgcaaggcgagttgcaactgtagtaatagtatttattag

SEQ ID NO: 73143 - DNA, 831 bp, Artificial Sequence
  derived and/or modified sequence
atgaaacagattctgcacccggctctagaaactacagcttgtaccaaccatttcaatgctgatccctgttcaaccggctttgtgtttcctgctatgacactgtttcctgtactgctttttcttgtggcaggccttctcccgtcctttcccgcaaatgaggataaagatcctgcctttactgctctactaactacgcaaacacaagtgcaacgagaaattgttaataaacacaacgagttgcgcagggcagtttctccaccagcacgcaatatgttaaagatggagtggaacaaggaagccgctgcgaatgctcaaaaatgggctaaccagtgtaactacagacattctaaccccaaagacagaatgaccagcctaaaatgtggagagaatctgtacatgtcatccgccagtagcagctggtctcaggccatccagtcctggttcgatgaatacaacgatttcgacttcggcgtggggccgaagactccaaatgcggtagtgggtcactatacacaagtggtttggtatagctcttacctggtgggctgcgggaatgcttactgccccaatcagaaagtcctgaaatactattacgtttgccagtactgtcctgcagggaattgggccaacagactctatgttccctatgaacagggcgctccctgcgcaagttgccctgacaactgtgacgatggactgtgcaccaatggatgcaaatacgaagatctttatagcaattgcaagagcctgaaactcactctcacatgcaaacaccagcttgtgcgcgactcctgtaaagcgtcatgtaactgcagcaattctatttattag

SEQ ID NO: 73144 - DNA, 2205 bp, Artificial Sequence
  derived and/or modified sequence
aaaacaggaaataggtgtttcatatatacggctctaaccttctctctctgcaccttccttctgtcaatagatgaaacaaatacttcatcctgctctggaaaccactgatccctgttccaccggttttgttttcccagcaatgacattattcccagtgctgttgttcctggttgctgggctgcttccatcttttccagcaaatgaagataaggatcccgcttttactgctttgttaaccacccaaacacaagtgcaaagggagattgtgaataagcacaatgaactgaggagagcagtatctccccctgccagaaacatgctgaagatggaatggaacaaagaggctgcagcaaatgcccaaaagtgggcaaaccagtgcaattacagacacagtaacccaaaggatcgaatgacaagtctaaaatgtggtgagaatctctacatgtcaagtgcctccagctcatggtcacaagcaatccaaagctggtttgatgagtacaatgattttgactttggtgtagggccaaagactcccaacgcagtggttggacattatacacaggttgtttggtactcttcatacctcgttggatgtggaaatgcctactgtcccaatcaaaaagttctaaaatactactatgtttgccaatattgtcctgctggtaattgggctaatagactatatgtcccttatgaacaaggagcaccttgtgccagttgcccagataactgtgacgatggactatgcaccaatggttgcaagtacgaagatctctatagtaactgtaaaagtttgaagctcacattaacctgtaaacatcagttggtcagggacagttgcaaggcctcctgcaattgttcaaacagcatttattaaatacgcattacacaccgagtagggctatgtagagaggagtcagattatctacttagatttggcatctacttagatttaacatatactagctgagaaattgtaggcatgtttgatacacatttgatttcaaatgtttttcttctggatctgctttttattttacaaaaatatttttcatacaaatggttaaaaagaaacaaaatctataacaacaactttggatttttatatataaactttgtgatttaaatttactgaatttaattagggtgaaaattttgaaagttgtattctcatatgactaagttcactaaaaccctggattgaaagtgaaaattatgttcctagaacaaaatgtacaaaaagaacaatataattttcacatgaacccttggctgtagttgcctttcctagctccactctaaggctaagcatcttcaaagacgttttcccatatgctgtcttaattcttttcactcattcacccttcttcccaatcatctggctggcatcctcacaattgagttgaagctgttcctcctaaaacaatcctgacttttattttgccaaaatcaatacaatcctttgaattttttatctgcataaattttacagtagaatatgatcaaaccttcatttttaaacctctcttctctttgacaaaacttccttaaaaaagaatacaagataatataggtaaataccctccactcaaggaggtagaactcagtcctctcccttgtgagtcttcactaaaatcagtgactcacttccaaagagtggagtatggaaagggaaacatagtaactttacaggggagaaaaatgacaaatgacgtcttcaccaagtgatcaaaattaacgtcaccagtgataagtcattcagatttgttctagataatctttctaaaaattcataatcccaatctaattatgagctaaaacatccagcaaactcaagttgaaggacattctacaaaatatccctggggtattttagagtattcctcaaaactgtaaaaatcatggaaaataagggaatcctgagaaacaatcacagaccacatgagactaaggagacatgtgagccaaatgcaatgtgcttcttggatcagatcctggaacagaaaaagatcagtaatgaaaaaactgatgaagtctgaatagaatctggagtatttttaacagtagtgttgatttcttaatcttgataaatatagcagggtaatgtaagatgataacgttagagaaactgaaactgggtgagggctatctaggaattctctgtactatcttaccaaattttcggtaagtctaagaaagcaatgc

SEQ ID NO: 73145 - DNA, 807 bp, Artificial Sequence
  derived and/or modified sequence
atgaaacagatactccacccagccttggagacgaccgacccatgctcaactgggttcgtctttcccgctatgaccctttttcctgttttgctttttcttgtcgctgggctgctgccttcctttccggctaacgaagataaggatcccgccttcaccgccctgctgaccacccagacgcaagtccagagggagatcgtcaacaaacataacgaactgcggcgtgctgtgtcaccaccggcgaggaacatgttgaagatggaatggaacaaagaggctgctgccaacgctcagaagtgggccaatcagtgtaactacagacatagcaaccctaaagaccgcatgacctctctaaagtgcggggagaatctttatatgtcgagcgccagtagtagctggtcgcaggctatccagtcttggtttgatgaatacaacgatttcgattttggagtgggcccgaagacaccgaacgcagtagttggccattacactcaggtcgtgtggtatagctcttacttggtcggctgtggaaatgcctattgtcccaaccagaaggttctgaagtactactatgtttgccaatactgcccagccgggaactgggccaacaggctgtacgtgccctatgaacagggagcaccatgtgctagttgccctgacaattgcgacgacggactgtgtactaatggctgtaaatacgaagacctgtattcgaattgcaaaagtctcaagctgaccttaacctgtaaacaccagttggttcgtgacagctgcaaggcatcttgtaactgcagcaactcaatatattag

SEQ ID NO: 73146 - DNA, 831 bp, Artificial Sequence
  derived and/or modified sequence
atgaagcaaatactacacccagcactcgagaccacagcttgcaccaatcactttaacgcggacccttgctccacaggcttcgtcttcccagctatgacactgttccctgtgctgttattcctagtggctggactcctgccttcttttcccgccaacgaagacaaagaccctgccttcaccgccctgctgactactcagacgcaggtgcagagagagatcgttaacaaacacaatgaacttcgtcgggccgtttctccacccgccaggaacatgctcaagatggaatggaataaagaggcagctgcaaatgctcagaaatgggccaatcagtgtaattacagacattctaatccaaaggacaggatgacatccctgaagtgcggtgagaatttatatatgagttcagcctcatcctcatggtcacaagcaattcagtcctggttcgacgaatataatgatttcgatttcggagtcggaccaaaaacccctaatgccgtggtgggacactatacccaggttgtgtggtactcatcttatcttgtcggctgtgggaatgcttactgcccaaatcaaaaggtgctgaagtactattacgtgtgccagtattgtccagcaggcaattgggctaatagactatatgtaccctacgaacagggcgcaccatgcgcctcctgtccagataattgtgatgatggcttgtgcacgaacggatgcaaatacgaggacctgtattctaactgtaaaagtttgaagctgaccctgacatgcaaacatcaacttgtaagagactcttgcaaagcctcctgtaattgcagcaattcaatttactag

SEQ ID NO: 73147 - DNA, 807 bp, Artificial Sequence
  derived and/or modified sequence
atgaagcaaattctacaccccgcattggagaccacagatccttgttcgaccggcttcgtttttcccgccatgacacttttcccagttctattattcctcgtggctggcttgctcccatcttttcctgcaaatgaagacaaagaccccgcattcaccgccctgctcaccacacagactcaggtgcagagggaaatcgtgaataaacataatgagttgcgacgcgccgtatcccctcctgctcgcaatatgctgaaaatggaatggaataaggaagctgctgccaatgcacagaaatgggctaaccaatgcaactatagacacagtaaccctaaagatcgcatgacgtctctgaagtgtggagagaatctgtacatgtcctctgccagcagttcttggtcccaggctattcaatcttggttcgacgagtacaacgattttgatttcggggtggggccgaagacccctaatgctgtggtcgggcattacactcaggttgtttggtattcctcatacctcgttggatgcggaaacgcttactgcccaaatcagaaggtgcttaagtattactatgtatgtcagtattgtcccgccggaaactgggctaaccgtctgtatgttccttacgaacaaggagccccatgcgcatcttgccctgacaactgtgacgacggcctatgcaccaatggctgtaaatatgaagatctatactcaaattgtaagtcccttaaactaactctgacatgtaagcatcagctggtcagagactcctgcaaagcatcctgtaactgcagtaattccatttactag

SEQ ID NO: 73148 - DNA, 831 bp, Artificial Sequence
  derived and/or modified sequence
atgaagcagatcctgcaccccgccctggagaccaccgcctgcaccaaccacttcaacgccgacccctgcagcaccggcttcgtgttccccgccatgaccctgttccccgtgctgctgttcctggtggccggcctgctgcccagcttccccgccaacgaggacaaggaccccgccttcaccgccctgctgaccacccagacccaggtgcagagagagatcgtgaacaagcacaacgagctgagaagagccgtgagcccccccgccagaaacatgctgaagatggagtggaacaaggaggccgccgccaacgcccagaagtgggccaaccagtgcaactacagacacagcaaccccaaggacagaatgaccagcctgaagtgcggcgagaacctgtacatgagcagcgccagcagcagctggagccaggccatccagagctggttcgacgagtacaacgacttcgacttcggcgtgggccccaagacccccaacgccgtggtgggccactacacccaggtggtgtggtacagcagctacctggtgggctgcggcaacgcctactgccccaaccagaaggtgctgaagtactactacgtgtgccagtactgccccgccggcaactgggccaacagactgtacgtgccctacgagcagggcgccccctgcgccagctgccccgacaactgcgacgacggcctgtgcaccaacggctgcaagtacgaggacctgtacagcaactgcaagagcctgaagctgaccctgacctgcaagcaccagctggtgagagacagctgcaaggccagctgcaactgcagcaacagcatctactag

SEQ ID NO: 73149 - DNA, 807 bp, Artificial Sequence
  derived and/or modified sequence
atgaagcagatcctgcaccccgccctggagaccaccgacccctgcagcaccggcttcgtgttccccgccatgaccctgttccccgtgctgctgttcctggtggccggcctgctgcccagcttccccgccaacgaggacaaggaccccgccttcaccgccctgctgaccacccagacccaggtgcagagagagatcgtgaacaagcacaacgagctgagaagagccgtgagcccccccgccagaaacatgctgaagatggagtggaacaaggaggccgccgccaacgcccagaagtgggccaaccagtgcaactacagacacagcaaccccaaggacagaatgaccagcctgaagtgcggcgagaacctgtacatgagcagcgccagcagcagctggagccaggccatccagagctggttcgacgagtacaacgacttcgacttcggcgtgggccccaagacccccaacgccgtggtgggccactacacccaggtggtgtggtacagcagctacctggtgggctgcggcaacgcctactgccccaaccagaaggtgctgaagtactactacgtgtgccagtactgccccgccggcaactgggccaacagactgtacgtgccctacgagcagggcgccccctgcgccagctgccccgacaactgcgacgacggcctgtgcaccaacggctgcaagtacgaggacctgtacagcaactgcaagagcctgaagctgaccctgacctgcaagcaccagctggtgagagacagctgcaaggccagctgcaactgcagcaacagcatctactag

SEQ ID NO: 73150 - DNA, 831 bp, Artificial Sequence
  derived and/or modified sequence
atgaaacagatccttcatcctgccctggagaccaccgcttgtaccaaccactttaacgccgatccctgctccaccggcttcgtgttcccagccatgaccctgttcccagttttgctgttcctcgtggctgggctgctgccttctttccctgctaacgaagataaagatcctgcctttactgctttgctgaccacccagactcaggtccagagagagattgttaataagcataacgagctgagaagagccgtaagcccacccgcccgtaacatgctaaaaatggaatggaacaaagaagccgccgcaaatgcacagaaatgggctaatcagtgcaattaccgccactctaatccaaaggaccggatgacttctttgaagtgcggcgagaacttgtacatgtctagcgccagcagcagctggagtcaggccatccagtcctggtttgacgagtacaacgacttcgacttcggtgtgggacctaaaacgcctaacgcagtggtggggcattacacccaggtggtgtggtacagttcttatttagtcggatgtgggaacgcatactgccccaaccagaaggtactcaaatattattacgtttgccagtactgccctgccggcaattgggccaaccgactatacgtgccttacgagcaaggagctccctgtgcctcttgtcccgacaactgcgacgacggactctgtacaaatgggtgtaagtacgaggatttgtacagcaattgcaagtctcttaagctaacactgacatgcaaacatcagcttgtccgcgatagttgcaaagcttcctgcaattgctctaactctatttactag

SEQ ID NO: 73151 - DNA, 807 bp, Artificial Sequence
  derived and/or modified sequence
atgaagcagatccttcacccggcgttagaaacgactgatccttgtagtacagggttcgttttcccagccatgacgttgtttccagtgctgctgttcttagtggccggactgctgccatcatttccggctaacgaggataaggacccagccttcacggcactgctgacaactcagacccaggtgcagagggagattgtgaacaagcacaacgagctgagacgcgcagttagtccccctgcacgcaacatgctcaagatggaatggaacaaggaagctgcggccaacgcccagaagtgggcaaaccaatgcaactacaggcattccaacccgaaagatcgcatgacaagcctgaagtgcggagaaaacctttacatgtcttcagctagctctagctggtcccaggccattcagtcttggtttgacgaatacaacgacttcgacttcggcgtgggtcccaagactcccaatgctgtcgtggggcactacactcaggtggtgtggtattcttcctaccttgtgggctgcggcaacgcatattgtcctaaccagaaggttttaaagtactactacgtgtgtcagtactgcccagccggcaactgggccaacaggctctatgttccctacgagcagggggctccatgcgccagttgcccagacaactgcgatgacggtctctgcacaaatggttgtaagtacgaggatttgtactctaactgtaaaagcctgaaactgactcttacctgtaaacatcagctggtgagagattcttgcaaagcttcttgtaattgctccaactccatttattag

SEQ ID NO: 73152 - DNA, 831 bp, Artificial Sequence
  derived and/or modified sequence
atgaagcagatcctgcacccagccctggagaccacagcctgcaccaaccacttcaatgctgacccctgcagcactggatttgtgtttcctgccatgaccctcttccctgtgctgctcttcctggtggccggcctgctgcccagcttccctgccaatgaagacaaggaccctgccttcaccgccctgctgaccacccagacccaggtgcagcgggagatcgtgaacaagcacaatgagctgcggcgggctgtgagccccccagccaggaacatgctgaagatggagtggaacaaggaggccgccgccaatgcccagaagtgggccaaccagtgcaactaccgccacagcaaccccaaggacaggatgaccagcctgaagtgtggagaaaatctctacatgagcagcgccagcagctcctggagccaggccatccagagctggtttgatgagtacaatgactttgattttggagtgggccccaagaccccaaatgctgtggtgggccactacacccaggtggtgtggtacagcagctacctggtgggctgtggaaatgcctactgccccaaccagaaggtgctgaagtactactacgtgtgccagtactgcccagctggcaactgggccaaccggctgtatgtgccctatgagcagggcgccccctgtgccagctgcccagacaactgtgatgatggcctgtgcaccaacggctgcaagtatgaagatctctacagcaactgcaagagcctgaagctgaccctgacctgcaagcaccagctggtgcgggacagctgcaaggccagctgcaactgcagcaacagcatctactag

SEQ ID NO: 73153 - DNA, 872 bp, Artificial Sequence
  derived and/or modified sequence
accttccttctgtcaatagatgaaacaaatacttcatcctgctctggaaaccactgcatgtaccaatcattttaatgcagatccctgttccaccggttttgttttcccagcaatgacattattcccagtgctgttgttcctggttgctgggctgcttccatcttttccagcaaatgaagataaggatcccgcttttactgctttgttaaccacccaaacacaagtgcaaagggagattgtgaataagcacaatgaactgaggagagcagtatctccccctgccagaaacatgctgaagatggaatggaacaaagaggctgcagcaaatgcccaaaagtgggcaaaccagtgcaattacagacacagtaacccaaaggatcgaatgacaagtctaaaatgtggtgagaatctctacatgtcaagtgcctccagctcatggtcacaagcaatccaaagctggtttgatgagtacaatgattttgactttggtgtagggccaaagactcccaacgcagtggttggacattatacacaggttgtttggtactcttcatacctcgttggatgtggaaatgcctactgtcccaatcaaaaagttctaaaatactactatgtttgccaatattgtcctgctggtaattgggctaatagactatatgtcccttatgaacaaggagcaccttgtgccagttgcccagataactgtgacgatggactatgcaccaatggttgcaagtacgaagatctctatagtaactgtaaaagtttgaagctcacattaacctgtaaacatcagttggtcagggacagttgcaaggcctcctgcaattgttcaaacagcatttattaaatacgcattacacaccgagtag

SEQ ID NO: 73154 - DNA, 807 bp, Artificial Sequence
  derived and/or modified sequence
atgaagcagatcctgcacccagccctggagaccacagacccctgcagcactggatttgtgtttcctgccatgaccctcttccctgtgctgctcttcctggtggccggcctgctgcccagcttccctgccaatgaagacaaggaccctgccttcaccgccctgctgaccacccagacccaggtgcagcgggagatcgtgaacaagcacaatgagctgcggcgggctgtgagccccccagccaggaacatgctgaagatggagtggaacaaggaggccgccgccaatgcccagaagtgggccaaccagtgcaactaccgccacagcaaccccaaggacaggatgaccagcctgaagtgtggagaaaatctctacatgagcagcgccagcagctcctggagccaggccatccagagctggtttgatgagtacaatgactttgattttggagtgggccccaagaccccaaatgctgtggtgggccactacacccaggtggtgtggtacagcagctacctggtgggctgtggaaatgcctactgccccaaccagaaggtgctgaagtactactacgtgtgccagtactgcccagctggcaactgggccaaccggctgtatgtgccctatgagcagggcgccccctgtgccagctgcccagacaactgtgatgatggcctgtgcaccaacggctgcaagtatgaagatctctacagcaactgcaagagcctgaagctgaccctgacctgcaagcaccagctggtgcgggacagctgcaaggccagctgcaactgcagcaacagcatctactag

SEQ ID NO: 73155 - DNA, 831 bp, Artificial Sequence
  derived and/or modified sequence
atgaagcagatcctgcaccccgccctggagaccaccgcctgcaccaatcactttaacgcggatccatgctccaccgggttcgtgttcccggctatgaccctgttccccgtactactctttctggttgctggcctgctgccctcctttccggccaatgaagacaaggatcccgccttcaccgcactgttgaccacacagactcaggtgcagagggagattgtaaacaaacataacgaactccgtcgcgccgtgagcccccccgctcgaaatatgctgaaaatggagtggaacaaggaggccgccgccaatgcccagaaatgggccaaccagtgtaactacagacactccaatccgaaggaccggatgactagccttaagtgcggcgagaacttatatatgtcatcagccagctcatcctggagccaagctatacagagttggtttgacgaatataatgattttgatttcggcgttggccctaaaaccccgaatgcagtggtcggacattatacccaggttgtgtggtactcctcatacttggtgggctgcggaaacgcgtactgccctaaccagaaagtgctcaagtattattatgtgtgccagtactgtccagccggaaactgggccaatcgactttacgttccttatgagcagggagccccttgtgctagctgtcccgacaactgtgacgacggattgtgcacgaatggatgtaagtacgaggacctgtatagcaattgcaaatccctcaaattaactctcacctgcaagcatcagctggtgagagatagctgtaaagcatcctgcaactgctccaatagtatctactag

SEQ ID NO: 73156 - DNA, 807 bp, Artificial Sequence
  derived and/or modified sequence
atgaagcagatcctgcaccccgccctggagaccaccgacccctgcagtactggcttcgtattcccagccatgactctcttcccagtccttctctttttggtcgccgggctacttccaagtttcccagccaacgaggataaagatcctgcattcactgccttgctaaccacccagacgcaggtgcagcgggaaattgtgaataaacacaatgaattacgtagagccgtttcaccccctgcccggaacatgctgaaaatggagtggaataaagaggctgccgccaacgcacagaagtgggcaaatcagtgtaattaccgccactccaatcccaaggaccgtatgacttcattgaaatgcggcgaaaatttatacatgtcctccgctagcagctcctggtctcaagcaattcaatcatggttcgacgagtataatgattttgatttcggagtgggaccgaagacgcccaatgcagtcgtaggacactatacacaagtggtttggtattccagttatctggtcggctgcggaaatgcttactgcccaaatcagaaagtgcttaagtattactatgtatgccaatattgccctgccggtaactgggctaataggctctacgttccttatgagcagggagcaccctgcgcctcttgccccgacaactgcgacgatggcctgtgcacaaacggctgcaagtatgaggatctatatagcaattgtaagagtctcaaactcacactgacttgtaagcatcaattggtgcgagacagctgtaaagcctcctgcaactgcagtaattctatttactag

SEQ ID NO: 73157 - DNA, 2073 bp, Artificial Sequence
  derived and/or modified sequence
cccagcaatgacattattcccagtgctgttgttcctggttgctgggctgcttccatcttttccagcaaatgaagataaggatcccgcttttactgctttgttaaccacccaaacacaagtgcaaagggagattgtgaataagcacaatgaactgaggagagcagtatctccccctgccagaaacatgctgaagatggaatggaacaaagaggctgcagcaaatgcccaaaagtgggcaaaccagtgcaattacagacacagtaacccaaaggatcgaatgacaagtctaaaatgtggtgagaatctctacatgtcaagtgcctccagctcatggtcacaagcaatccaaagctggtttgatgagtacaatgattttgactttggtgtagggccaaagactcccaacgcagtggttggacattatacacaggttgtttggtactcttcatacctcgttggatgtggaaatgcctactgtcccaatcaaaaagttctaaaatactactatgtttgccaatattgtcctgctggtaattgggctaatagactatatgtcccttatgaacaaggagcaccttgtgccagttgcccagataactgtgacgatggactatgcaccaatggttgcaagtacgaagatctctatagtaactgtaaaagtttgaagctcacattaacctgtaaacatcagttggtcagggacagttgcaaggcctcctgcaattgttcaaacagcatttattaaatacgcattacacaccgagtagggctatgtagagaggagtcagattatctacttagatttggcatctacttagatttaacatatactagctgagaaattgtaggcatgtttgatacacatttgatttcaaatgtttttcttctggatctgctttttattttacaaaaatatttttcatacaaatggttaaaaagaaacaaaatctataacaacaactttggatttttatatataaactttgtgatttaaatttactgaatttaattagggtgaaaattttgaaagttgtattctcatatgactaagttcactaaaaccctggattgaaagtgaaaattatgttcctagaacaaaatgtacaaaaagaacaatataattttcacatgaacccttggctgtagttgcctttcctagctccactctaaggctaagcatcttcaaagacgttttcccatatgctgtcttaattcttttcactcattcacccttcttcccaatcatctggctggcatcctcacaattgagttgaagctgttcctcctaaaacaatcctgacttttattttgccaaaatcaatacaatcctttgaattttttatctgcataaattttacagtagaatatgatcaaaccttcatttttaaacctctcttctctttgacaaaacttccttaaaaaagaatacaagataatataggtaaataccctccactcaaggaggtagaactcagtcctctcccttgtgagtcttcactaaaatcagtgactcacttccaaagagtggagtatggaaagggaaacatagtaactttacaggggagaaaaatgacaaatgacgtcttcaccaagtgatcaaaattaacgtcaccagtgataagtcattcagatttgttctagataatctttctaaaaattcataatcccaatctaattatgagctaaaacatccagcaaactcaagttgaaggacattctacaaaatatccctggggtattttagagtattcctcaaaactgtaaaaatcatggaaaataagggaatcctgagaaacaatcacagaccacatgagactaaggagacatgtgagccaaatgcaatgtgcttcttggatcagatcctggaacagaaaaagatcagtaatgaaaaaactgatgaagtctgaatagaatctggagtatttttaacagtagtgttgatttcttaatcttgataaatatagcagggtaatgtaagatgataacgttagagaaactgaaactgggtgagggctatctaggaattctctgtactatcttaccaaattttcggtaagtctaagaaagcaatgc

SEQ ID NO: 73158 - RNA, 831 nt, Artificial Sequence
  derived and/or modified sequence
augaaacagauucugcacccggcucuagaaacuacagcuuguaccaaccauuucaaugcugaucccuguucaaccggcuuuguguuuccugcuaugacacuguuuccuguacugcuuuuucuuguggcaggccuucucccguccuuucccgcaaaugaggauaaagauccugccuuuacugcucuacuaacuacgcaaacacaagugcaacgagaaauuguuaauaaacacaacgaguugcgcagggcaguuucuccaccagcacgcaauauguuaaagauggaguggaacaaggaagccgcugcgaaugcucaaaaaugggcuaaccaguguaacuacagacauucuaaccccaaagacagaaugaccagccuaaaauguggagagaaucuguacaugucauccgccaguagcagcuggucucaggccauccaguccugguucgaugaauacaacgauuucgacuucggcguggggccgaagacuccaaaugcgguagugggucacuauacacaagugguuugguauagcucuuaccuggugggcugcgggaaugcuuacugccccaaucagaaaguccugaaauacuauuacguuugccaguacuguccugcagggaauugggccaacagacucuauguucccuaugaacagggcgcucccugcgcaaguugcccugacaacugugacgauggacugugcaccaauggaugcaaauacgaagaucuuuauagcaauugcaagagccugaaacucacucucacaugcaaacaccagcuugugcgcgacuccuguaaagcgucauguaacugcagcaauucuauuuauuag

SEQ ID NO: 73159 - RNA, 807 nt, Artificial Sequence
  derived and/or modified sequence
augaaacagauacuccacccagccuuggagacgaccgacccaugcucaacuggguucgucuuucccgcuaugacccuuuuuccuguuuugcuuuuucuugucgcugggcugcugccuuccuuuccggcuaacgaagauaaggaucccgccuucaccgcccugcugaccacccagacgcaaguccagagggagaucgucaacaaacauaacgaacugcggcgugcugugucaccaccggcgaggaacauguugaagauggaauggaacaaagaggcugcugccaacgcucagaagugggccaaucaguguaacuacagacauagcaacccuaaagaccgcaugaccucucuaaagugcggggagaaucuuuauaugucgagcgccaguaguagcuggucgcaggcuauccagucuugguuugaugaauacaacgauuucgauuuuggagugggcccgaagacaccgaacgcaguaguuggccauuacacucaggucgugugguauagcucuuacuuggucggcuguggaaaugccuauugucccaaccagaagguucugaaguacuacuauguuugccaauacugcccagccgggaacugggccaacaggcuguacgugcccuaugaacagggagcaccaugugcuaguugcccugacaauugcgacgacggacuguguacuaauggcuguaaauacgaagaccuguauucgaauugcaaaagucucaagcugaccuuaaccuguaaacaccaguugguucgugacagcugcaaggcaucuuguaacugcagcaacucaauauauuag

SEQ ID NO: 73160 - RNA, 831 nt, Artificial Sequence
  derived and/or modified sequence
augaagcaaauacuacacccagcacucgagaccacagcuugcaccaaucacuuuaacgcggacccuugcuccacaggcuucgucuucccagcuaugacacuguucccugugcuguuauuccuaguggcuggacuccugccuucuuuucccgccaacgaagacaaagacccugccuucaccgcccugcugacuacucagacgcaggugcagagagagaucguuaacaaacacaaugaacuucgucgggccguuucuccacccgccaggaacaugcucaagauggaauggaauaaagaggcagcugcaaaugcucagaaaugggccaaucaguguaauuacagacauucuaauccaaaggacaggaugacaucccugaagugcggugagaauuuauauaugaguucagccucauccucauggucacaagcaauucaguccugguucgacgaauauaaugauuucgauuucggagucggaccaaaaaccccuaaugccguggugggacacuauacccagguugugugguacucaucuuaucuugucggcugugggaaugcuuacugcccaaaucaaaaggugcugaaguacuauuacgugugccaguauuguccagcaggcaauugggcuaauagacuauauguacccuacgaacagggcgcaccaugcgccuccuguccagauaauugugaugauggcuugugcacgaacggaugcaaauacgaggaccuguauucuaacuguaaaaguuugaagcugacccugacaugcaaacaucaacuuguaagagacucuugcaaagccuccuguaauugcagcaauucaauuuacuag

SEQ ID NO: 73161 - RNA, 807 nt, Artificial Sequence
  derived and/or modified sequence
augaagcaaauucuacaccccgcauuggagaccacagauccuuguucgaccggcuucguuuuucccgccaugacacuuuucccaguucuauuauuccucguggcuggcuugcucccaucuuuuccugcaaaugaagacaaagaccccgcauucaccgcccugcucaccacacagacucaggugcagagggaaaucgugaauaaacauaaugaguugcgacgcgccguauccccuccugcucgcaauaugcugaaaauggaauggaauaaggaagcugcugccaaugcacagaaaugggcuaaccaaugcaacuauagacacaguaacccuaaagaucgcaugacgucucugaaguguggagagaaucuguacauguccucugccagcaguucuuggucccaggcuauucaaucuugguucgacgaguacaacgauuuugauuucgggguggggccgaagaccccuaaugcuguggucgggcauuacacucagguuguuugguauuccucauaccucguuggaugcggaaacgcuuacugcccaaaucagaaggugcuuaaguauuacuauguaugucaguauugucccgccggaaacugggcuaaccgucuguauguuccuuacgaacaaggagccccaugcgcaucuugcccugacaacugugacgacggccuaugcaccaauggcuguaaauaugaagaucuauacucaaauuguaagucccuuaaacuaacucugacauguaagcaucagcuggucagagacuccugcaaagcauccuguaacugcaguaauuccauuuacuag

SEQ ID NO: 73162 - protein, 549 aa, Artificial Sequence
  derived and/or modified sequence
MSPTISHKDSSRQRRPGNFSHSLDMKSGPLPPGGWDDSHLDSAGREGDREALLGDTGTGDFLKAPQSFRAELSSILLLLFLYVLQGIPLGLAGSIPLILQSKNVSYTDQAFFSFVFWPFSLKLLWAPLVDAVYVKNFGRRKSWLVPTQYILGLFMIYLSTQVDRLLGNTDDRTPDVIALTVAFFLFEFLAATQDIAVDGWALTMLSRENVGYASTCNSVGQTAGYFLGNVLFLALESADFCNKYLRFQPQPRGIVTLSDFLFFWGTVFLITTTLVALLKKENEVSVVKEETQGITDTYKLLFAIIKMPAVLTFCLLILTAKIGFSAADAVTGLKLVEEGVPKEHLALLAVPMVPLQIILPLIISKYTAGPQPLNTFYKAMPYRLLLGLEYALLVWWTPKVEHQGGFPIYYYIVVLLSYALHQVTVYSMYVSIMAFNAKVSDPLIGGTYMTLLNTVSNLGGNWPSTVALWLVDPLTVKECVGASNQNCRTPDAVELCKKLGGSCVTALDGYYVESIICVFIGFGWWFFLGPKFKKLQDEGSSSWKCKRNN

SEQ ID NO: 73163 - DNA, 1650 bp, Artificial Sequence
  derived and/or modified sequence
atgtcgcctacaatcagccataaggatagttccagacagaggcgccccggaaatttttcccactcactggacatgaagagtggacctctgccgcccggcgggtgggacgattcccacttggatagtgctggtagagaaggcgatagagaagccctgctcggggacacaggaaccggcgactttctgaaggccccacagtcattccgtgccgagctgagctcgatcctgctgcttttatttctgtacgtgttgcagggtattccgctcggtctggccgggtcaatccccctcattctgcagagtaaaaacgtgagctacactgaccaagcattcttctcctttgtattttggccgtttagccttaaacttctgtgggctccactggtggacgctgtttacgtgaagaactttggccgaaggaaatcatggcttgtccccactcaatacatcttgggtctatttatgatttacctgtccacacaagtggaccgactgctgggaaacacagacgacagaacgcccgatgtcatcgctctaaccgttgcattctttttattcgaatttttggccgccacccaggacatcgctgtcgacggctgggctctcaccatgctctctcgagagaacgtgggctacgcaagcacttgcaactcagtgggacagacagcgggttatttcctgggaaacgtgttattccttgccttagagtcagctgatttctgtaacaaatatttgcgattccagccccagcccagaggtattgtgaccctgtccgacttcctctttttttgggggaccgtattcttgattacaaccacgctggtcgctcttctcaagaaggagaatgaggtgtcagtggtgaaagaagagactcagggtattactgatacctacaagctgctgttcgcaatcattaagatgccagctgtgctgacgttctgtttgctgatcctcactgctaagattggtttttctgctgctgacgcagttactggtctgaagctcgtcgaggaaggagtcccaaaggagcatctggcgctgctggccgtcccgatggtgcccctgcaaatcattcttcctttgattatatccaagtacactgctggccctcagccactgaatacattttataaagccatgccttatagactgctgctgggcctcgagtacgctctgcttgtgtggtggacaccgaaggtggagcatcagggagggtttccaatctactattacatcgtggttcttctgagttatgccttacaccaggttaccgtgtacagcatgtacgtatccatcatggcatttaacgctaaagttagcgatcctctgatcgggggaacctacatgactttgttaaacaccgtgtcgaacctaggaggaaattggcccagtaccgtagctttgtggctcgtcgacccacttactgtaaaagagtgcgtaggagcaagcaatcagaactgccgtacacccgacgctgtggagctgtgcaagaagttagggggttcttgtgtgaccgcacttgatggctattatgtggagagcatcatttgcgtcttcatcggttttggttggtggtttttcttgggccccaaatttaagaagcttcaggacgaggggtcatcctcttggaagtgcaagcgtaataattag

SEQ ID NO: 73164 - DNA, 1650 bp, Artificial Sequence
  derived and/or modified sequence
atgtcccccacaattagccacaaggattcttctcggcaacgaagacccggcaactttagccacagtctggatatgaagagtgggccgttgccgccaggaggatgggacgatagccacctggatagcgccggcagggagggagaccgggaggcgttgcttggcgacaccggtaccggcgacttcctgaaggcaccacaaagtttcagagcggagctttcttcaatattgttactcctttttctatatgtcttgcaggggatccctctgggcctcgctgggagcattcccctcatcctgcagtcaaagaacgtcagctacaccgatcaggcgtttttttccttcgtgttctggcccttctcgctcaagctgctctgggccccattggtggacgcggtatacgtcaagaactttggacgtaggaagagctggctggtgcctactcagtacatcttgggcctattcatgatctacctttcaacacaggtggacagactgctcggaaacacagatgatcgaacacctgacgtcattgcacttaccgtggcctttttcctcttcgaatttttggcagcaacccaggacattgctgtggatggttgggccctgaccatgctgagcagggaaaacgtcggatatgcaagtacttgtaattcagtcggacagaccgccggatacttcttgggtaatgtgttgttccttgccttagaatccgccgacttctgtaataagtacctcaggttccagccgcagcccagaggcatcgtcacactcagtgactttctatttttttggggcaccgttttcctcataaccactactctagtcgcattactgaaaaaagagaatgaggtgtcggtggtgaaagaggaaacacaggggatcaccgatacatacaagctacttttcgccatcatcaagatgcccgccgtgctcacgttttgtctgctgattctaacggctaaaattggcttctcagcagcagacgccgtaacaggccttaagctggttgaagagggcgtgccaaaggagcacctagcattgctggccgttcccatggtcccactgcaaattatcctgccactcattatttctaagtacacagctggaccacagcccctgaacaccttctacaaagcaatgccttaccgcctcctcttagggctggagtacgcactcttggtgtggtggactcccaaggtagaacaccagggcggattccctatttattactacatcgttgttctcctgtcttatgccctccatcaggttacggtctattccatgtacgttagcattatggccttcaatgcaaaggtatctgaccctctgattggagggacctacatgacactattgaatactgtctccaatctcggcgggaattggccatctactgtggcgttatggctggtggatccattaacagttaaggagtgtgtgggcgccagcaatcagaattgcagaacccccgacgccgtggaactgtgtaaaaagctcggaggatcttgtgttacggcactcgatggctattacgtggagtccataatatgtgtatttattgggtttggttggtggttcttcctcggaccaaagtttaaaaagctgcaagatgaaggctccagtagctggaaatgcaagcggaataattag

SEQ ID NO: 73165 - DNA, 1650 bp, Artificial Sequence
  derived and/or modified sequence
atgagccccaccatcagccacaaggacagcagccggcagaggcggcccggcaacttcagccacagcctggacatgaagagcggccccctgcccccaggcggctgggatgacagccacctggacagcgctggccgggagggggaccgggaggccctgctgggggacaccggcaccggggacttcctgaaggccccccagagcttccgggcagagctgagcagcatcctgctgctgctcttcctgtatgtgctgcagggcatccccctgggcctggccggcagcatccccctcatcctgcagagcaagaatgtgtcctacacagaccaggccttcttctcctttgtgttctggcccttcagcctgaagctgctgtgggcccccctggtggatgctgtgtatgtgaagaactttggaagaaggaagtcctggctggtgcccacccagtacatcctgggcctcttcatgatctacctgagcacccaggtggaccggctgctgggcaacacagatgacaggaccccagatgtgattgccctgactgtggccttcttcctgtttgagttcctggccgccacccaggacattgctgtggatggctgggccctgaccatgctgagccgggagaatgtgggctacgccagcacctgcaacagcgtgggccagacagctggctacttcctgggcaatgtgctcttcctggccctggagagcgctgacttctgcaacaagtacctgcgcttccagccccagccccggggcatcgtgaccctgagtgacttcctgttcttctggggcaccgtcttcctgatcaccaccaccctggtggccctgctgaagaaggaaaatgaggtgtctgtggtgaaggaggagacccagggcatcacagacacctacaagctgctgtttgccatcatcaagatgcctgctgtgctgaccttctgcctgctgatcctgacagccaagattggcttctctgctgctgatgctgtgacaggcctgaagctggtggaggagggcgtgcccaaggagcacctggccctgctggccgtgcccatggtgcccctgcagatcatcctgcccctcatcatcagcaagtacacagctggcccccagcccctgaacaccttctacaaggccatgccctaccgcctgctgctgggcctggagtatgccctgctggtgtggtggacccccaaggtggagcaccagggcggcttccccatctactactacatcgtggtgctgctgtcctatgccctgcaccaggtgacagtgtacagcatgtatgtgtccatcatggccttcaatgccaaggtgtctgaccccctcatcggcggcacctacatgaccctgctgaacacagtgagcaacctgggcggcaactggcccagcacagtggccctgtggctggtggaccccctgactgtgaaggaatgtgtgggcgccagcaaccagaactgcaggaccccagatgctgtggagctgtgcaagaagctgggcggcagctgtgtgacagccctggatggctactacgtggagagcatcatctgtgtgttcatcggcttcggctggtggttcttcctgggccccaagttcaagaagctgcaggatgagggcagcagctcctggaagtgcaagaggaacaactag

SEQ ID NO: 73166 - DNA, 1650 bp, Artificial Sequence
  derived and/or modified sequence
atgagccccaccatcagccacaaggacagcagccggcagcggcggcctggaaacttctcccattcactggacatgaagagtggccccctgccacccggaggctgggatgactcccatctggactcggcaggtcgtgagggagatcgggaggctcttcttggcgatacaggtactggcgacttcctgaaggccccgcagtccttccgggctgagctgtcttcaatcctcctattactgttcctttacgtccttcagggaatccctctagggctggccggtagcatccctctgattcttcagagtaaaaacgtgagctataccgatcaggccttcttcagctttgtgttctggccatttagcctcaagctgctgtgggcacctctggtcgatgccgtttacgtgaaaaactttggccgtaggaagagttggctggtccctacacagtacatcttaggcctctttatgatttatctctctactcaagttgatcggctgttgggcaacacagatgatcgaaccccggatgtgatcgccttaaccgtcgctttttttttattcgagtttttggcagccacccaagacattgccgttgacggttgggcactcaccatgctgtcgcgcgaaaatgtggggtatgcttccacttgcaactcagtggggcaaactgccgggtatttcctgggaaacgtcctctttctggccctggaatctgcagatttttgcaacaaatacctgcggttccagccacaacctagggggatcgttactctgagcgatttcctcttcttttggggtaccgtgtttctgattaccacaacgctggtcgctttactaaagaaggaaaacgaggtgagtgtggtaaaagaggagactcagggcataaccgatacttacaagctgctgttcgccataattaaaatgccggcagtgctcaccttctgcttgctcatcctcaccgcaaaaattggcttcagcgccgcagatgcggttaccgggctaaagttggtggaagagggggtccctaaagagcatttggcgctccttgccgtgccaatggttccactgcagatcatactgcctctcattatcagcaagtatacagctgggcctcagccacttaatactttttacaaagccatgccttatagattgctgctggggctcgaatatgctctgctcgtttggtggactccaaaggtggaacatcaaggcggatttccgatttattactacatcgtggtcctgctcagttatgcactgcatcaggtcactgtatatagtatgtatgtctccataatggcattcaacgccaaagtcagcgacccattgatcgggggaacatatatgacactgctgaacaccgtgtctaacctcggcggcaactggccctctaccgttgctttgtggctggttgatccgctgacggtgaaggaatgcgtgggggcctcaaatcagaactgtaggaccccagacgctgtggaactttgcaaaaaattaggcggttcctgcgtcacagctttggacgggtactacgtggaatctataatctgtgtcttcatcggcttcgggtggtggttttttctaggcccaaaattcaagaaactccaggacgagggcagctctagttggaagtgtaaaaggaacaattag

SEQ ID NO: 73167 - DNA, 1650 bp, Artificial Sequence
  derived and/or modified sequence
atgagccccaccatcagccacaaggacagcagccggcagcggcggcctggaaattttagccattccctggacatgaagtccggtcccttaccacctgggggctgggacgactcacatctggacagtgctggtagggaaggagacagggaggcactgctgggcgacaccggtacaggcgactttctgaaggcgccccagtcattcagagctgaattgtcctctatcctactgctgctctttctgtacgtgctgcagggcatcccactaggactggctggctccattcccctgatcctgcagagtaagaatgtatcttacactgatcaggcgttttttagttttgtgttttggcctttcagcttgaaactactctgggctccgctagttgacgccgtgtacgttaagaacttcggccgcaggaaatcatggctggtgcctacacagtacatcctgggtttgtttatgatttacttgagtactcaagtcgaccggcttctgggcaatacagacgatagaacaccggacgttattgccctgaccgtggcctttttcctgtttgagttcctggcagccacccaggacatcgccgtcgatggctgggcactgacaatgctctccagggagaacgtagggtatgcaagcacatgtaatagtgtagggcagaccgctggctacttcctgggcaatgttctgtttctggcacttgagagtgccgatttctgcaacaagtacttgaggtttcagcctcaacccagggggatcgttaccctctcggacttcttgtttttttggggcactgtctttctcatcaccacaaccctggttgccctgcttaaaaaggagaacgaggtctctgttgttaaggaagagacacagggcatcactgatacatacaagctgctcttcgccattataaagatgcctgccgttcttacattctgtctgctgatcctgactgctaaaatcggcttcagtgccgctgacgccgtcacgggcctgaagctcgtggaagaaggagtgccaaaggagcaccttgccctgttggctgttcccatggtgccactccaaattatcctgccactgatcatttctaaatataccgccggtcctcagccgctgaatactttttacaaggcaatgccctacagactgcttctcggcctagaatacgccctgctcgtatggtggacccccaaagttgagcaccaaggcggatttcccatatattattacatcgttgtgctgctcagctatgcacttcaccaggtgacggtgtattctatgtacgtgtcaatcatggccttcaatgccaaagtgagcgatcctttaattggcggtacctatatgacgttactgaatacagtgtcaaatctggggggaaactggccaagcacagtggccttgtggctagtagaccccctgacggtgaaggaatgtgtgggtgcgagcaatcagaactgccgcacgccggatgccgtcgaactttgtaaaaaactcggaggctcttgcgttacagcactggacggttactatgtggagagcatcatctgtgtgtttatcggttttggttggtggttctttctgggcccaaagttcaaaaagttgcaggatgagggtagctcttcttggaagtgtaaaagaaacaattag

SEQ ID NO: 73168 - DNA, 1650 bp, Artificial Sequence
  derived and/or modified sequence
atgtcaccaactatctcccacaaagattcatccagacagaggaggcccggaaacttttctcacagtctggatatgaagtcaggacccctgccccctggcggatgggacgatagtcaccttgacagcgcaggtagagagggtgatagggaagctctcctgggtgacactgggacgggagattttctgaaggcccctcaaagttttcgcgctgaactttctagcatcttactcctcttgtttctttatgtcctccaggggattccactggggctggcagggtcgattcctctgatcctgcagtccaaaaacgtgtcttataccgatcaggcatttttttcattcgttttttggccctttagcttaaagctgttatgggctcccctggtggacgcggtctacgttaagaattttggcaggcgcaaatcttggctggtgcctactcaatatatcctcgggctgttcatgatatacctatcgactcaggtcgacagactgctcgggaacacagacgaccgcacgcctgacgtgatcgccctgactgttgccttcttcctgtttgagtttcttgcagccacacaggacatcgcggttgacgggtgggctctgactatgctgtccagagagaacgtcggctacgcatccacctgtaacagtgtcggtcaaaccgcagggtatttccttggtaacgtgctgtttctggccttggagagtgctgatttctgtaataagtacctgcggtttcagcctcaacccagggggatcgtgactctgagcgatttcctgttcttctggggcaccgttttcctcattaccacaactttggttgccctgctcaagaaagagaacgaggtgtcggttgtcaaagaggagacacaaggaatcactgacacttataagctgctgttcgctataattaagatgcctgccgtgctgacgttttgcctgctgatcctaacggccaaaattggattcagtgccgctgacgccgttaccgggctgaagctggtcgaagagggcgttcctaaagaacatcttgctctgctcgccgtccccatggttccactccagatcattctccctctgataatttccaagtatacagccggacctcagcccctcaacacattttataaggccatgccctatcgactgctgcttgggttggaatatgccctgctagtctggtggacgcccaaggtggagcatcagggcggtttccctatctattattatatcgtggtgctcttaagttatgcattacaccaagtcactgtgtattccatgtacgtgtctatcatggccttcaacgctaaggtgagcgatcccctgatcggcggaacatacatgaccctgctgaataccgtgagcaatttaggtggaaactggccgtccactgttgctttatggttagtagatcctctgaccgtgaaagagtgcgtgggagcttccaaccagaactgtcgtactcctgacgctgttgaattgtgcaaaaagctcggcggatcttgtgtgaccgccctagatggctactacgtggaatccatcatttgtgtcttcataggtttcgggtggtggttctttctgggcccaaagttcaaaaaactacaagatgaaggttcatcatcctggaaatgtaagagaaacaactag

SEQ ID NO: 73169 - DNA, 1650 bp, Artificial Sequence
  derived and/or modified sequence
atgagcccgaccatttctcataaggatagcagccggcaaagacgacccggtaatttctcacactcattggacatgaaatctggccctttgccacccggagggtgggatgacagccaccttgactccgcaggcagagagggtgaccgcgaggcactactgggagacacaggtacaggagactttcttaaagcaccgcagtccttcagggccgagctttcctccatcctcctgttgttgtttctgtacgtcttgcaggggatccccttaggtttggccggatctatccccctcatattgcagtccaaaaacgtttcctacaccgatcaagcatttttttccttcgtcttctggcccttttcactgaagctattatgggcccctttggttgatgcagtttacgttaagaatttcgggagacgcaagtcatggctggtacccacacaatatattctgggtctcttcatgatctatctcagcactcaggtggaccgtctgctcgggaacactgacgaccgcactccagacgtcatagcactgactgtggccttcttcctgttcgagtttctggccgctacccaggacatcgccgtcgatggatgggcattaactatgctctcacgagaaaatgttggatacgcttcaacatgtaactctgttggacagaccgcgggttactttttgggcaacgtgctgtttctggcccttgagtctgctgacttttgcaataaatatctaaggttccagccccagcccaggggaattgttactttatccgacttcttgttcttctggggaacagtatttttgattaccaccacccttgtggctcttctaaagaaggaaaacgaagtgtcagtggtaaaagaagagacgcagggtattacagacacctataaactgctgttcgccatcattaagatgccagccgtcctgaccttttgcctgctgatcctgactgccaaaattgggttctccgctgccgacgctgttactggccttaagctggttgaggagggcgttccaaaagaacaccttgcactacttgccgtcccaatggtgcccctgcagattatactccccctcattatctcgaaatatacggctggcccacagcccctaaacacattttacaaggcaatgccataccggttactattgggtctggaatatgctctgctcgtctggtggacccccaaggtggaacaccagggaggtttccctatttactactatattgtagtgctcctgtcatatgccttgcatcaggtgactgtgtactctatgtacgtgtctatcatggcctttaacgcaaaggtgtctgatcctttgattggcggtacttatatgacgctgttaaacactgtgtctaatttgggaggaaattggcctagcaccgtggccctgtggctggtcgaccctctaactgtgaaggaatgcgttggcgctagcaaccagaattgccgtacaccagacgctgtcgaattatgtaagaagctcggaggctcttgtgtaactgccttggacgggtactatgtggaatccataatatgcgtctttatagggtttggatggtggtttttcctcggaccaaagttcaaaaagctgcaggacgagggaagctcatcatggaaatgcaagagaaacaactag

SEQ ID NO: 73170 - DNA, 2404 bp, Artificial Sequence
  derived and/or modified sequence
atatgctttttctggagtcctgtagagaaagtgctctctgccgcattgatagcagcgagagctggaggtgttgggtcgggagaccagccgttcgatcccgccgcaggtaggagctggtttccatcctggcaccacggcacacacctccagcctcgagcccggcgctgctgcccgggggtctccttcaggctctttgacgccgttccagggggcacctatccaggcatcctctgggcctctagccagaggactggctcccggcttcagcactccgggctgcagtaagaagtgcccttatcgctctgagccctgccaccatcccgtgaaccaccgaaaccctggtccagcgcgacagccttggacctgggactggacggatccaaaacgctcagcctcggccccccacagacggggctctgcatcgtctctgatatgtcacccaccatctcccacaaggacagcagccggcaacggcggccagggaatttcagtcactctctggatatgaagagcggtcccctgccgccaggcggttgggatgacagtcatttggactcagcgggccgggaaggggacagagaagctcttctgggggataccggcactggcgacttcttaaaagccccacagagcttccgggccgaactaagcagcattttgctactactctttctttacgtgcttcagggtattcccctgggcttggcgggaagcatcccactcattttgcaaagcaaaaatgttagctatacagaccaagctttcttcagttttgtcttttggcccttcagtctcaaattactctgggccccgttggttgatgcggtctacgttaagaacttcggtcgtcgcaaatcttggcttgtcccgacacagtatatactaggactcttcatgatctatttatccactcaggtggaccgtttgcttgggaataccgatgacagaacacccgacgtgattgctctcactgtggcgttctttttgtttgaattcttggccgccactcaggacattgccgtcgatggttgggcgttaactatgttatccagggaaaatgtgggttatgcttctacttgcaattcggtgggccaaacagcgggttactttttgggcaatgttttgtttttggcccttgaatctgccgacttttgtaacaaatatttgcggtttcagcctcaacccagaggaatcgttactctttcagatttcctttttttctggggaactgtatttttaataacaacaacattggttgcccttctgaaaaaagaaaacgaagtatcagtagtaaaagaagaaacacaagggatcacagatacttacaagctgctttttgcaattataaaaatgccagcagttctgacattttgccttctgattctaactgcaaagattggtttttcagcagcagatgctgtaacaggactgaaattggtagaagagggagtacccaaagaacatttagccttattggcagttccaatggttcctttgcagataatactgcctctgattatcagcaaatacactgcaggtccccagccattaaacacattttacaaagccatgccctacagattattgcttgggttagaatatgccctactggtttggtggactcctaaagtagaacatcaagggggattccctatatattactatatcgtagtcctgctgagttatgctttacatcaggttacagtgtacagcatgtatgtttctataatggctttcaatgcaaaggttagtgatccacttattggaggaacatacatgacccttttaaataccgtgtccaatctgggaggaaactggccttctacagtagctctttggcttgtagatcccctcacagtaaaagagtgtgtaggagcatcaaaccagaattgtcgaacacctgatgctgttgagctttgcaaaaaactgggtggctcatgtgttacagccctggatggttattatgtggagtccattatttgtgttttcattggatttggttggtggttctttcttggtccaaaatttaaaaagttacaggatgaaggatcatcttcgtggaaatgcaaaaggaacaattaatatatatgctactggacattctagcaaggttgaattttagagtggggtttttataagtaatggaggataaaatgggtgggagaaaatggcacacagcacctgaagaaagatggggcagtgacctctagaactcatgcattgccattggaaagcctgtgttgggcatcgatgtcagatcctgaagaatcacctggaaaaaatcccatcctagaggcaaggaggctacaccaaaccatacactacagtactttgtcacatggttgtccattatcatgtattagagtctaaatgattacttgaataaagaaaaaaaaccacttaa

SEQ ID NO: 73171 - DNA, 3725 bp, Artificial Sequence
  derived and/or modified sequence
gcagcgagagctggaggtgttgggtcgggagaccagccgttcgatcccgccgcaggtaggagctggtttccatcctggcaccacggcacacacctccagcctcgagcccggcgctgctgcccgggggtctccttcaggctctttgacgccgttccagggggcacctatccaggcatcctctgggcctctagccagaggactggctcccggcttcagcactccgggctgcagtaagaagtgcccttatcgctctgagccctgccaccatcccgtgaaccaccgaaaccctggtccagcgcgacagccttggacctgggactggacggatccaaaacgctcagcctcggccccccacagacggggctctgcatcgtctctgatatgtcacccaccatctcccacaaggacagcagccggcaacggcggccagggaatttcagtcactctctggatatgaagagcggtcccctgccgccaggcggttgggatgacagtcatttggactcagcgggccgggaaggggacagagaagctcttctgggggataccggcactggcgacttcttaaaagccccacagagcttccgggccgaactaagcagcattttgctactactctttctttacgtgcttcagggtattcccctgggcttggcgggaagcatcccactcattttgcaaagcaaaaatgttagctatacagaccaagctttcttcagttttgtcttttggcccttcagtctcaaattactctgggccccgttggttgatgcggtctacgttaagaacttcggtcgtcgcaaatcttggcttgtcccgacacagtatatactaggactcttcatgatctatttatccactcaggtggaccgtttgcttgggaataccgatgacagaacacccgacgtgattgctctcactgtggcgttctttttgtttgaattcttggccgccactcaggacattgccgtcgatggttgggcgttaactatgttatccagggaaaatgtgggttatgcttctacttgcaattcggtgggccaaacagcgggttactttttgggcaatgttttgtttttggcccttgaatctgccgacttttgtaacaaatatttgcggtttcagcctcaacccagaggaatcgttactctttcagatttcctttttttctggggaactgtatttttaataacaacaacattggttgcccttctgaaaaaagaaaacgaagtatcagtagtaaaagaagaaacacaagggatcacagatacttacaagctgctttttgcaattataaaaatgccagcagttctgacattttgccttctgattctaactgcaaagattggtttttcagcagcagatgctgtaacaggactgaaattggtagaagagggagtacccaaagaacatttagccttattggcagttccaatggttcctttgcagataatactgcctctgattatcagcaaatacactgcaggtccccagccattaaacacattttacaaagccatgccctacagattattgcttgggttagaatatgccctactggtttggtggactcctaaagtagaacatcaagggggattccctatatattactatatcgtagtcctgctgagttatgctttacatcaggttacagtgtacagcatgtatgtttctataatggctttcaatgcaaaggttagtgatccacttattggaggaacatacatgacccttttaaataccgtgtccaatctgggaggaaactggccttctacagtagctctttggcttgtagatcccctcacagtaaaagagtgtgtaggagcatcaaaccagaattgtcgaacacctgatgctgttgagctttgcaaaaaactgggtggctcatgtgttacagccctggatggttattatgtggagtccattatttgtgttttcattggatttggttggtggttctttcttggtccaaaatttaaaaagttacaggatgaaggatcatcttcgtggaaatgcaaaaggaacaattaatatatatgctactggacattctagcaaggtaattgtagtttagttttaattcggagagcaatgataatcagtgcacaggagtataaaatattattttaaacagcgaaattaataatataaaatgccaaatggttgaaaaaatagaaacctttctgtatatttgatcatattttttttttgccttgtcaatgtatttaaagtttacttaaggtcaggaaattctaaaacaacttttctggccttgttatttgatgtatatcttttaaatttactgaccaaagcatgttttaagctgcaatgcagtagtcacgggtggtaaccatgtagtcaggtattgttattagtacctatcactgctgagctgtatttaaaattttggtacaatatataaaatggagaagagcttgatattcaggtactaaccacaactagtctgacattgttggcagttaaaatcttattttgaattgtaaattagttaaattttatgtggaatttgctgagaaaagaatatagactactgaaatgtcattttagttatttttcttatgaccacattgtacaaatgaatctgtgttaaaaagactattttaaatgtatttcctgcttttgtaagcattaaagatttataagaaaattattcaaactattttttataaaatgaaagttatgatttttaaacttattgattcctcttgcccctaccccctctttttggaagatattttgattccttataaacttttaccctaagcttatatatgttttctgtcacaagtgcttcctggcacacagacagccaatggaggggatcaaattcagtgttgtatgtatgtttatggcaacattttgaaaataaaaattaaatgtttttcttcaagtagtttttttttaattgctgagagaaaaaaacagtaaagctttctgattaagtaaaatttaaatgggcagtaccataatttaaaaaactaatactttaaagagagagacaaagatattttgtgcctttgacaaattaaatctaatagtggaaaaatgtttcttaattaagcactttactagtgaaaaagatctcacaatttatgccaaatcaggtactgtattttcatgtattaacacataaccttttgtttgaatactatagttttcagtggacagttgctattccaagaaaattaagcttttgagtactttagcaattcccagcgtattacatacacccagtgataaggttctttgcatgttttgtgttatgtattactctgactctttagagattatataaatcctccaaaagttagacgaaacaagatagtacattatgagtcttaattttatcattgtggaaaaatgtgtactaactcctgattttgttaattttataacataggttgaattttagagtggggtttttataagtaatggaggataaaatgggtgggagaaaatggcacacagcacctgaagaaagatggggcagtgacctctagaactcatgcattgccattggaaagcctgtgttgggcatcgatgtcagatcctgaagaatcacctggaaaaaatcccatcctagaggcaaggaggctacaccaaaccatacactacagtactttgtcacatggttgtccattatcatgtattagagtctaaatgattacttgaataaagaaaaaaaaccacttaactcttacata

SEQ ID NO: 73172 - DNA, 1650 bp, Artificial Sequence
  derived and/or modified sequence
atgagccccaccatcagccacaaggacagcagcagacagagaagacccggcaacttcagccacagcctggacatgaagagcggccccctgccccccggcggctgggacgacagccacctggacagcgccggcagagagggcgacagagaggccctgctgggcgacaccggcaccggcgacttcctgaaggccccccagagcttcagagccgagctgagcagcatcctgctgctgctgttcctgtacgtgctgcagggcatccccctgggcctggccggcagcatccccctgatcctgcagagcaagaacgtgagctacaccgaccaggccttcttcagcttcgtgttctggcccttcagcctgaagctgctgtgggcccccctggtggacgccgtgtacgtgaagaacttcggcagaagaaagagctggctggtgcccacccagtacatcctgggcctgttcatgatctacctgagcacccaggtggacagactgctgggcaacaccgacgacagaacccccgacgtgatcgccctgaccgtggccttcttcctgttcgagttcctggccgccacccaggacatcgccgtggacggctgggccctgaccatgctgagcagagagaacgtgggctacgccagcacctgcaacagcgtgggccagaccgccggctacttcctgggcaacgtgctgttcctggccctggagagcgccgacttctgcaacaagtacctgagattccagccccagcccagaggcatcgtgaccctgagcgacttcctgttcttctggggcaccgtgttcctgatcaccaccaccctggtggccctgctgaagaaggagaacgaggtgagcgtggtgaaggaggagacccagggcatcaccgacacctacaagctgctgttcgccatcatcaagatgcccgccgtgctgaccttctgcctgctgatcctgaccgccaagatcggcttcagcgccgccgacgccgtgaccggcctgaagctggtggaggagggcgtgcccaaggagcacctggccctgctggccgtgcccatggtgcccctgcagatcatcctgcccctgatcatcagcaagtacaccgccggcccccagcccctgaacaccttctacaaggccatgccctacagactgctgctgggcctggagtacgccctgctggtgtggtggacccccaaggtggagcaccagggcggcttccccatctactactacatcgtggtgctgctgagctacgccctgcaccaggtgaccgtgtacagcatgtacgtgagcatcatggccttcaacgccaaggtgagcgaccccctgatcggcggcacctacatgaccctgctgaacaccgtgagcaacctgggcggcaactggcccagcaccgtggccctgtggctggtggaccccctgaccgtgaaggagtgcgtgggcgccagcaaccagaactgcagaacccccgacgccgtggagctgtgcaagaagctgggcggcagctgcgtgaccgccctggacggctactacgtggagagcatcatctgcgtgttcatcggcttcggctggtggttcttcctgggccccaagttcaagaagctgcaggacgagggcagcagcagctggaagtgcaagagaaacaactag

SEQ ID NO: 73173 - protein, 832 aa, Artificial Sequence
  derived and/or modified sequence
MESLTLKGYALPLQLVNNQTMTTWMEIFRTIIDRTVPPETLHIDEDDRPELVWWKCKKWALHIVARLFERYGSPGNVTKEYFEFSEFFLKTYAVGIQQVLLKILDQYRQKEYVAPRVLQQAFNYLNQGVVHSITWKQMKPHIQNISEDVIFSVMCYKDEDEELWQEDPYEYIRMKFDIFEDYASPTTAAQTLLYTAAKKRKEVLPKMMAFCYQILTDPNFDPRKKDGALHVIGSLAEILLKKSLFKDQMELFLQNHVFPLLLSNLGYLRARSCWVLHAFSSLKFHNELNLRNAVELAKKSLIEDKEMPVKVEAALALQSLISNQIQAKEYMKPHVRPIMQELLHIVRETENDDVTNVIQKMICEYSQEVASIAVDMTQHLAEIFGKVLQSDEYEEVEDKTVMAMGILHTIDTILTVVEDHKEITQQLENICLRIIDLVLQKHVIEFYEEILSLAYSLTCHSISPQMWQLLGILYEVFQQDCFEYFTDMMPLLHNYVTIDTDTLLSNAKHLEILFTMCRKVLCGDAGEDAECHAAKLLEVIILQCKGRGIDQCIPLFVQLVLERLTRGVKTSELRTMCLQVAIAALYYNPDLLLHTLERIQLPHNPGPITVQFINQWMNDTDCFLGHHDRKMCIIGLSILLELQNRPPAVDAVVGQIVPSILFLFLGLKQVCATRQLVNREDRSKAEKADMEENEEISSDEEETNVTAQAMQSNNGRGEDEEEEDDDWDEEVLEETALEGFSTPLDLDNSVDEYQFFTQALITVQSRDAAWYQLLMAPLSEDQRTALQEVYTLAEHRRTVAEAKKKIEQQGGFTFENKGVLSAFNFGTVPSNN

SEQ ID NO: 73174 - DNA, 2499 bp, Artificial Sequence
  derived and/or modified sequence
atggaaagcctgactctgaaaggatacgccctccccctgcagttagttaacaaccagaccatgactacttggatggaaatttttcggacaattattgacagaaccgtcccaccagaaaccctgcatatcgacgaagacgacaggccagagctggtctggtggaaatgcaaaaagtgggccctgcacatagtcgcccgactgttcgagaggtacggatcgccaggaaacgtaactaaagagtatttcgagttcagcgagtttttcttaaagacctatgcggtgggcattcagcaggtgctcctaaaaatacttgaccagtacagacaaaaggagtatgtcgcacctagagtgctgcaacaggccttcaattacctgaatcagggggtggtgcatagcatcacctggaaacagatgaagccacacattcagaatattagcgaggacgtgatcttctcagtgatgtgttacaaggacgaagatgaagagctatggcaggaggatccctatgagtatatcagaatgaaattcgacatcttcgaggattacgcttcccctacgaccgcagctcagaccttactttatactgctgccaagaagcgcaaagaggttctgccgaaaatgatggcattttgctatcagatccttaccgatcccaacttcgacccacgcaagaaggacggtgcactgcacgttattgggtcacttgctgagattctgctaaagaagagcctgttcaaagaccagatggagcttttcctacagaaccatgtgttccccttgttgcttagcaatctagggtacctgcgcgcccgtagttgctgggtgcttcatgctttctcttctctgaaattccacaacgagctgaatctgaggaatgcagtagaactggccaagaagagcctgattgaggacaaagaaatgccagtcaaggttgaagccgctttagctttgcagtccctgattagcaatcaaatccaggcaaaagagtatatgaaaccacacgtcagacccatcatgcaagaactgttacacatcgtgagagagacagagaacgatgacgtcacaaatgtcattcagaaaatgatatgcgagtattcgcaggaagtggcttccattgctgtggacatgacccagcacttagcggaaatctttggcaaagtgctgcagtccgatgaatacgaggaagtggaggataaaacggtgatggccatgggcatactgcataccatagatacaattctgacagttgtggaggatcacaaggagatcacccagcagctggagaacatttgtctcagaattattgatctcgtcctgcagaagcatgtgattgagttttatgaggaaattctgtccttggcctattcattaacctgtcactccatttcaccccaaatgtggcaattgctcgggatcttatacgaagtgtttcagcaggactgctttgaatattttaccgatatgatgcctcttctgcataattacgttacgatcgacaccgacactcttctgtccaacgctaaacaccttgaaattctgttcaccatgtgccggaaggtgctgtgcggcgacgctggggaggatgccgagtgtcatgctgctaagctcctagaagtgattatcctgcagtgtaagggacgaggcatcgaccagtgcattcccctgtttgtgcagcttgtcctcgaaagactaaccaggggggtcaaaacaagcgagctgcgcaccatgtgcctacaggttgccatagcggccctctattataatcccgatctcctgctccacactttggaacgcatacagctgccccataatccaggacccattacggtccaattcatcaaccaatggatgaacgataccgactgcttcttgggccaccacgacagaaagatgtgcattattggcctgagtatcttactggaactgcaaaatcgccctcccgccgtggacgctgtggttggacaaatcgtgccaagtatcttgtttttatttttaggcttgaagcaggtatgtgccacacgtcaactggtgaatcgggaagaccgctcaaaggccgaaaaggccgatatggaggagaatgaggagatatcatccgatgaggaggaaactaatgttacagctcaggcaatgcagtccaataatgggcggggcgaggatgaggaggaggaagatgacgactgggatgaagaggtactggaggagacagcccttgaaggattctccacgcctctggatcttgataacagtgtcgacgaatatcaattcttcactcaagccctcataacggtccagtccagggacgctgcttggtatcagcttcttatggctcccctctcagaggatcagcgcacagccctacaggaagtttacactctggcagaacatcggagaactgtcgctgaagccaaaaagaaaatagagcagcagggtggcttcacctttgaaaataaaggtgtgctttccgctttcaactttggtactgttccgagcaataactag

SEQ ID NO: 73175 - DNA, 3212 bp, Artificial Sequence
  derived and/or modified sequence
attgttgtatatgcagtctgtcactgaccgaaacatttgttatgtggtgcatgactttatatacattttttccagttagagtgtaagcttcgtgagggcaaagattgtctatcttattatgtctgtagcatgtagcatgttttgtactgaatggatgtggaggcaatatccgtcttctgcaactcacagtacagcagaggtgagccatatatctgtttagtacaaagtggactgtagttattatgctacagtgtagaggaaagtaatttaaaaaaatgtttcatgagtgtttaatgaaataaatattttcatcaaggtggttaaaatggaaagtttgaccctcaaagggtatgcattgcctcttcagctagtgaataaccaaaccatgacaacatggatggagatcttccgaactattatcgacaggaccgttcctcctgagactctgcacattgatgaggatgatagaccagaactggtatggtggaagtgtaagaagtgggcactgcatattgtagctcggctctttgaacgatatggaagcccaggaaatgtcacaaaagaatactttgaattttctgaattctttttgaaaacctatgcagtgggcattcagcaggtgctactaaaaattttagatcaatatagacagaaagaatatgtagctccccgtgttcttcagcaagcattcaactatctcaaccaaggggtggttcattctataacctggaagcagatgaagccacacatacagaatatctctgaagatgtgattttttctgtgatgtgttataaagatgaggatgaagagctgtggcaagaagatccatatgagtatataaggatgaaatttgatatttttgaagattatgcttctcccaccacagcagcccagactctcttatatactgctgcaaagaaaagaaaagaggtgttgccaaaaatgatggcattctgttatcaaatcctgacagacccgaactttgaccctaggaagaaagatggagccctgcatgtgattggttccctagctgagattttactgaagaagagtttattcaaggaccaaatggagctgtttctacaaaatcatgtatttccattattattgtctaacctgggatatcttcgagctagatcttgctgggtacttcatgcatttagttctttgaagttccataatgagctcaatctaagaaatgccgttgaattagcgaagaagagcctgattgaagataaagagatgcctgtcaaagttgaagctgcccttgctcttcagtctttaatttctaaccagatacaagctaaggaatatatgaagccacatgtgaggcctattatgcaggaactgttgcacattgttagagagacagaaaatgatgatgttactaatgtcatccagaagatgatatgtgaatacagtcaagaggtagcctcaattgctgttgatatgacccaacacttggctgagatatttggcaaagttcttcaaagtgatgaatatgaagaagttgaagacaaaacagtaatggctatgggaattttacataccattgatactatcttaacagttgtagaagatcataaagagattacccagcagttagagaatatctgtctacggatcattgatcttgttctgcagaaacatgtaattgaattctatgaagaaattctttccctggcatacagtttaacctgccacagtatttcccctcaaatgtggcagcttctaggtatactatatgaagtgtttcagcaggattgctttgaatactttacagacatgatgcctctcctgcataattatgtgacaatagatacagataccttactatcaaatgcaaaacatttagaaattctttttacaatgtgtaggaaggtactatgtggagatgcaggagaagatgcagagtgtcatgcagctaaacttctggaagtcatcattcttcagtgcaaaggaaggggaattgatcagtgcattccactcttcgttcaacttgttttggagagattaactcgaggggtcaaaactagtgagcttcgtactatgtgtcttcaggttgcaattgctgccttgtactacaaccctgatttgctgctacatactttagaacgaattcagttgcctcacaaccctggacctatcactgtacagtttataaatcaatggatgaatgatacagattgttttcttgggcatcatgaccggaagatgtgtataataggactgagtatccttttggaattgcaaaatcgacctcctgcagtagatgctgtggtgggacagattgttccctcaattcttttccttttccttggcctaaagcaggtctgtgctactagacaactggtaaaccgggaagatcgttcaaaagcagagaaagctgatatggaagaaaatgaggagatttcaagtgatgaagaggagacaaatgtaactgctcaagcaatgcagtcaaataatggaagaggtgaagatgaggaggaggaagatgatgactgggatgaagaagtattggaagaaaccgcgcttgaggggttcagtactccacttgaccttgacaatagtgtggatgaatatcagttttttacacaagctctgataactgtgcagagtcgagatgcagcctggtaccagctgctgatggcaccactcagcgaggatcagaggacagcactgcaggaggtgtacacactggcagagcaccgacggacggtggcagaggcaaagaagaagattgaacaacagggaggcttcacctttgaaaacaaaggagtcctctccgcatttaattttgggactgtgcccagcaacaactgaaggaaagaacatcagctgaccaaatgtcatcgctgcattttatttcacaagaggagtgtgagggtcaaggggatgaaatgaggggctgcttttagggccctcctgctgtgccagttaccatctggcattaggcagcacttttatctactctttcccctttgacctttgtcaccctgaaatatatattttaaacagctactgtaagtatgaaatgaaagaaaaacaatcattggacggaaaaggacaacccatatgttccaaaggctgaatgcccaaggttgttttagaggattggatagacttgcacgtctcaggtttttgccatgcagaatcaatggatttatgcggataacagtgccttctgttgtacatgaattatcagaaaaaa

SEQ ID NO: 73176 - DNA, 2499 bp, Artificial Sequence
  derived and/or modified sequence
atggagagcctgaccctgaagggctacgccctgcccctgcagctggtgaacaaccagaccatgaccacctggatggagatcttccgcaccatcatcgacagaacagtgcccccagagaccctgcacattgatgaagatgacaggcctgagctggtgtggtggaagtgcaagaagtgggccctgcacatcgtggcccggctgtttgaaagatatggcagccctggaaatgtgaccaaggagtactttgagttcagcgagttcttcctgaagacctatgctgtgggcatccagcaggtgctgctgaagatcctggaccagtaccggcagaaggagtatgtggccccccgggtgctgcagcaggccttcaactacctgaaccagggcgtggtgcacagcatcacctggaagcagatgaagccccacatccagaacatcagtgaagatgtgatcttctctgtgatgtgctacaaggatgaagatgaggagctgtggcaggaggacccctatgagtacatccgcatgaagtttgacatctttgaggactatgccagccccaccacagctgcccagaccctgctgtacacagctgccaagaagaggaaggaggtgctgcccaagatgatggccttctgctaccagatcctgacagaccccaactttgaccccaggaagaaggatggagccctgcacgtgattggcagcctggccgagatcctgctgaagaagagcctcttcaaggaccagatggagctgttcctgcagaaccacgtgttccccctgctgctgagcaacctgggctacctgcgggcccggagctgctgggtgctgcacgccttcagcagcctgaagttccacaatgagctgaacctgagaaatgctgtggagctggccaagaagagcctgattgaggacaaggagatgcctgtgaaggtggaggccgccctggccctgcagagcctcatcagcaaccagatccaggccaaggagtacatgaagccccacgtgcggcccatcatgcaggagctgctgcacatcgtgcgggagacagaaaatgatgatgtgaccaacgtcatccagaagatgatctgtgagtacagccaggaggtggccagcattgctgtggacatgacccagcacctggccgagatctttgggaaggtgctgcagagtgatgaatatgaggaggtggaggacaagacagtgatggccatgggcatcctgcacaccatcgacaccatcctgactgtggtggaggaccacaaggagatcacccagcagctggagaacatctgcctgcgcatcatcgacctggtgctgcagaagcacgtgattgagttctatgaggagatcctgagcctggcctacagcctgacctgccacagcatcagcccccagatgtggcagctgctgggcatcctgtatgaggtgttccagcaggactgctttgagtacttcacagacatgatgcccctgctgcacaactacgtgaccatcgacacagacaccctgctgagcaatgccaagcacctggagatcctcttcaccatgtgcaggaaggtgctgtgtggagatgctggagaagatgctgagtgccacgccgccaagctgctggaggtgatcatcctgcagtgcaagggccggggcatcgaccagtgcatccccctgtttgtgcagctggtgctggagcggctgacccggggcgtgaagaccagcgagctgcggaccatgtgcctgcaggtggccatcgccgccctgtactacaacccagacctgctgctgcacaccctggagcgcatccagctgccccacaaccctggccccatcaccgtgcagttcatcaaccagtggatgaatgacacagactgcttcctgggccaccacgacaggaagatgtgcatcatcggcctgagcatcctgctggagctgcagaaccggcccccagctgtggatgctgtggtgggccagatcgtgcccagcatcctcttcctgttcctgggcctgaagcaggtgtgtgccacccggcagctggtgaaccgggaggacaggagcaaggccgagaaggctgacatggaggagaatgaggagatcagcagtgatgaggaggagaccaacgtgacagcccaggccatgcagagcaacaacggccgcggggaggatgaggaggaggaggatgatgactgggatgaggaggtgctggaggagacagccctggagggcttcagcacccccctggacctggacaacagcgtggatgagtaccagttcttcacccaggccctgatcaccgtgcagagcagagatgctgcctggtaccagctgctgatggcccccctgtctgaggaccagaggacagccctgcaggaggtgtacaccctggccgagcacagaagaacagtggccgaggccaagaagaagattgagcagcagggcggcttcacctttgaaaataaaggagtgctgagcgccttcaactttggaacagtgcccagcaacaactag

SEQ ID NO: 73177 - DNA, 2499 bp, Artificial Sequence
  derived and/or modified sequence
atggagagcctgaccctgaagggctacgccctgcccctgcagctggtgaacaatcagacaatgacaacctggatggagatcttccgaacaattatcgatcgtacagtgccccccgagacactgcacattgacgaagatgatcggcccgaacttgtctggtggaagtgtaaaaaatgggcactgcacattgtggctagactttttgaaagatacgggtctccagggaatgtcaccaaagaatatttcgagtttagtgagttcttcttaaagacatatgctgtcgggattcagcaggtcttgctgaagatcctagaccaatacagacagaaagaatacgttgcaccgcgggtgctgcagcaggccttcaattatctgaaccaaggagtggttcattcaattacctggaagcagatgaagcctcacattcaaaacattagtgaagatgtgatcttcagtgttatgtgttacaaagatgaagatgaggagctttggcaggaggacccatatgaatatattaggatgaaattcgacatcttcgaggattacgcaagcccaaccaccgccgcccaaactctgctttatacagctgctaaaaaaaggaaggaagtgctgcctaaaatgatggctttttgttaccagatcctcactgaccccaactttgaccccaggaagaaagacggagctctgcatgttattggcagcctcgccgagattctgttgaagaagtctctgtttaaagaccagatggagctattcctgcaaaaccatgtgttcccactgcttttgagtaatctgggttacttgcgggccagatcatgttgggtcctgcacgccttttcgagtctcaaattccacaacgaactaaatctgagaaacgctgttgaactggctaaaaaaagtctgatcgaggacaaggaaatgcccgtgaaagtggaagccgctctcgcactacagtctcttatctcgaatcaaatccaagccaaagagtatatgaaaccacacgtccggccaattatgcaagagttgctccacatcgtgagagagactgagaatgatgatgtaaccaacgtgatccagaagatgatctgcgagtatagtcaggaagtggcctctatcgcagttgatatgacacagcacctggcggagatctttggcaaggtactgcaatcagacgagtatgaagaagtggaggataagaccgtaatggctatgggcattctgcataccatagatactatactcactgtggttgaggatcacaaagaaattacacaacagctggagaatatttgtctgaggataatcgacctcgtgctgcagaagcatgtgattgaattctatgaggagatcctgtcgctggcttactctctgacatgccacagcatttcaccccagatgtggcagctcttgggaatcctgtacgaagtcttccagcaagactgcttcgaatactttaccgatatgatgcctcttctccacaactacgttacaatcgacaccgataccctgctgtcaaatgcgaagcatctggagatcctgtttactatgtgccggaaagtgctgtgtggagacgccggcgaggatgccgaatgccacgctgccaaactgttagaagtcattattctgcagtgtaagggccgtggaattgaccagtgcatacctctcttcgtccaattggtgcttgagaggttgacccggggagtgaagacatcagagctgaggactatgtgtctccaggtagcaattgctgcactgtactacaaccccgacctgctgttacatactctggagagaatccagcttccgcataatcccgggccaatcacagtgcaatttataaaccaatggatgaacgatacggattgttttttaggacatcacgacaggaagatgtgcatcattgggctgtctatcctgctggaattacagaaccgacctcccgccgtcgacgccgtagttgggcagatcgtcccgtcaatccttttcctgttcctcgggcttaagcaggtctgtgcaacccggcagctcgtgaatagggaagatcgttcaaaagccgagaaggccgatatggaggagaacgaggagatctcctcggatgaggaggaaacgaacgtgactgcacaggccatgcaatctaataatgggcgaggtgaagatgaggaagaggaagacgatgattgggacgaggaggttctcgaagaaaccgcattggaggggttctccactcctttagatctcgacaacagcgtggatgagtaccagttttttacgcaggccctgatcactgtgcaatccagagacgctgcgtggtatcagctacttatggcgcctctatctgaggatcaacgaactgctctccaggaggtgtacacactggcagaacacagacggactgttgccgaggcgaagaaaaagattgagcagcagggtggttttactttcgagaataagggagtcctaagcgcgtttaacttcgggacagtcccctcgaacaactag

SEQ ID NO: 73178 - DNA, 2499 bp, Artificial Sequence
  derived and/or modified sequence
atggagtcccttacccttaagggctatgctcttccgttgcagctggttaacaatcaaactatgaccacctggatggagatttttcgcactattatcgaccggacagtgccaccggagactctccatatcgacgaagatgatcgacccgaattagtgtggtggaaatgcaagaagtgggcccttcacattgttgccagactgttcgaacgctacggaagccccggaaacgtcaccaaagaatactttgagttttcggagttcttcctaaagacctacgccgtagggattcagcaggttttgttaaagatcctggaccagtaccggcagaaagagtatgtcgcaccgagggtgctgcagcaggccttcaattacctgaatcagggggtggtgcattcaattacatggaaacagatgaagcctcacattcagaacatctcggaggatgtgatcttttcagtgatgtgctataaggatgaagacgaggaactgtggcaggaggacccttatgagtacattagaatgaaatttgatatcttcgaagactacgcttccccaaccactgctgcccaaaccctgttgtacactgctgccaaaaagaggaaagaagtgctgccaaagatgatggctttctgttatcagattctgacagacccaaactttgaccccagaaaaaaggatggagctctgcatgttattggatctctggcagagatactcctgaaaaagtccctgttcaaggaccaaatggaactctttttgcaaaatcatgtgtttcctctgctgttaagcaatctggggtacttgcgagctaggtcctgctgggtcctccacgccttctcgagtctgaagtttcacaacgagctgaatctacgtaatgctgttgaactggcgaagaagtcattgattgaggataaggaaatgcccgttaaagtggaagctgcactggctttacaaagtctgattagtaaccagatccaagcaaaggagtacatgaaacctcatgtgcgccctattatgcaggagcttctgcacatcgtacgcgagacagaaaatgacgacgttaccaatgtgatccagaagatgatctgtgagtattctcaggaagtagcctccattgccgttgatatgacacagcacctcgcagaaatcttcggaaaggtccttcagtctgatgagtacgaggaggtggaagacaaaaccgtcatggccatgggcatactgcacaccatagatactatacttactgtcgtggaggaccacaaagaaattacacagcagctcgagaacatatgcctgcgcatcatagatttggttctgcaaaagcacgttatcgagttctatgaagagatcttgtccctggcatacagcctgacctgtcacagcatctcaccccagatgtggcagttattaggcatactatatgaggttttccagcaagattgttttgaatacttcacggatatgatgccgctgttgcacaattatgtgaccatagacacggacacacttctgtctaacgcgaaacatctcgaaatacttttcacaatgtgccgtaaggtcctgtgcggggatgcaggcgaggacgcagagtgccatgctgccaaactgcttgaagtgatcatcttacagtgcaagggtaggggaattgaccagtgcatacccctgttcgtccaattagttcttgagagattgactcgaggagtcaaaacaagtgagctgcggaccatgtgcctgcaagtcgccattgctgctttgtattataatcccgatctccttctccacaccctggaacgaatccagctgcctcacaatcctgggcctataaccgtccagttcattaaccaatggatgaacgatactgattgtttcttgggacatcatgatagaaagatgtgtatcataggattatccatcctgctggagcttcagaatcgcccaccggctgtcgacgccgtggtgggccagatagtgcccagcattttgttcctgttcctgggactaaagcaggtgtgcgcaacccgccagctggtcaaccgcgaagacagatcgaaggccgagaaagctgacatggaggaaaatgaggaaatctccagcgacgaggaggaaaccaacgttaccgcacaggctatgcaaagcaataatggtcgcggagaagatgaagaagaagaagatgatgactgggatgaagaggttctggaggaaacggctcttgagggcttctctactcctttggatcttgacaattccgtagatgaatatcagtttttcactcaggctctgatcacagtgcagtcacgtgacgctgcgtggtaccagcttctgatggcccctttgagcgaggatcagagaacagcgctccaggaggtgtatactctcgcggaacatcgacggaccgttgccgaagcaaagaagaaaatagagcaacaaggaggattcacatttgaaaacaagggcgttctgagcgcgtttaactttggaacagttccttccaataactag

SEQ ID NO: 73179 - DNA, 2499 bp, Artificial Sequence
  derived and/or modified sequence
atggagagcctgaccctgaagggctacgccctgcccctgcagctggtgaacaaccagaccatgaccacctggatggagatcttcagaaccatcatcgacagaaccgtgccccccgagaccctgcacatcgacgaggacgacagacccgagctggtgtggtggaagtgcaagaagtgggccctgcacatcgtggccagactgttcgagagatacggcagccccggcaacgtgaccaaggagtacttcgagttcagcgagttcttcctgaagacctacgccgtgggcatccagcaggtgctgctgaagatcctggaccagtacagacagaaggagtacgtggcccccagagtgctgcagcaggccttcaactacctgaaccagggcgtggtgcacagcatcacctggaagcagatgaagccccacatccagaacatcagcgaggacgtgatcttcagcgtgatgtgctacaaggacgaggacgaggagctgtggcaggaggacccctacgagtacatcagaatgaagttcgacatcttcgaggactacgccagccccaccaccgccgcccagaccctgctgtacaccgccgccaagaagagaaaggaggtgctgcccaagatgatggccttctgctaccagatcctgaccgaccccaacttcgaccccagaaagaaggacggcgccctgcacgtgatcggcagcctggccgagatcctgctgaagaagagcctgttcaaggaccagatggagctgttcctgcagaaccacgtgttccccctgctgctgagcaacctgggctacctgagagccagaagctgctgggtgctgcacgccttcagcagcctgaagttccacaacgagctgaacctgagaaacgccgtggagctggccaagaagagcctgatcgaggacaaggagatgcccgtgaaggtggaggccgccctggccctgcagagcctgatcagcaaccagatccaggccaaggagtacatgaagccccacgtgagacccatcatgcaggagctgctgcacatcgtgagagagaccgagaacgacgacgtgaccaacgtgatccagaagatgatctgcgagtacagccaggaggtggccagcatcgccgtggacatgacccagcacctggccgagatcttcggcaaggtgctgcagagcgacgagtacgaggaggtggaggacaagaccgtgatggccatgggcatcctgcacaccatcgacaccatcctgaccgtggtggaggaccacaaggagatcacccagcagctggagaacatctgcctgagaatcatcgacctggtgctgcagaagcacgtgatcgagttctacgaggagatcctgagcctggcctacagcctgacctgccacagcatcagcccccagatgtggcagctgctgggcatcctgtacgaggtgttccagcaggactgcttcgagtacttcaccgacatgatgcccctgctgcacaactacgtgaccatcgacaccgacaccctgctgagcaacgccaagcacctggagatcctgttcaccatgtgcagaaaggtgctgtgcggcgacgccggcgaggacgccgagtgccacgccgccaagctgctggaggtgatcatcctgcagtgcaagggcagaggcatcgaccagtgcatccccctgttcgtgcagctggtgctggagagactgaccagaggcgtgaagaccagcgagctgagaaccatgtgcctgcaggtggccatcgccgccctgtactacaaccccgacctgctgctgcacaccctggagagaatccagctgccccacaaccccggccccatcaccgtgcagttcatcaaccagtggatgaacgacaccgactgcttcctgggccaccacgacagaaagatgtgcatcatcggcctgagcatcctgctggagctgcagaacagaccccccgccgtggacgccgtggtgggccagatcgtgcccagcatcctgttcctgttcctgggcctgaagcaggtgtgcgccaccagacagctggtgaacagagaggacagaagcaaggccgagaaggccgacatggaggagaacgaggagatcagcagcgacgaggaggagaccaacgtgaccgcccaggccatgcagagcaacaacggcagaggcgaggacgaggaggaggaggacgacgactgggacgaggaggtgctggaggagaccgccctggagggcttcagcacccccctggacctggacaacagcgtggacgagtaccagttcttcacccaggccctgatcaccgtgcagagcagagacgccgcctggtaccagctgctgatggcccccctgagcgaggaccagagaaccgccctgcaggaggtgtacaccctggccgagcacagaagaaccgtggccgaggccaagaagaagatcgagcagcagggcggcttcaccttcgagaacaagggcgtgctgagcgccttcaacttcggcaccgtgcccagcaacaactag

SEQ ID NO: 73180 - protein, 345 aa, Artificial Sequence
  derived and/or modified sequence
MHERFIHCFCIDWAPKSDRIVTCGADRNAYVWSQKDGVWKPTLVILRINRAATFVKWSPLENKFAVGSGARLISVCYFESENDWWVSKHIKKPIRSTVLSLDWHPNNVLLAAGSCDFKCRVFSAYIKEVDEKPASTPWGSKMPFGQLMSEFGGSGTGGWVHGVSFSASGSRLAWVSHDSTVSVADASKSVQVSTLKTEFLPLLSVSFVSENSVVAAGHDCCPMLFNYDDRGCLTFVSKLDIPKQSIQRNMSAMERFRNMDKRATTEDRNTALETLHQNSITQVSIYEVDKQDCRKFCTTGIDGAMTIWDFKEPSRHGLPQLPGGAHQLPRLEQGPHPDCHLPQQP

SEQ ID NO: 73181 - DNA, 1038 bp, Artificial Sequence
  derived and/or modified sequence
atgcacgagaggtttattcactgcttctgcattgactgggcccctaagagcgatagaatagtcacttgcggtgccgaccgcaatgcatacgtgtggtcccaaaaagatggagtgtggaaaccgactctggtcatcttgcgaatcaaccgagccgccactttcgtcaagtggagccccctcgagaacaaatttgcagtcggaagcggcgctcgcctgatctcagtgtgctattttgagtctgaaaacgactggtgggtgagtaaacacatcaaaaagcccatccgatccaccgttctctctctggactggcaccccaacaatgtcttacttgcagcaggctcatgtgattttaagtgtagggtttttagcgcatatataaaagaagtagatgagaagcccgcctccactccctggggctccaagatgcccttcggtcagctcatgtctgaattcggagggagcgggacggggggctgggtccacggcgtgtccttcagcgccagcgggtcacgactcgcatgggtgtctcacgacagcacggtttctgttgctgacgcatcgaagtctgtgcaggtctccacactcaagactgaatttctcccgctcttgtcagtgtccttcgtcagcgaaaactcggtggtggcagctggccatgactgctgccctatgctgtttaactacgatgataggggatgccttaccttcgttagtaagctggatatccccaaacagagtatccaacggaatatgtccgccatggagcgttttagaaacatggataaacgagctactaccgaagatagaaacaccgctctcgaaactctccaccaaaactctatcactcaggtgtcgatttatgaggtcgacaagcaggactgccgcaaattctgcactaccggcatcgatggcgccatgaccatttgggattttaaagaaccttcaaggcacggactgccccagctccctggtggggcacatcagctgcctaggttagagcagggccctcaccctgattgtcacctccctcagcagccttag

SEQ ID NO: 73182 - DNA, 1038 bp, Artificial Sequence
  derived and/or modified sequence
atgcatgagcgcttcatccactgcttctgcatcgactgggcccccaagagtgaccgcatcgtgacctgtggggctgacagaaatgcctacgtgtggagccagaaggatggagtgtggaagcccaccctggtgatcctgcgcatcaacagagctgccacctttgtgaagtggagccccctggagaacaagtttgctgtgggcagcggggcccggctcatctctgtgtgctactttgaaagtgaaaatgactggtgggtgtccaagcacatcaagaagcccatccgcagcacagtgctgagcctggactggcaccccaacaacgtgctgctggccgccggcagctgtgacttcaagtgcagggtcttcagcgcctacatcaaggaggtggatgagaagccagccagcaccccctggggcagcaagatgcccttcggccagctgatgtctgaatttggaggcagcggcaccggcggctgggtgcatggagtgtccttcagcgccagcggcagccggctggcctgggtgtcccatgacagcacagtgtctgtggctgatgccagcaagtctgtgcaggtgtccaccctgaagacagagttcctgcccctgctgtctgtgtcctttgtgtctgagaacagcgtggtggccgccggccatgactgctgccccatgctgttcaactatgatgaccggggctgcctgacctttgtgtccaagctggacatccccaagcagagcatccagaggaacatgtctgccatggagcgcttcaggaacatggacaagagggccaccacagaggacaggaacacagccctggagaccctgcaccagaacagcatcacccaggtgtccatctatgaggtggacaagcaggactgcaggaagttctgcaccactggaattgatggagccatgaccatctgggacttcaaggagcccagccgccacggcctgccccagctgcccggcggggcccaccagctgccccggctggagcagggcccccacccagactgccacctgccccagcagccctag

SEQ ID NO: 73183 - DNA, 1038 bp, Artificial Sequence
  derived and/or modified sequence
atgcacgagcggttcatccactgcttctgcatcgactgggcccccaagtctgacagaattgttacctgtggtgccgatcggaatgcctatgtgtggagtcagaaagatggcgtgtggaagcctacactcgtgattctcagaataaatcgtgccgccacttttgtgaagtggtctccacttgagaacaagttcgcggtcggtagcggcgccagactgattagcgtctgctattttgagtctgaaaatgactggtgggtgtctaaacacattaagaagcctattaggtcaaccgtactaagcctagactggcaccctaataacgtgctcttggcagccggatcttgcgacttcaaatgtagggtctttagcgcttacatcaaggaggtggatgagaaaccggcctcaacaccctgggggtccaaaatgcctttcggtcagctcatgtccgagttcggcgggagcggcaccggaggatgggtgcacggtgtgtccttctccgcctccggatcccggcttgcatgggtgtcccacgattctacagtcagcgttgccgacgctagtaagagcgttcaggtcagcacgctcaagaccgagtttctgcctctcctcagtgtgtctttcgtgagcgaaaacagcgtagtggccgctggacatgattgctgccccatgctgtttaactacgacgatcgcggatgcctgactttcgtgtccaaacttgatatcccaaagcagtctatccagcgtaatatgtccgccatggaaaggttccggaatatggacaagcgggctaccaccgaagacaggaacactgcattggaaacactccaccaaaacagtataactcaggtgagtatatatgaggtcgacaaacaggactgtcgcaagttctgcacaaccggcattgacggggcgatgacgatatgggactttaaggaaccctcccggcacgggctcccgcagctgccggggggggcacaccagctcccgcggctggagcaggggcctcaccccgactgtcacctgccacagcagccttag

SEQ ID NO: 73184 - DNA, 1038 bp, Artificial Sequence
  derived and/or modified sequence
atgcacgagcggttcattcattgtttctgtatcgattgggcccctaagagcgaccgcattgttacttgcggcgctgacagaaatgcatatgtgtggtcccagaaagatggtgtgtggaaaccgacactggtcattcttagaattaacagggccgcaacctttgtgaagtggtccccactggaaaataagttcgccgtcggtagcggggcacgcctgatctccgtttgctattttgaaagcgagaacgattggtgggtctcaaagcatatcaagaagcccattaggagcactgtgcttagcctggattggcacccaaataacgttctgctggccgcaggcagctgcgactttaaatgtagagtcttctctgcttacatcaaggaagtcgacgagaaacccgcatcgacaccatggggaagtaagatgcccttcgggcaactcatgtcggagtttggagggagcggcactggcggttgggtgcacggcgtgtcattcagcgcctccggcagccgcctcgcctgggtgtcacacgatagcactgtgtcagttgccgacgcatcaaagagcgtgcaggtgtctaccctgaaaacggagtttctcccattactgagcgtgtctttcgtgtcagaaaacagcgtcgtcgcagcaggccatgattgttgtccgatgttgtttaattatgacgacaggggatgtctcaccttcgtaagcaagttggacatccctaagcaaagtattcagcgaaatatgagcgccatggaacgcttcaggaatatggataagcgggctacgaccgaggacaggaatactgcactcgagacactgcatcagaatagtatcactcaggtctcaatttacgaggtggataaacaagactgtcggaaattctgcacgacgggaattgacggcgctatgaccatctgggatttcaaggagccttccagacatgggctaccacagttgccaggtggggcacaccagctcccacgcctcgagcagggtccacaccccgactgtcatttaccacaacagccttag

SEQ ID NO: 73185 - DNA, 1702 bp, Artificial Sequence
  derived and/or modified sequence
ctctgggcttccgtcctccgcccgcgcccgacggagcctgttcgcgtcgactgcccagagtccgcgaatcctccgctccgagcccgtccggactcccccgatcccagctttctctcctttgaaaacactaagaataatgtcactgcatcagtttttactagagccaatcacctgtcatgcctggaacagggatcgtactcgaccagtctgtcttgattactatagcttggtgagattgccctcagtcccaataatcacgaagtgcacatctataagaagaacgggagccagtgggtgaaagctcatgaactcaaggagcacaacggacacatcacagggtatgcatatctgcagtgcagtgttgccaggcctcatcagattgccatcattcccacctgtcctgtatgagagtgctcattttcccacaccccgccacatacttgagatgggaagactgaagaatgcatgaaaggttcatccattgcttctgtattgactgggctcccaagagcgaccgcattgtcacttgtggggcagaccgcaatgcctatgtctggagtcagaaagatggtgtttggaagccaaccctggtgatcctgagaattaatcgcgcagctacttttgtgaagtggtcccccctagagaacaaatttgctgtgggaagtggagcacgactcatttctgtttgttactttgagtctgaaaatgactggtgggtgagcaagcacattaaaaagccgattcgctccacagtcctcagcttggattggcatcccaacaacgttttgctggcagcaggatcatgtgacttcaaatgcagagtgttttctgcctacattaaagaagtggatgaaaagccagccagcacgccctggggcagcaagatgccttttgggcagctgatgtcagagtttggtggcagtggcactggtggctgggtccacggggtaagcttctctgccagtgggagccgcctggcctgggtcagccacgacagcaccgtgtctgttgctgatgcctcaaaaagtgtgcaggtctcgactctgaagacagagttcctgccgctcctaagtgtgtcatttgtctcagagaacagcgtcgtggctgctggccatgactgctgcccaatgctctttaactacgatgaccgcggctgcctgaccttcgtctccaagttagatattccaaaacagagcatccaacgcaacatgtctgccatggaacgcttccgcaacatggacaagagagccacaactgaggaccgcaacacggccttggagacgctgcaccagaatagcatcactcaagtctctatttatgaggtggacaagcaagattgtcgcaaattttgcactactggcatcgatggagccatgacaatttgggatttcaaggagccaagccgccatggcctaccacagcttcctggtggagcccatcagctgccacgcctggaacaaggaccgcacccagattgccatctgccccaacaaccatgaggtgcatatctatgaaaagagcggtgccaaatggaccaaggtgcacgagctcaaggagcacaacgggcaggtgacaggcatcgactgggcccccgagagtaaccgtattgtgacctgcggcacagaccgcaacgcctacgtgtggacgctgaagggccgcacatggaagcccacgctggtcatcctgcggatcaaccgggctg

SEQ ID NO: 73186 - DNA, 1038 bp, Artificial Sequence
  derived and/or modified sequence
atgcacgagagattcatccactgcttctgcatcgactgggcccccaagagcgacagaatcgtgacctgcggcgccgacagaaacgcctacgtgtggagccagaaggacggcgtgtggaagcccaccctggtgatcctgagaatcaacagagccgccaccttcgtgaagtggagccccctggagaacaagttcgccgtgggcagcggcgccagactgatcagcgtgtgctacttcgagagcgagaacgactggtgggtgagcaagcacatcaagaagcccatcagaagcaccgtgctgagcctggactggcaccccaacaacgtgctgctggccgccggcagctgcgacttcaagtgcagagtgttcagcgcctacatcaaggaggtggacgagaagcccgccagcaccccctggggcagcaagatgcccttcggccagctgatgagcgagttcggcggcagcggcaccggcggctgggtgcacggcgtgagcttcagcgccagcggcagcagactggcctgggtgagccacgacagcaccgtgagcgtggccgacgccagcaagagcgtgcaggtgagcaccctgaagaccgagttcctgcccctgctgagcgtgagcttcgtgagcgagaacagcgtggtggccgccggccacgactgctgccccatgctgttcaactacgacgacagaggctgcctgaccttcgtgagcaagctggacatccccaagcagagcatccagagaaacatgagcgccatggagagattcagaaacatggacaagagagccaccaccgaggacagaaacaccgccctggagaccctgcaccagaacagcatcacccaggtgagcatctacgaggtggacaagcaggactgcagaaagttctgcaccaccggcatcgacggcgccatgaccatctgggacttcaaggagcccagcagacacggcctgccccagctgcccggcggcgcccaccagctgcccagactggagcagggcccccaccccgactgccacctgccccagcagccctag

SEQ ID NO: 73187 - protein, 510 aa, Artificial Sequence
  derived and/or modified sequence
MDSRVSGTTSNGETKPVYPVMEKKEEDGTLERGHWNNKMEFVLSVAGEIIGLGNVWRFPYLCYKNGGEHCMEFQKTNGSLNGTSENATSPVIEFWERRVLKISDGIQHLGALRWELALCLLLAWVICYFCIWKGVKSTGKVVYFTATFPYLMLVVLLIRGVTLPGAAQGIQFYLYPNLTRLWDPQVWMDAGTQIFFSFAICLGCLTALGSYNKYHNNCYRDCIALCFLNSGTSFVAGFAIFSILGFMSQEQGVPISEVAESGPGLAFIAYPRAVVMLPFSPLWACCFFFMVVLLGLDSQFVCVESLVTALVDMYPHVFRKKNRREVLILGVSVVSFLVGLIMLTEGGMYVFQLFDYYAASGMCLLFVAIFESLCVAWVYGAKRFYDNIEDMIGYRPWPLIKYCWLFLTPAVCTATFLFSLIKYTPLTYNKKYTYPWWGDALGWLLALSSMVCIPAWSLYRLGTLKGPFRERIRQLMCPAEDLPQRNPAGPSAPATPRTSLLRLTELESHC

SEQ ID NO: 73188 - DNA, 1533 bp, Artificial Sequence
  derived and/or modified sequence
atggacagcagagtgagcggcaccaccagcaacggcgagaccaagcccgtgtaccccgtgatggagaagaaggaggaggacggcaccctggagagaggccactggaacaacaagatggagttcgtgctgagcgtggccggcgagatcatcggcctgggcaacgtgtggagattcccctacctgtgctacaagaacggcggcgagcactgcatggagttccagaagaccaacggcagcctgaacggcaccagcgagaacgccaccagccccgtgatcgagttctgggagagaagagtgctgaagatcagcgacggcatccagcacctgggcgccctgagatgggagctggccctgtgcctgctgctggcctgggtgatctgctacttctgcatctggaagggcgtgaagagcaccggcaaggtggtgtacttcaccgccaccttcccctacctgatgctggtggtgctgctgatcagaggcgtgaccctgcccggcgccgcccagggcatccagttctacctgtaccccaacctgaccagactgtgggacccccaggtgtggatggacgccggcacccagatcttcttcagcttcgccatctgcctgggctgcctgaccgccctgggcagctacaacaagtaccacaacaactgctacagagactgcatcgccctgtgcttcctgaacagcggcaccagcttcgtggccggcttcgccatcttcagcatcctgggcttcatgagccaggagcagggcgtgcccatcagcgaggtggccgagagcggccccggcctggccttcatcgcctaccccagagccgtggtgatgctgcccttcagccccctgtgggcctgctgcttcttcttcatggtggtgctgctgggcctggacagccagttcgtgtgcgtggagagcctggtgaccgccctggtggacatgtacccccacgtgttcagaaagaagaacagaagagaggtgctgatcctgggcgtgagcgtggtgagcttcctggtgggcctgatcatgctgaccgagggcggcatgtacgtgttccagctgttcgactactacgccgccagcggcatgtgcctgctgttcgtggccatcttcgagagcctgtgcgtggcctgggtgtacggcgccaagagattctacgacaacatcgaggacatgatcggctacagaccctggcccctgatcaagtactgctggctgttcctgacccccgccgtgtgcaccgccaccttcctgttcagcctgatcaagtacacccccctgacctacaacaagaagtacacctacccctggtggggcgacgccctgggctggctgctggccctgagcagcatggtgtgcatccccgcctggagcctgtacagactgggcaccctgaagggccccttcagagagagaatcagacagctgatgtgccccgccgaggacctgccccagagaaaccccgccggccccagcgcccccgccacccccagaaccagcctgctgagactgaccgagctggagagccactgctag

SEQ ID NO: 73189 - DNA, 1533 bp, Artificial Sequence
  derived and/or modified sequence
atggacagccgtgtctctgggactacttctaatggtgagaccaagcccgtctatcctgtgatggaaaaaaaagaggaggatggaacactggagaggggacactggaacaacaaaatggagtttgttttgagcgtcgctggggaaattatagggctaggcaacgtgtggagattcccttacttgtgttataagaatggtggagaacactgcatggaatttcagaagaccaatggaagccttaatggaacttctgagaacgcaactagcccagtaatcgagttttgggaacgacgcgtgctgaagatttcagatggaatacagcatcttggcgcattgaggtgggagctggccctatgccttctactggcctgggtcatatgttacttctgtatttggaagggcgtgaagagcactggaaaggtcgtctatttcaccgcaacattcccgtacctgatgctggtggtactgctgattcgcggagttacattgcctggtgctgcccagggcattcaattttacttgtatcctaacctgactcgtctgtgggacccccaggtgtggatggacgccggaacacagatcttcttttcatttgcaatctgcttaggctgcctcaccgccctaggctcctacaacaagtatcataacaattgttaccgagactgcatagccttatgcttcctgaatagcggaacgagttttgtcgcgggttttgccatcttcagcattcttggctttatgtcgcaggagcaaggggtcccgatttcagaggtcgctgagtccggaccgggcctcgcatttattgcttaccccagggccgtggtcatgctgcccttttcgcctctgtgggcatgctgcttctttttcatggttgttctgctcggcctcgactcacaattcgtctgtgttgaatcactggtgacagccttggtggatatgtatcctcacgtttttaggaaaaagaaccggagagaggtgcttattctcggcgttagtgtggtctcatttctcgttggcctcataatgctcacggaaggcgggatgtatgtgttccagctcttcgactactacgcggcttctggaatgtgtctgttgtttgtggcaatcttcgaatctctgtgtgtcgcatgggtttacggagccaagagattttacgacaatatcgaggatatgattggctacaggccgtggccgctcataaagtattgctggctgttcctcacaccagccgtctgtacggccaccttcctttttagtctgatcaagtacacccccctgacatacaacaaaaagtatacctacccctggtggggcgacgcgctgggttggctcctcgcgttgagctccatggtgtgcattcctgcatggtctttatatagactagggacgctgaaaggtcctttccgggagcgcataaggcagctcatgtgtccagccgaggatctgccacagagaaaccctgccgggcctagtgccccagccacccctcggacaagcttgcttagactcacagagcttgaatcccattgttag

SEQ ID NO: 73190 - DNA, 1533 bp, Artificial Sequence
  derived and/or modified sequence
atggacagccgggtgtctggcaccaccagcaatggagagaccaagcctgtgtaccctgtgatggagaagaaggaggaggatggcaccctggagcggggccactggaacaacaagatggagtttgtgctgtctgtggccggggagatcatcggcctgggcaatgtgtggaggttcccctacctgtgctacaagaatggaggagagcactgcatggagttccagaagaccaacggcagcctgaatggcaccagtgaaaatgccaccagccctgtgattgagttctgggagaggagagtgctgaagatcagtgatggcatccagcacctgggcgccctgcgctgggagctggccctgtgcctgctgctggcctgggtgatctgctacttctgcatctggaagggcgtgaagagcacaggcaaggtggtgtacttcaccgccaccttcccctacctgatgctggtggtgctgctgatccggggcgtgaccctgcccggggccgcccagggcatccagttctacctgtaccccaacctgacccggctgtgggacccccaggtgtggatggatgctggcacccagatcttcttctcctttgccatctgcctgggctgcctgacagccctgggcagctacaacaagtaccacaacaactgctacagagactgcatcgccctgtgcttcctgaacagcggcaccagctttgtggccggctttgccatcttcagcatcctgggcttcatgagccaggagcagggcgtgcccatcagcgaggtggccgagagcggccctggcctggccttcatcgcctaccccagggctgtggtgatgctgcccttcagccccctgtgggcctgctgcttcttcttcatggtggtgctgctgggcctggacagccagtttgtgtgtgtggagagcctggtgacagccctggtggacatgtacccccacgtgttcaggaagaagaacagaagagaggtgctgatcctgggcgtgtctgtggtgtccttcctggtgggcctcatcatgctgacagagggcggcatgtatgtgttccagctgtttgactactatgctgccagcggcatgtgcctgctgtttgtggccatctttgagagcctgtgtgtggcctgggtgtatggagccaagcgcttctatgacaacatcgaggacatgattggctaccggccctggcccctcatcaagtactgctggctgttcctgaccccagctgtgtgcacagccaccttcctgttcagcctcatcaagtacacccccctgacctacaacaagaagtacacctacccctggtggggagatgccctgggctggctgctggccctgagctccatggtgtgcatcccagcctggagcctgtaccgcctgggcaccctgaagggccccttccgggagcgcatccggcagctgatgtgcccagctgaggacctgccccagagaaatcctgctggccccagcgccccagccacccccaggaccagcctgctgcggctgacagagctggagagccactgctag

SEQ ID NO: 73191 - DNA, 1533 bp, Artificial Sequence
  derived and/or modified sequence
atggacagccgggtgagcggcaccaccagcaacggcgagaccaagcccgtctaccccgtgatggagaagaaggaagaggacggaaccctagaacggggccattggaataacaaaatggaattcgttttatccgtagcgggcgaaataatcggattaggtaacgtctggaggttcccttatttgtgctataagaatggcggagagcattgcatggagttccagaagaccaatgggtctctgaatggcacttccgaaaatgctacctcacccgtgatagaattctgggagagacgggttttgaagatttcagacggaatacagcatctaggagcactacgctgggagcttgccctctgcctgcttctggcttgggttatttgctatttctgtatatggaagggagtgaagagtaccggaaaggtggtttacttcacagccacctttccctatctgatgttggtggtactgctcatccgcggggttacattgcccggagcggctcaaggcatacagttttacttgtatccgaatctcactagactttgggatccccaagtgtggatggacgccggcacacagatcttcttctcctttgctatttgtctgggctgcctaactgccctgggcagttacaataaataccataataactgctaccgggactgcattgccctgtgcttcttgaactctgggacgtcttttgtcgctggttttgcaatttttagcatcctaggtttcatgagtcaagaacagggcgtgcccatttcagaggtcgcggaatccggccccggcctcgcctttatcgcatacccacgagctgtggtgatgctgccgttcagccccctctgggcatgctgtttctttttcatggtggtgttgcttggactggactcgcagttcgtttgtgtagaatctctggtgactgccctggtggacatgtatcctcacgtgtttcgcaaaaaaaatcgccgggaggttctgatattgggggtcagcgtcgtgagcttcctcgtaggactcattatgctcacggagggaggcatgtatgtcttccaattgttcgactattacgcagctagtggcatgtgcctgctgttcgtcgcaatcttcgagtctttgtgtgttgcatgggtgtatggagcgaagcgcttctatgacaatattgaggatatgatcggataccggccctggccgctgataaagtattgctggcttttcttgacacccgctgtgtgcacagcgacttttttattcagtctgattaagtacactcccctcacttacaacaagaaatatacttacccatggtggggcgatgcacttggttggctacttgctttaagttccatggtttgtattcccgcttggagtctctacagactgggcaccctgaagggaccatttcgggagaggattagacaacttatgtgtcctgcagaggaccttcctcagcgcaatcccgctggtccttccgcaccagctactccaaggacctctttgctgcgcctaactgaattggagtcccattgctag

SEQ ID NO: 73192 - DNA, 1533 bp, Artificial Sequence
  derived and/or modified sequence
atggacagtcgtgtgtcaggcactacatccaacggggagacgaaacctgtgtatcctgtgatggagaagaaagaggaagacggcaccttggaacgaggacattggaacaataaaatggagtttgtcctgtctgtagcaggcgaaattattggactgggcaacgtttggagatttccatatttatgctacaagaacggcggagagcattgtatggagttccagaagacgaacggaagcttaaatgggacctcagagaacgcaacttcccccgtcatcgagttctgggaaaggcgggtcttgaaaatctccgatgggattcaacatctcggtgccctgcggtgggaactggccctgtgcctactgttagcctgggtgatctgctacttttgcatctggaaaggcgttaagtctaccggcaaggtcgtgtattttactgccacatttccctacctcatgctggtggtgctcctaatccggggagtcactcttccaggcgctgcccagggcatccagttctacctgtaccccaatctcactcggttatgggacccacaggtctggatggacgcaggcacacaaatttttttctcatttgccatctgcctcggatgcctaacggccctggggtcatataataaataccacaacaactgctatagagactgtattgctctctgttttctcaattcagggacaagtttcgtcgccggatttgccatattttccatactcggattcatgtcacaggaacagggagtgcccatctctgaagtggccgagagcggcccaggcctggcttttatcgcctaccctcgggctgtagtcatgctgcctttttccccgctgtgggcttgttgtttcttcttcatggtggtgctgcttggtctggatagccagttcgtctgtgttgagagcctggttacagctctggtggacatgtacccccacgtgtttcgcaaaaagaaccggagggaggtgcttattctgggtgtgtccgtggtctccttcctggtggggctcattatgctgactgaggggggaatgtatgtgttccagctgtttgactattacgccgcaagtggcatgtgcttactatttgtggctatcttcgagtcgttatgcgtggcctgggtctacggggctaagcgcttctatgacaacatcgaggatatgattggctaccggccttggccactcattaagtactgctggcttttcttaactcccgctgtgtgcacagcaacatttctctttagtttgatcaaatacactcctcttacttacaacaagaagtatacttacccctggtggggtgatgctctcggctggctgctcgctctatcttcaatggtctgcattcccgcttggagcctgtacaggctgggaacactgaagggaccgttcagggaaagaattaggcagcttatgtgtcctgctgaagacctcccacaaagaaatcccgcaggccctagtgcgcctgccacccccaggacttctctgctgagacttacagagttagagagtcattgctag

SEQ ID NO: 73193 - DNA, 1948 bp, Artificial Sequence
  derived and/or modified sequence
cacactttaaatagccagcaccttctccttcccccttagataattcttctcccctgactggacctctggcagcagcttcactaaggtgggatggatagcagggtctcaggcacaaccagtaatggagagacaaaaccagtgtatccagtcatggaaaagaaggaggaagatggcaccctggagcgggggcactggaacaacaagatggagtttgtgctgtcagtggctggggagatcattggcttaggcaacgtctggaggtttccctatctctgctacaaaaatgggggagaacactgtatggagttccagaagaccaacggctccctgaatggtacctctgagaatgccacctctcctgtcatcgagttctgggagcggcgggtcttgaagatctctgatgggatccagcacctgggggccctgcgctgggagctggctctgtgcctcctgctggcctgggtcatctgctacttctgcatctggaagggggtgaagtccacaggcaaggtggtgtacttcacggccacatttccttacctcatgctggtggtcctgttaattcgaggggtgacgttgcctggggcagcccaaggaattcagttttacctgtacccaaacctcacgcgtctgtgggatccccaggtgtggatggatgcaggcacccagatattcttctccttcgccatctgtcttgggtgcctgacagccctgggcagctacaacaagtaccacaacaactgctacagggactgcatcgccctctgcttcctcaacagcggcaccagctttgtggccggctttgccatcttctccatcctgggcttcatgtctcaggagcagggggtgcccatttctgaggtggccgagtcaggccctggcctggctttcatcgcttacccgcgggctgtggtgatgctgcccttctctcctctctgggcctgctgtttcttcttcatggtcgttctcctgggactggatagccagtttgtgtgtgtagaaagcctggtgacagcgctggtggacatgtaccctcacgtgttccgcaagaagaaccggagggaagtcctcatccttggagtatctgtcgtctccttccttgtggggctgatcatgctcacagagggcggaatgtacgtgttccagctctttgactactatgcggccagtggcatgtgcctcctgttcgtggccatcttcgagtccctctgtgtggcttgggtttacggagccaagcgcttctacgacaacatcgaagacatgattgggtacaggccatggcctcttatcaaatactgttggctcttcctcacaccagctgtgtgcacagccacctttctcttctccctgataaagtacactccgctgacctacaacaagaagtacacgtacccgtggtggggcgatgccctgggctggctcctggctctgtcctccatggtctgcattcctgcctggagcctctacagactcggaaccctcaagggccccttcagagagagaatccgtcagctcatgtgcccagccgaggacctgccccagcggaacccagcaggaccctcggctcccgccacccccaggacctcactgctcagactcacagagctagagtctcactgctagggggcaggcccttggatggtgcctgtgtgcctggccttggggatggctgtggagggaacgtggcagaagcagccccatgtgcttccctgcccccgacctggagtggataagacaagaggggtattttggagtccacctgctgagctggaggcctcccactgcaacttttcagctcaggggttgttgaacagatgtgaaaggccagtgccaagagtgtccctctgagacccttgggaagctgggtgggggctggtaggtggggcgagacttgctggcttcgggccctctcatccttcattccattaaatccacattcttcccgctg

SEQ ID NO: 73194 - protein, 208 aa, Artificial Sequence
  derived and/or modified sequence
MSGESARSLGKGSAPPGPVPEGSIRIYSMRFCPFAERTRLVLKAKGIRHEVININLKNKPEWFFKKNPFGLVPVLENSQGQLIYESAITCEYLDEAYPGKKLLPDDPYEKACQKMILELFSKVLTNKKTTFFGGNSISMIDYLIWPWFERLEAMKLNECVDHTPKLKLWMAAMKEDPTVSALLTSEKDWQGFLELYLQNSPEACDYGL

SEQ ID NO: 73195 - protein, 180 aa, Artificial Sequence
  derived and/or modified sequence
MRFCPFAERTRLVLKAKGIRHEVININLKNKPEWFFKKNPFGLVPVLENSQGQLIYESAITCEYLDEAYPGKKLLPDDPYEKACQKMILELFSKVLTNKKTTFFGGNSISMIDYLIWPWFERLEAMKLNECVDHTPKLKLWMAAMKEDPTVSALLTSEKDWQGFLELYLQNSPEACDYGL

SEQ ID NO: 73196 - DNA, 627 bp, Artificial Sequence
  derived and/or modified sequence
atgtcaggggaatccgccaggtcacttggtaaggggtcggctcctccaggcccagtcccagagggatctattagaatctactccatgcggttttgcccgttcgccgagcgaacgagacttgtgctgaaagcaaaggggataaggcatgaagtcatcaatattaacctcaagaataagccagagtggttcttcaagaagaatccttttggactcgttccagtgctggagaatagtcagggacagctgatctacgagagtgctataacctgcgaatacctggacgaggcttacccgggaaaaaagctgctcccggatgacccttatgaaaaggcctgccagaaaatgatcctcgagctctttagtaaggtgctgaccaataaaaagacaaccttcttcggaggcaattcaatatctatgatcgactatcttatatggccttggtttgagcggctggaagccatgaagctgaatgaatgcgtggaccatacccctaaactgaagctttggatggctgccatgaaggaagatcctacagtgtctgctctactgacttctgaaaaggattggcagggatttctggagttgtatcttcagaattctccggaggcatgcgattacggcttgtag

SEQ ID NO: 73197 - DNA, 543 bp, Artificial Sequence
  derived and/or modified sequence
atgagattctgtccttttgccgagagaaccaggctggtgcttaaggcaaagggcattcggcacgaggtcatcaatattaacctcaagaacaaaccagaatggttctttaagaagaaccctttcggcctcgtgcctgtgttggaaaacagccaagggcagctgatttacgaaagtgccattacgtgtgagtatctggacgaggcttaccctggcaaaaaactcttgccagacgatccctatgagaaagcttgccagaagatgattcttgaactgttctccaaggtactcaccaataagaaaacaaccttttttgggggaaatagtattagcatgatagattacctcatttggccttggtttgaaaggctcgaggccatgaagcttaacgagtgtgtggaccacacgcccaagctgaagctctggatggctgcgatgaaggaagatccaacagttagcgctttgcttacttctgagaaagattggcagggattcctagaattgtacctgcagaattcaccagaggcttgcgattatggcctgtag

SEQ ID NO: 73198 - DNA, 900 bp, Artificial Sequence
  derived and/or modified sequence
cccttggccagcgagatgctttgacacagccccttaagatgttttaagggctatcccataaagccgggaaggcacaacgggtggagctggcggccgccgggggcaggcacttttgagctaaggaggaagcgggggagggaaggagggcgggaaggacgcgccacctacttcctgaatcccctgcaaaccccagaggagctcggcctgcgctgcgccacgatgtccggggagtcagccaggagcttggggaagggaagcgcgcccccggggccggtcccggagggctcgatccgcatctacagcatgaggttctgcccgtttgctgagaggacgcgtctagtcctgaaggccaagggaatcaggcatgaagtcatcaatatcaacctgaaaaataagcctgagtggttctttaagaaaaatccctttggtctggtgccagttctggaaaacagtcagggtcagctgatctacgagtctgccatcacctgtgagtacctggatgaagcatacccagggaagaagctgttgccggatgacccctatgagaaagcttgccagaagatgatcttagagttgttttctaaggttctgactaataagaagacgaccttctttggtggcaattctatctctatgattgattacctcatctggccctggtttgaacggctggaagcaatgaagttaaatgagtgtgtagaccacactccaaaactgaaactgtggatggcagccatgaaggaagatcccacagtctcagccctgcttactagtgagaaagactggcaaggtttcctagagctctacttacagaacagccctgaggcctgtgactatgggctctgaagggggcaggagtcagcaataaagctatgtctgatattttccttcactaatatg

SEQ ID NO: 73199 - DNA, 592 bp, Artificial Sequence
  derived and/or modified sequence
gaagcgcgcccccggggccggtcccggagggctcgatccgcatctacagcatgaggttctgcccgtttgctgagaggacgcgtctagtcctgaaggccaagggaatcaggcatgaagtcatcaatatcaacctgaaaaataagcctgagtggttctttaagaaaaatccctttggtctggtgccagttctggaaaacagtcagggtcagctgatctacgagtctgccatcacctgtgagtacctggatgaagcatacccagggaagaagctgttgccggatgacccctatgagaaagcttgccagaagatgatcttagagttgttttctaaggttctgactaataagaagacgaccttctttggtggcaattctatctctatgattgattacctcatctggccctggtttgaacggctggaagcaatgaagttaaatgagtgtgtagaccacactccaaaactgaaactgtggatggcagccatgaaggaagatcccacagtctcagccctgcttactagtgagaaagactggcaaggtttcctagagctctacttacagaacagccctgaggcctgtgactatgggctctg

SEQ ID NO: 73200 - DNA, 627 bp, Artificial Sequence
  derived and/or modified sequence
atgtctggagagagcgcccggagcctgggcaaaggaagtgcccctcctggccctgtgcctgagggcagcatccgcatctacagcatgaggttctgcccctttgctgagaggacccggctggtgctgaaggccaagggcatcagacatgaagtcatcaacatcaacctgaagaacaagccagagtggttcttcaagaagaaccccttcggcctggtgcctgtgctggagaacagccagggccagctgatctatgagagcgccatcacctgtgagtacctggatgaggcctacccaggcaagaagctgctgcctgatgacccctatgagaaggcctgccagaagatgatcctggagctgttcagcaaggtgctgaccaacaagaagaccaccttcttcggcggcaacagcatctccatgattgactacctgatctggccctggtttgagcggctggaggccatgaagctgaatgaatgtgtggaccacacccccaagctgaagctgtggatggccgccatgaaggaggaccccaccgtgtctgccctgctgaccagcgagaaggactggcagggcttcctggagctgtacctgcagaacagccctgaggcctgtgactatggcctgtag

SEQ ID NO: 73201 - DNA, 543 bp, Artificial Sequence
  derived and/or modified sequence
atgaggttctgcccctttgctgagaggacccggctggtgctgaaggccaagggcatcagacatgaagtcatcaacatcaacctgaagaacaagccagagtggttcttcaagaagaaccccttcggcctggtgcctgtgctggagaacagccagggccagctgatctatgagagcgccatcacctgtgagtacctggatgaggcctacccaggcaagaagctgctgcctgatgacccctatgagaaggcctgccagaagatgatcctggagctgttcagcaaggtgctgaccaacaagaagaccaccttcttcggcggcaacagcatctccatgattgactacctgatctggccctggtttgagcggctggaggccatgaagctgaatgaatgtgtggaccacacccccaagctgaagctgtggatggccgccatgaaggaggaccccaccgtgtctgccctgctgaccagcgagaaggactggcagggcttcctggagctgtacctgcagaacagccctgaggcctgtgactatggcctgtag

SEQ ID NO: 73202 - DNA, 627 bp, Artificial Sequence
  derived and/or modified sequence
atgagcggcgagagcgcccggagcctgggcaagggcagcgccccccccggtccagtgcctgagggaagcatcagaatctattccatgagattttgtccatttgctgaacgaaccaggctggtgctgaaagcgaaaggcatccgacatgaggtcataaatattaatctgaaaaataagcccgagtggttcttcaagaagaatccttttgggttagtgcccgtgctggagaactcccagggtcaattgatatatgagtcagctattacctgtgagtatttggatgaggcttaccctggaaagaaactgctccccgacgacccatatgaaaaggcatgtcagaagatgatattagagcttttttcaaaagtgctgactaacaagaaaacaacattcttcgggggaaacagtatctctatgatcgactacctcatatggccatggtttgagcgtctcgaggcgatgaaattgaacgagtgtgtggaccacactcctaaactcaagctttggatggccgccatgaaggaggatccaacagtgagcgcccttttaacctccgagaaagactggcagggattcctggaactgtacctccagaactcgcccgaggcctgcgactatgggctgtag

SEQ ID NO: 73203 - DNA, 543 bp, Artificial Sequence
  derived and/or modified sequence
atgcggttctgccccttcgccgagcggacccggctggtgctgaaggctaaggggatcagacatgaggtgatcaacatcaacctcaagaacaagccggaatggttttttaaaaaaaatccctttgggttagtgcccgtcctcgaaaattcacaagggcagctgatctatgagtcggccatcacctgcgagtatctcgatgaagcatatcccggcaaaaaattgttgcctgacgacccatatgaaaaggcttgtcaaaagatgattttggagctcttcagtaaagttctgaccaataaaaagacaaccttcttcggaggcaactccatttcaatgattgattatcttatctggccatggtttgagaggctggaagctatgaagttgaacgagtgcgtggaccacacccccaagcttaagctctggatggcggccatgaaagaagacccgacggtctctgcactcctcactagcgagaaagattggcagggattcttagagctgtatctacagaattccccagaggcttgtgattacggactttag

SEQ ID NO: 73204 - DNA, 627 bp, Artificial Sequence
  derived and/or modified sequence
atgtctggcgagagcgcgagatctctggggaaaggaagcgctcccccaggacccgtgcccgaaggaagcattaggatttactctatgaggttttgcccatttgcggagagaacccgcctggttttaaaggccaaaggaatcagacatgaagtcattaatattaacttgaagaacaagccagaatggttttttaagaaaaaccccttcggcctcgtgccagtgctagagaattcgcaaggtcagctgatttacgagtccgccatcacctgcgagtatcttgatgaggcctacccaggcaaaaagcttctccctgacgatccttacgagaaggcctgccagaagatgatacttgagctgttcagtaaagttctgaccaataagaagaccaccttctttggaggaaatagtattagcatgatagattaccttatctggccttggtttgagaggctcgaggcgatgaagcttaatgagtgtgttgatcacacccccaaactgaagctgtggatggcagccatgaaggaggacccgactgtgtctgcattactgacatcagaaaaagattggcagggattcctggaactgtatctccagaattcccctgaagcttgcgattatggactgtag

SEQ ID NO: 73205 - DNA, 543 bp, Artificial Sequence
  derived and/or modified sequence
atgcggttttgtcctttcgccgaacgcacccgcctcgttctcaaagctaaaggcatccggcatgaagttatcaatattaaccttaagaacaaacccgaatggttttttaagaagaacccatttggcttggtcccagtcttagagaatagccaggggcagctgatttatgaatccgcaatcacctgcgagtatctcgatgaagcttatcctggtaagaagctgttgcctgatgatccttatgaaaaagcttgtcagaaaatgatcttggagctgttttcaaaggtgctgaccaataagaaaacaaccttctttgggggtaatagcatctcgatgatcgattacttgatatggccgtggttcgaacggcttgaagcgatgaagctcaacgagtgcgtagaccacacacccaagctgaagctttggatggcagcaatgaaggaggaccctaccgtctcggcattgctgacgagtgagaaggactggcagggatttctggaactttaccttcagaacagccctgaagcctgcgactatgggctctag

SEQ ID NO: 73206 - DNA, 627 bp, Artificial Sequence
  derived and/or modified sequence
atgagcggcgagagcgccagaagcctgggcaagggcagcgccccccccggccccgtgcccgagggcagcatcagaatctacagcatgagattctgccccttcgccgagagaaccagactggtgctgaaggccaagggcatcagacacgaggtgatcaacatcaacctgaagaacaagcccgagtggttcttcaagaagaaccccttcggcctggtgcccgtgctggagaacagccagggccagctgatctacgagagcgccatcacctgcgagtacctggacgaggcctaccccggcaagaagctgctgcccgacgacccctacgagaaggcctgccagaagatgatcctggagctgttcagcaaggtgctgaccaacaagaagaccaccttcttcggcggcaacagcatcagcatgatcgactacctgatctggccctggttcgagagactggaggccatgaagctgaacgagtgcgtggaccacacccccaagctgaagctgtggatggccgccatgaaggaggaccccaccgtgagcgccctgctgaccagcgagaaggactggcagggcttcctggagctgtacctgcagaacagccccgaggcctgcgactacggcctgtag

SEQ ID NO: 73207 - DNA, 543 bp, Artificial Sequence
  derived and/or modified sequence
atgagattctgccccttcgccgagagaaccagactggtgctgaaggccaagggcatcagacacgaggtgatcaacatcaacctgaagaacaagcccgagtggttcttcaagaagaaccccttcggcctggtgcccgtgctggagaacagccagggccagctgatctacgagagcgccatcacctgcgagtacctggacgaggcctaccccggcaagaagctgctgcccgacgacccctacgagaaggcctgccagaagatgatcctggagctgttcagcaaggtgctgaccaacaagaagaccaccttcttcggcggcaacagcatcagcatgatcgactacctgatctggccctggttcgagagactggaggccatgaagctgaacgagtgcgtggaccacacccccaagctgaagctgtggatggccgccatgaaggaggaccccaccgtgagcgccctgctgaccagcgagaaggactggcagggcttcctggagctgtacctgcagaacagccccgaggcctgcgactacggcctgtag

SEQ ID NO: 73208 - DNA, 603 bp, Artificial Sequence
  derived and/or modified sequence
atgaggttctgtcccttcgcagaacgtacccggctggttctgaaagcaaaagggatccggcacgaggttatcaatatcaatctgaagaacaagcccgagtggttttttaaaaagaacccattcggacttgtacccgtcttggaaaattctcaagggcagcttatttatgaaagcgccatcacttgtgagtatttagatgaggcgtacccgggtaagaaactccttcccgacgatccatatgaaaaagcttgtcaaaaaatgatcctcgagctgttcagcaaggtgccgtctctcgtcggctcttttattagatcccaaaacaaggaagactatgctggactcaaggaggaattcagaaaagagttcaccaagctagaagaagtcctgacaaataagaagacaacctttttcggagggaacagcatttctatgatagattatcttatttggccctggttcgaacgtctcgaggccatgaagctgaatgaatgtgtggatcacacccccaagcttaagctatggatggctgccatgaaagaggatcctacagtgtcggctctcctgacatcggagaaagattggcaagggtttttagagctgtag

SEQ ID NO: 73209 - DNA, 642 bp, Artificial Sequence
  derived and/or modified sequence
atgcggttttgccctttcgccgagcgcacccggctcgtgctaaaggccaaagggatccgtcacgaggttatcaacattaacctaaagaataaacctgagtggtttttcaaaaagaaccctttcggccttgtccccgtattggaaaacagccagggccagctcatctatgagtctgccatcacttgcgagtacctcgacgaagcatacccagggaaaaaactgctgccggatgacccatacgagaaagcttgccaaaagatgattttagaactattctctaaagtcccctcactcgttgggagctttatacggagccaaaacaaagaggattatgcaggcctcaaagaagaatttcgtaaggagttcactaaactggaagaggtgctcacaaacaagaagacaaccttcttcggtggaaacagcatctctatgattgattacctgatatggccctggttcgaaagactcgaagctatgaagttgaacgaatgcgttgatcacacaccaaaactgaagctctggatggccgcgatgaaagaagatcctacggtctcagcattgctgacttccgagaaagattggcaaggatttctggaattatatctccagaattctccagaggcctgtgactatggactatag

SEQ ID NO: 73210 - DNA, 603 bp, Artificial Sequence
  derived and/or modified sequence
atgaggttctgcccctttgctgagaggacccggctggtgctgaaggccaagggcatcagacatgaagtcatcaacatcaacctgaagaacaagccagagtggttcttcaagaagaaccccttcggcctggtgcctgtgctggagaacagccagggccagctgatctatgagagcgccatcacctgtgagtacctggatgaggcctacccaggcaagaagctgctgcctgatgacccctatgagaaggcctgccagaagatgatcctggagctgttcagcaaggtgcccagcctggtgggcagcttcatccgcagccagaacaaggaggactatgccggcctgaaggaggagttcaggaaggagttcaccaagctggaggaggtgctgaccaacaagaagaccaccttctttggaggcaacagcatctccatgattgactacctgatctggccctggtttgagcggctggaggccatgaagctgaatgaatgtgtggaccacacccccaagctgaagctgtggatggccgccatgaaggaggaccccaccgtgtctgccctgctgaccagcgagaaggactggcagggcttcctggagctgtag

SEQ ID NO: 73211 - DNA, 642 bp, Artificial Sequence
  derived and/or modified sequence
atgaggttctgcccctttgctgagaggacccggctggtgctgaaggccaagggcatcagacatgaagtcatcaacatcaacctgaagaacaagccagagtggttcttcaagaagaaccccttcggcctggtgcctgtgctggagaacagccagggccagctgatctatgagagcgccatcacctgtgagtacctggatgaggcctacccaggcaagaagctgctgcctgatgacccctatgagaaggcctgccagaagatgatcctggagctgttcagcaaggtgcccagcctggtgggcagcttcatccgcagccagaacaaggaggactatgccggcctgaaggaggagttcaggaaggagttcaccaagctggaggaggtgctgaccaacaagaagaccaccttctttggaggcaacagcatctccatgattgactacctgatctggccctggtttgagcggctggaggccatgaagctgaatgaatgtgtggaccacacccccaagctgaagctgtggatggccgccatgaaggaggaccccaccgtgtctgccctgctgaccagcgagaaggactggcagggcttcctggagctgtacctgcagaacagccctgaggcctgtgactatggcctgtag

SEQ ID NO: 73212 - DNA, 603 bp, Artificial Sequence
  derived and/or modified sequence
atgcggttctgccccttcgccgagcggacccggctggtgctgaaggcaaagggtattcggcatgaagtgatcaatataaacctcaagaacaaaccagagtggtttttcaagaaaaatcccttcggtctggttcctgtactggagaactctcagggccagctaatatatgagtccgctatcacgtgtgagtatctggacgaagcttacccagggaaaaaacttctgcccgatgacccctacgaaaaggcctgccaaaaaatgatactagagttgttctctaaagtgcctagccttgttggcagcttcatccggagccagaacaaggaagactatgcagggctaaaggaggaattcagaaaagagtttacaaagctcgaggaggtcctgactaacaagaagacgaccttttttggtggcaacagcatttctatgattgactatctgatttggccttggtttgagcgcttagaagcaatgaagttaaatgaatgcgtagaccacactccaaagctcaagctgtggatggctgcgatgaaggaggacccgaccgtgtccgcgctgttgacctccgagaaggactggcagggctttctggaattatag

SEQ ID NO: 73213 - DNA, 642 bp, Artificial Sequence
  derived and/or modified sequence
atgcggttctgccccttcgccgagcggacccggctggtgctgaaggcgaaaggcatccggcatgaggtgattaacatcaacctgaagaataagccggaatggttttttaagaagaatccttttgggctcgttcccgtcctcgaaaactcccaggggcagttaatttacgagtcagctattacctgcgaatatctggatgaggcctatcctggtaagaaactccttccggatgacccttacgagaaagcctgtcagaagatgattctcgaactgttctcaaaggtcccaagcctcgtgggcagcttcattagatctcagaataaagaggattatgcggggctcaaagaggagttccggaaagaatttaccaaactggaagaggttctcaccaataagaaaaccaccttttttggcgggaactccatctccatgattgactacttgatctggccctggttcgaaaggctggaggcgatgaagctgaatgagtgcgtggaccacactccaaagctgaagttgtggatggccgccatgaaggaagatccaacagtgagcgcgctgcttacctctgaaaaagactggcagggctttctggagctttaccttcagaacagccctgaagcctgcgactatggactgtag

SEQ ID NO: 73214 - DNA, 603 bp, Artificial Sequence
  derived and/or modified sequence
atgcgtttttgtccatttgcggagaggactagactggttcttaaggctaaaggcattaggcacgaggtgatcaacatcaatctcaaaaacaagcctgaatggtttttcaagaaaaaccctttcgggcttgtccccgtgcttgagaacagccagggacagctcatctatgagtcagccatcacatgtgagtatctggatgaagcataccccggaaagaaactgctgccagacgatccatacgaaaaggcctgccagaaaatgattctggaactcttttctaaagtaccatcactggtgggatcattcataaggtcccagaacaaggaggactatgcaggacttaaagaagaatttaggaaagagtttacaaaactggaggaggtgctgacaaataagaagacgaccttctttggcggaaacagtataagcatgatagattacctgatttggccatggtttgaacgactagaagccatgaaacttaatgaatgtgttgaccacacccccaagctgaagctgtggatggccgcaatgaaagaggatccaacggtgagcgcgctgttgacttccgagaaagattggcaaggatttctggaactctag

SEQ ID NO: 73215 - DNA, 642 bp, Artificial Sequence
  derived and/or modified sequence
atgaggttctgtccatttgctgagagaactcgacttgttctcaaggctaaggggatcagacatgaggtaatcaatatcaatctgaaaaacaagcccgagtggtttttcaaaaagaatccctttggcctcgttcctgttctcgaaaatagccaagggcagctgatttacgagtccgcgatcacctgcgagtacctggacgaggcttacccgggtaaaaagttgctcccagatgatccttacgaaaaggcctgccagaagatgatacttgagctgtttagcaaggtgccttcgcttgtgggatctttcattaggagtcagaacaaagaagactacgctgggctgaaggaagaattccggaaagaatttacgaagctggaagaagtgttgaccaacaagaagacaaccttttttgggggaaactcgatcagcatgattgactatctcatctggccctggtttgagcgactcgaggccatgaaactgaacgagtgtgttgatcatacacctaaactcaaactgtggatggccgcaatgaaggaggacccgactgtcagtgccctgctgaccagcgagaaagattggcaaggctttctggaattatatcttcagaacagcccagaagcctgcgactacggcttgtag

SEQ ID NO: 73216 - DNA, 603 bp, Artificial Sequence
  derived and/or modified sequence
atgagattctgccccttcgccgagagaaccagactggtgctgaaggccaagggcatcagacacgaggtgatcaacatcaacctgaagaacaagcccgagtggttcttcaagaagaaccccttcggcctggtgcccgtgctggagaacagccagggccagctgatctacgagagcgccatcacctgcgagtacctggacgaggcctaccccggcaagaagctgctgcccgacgacccctacgagaaggcctgccagaagatgatcctggagctgttcagcaaggtgcccagcctggtgggcagcttcatcagaagccagaacaaggaggactacgccggcctgaaggaggagttcagaaaggagttcaccaagctggaggaggtgctgaccaacaagaagaccaccttcttcggcggcaacagcatcagcatgatcgactacctgatctggccctggttcgagagactggaggccatgaagctgaacgagtgcgtggaccacacccccaagctgaagctgtggatggccgccatgaaggaggaccccaccgtgagcgccctgctgaccagcgagaaggactggcagggcttcctggagctgtag

SEQ ID NO: 73217 - DNA, 642 bp, Artificial Sequence
  derived and/or modified sequence
atgagattctgccccttcgccgagagaaccagactggtgctgaaggccaagggcatcagacacgaggtgatcaacatcaacctgaagaacaagcccgagtggttcttcaagaagaaccccttcggcctggtgcccgtgctggagaacagccagggccagctgatctacgagagcgccatcacctgcgagtacctggacgaggcctaccccggcaagaagctgctgcccgacgacccctacgagaaggcctgccagaagatgatcctggagctgttcagcaaggtgcccagcctggtgggcagcttcatcagaagccagaacaaggaggactacgccggcctgaaggaggagttcagaaaggagttcaccaagctggaggaggtgctgaccaacaagaagaccaccttcttcggcggcaacagcatcagcatgatcgactacctgatctggccctggttcgagagactggaggccatgaagctgaacgagtgcgtggaccacacccccaagctgaagctgtggatggccgccatgaaggaggaccccaccgtgagcgccctgctgaccagcgagaaggactggcagggcttcctggagctgtacctgcagaacagccccgaggcctgcgactacggcctgtag

SEQ ID NO: 73218 - protein, 209 aa, Artificial Sequence
  derived and/or modified sequence
MSGDATRTLGKGSQPPGPVPEGLIRIYSMRFCPYSHRTRLVLKAKDIRHEVVNINLRNKPEWYYTKHPFGHIPVLETSQCQLIYESVIACEYLDDAYPGRKLFPYDPYERARQKMLLELFCKILEYQNTTFFGGTCISMIDYLLWPWFERLDVYGILDCVSHTPALRLWISAMKWDPTVCALLMDKSIFQGFLNLYFQNNPNAFDFGLC

SEQ ID NO: 73219 - DNA, 630 bp, Artificial Sequence
  derived and/or modified sequence
atgtctggcgatgcaactagaacactgggtaagggatcccagccccccgggccggtgcctgagggattaattcgtatctattcaatgaggttctgtccctatagtcaccgaactagattggtcctgaaagccaaagatattaggcacgaggtagtgaatataaacttgcgaaataagccagagtggtattatacaaaacacccttttggacacatacctgtcctggagaccagccagtgtcagttgatctacgaaagtgtaatcgcctgtgagtatctcgacgatgcttacccgggaaggaaactgtttccctacgacccctacgagagagctaggcagaaaatgctccttgagctgttctgcaaaatcctggaatatcagaatacaacattctttggcgggacctgcatctccatgattgattatttgctgtggccatggttcgagcggctggacgtatacggaatactggattgcgtatctcacactcctgccctaaggctgtggattagcgccatgaaatgggatccaaccgtctgcgcccttctgatggacaagtcaattttccaggggtttcttaatttgtactttcaaaacaatccaaatgcctttgattttggcctttgctag

SEQ ID NO: 73220 - DNA, 1391 bp, Artificial Sequence
  derived and/or modified sequence
accacctctgctgccgcgcgcctaccggagccgcttggccctagtgctttccagcggatttcccctcaggtgcggagccgggtgccggggtcccacagccaaccactaccggttcctctttcgtcagccaccggcgccggcaggacccgcgaatcccgatctccaggagcctgtaaggaggccgcccattggctcagccgcactgctgggcaggtacttccaaagctttgaggattggctgatgctctgggcgccggggctagttggcgggtaggatcacgtgcgaggggcaggccccgtctaggccccgcctccttgctgctgctgccgccgccaatcctggtccggttgcccgagttcccggaggtctctcgcgggacctctctcaccgccaccgctcctactctcgggcttccaaatctggggcgatgtctccccaggttaaattaccctagctcctgctccagatcgcttccccgtgccccgccagagcccagtagttcaaaaattaaatttggggcaaggggtgcgcgccagagcgcagctgtttctggagcctgcggcagcggtggcgagccacagggcggcgaccgtgagctccgggagctgcgcaaaccacctggagaccatgtctggggatgcgaccaggaccctggggaaaggaagccagcccccagggccagtcccggaggggctgatccgcatctacagcatgaggttctgcccctattctcacaggacccgcctcgtcctcaaggccaaagacatcagacatgaagtggtcaacattaacctgagaaacaagcctgaatggtactatacaaagcacccttttggccacattcctgtcctggagaccagccaatgtcaactgatctatgaatctgttattgcttgtgagtacctggatgatgcttatccaggaaggaagctgtttccatatgacccttatgaacgagctcgccaaaagatgttattggagctattttgtaagattcttgagtatcagaacaccaccttctttggtggaacctgtatatccatgattgattacctcctctggccctggtttgagcggctggatgtgtatgggatactggactgtgtgagccacacgccagccctgcggctctggatatcagccatgaagtgggaccccacagtctgtgctcttctcatggataagagcattttccagggcttcttgaatctctattttcagaacaaccctaatgcctttgactttgggctgtgctgagtctcactgtccaccccttcgctgtccagaattccccagcttgttgggagtctacgtcacggcttgtcttgggaaccaatccgtctctctttcttttctttgaagttcccaataaaatgaaaacaggaaatgt

SEQ ID NO: 73221 - DNA, 630 bp, Artificial Sequence
  derived and/or modified sequence
atgtctggagatgccaccaggaccctgggcaagggcagccagcccccaggccctgtgcctgagggcctcatccgcatctacagcatgaggttctgcccctacagccacaggacccggctggtgctgaaggccaaggacatcagacatgaggtggtgaacatcaacctgaggaacaagccagagtggtactacaccaagcaccccttcggccacatccctgtgctggagaccagccagtgccagctgatctatgagagcgtcatcgcctgtgagtacctggatgatgcctacccaggcaggaagctgttcccctatgacccctatgaaagagcccggcagaagatgctgctggagctgttctgcaagatcctggagtaccagaacaccaccttcttcggcggcacctgcatctccatgattgactacctgctgtggccctggtttgagcggctggatgtgtatggcatcctggactgtgtgagccacaccccagccctgcggctgtggatcagcgccatgaagtgggaccccaccgtgtgtgccctgctgatggacaagagcatcttccagggcttcctgaacctgtacttccagaacaaccccaatgcctttgattttggcctgtgctag

SEQ ID NO: 73222 - DNA, 630 bp, Artificial Sequence
  derived and/or modified sequence
atgagcggcgacgccacccggaccctgggcaagggcagccagccccccggccctgtgccggaaggtctgattcgcatctatagcatgaggttttgtccatacagccacagaacccggttggtgctgaaggcaaaggacattcggcatgaggtggtcaatatcaacttgcgtaacaaaccagagtggtattacaccaaacatccgtttggccatatccccgtgctggagacctctcagtgtcagctgatttatgaaagcgtcatcgcatgtgagtacctggacgatgcctatccaggcaggaagctgtttccgtacgacccctacgaaagagcaaggcaaaagatgttgctagaactgttttgtaagattctcgaataccagaacactaccttcttcgggggaacatgcatcagcatgatcgattaccttctgtggccttggttcgagaggctggacgtctacggcattttagattgcgtgtcgcatacacccgcactgagactgtggatctccgcaatgaagtgggaccctacggtttgcgctcttctcatggacaaatccattttccagggcttcctgaatttgtacttccaaaacaatccgaacgcgtttgatttcgggttatgttag

SEQ ID NO: 73223 - DNA, 630 bp, Artificial Sequence
  derived and/or modified sequence
atgtcaggtgacgcaaccagaaccttgggaaagggatcacaaccaccagggcctgtacccgaagggctgatcagaatctacagcatgcggttctgtccatattcccacagaaccaggctcgtcctgaaagcaaaggatattcgacacgaagtggtgaacatcaacttgagaaataaaccagagtggtactataccaagcatcccttcggccacatccctgtgctggaaacttcacaatgtcagctgatttatgaatccgtgatcgcctgcgagtatctcgatgacgcctaccccggtcggaaactgttcccgtatgatccctatgaaagggccagacagaaaatgctgcttgagctgttctgtaaaatcctggaatatcagaatactacttttttcggtggcacttgcatttctatgattgattacctcctttggccctggttcgaacgcctcgatgtgtacggcatcttggactgtgtttctcacaccccggctttgagattatggatatcagcaatgaagtgggaccctaccgtctgtgccctgcttatggataagtcgatctttcagggctttctgaacctgtatttccagaacaatcctaatgcgttcgatttcgggctctgctag

SEQ ID NO: 73224 - DNA, 630 bp, Artificial Sequence
  derived and/or modified sequence
atgagcggcgacgccaccagaaccctgggcaagggcagccagccccccggccccgtgcccgagggcctgatcagaatctacagcatgagattctgcccctacagccacagaaccagactggtgctgaaggccaaggacatcagacacgaggtggtgaacatcaacctgagaaacaagcccgagtggtactacaccaagcaccccttcggccacatccccgtgctggagaccagccagtgccagctgatctacgagagcgtgatcgcctgcgagtacctggacgacgcctaccccggcagaaagctgttcccctacgacccctacgagagagccagacagaagatgctgctggagctgttctgcaagatcctggagtaccagaacaccaccttcttcggcggcacctgcatcagcatgatcgactacctgctgtggccctggttcgagagactggacgtgtacggcatcctggactgcgtgagccacacccccgccctgagactgtggatcagcgccatgaagtgggaccccaccgtgtgcgccctgctgatggacaagagcatcttccagggcttcctgaacctgtacttccagaacaaccccaacgccttcgacttcggcctgtgctag

SEQ ID NO: 73225 - DNA, 648 bp, Artificial Sequence
  derived and/or modified sequence
atgcgcttttgcccgtatagtcacagaactagacttgtgctcaaagcgaaagacattcgacacgaagtcgtgaacataaatctccgtaacaagccagagtggtactacaccaagcatccatttgggcacattccggtgttagaaacctcccagtgtcagttaatctacgagagtgtaatcgcatgcgagtatttggatgatgcatatccgggccgtaagctctttccatacgatccttacgagcgagccagacaaaagatgctgctcgagcttttctgcaaagtgccccacctgacgaaagaatgcctggtggcattgcgttgtgggcgggagtgcactaacctgaaggccgccctgagacaggagttctccaacctagaagagattttagagtatcagaatactaccttcttcggcgggacctgcatctcaatgatcgactacttattatggccttggttcgagcgacttgacgtctacggaatcctggactgtgtgtctcatacccccgccctgcgcctatggatatccgcgatgaaatgggatccaacagtgtgcgcactcctgatggataaatctatattccagggatttttgaatttgtacttccagaataatcctaacgcttttgacttcggcctttgctag

SEQ ID NO: 73226 - DNA, 648 bp, Artificial Sequence
  derived and/or modified sequence
atgaggttctgcccctacagccacaggacccggctggtgctgaaggccaaggacatcagacatgaggtggtgaacatcaacctgaggaacaagccagagtggtactacaccaagcaccccttcggccacatccctgtgctggagaccagccagtgccagctgatctatgagagcgtcatcgcctgtgagtacctggatgatgcctacccaggcaggaagctgttcccctatgacccctatgaaagagcccggcagaagatgctgctggagctgttctgcaaggtgccccacctgaccaaggaatgtctggtggccctgcgctgtggcagagaatgtaccaacctgaaggccgccctgcggcaggagttcagcaacctggaggagatcctggagtaccagaacaccaccttcttcggcggcacctgcatctccatgattgactacctgctgtggccctggtttgagcggctggatgtgtatggcatcctggactgtgtgagccacaccccagccctgcggctgtggatcagcgccatgaagtgggaccccaccgtgtgtgccctgctgatggacaagagcatcttccagggcttcctgaacctgtacttccagaacaaccccaatgcctttgattttggcctgtgctag

SEQ ID NO: 73227 - DNA, 648 bp, Artificial Sequence
  derived and/or modified sequence
atgcggttctgcccctacagccaccggacccggctggtgctgaaggctaaggatattaggcatgaggtggttaacatcaacctcagaaacaagcccgaatggtactataccaaacatccctttggacacatccccgtgctcgaaaccagccagtgccaactgatctacgagtccgtcattgcttgcgagtatcttgacgatgcctaccctggtagaaagctgtttccatatgatccatacgaacgcgctcgccagaaaatgctgttggagctgttctgtaaggtgccccacttgactaaagagtgcctagtggctttgcgctgtggcagagagtgcacaaacctgaaggctgctctgagacaagagttctccaacctggaagagatcctggagtatcaaaacactactttctttggcggcacatgtataagcatgattgattacctgctctggccgtggttcgagcgcctggacgtctacggcatactcgattgtgtgagccacaccccagctttacgcctgtggatttctgccatgaagtgggaccctactgtgtgtgccctgctgatggacaagtccatttttcaaggatttcttaatctttacttccagaataatccaaatgcattcgattttgggctgtgttag

SEQ ID NO: 73228 - DNA, 648 bp, Artificial Sequence
  derived and/or modified sequence
atgaggttctgcccgtatagtcacagaactagattagtcctcaaagctaaagacattaggcacgaagtcgtgaacatcaatctaagaaacaaacccgagtggtactacactaaacatcctttcggccacatacctgtcttggaaacgtcccaatgtcagcttatctacgagtccgtgattgcctgtgagtatttagatgatgcataccccggacgcaagctcttcccttacgacccatacgagcgcgctaggcagaagatgctgctggaactgttttgcaaggtgccccacctgacaaaagaatgcctcgtggcactacggtgcgggcgagagtgtactaacctgaaagcagcattacggcaggagttttcaaatctggaggaaatcttagagtaccagaacactactttctttgggggaacatgtatctctatgatcgattacctgctttggccatggtttgaaagactggacgtatacggaatcctcgattgcgtctcacatactccagccctcagattatggatcagcgccatgaagtgggaccccacggtttgcgctttgctgatggataagtccatcttccagggcttcctgaatctctactttcagaacaatccgaacgctttcgacttcggtctgtgctag

SEQ ID NO: 73229 - DNA, 648 bp, Artificial Sequence
  derived and/or modified sequence
atgagattctgcccctacagccacagaaccagactggtgctgaaggccaaggacatcagacacgaggtggtgaacatcaacctgagaaacaagcccgagtggtactacaccaagcaccccttcggccacatccccgtgctggagaccagccagtgccagctgatctacgagagcgtgatcgcctgcgagtacctggacgacgcctaccccggcagaaagctgttcccctacgacccctacgagagagccagacagaagatgctgctggagctgttctgcaaggtgccccacctgaccaaggagtgcctggtggccctgagatgcggcagagagtgcaccaacctgaaggccgccctgagacaggagttcagcaacctggaggagatcctggagtaccagaacaccaccttcttcggcggcacctgcatcagcatgatcgactacctgctgtggccctggttcgagagactggacgtgtacggcatcctggactgcgtgagccacacccccgccctgagactgtggatcagcgccatgaagtgggaccccaccgtgtgcgccctgctgatggacaagagcatcttccagggcttcctgaacctgtacttccagaacaaccccaacgccttcgacttcggcctgtgctag

SEQ ID NO: 73230 - protein, 399 aa, Artificial Sequence
  derived and/or modified sequence
MAFVTSGELVRHRRYKHTHEKPFKCSMCDYASVEVSKLKRHIRSHTGERPFQCSLCSYASRDTYKLKRHMRTHSGEKPYECYICHARFTQSGTMKMHILQKHTENVAKFHCPHCDTVIARKSDLGVHLRKQHSYIEQGKKCRYCDAVFHERYALIQHQKSHKNEKRFKCDQCDYACRQERHMIMHKRTHTGEKPYACSHCDKTFRQKQLLDMHFKRYHDPNFVPAAFVCSKCGKTFTRRNTMARHADNCAGPDGVEGENGGETKKSKRGRKRKMRSKKEDSSDSENAEPDLDDNEDEEEPAVEIEPEPEPQPVTPAPPPAKKRRGRPPGRTNQPKQNQPTAIIQVEDQNTGAIENIIVEVKKEPDAEPAEGEEEEAQPAATDAPNGDLTPEMILSMMDR

SEQ ID NO: 73231 - DNA, 1200 bp, Artificial Sequence
  derived and/or modified sequence
atggccttcgtcacctcaggggaactcgttaggcatagacggtacaagcacactcatgagaaaccattcaaatgttccatgtgtgattatgcatccgtcgaggtttctaaactcaaaaggcatatcagatcccacactggagaaaggccatttcagtgctctctgtgttcttacgcttccagagacacctacaaactcaaacgtcacatgaggactcatagtggggaaaaaccctatgaatgttatatctgccatgcacgctttactcagagcggtacaatgaagatgcacatcctccagaaacacacagaaaacgtcgccaaatttcattgcccacactgcgacactgttattgcaaggaaatctgatttgggtgtccatctgcggaagcagcatagctatatagagcaggggaagaagtgcagatattgtgacgcggtctttcacgagcgatatgcgctcattcagcatcagaagagtcacaaaaacgagaaacgctttaagtgtgatcagtgtgactacgcctgcaggcaggaaaggcatatgatcatgcacaaaaggacacacacaggcgaaaaaccatacgcttgctcccactgtgacaagacctttaggcagaaacagctgctggatatgcatttcaaacgatatcatgaccctaactttgtgcctgcagccttcgtgtgctctaaatgcggtaagacatttacccgaaggaacaccatggctcgtcatgctgacaactgtgcagggcccgacggggttgaaggcgagaacggaggtgaaacgaagaagtcaaagaggggcagaaaaaggaagatgcgctccaaaaaagaagatagcagcgactccgagaacgcagaaccggacctggacgacaacgaggacgaggaggaacctgccgtggagattgaaccagaaccggagcctcagccagtgacgccagcccctccaccagcaaagaagcggcggggccgtccccctgggcgcactaaccaacctaaacagaaccagcctactgcaatcatacaagtcgaagaccagaatacaggcgcaattgagaacatcattgtcgaggttaaaaaagagcctgatgccgagcctgcggaaggcgaagaagaggaagcgcagccagcagcaaccgacgccccgaacggtgatctcactcccgaaatgatcctcagcatgatggataggtag

SEQ ID NO: 73232 - DNA, 1200 bp, Artificial Sequence
  derived and/or modified sequence
atggcctttgtgaccagcggggagctggtgcgccaccggcgctacaagcacacccatgagaagcccttcaagtgcagcatgtgtgactatgcctctgtggaggtgtccaagctgaagaggcacatccgcagccacactggagagcggcccttccagtgcagcctgtgcagctatgccagccgggacacctacaagctgaagaggcacatgaggacccacagcggggagaagccctatgagtgctacatctgccacgcccgcttcacccagagcggcaccatgaagatgcacatcctgcagaagcacacagaaaatgtggccaagttccactgcccccactgtgacaccgtcatcgccaggaagagtgacctgggcgtgcacctgaggaagcagcacagctacatcgagcagggcaagaagtgccgctactgtgatgctgtgttccacgagagatatgccctgatccagcaccagaagagccacaagaatgagaagcgcttcaagtgtgaccagtgtgactatgcctgccggcaggagcggcacatgatcatgcacaagaggacccacactggagagaagccctatgcctgcagccactgtgacaagaccttccggcagaagcagctgctggacatgcacttcaagcgctaccatgaccccaactttgtgcctgctgcctttgtgtgcagcaaatgtgggaagaccttcaccaggaggaacaccatggcccggcatgctgacaactgtgccggcccagatggagtggagggggagaatggaggagagaccaagaagagcaagaggggcaggaagaggaagatgaggagcaagaaggaggacagcagtgacagtgaaaatgctgagccagacctggatgacaatgaagatgaggaggagcctgctgtggagattgagcctgagcctgagccccagcctgtgaccccagcccctcctccagccaagaagagaagaggccggcccccaggccgcaccaaccagcccaagcagaaccagcccacagccatcatccaggtggaggaccagaacacaggagccatcgagaacatcatcgtggaggtgaagaaggagccagatgctgagcctgctgagggggaggaggaggaggcccagcctgctgccacagatgccccaaatggagacctgaccccagagatgatcctgtccatgatggacagatag

SEQ ID NO: 73233 - DNA, 1200 bp, Artificial Sequence
  derived and/or modified sequence
atggccttcgtgaccagcggcgagctggtgcggcaccggcggtacaagcacacacacgaaaagccatttaagtgttctatgtgcgattatgcgtccgtggaggtgtctaaattgaagcggcatattagatcccacactggagaaagaccgtttcaatgctctctgtgcagttacgcctcccgcgacacttataaacttaagcggcacatgcgtacgcatagcggcgagaaaccatatgagtgttatatttgtcatgcgcggttcacacagagcggcacgatgaagatgcacattctccagaagcacaccgaaaacgtcgcaaagtttcactgcccgcattgcgacaccgtcatcgctagaaaaagtgacttgggagttcacctgcgtaagcagcattcttatattgaacaggggaagaagtgccgttactgcgatgccgtgtttcacgagaggtatgcgctcattcagcaccagaaatcccacaagaacgaaaagagattcaagtgtgatcagtgcgattatgcctgtcggcaagaacgtcatatgattatgcacaagcgcacccacacaggggagaagccatatgcctgcagccactgtgataagacttttcgacagaaacagttgctggacatgcacttcaaaagataccatgatcctaacttcgtacccgccgcattcgtttgttcaaagtgtgggaagacgttcacccgcagaaacacgatggcgagacatgccgacaactgcgccggacctgacggagtggaaggggaaaatggcggcgaaactaaaaaatcgaagcgaggacgaaaaaggaagatgaggtcaaagaaagaagactcaagtgactctgagaatgcagaacccgacctcgacgataacgaggatgaggaggagcccgctgtcgagatcgaaccggagcctgagcctcagcctgtgacacccgctccacctcccgccaaaaagcggagaggacgtcccccagggagaactaaccagcctaagcagaaccagcctaccgctatcatccaagtggaagatcaaaatacaggcgccatagaaaacatcattgtggaggtcaaaaaagagcctgatgcggaaccagccgagggggaggaggaggaggctcagccggccgctactgatgcaccaaacggagacctgacacctgagatgattctgtcaatgatggatcggtag

SEQ ID NO: 73234 - DNA, 1200 bp, Artificial Sequence
  derived and/or modified sequence
atggctttcgtgaccagcggggaactggtccgacacagaagatataagcacactcatgagaagccctttaagtgttcaatgtgcgattatgcctccgtggaggttagtaagctgaagcgccatattcggagccatacgggtgagagaccctttcagtgtagcttatgttcctatgcctcacgggatacgtataaactgaaacggcatatgaggacccactccggcgaaaagccctatgaatgctacatttgccatgctaggttcactcagtcagggactatgaaaatgcacatccttcaaaagcatacagagaacgttgcaaagtttcactgtccccactgtgatacagttatcgccagaaaatccgacctgggagtgcacctcaggaagcaacattcgtacattgagcaagggaagaagtgcagatattgtgacgccgtgttccacgaaagatacgcccttatccagcaccagaagtcccacaaaaatgagaagcgcttcaagtgtgaccagtgtgattatgcctgcagacaggagcgccacatgatcatgcacaagcggacacataccggcgaaaaaccttacgcttgtagtcattgtgataaaacgttcagacagaagcagttacttgatatgcacttcaagcgttatcatgacccaaacttcgtacccgctgcattcgtgtgtagtaagtgtggaaaaaccttcactcggagaaacactatggcaagacatgctgataattgcgctgggccagacggtgtggaaggagagaacggaggagaaaccaagaaatctaagcgtggaagaaaaaggaaaatgcggtctaagaaggaggattcatccgactctgagaacgccgagccggatctggacgacaacgaagacgaagaggagcccgctgtggagatcgagcccgagcccgagccacagccggtgactccggcacccccaccagctaagaagagacgcggtaggcccccaggcagaacaaaccagcctaaacaaaaccagccgacagcaattatccaagttgaggatcaaaacacaggagcgatcgaaaacattatcgtggaggtgaaaaaagaaccagatgccgagccagccgagggcgaggaggaggaggcacagccagccgcaacagacgctccgaatggggatctcacacctgagatgattctgtccatgatggatcggtag

SEQ ID NO: 73235 - DNA, 1200 bp, Artificial Sequence
  derived and/or modified sequence
atggccttcgtgaccagcggcgagctggtgagacacagaagatacaagcacacccacgagaagcccttcaagtgcagcatgtgcgactacgccagcgtggaggtgagcaagctgaagagacacatcagaagccacaccggcgagagacccttccagtgcagcctgtgcagctacgccagcagagacacctacaagctgaagagacacatgagaacccacagcggcgagaagccctacgagtgctacatctgccacgccagattcacccagagcggcaccatgaagatgcacatcctgcagaagcacaccgagaacgtggccaagttccactgcccccactgcgacaccgtgatcgccagaaagagcgacctgggcgtgcacctgagaaagcagcacagctacatcgagcagggcaagaagtgcagatactgcgacgccgtgttccacgagagatacgccctgatccagcaccagaagagccacaagaacgagaagagattcaagtgcgaccagtgcgactacgcctgcagacaggagagacacatgatcatgcacaagagaacccacaccggcgagaagccctacgcctgcagccactgcgacaagaccttcagacagaagcagctgctggacatgcacttcaagagataccacgaccccaacttcgtgcccgccgccttcgtgtgcagcaagtgcggcaagaccttcaccagaagaaacaccatggccagacacgccgacaactgcgccggccccgacggcgtggagggcgagaacggcggcgagaccaagaagagcaagagaggcagaaagagaaagatgagaagcaagaaggaggacagcagcgacagcgagaacgccgagcccgacctggacgacaacgaggacgaggaggagcccgccgtggagatcgagcccgagcccgagccccagcccgtgacccccgcccccccccccgccaagaagagaagaggcagaccccccggcagaaccaaccagcccaagcagaaccagcccaccgccatcatccaggtggaggaccagaacaccggcgccatcgagaacatcatcgtggaggtgaagaaggagcccgacgccgagcccgccgagggcgaggaggaggaggcccagcccgccgccaccgacgcccccaacggcgacctgacccccgagatgatcctgagcatgatggacagatag

SEQ ID NO: 73236 - protein, 859 aa, Artificial Sequence
  derived and/or modified sequence
MEGAKPTLQLVYQAVQALYHDPDPSGKERASFWLGELQRSVHAWEISDQLLQIRQDVESCYFAAQTMKMKIQTSFYELPTDSHASLRDSLLTHIQNLKDLSPVIVTQLALAIADLALQMPSWKGCVQTLVEKYSNDVTSLPFLLEILTVLPEEVHSRSLRIGANRRTEIIEDLAFYSSTVVSLLMTCVEKAGTDEKMLMKVFRCLGSWFNLGVLDSNFMANNKLLALLFEVLQQDKTSSNLHEAASDCVCSALYAIENVETNLPLAMQLFQGVLTLETAYHMAVAREDLDKVLNYCRIFTELCETFLEKIVCTPGQGLGDLRTLELLLICAGHPQYEVVEISFNFWYRLGEHLYKTNDEVIHGIFKAYIQRLLHALARHCQLEPDHEGVPEETDDFGEFRMRVSDLVKDLIFLIGSMECFAQLYSTLKEGNPPWEVTEAVLFIMAAIAKSVDPENNPTLVEVLEGVVRLPETVHTAVRYTSIELVGEMSEVVDRNPQFLGTALVLARLPLDKITECLSELCSVQVMALKKLLSQEPSNGISSDPTVFLDRLAVIFRHTNPIVENGQTHPCQKVIQEIWPVLSETLNKHRADNRIVERCCRCLRFAVRCVGKGSAALLQPLVTQMVNVYHVHQHSCFLYLGSILVDEYGMEEGCRQGLLDMLQALCIPTFQLLEQQNGLQNHPDTVDDLFRLATRFIQRSPVTLLRSQVVIPILQWAIASTTLDHRDANCSVMRFLRDLIHTGVANDHEEDFELRKELIGQVMNQLGQQLVSQLLHTCCFCLPPYTLPDVAEVLWEIMQVDRPTFCRWLENSLKGLPKETTVGAVTVTHKQLTDFHKQVTSAEECKQVCWALRDFTRLFR

SEQ ID NO: 73237 - DNA, 2580 bp, Artificial Sequence
  derived and/or modified sequence
atggagggcgccaagcccaccctgcagctggtgtaccaggccgtgcaggccctgtaccacgaccccgaccccagcggcaaggagagagccagcttctggctgggcgagctgcagagaagcgtgcacgcctgggagatcagcgaccagctgctgcagatcagacaggacgtggagagctgctacttcgccgcccagaccatgaagatgaagatccagaccagcttctacgagctgcccaccgacagccacgccagcctgagagacagcctgctgacccacatccagaacctgaaggacctgagccccgtgatcgtgacccagctggccctggccatcgccgacctggccctgcagatgcccagctggaagggctgcgtgcagaccctggtggagaagtacagcaacgacgtgaccagcctgcccttcctgctggagatcctgaccgtgctgcccgaggaggtgcacagcagaagcctgagaatcggcgccaacagaagaaccgagatcatcgaggacctggccttctacagcagcaccgtggtgagcctgctgatgacctgcgtggagaaggccggcaccgacgagaagatgctgatgaaggtgttcagatgcctgggcagctggttcaacctgggcgtgctggacagcaacttcatggccaacaacaagctgctggccctgctgttcgaggtgctgcagcaggacaagaccagcagcaacctgcacgaggccgccagcgactgcgtgtgcagcgccctgtacgccatcgagaacgtggagaccaacctgcccctggccatgcagctgttccagggcgtgctgaccctggagaccgcctaccacatggccgtggccagagaggacctggacaaggtgctgaactactgcagaatcttcaccgagctgtgcgagaccttcctggagaagatcgtgtgcacccccggccagggcctgggcgacctgagaaccctggagctgctgctgatctgcgccggccacccccagtacgaggtggtggagatcagcttcaacttctggtacagactgggcgagcacctgtacaagaccaacgacgaggtgatccacggcatcttcaaggcctacatccagagactgctgcacgccctggccagacactgccagctggagcccgaccacgagggcgtgcccgaggagaccgacgacttcggcgagttcagaatgagagtgagcgacctggtgaaggacctgatcttcctgatcggcagcatggagtgcttcgcccagctgtacagcaccctgaaggagggcaaccccccctgggaggtgaccgaggccgtgctgttcatcatggccgccatcgccaagagcgtggaccccgagaacaaccccaccctggtggaggtgctggagggcgtggtgagactgcccgagaccgtgcacaccgccgtgagatacaccagcatcgagctggtgggcgagatgagcgaggtggtggacagaaacccccagttcctgggcaccgccctggtgctggccagactgcccctggacaagatcaccgagtgcctgagcgagctgtgcagcgtgcaggtgatggccctgaagaagctgctgagccaggagcccagcaacggcatcagcagcgaccccaccgtgttcctggacagactggccgtgatcttcagacacaccaaccccatcgtggagaacggccagacccacccctgccagaaggtgatccaggagatctggcccgtgctgagcgagaccctgaacaagcacagagccgacaacagaatcgtggagagatgctgcagatgcctgagattcgccgtgagatgcgtgggcaagggcagcgccgccctgctgcagcccctggtgacccagatggtgaacgtgtaccacgtgcaccagcacagctgcttcctgtacctgggcagcatcctggtggacgagtacggcatggaggagggctgcagacagggcctgctggacatgctgcaggccctgtgcatccccaccttccagctgctggagcagcagaacggcctgcagaaccaccccgacaccgtggacgacctgttcagactggccaccagattcatccagagaagccccgtgaccctgctgagaagccaggtggtgatccccatcctgcagtgggccatcgccagcaccaccctggaccacagagacgccaactgcagcgtgatgagattcctgagagacctgatccacaccggcgtggccaacgaccacgaggaggacttcgagctgagaaaggagctgatcggccaggtgatgaaccagctgggccagcagctggtgagccagctgctgcacacctgctgcttctgcctgcccccctacaccctgcccgacgtggccgaggtgctgtgggagatcatgcaggtggacagacccaccttctgcagatggctggagaacagcctgaagggcctgcccaaggagaccaccgtgggcgccgtgaccgtgacccacaagcagctgaccgacttccacaagcaggtgaccagcgccgaggagtgcaagcaggtgtgctgggccctgagagacttcaccagactgttcagatag

SEQ ID NO: 73238 - DNA, 2580 bp, Artificial Sequence
  derived and/or modified sequence
atggaaggtgctaagccaactttacagctggtctaccaagcagtgcaggccctgtaccatgatcctgaccccagcggcaaggagcgagctagcttttggctcggtgagctgcagagatccgtgcacgcctgggaaatctctgatcagctcctccaaatcagacaggacgtcgagtcttgttacttcgccgcacagacaatgaaaatgaagatccaaacttcattctatgagctcccgactgattcccacgcaagcctaagggactctctgttgacccatatccagaatctcaaggacttatcaccagttatcgttactcagctcgccctcgcaatcgcggatctggctctccaaatgcccagctggaaggggtgcgtccaaacactcgtggagaagtactctaacgatgtgacaagcctcccctttctcctggaaattctgacagtgttaccagaagaggtgcactccagatcactaagaatcggggcaaatcgccggactgagataattgaggacctcgccttctacagctcaacagtagtttcgctgctgatgacttgcgtcgaaaaggcaggcaccgacgaaaagatgctcatgaaagtgtttcggtgtctgggatcttggttcaatctgggtgtgctcgacagtaatttcatggcgaacaataaattattagcgctactttttgaggtgttgcaacaagacaaaacctcctctaacctacacgaggccgcctcggactgcgtgtgcagcgcactctacgcgattgagaacgttgaaaccaatctgcccttagccatgcagttattccagggcgtgctaaccctcgagaccgcttatcatatggccgtggcccgggaagacctcgacaaagtgcttaattattgtagaatttttaccgagctctgcgagaccttcctcgaaaaaatagtgtgcacacctggccaggggctgggagatttgcggacactggaattgcttctgatctgtgccggccacccacaatatgaagttgtcgaaatcagctttaacttctggtaccgactcggggaacacctgtataagaccaacgatgaggtcatccatgggattttcaaagcctacattcagagacttctgcatgcactggcccgtcactgtcaactggagcctgatcacgagggggtcccggaagaaacagacgacttcggagaatttcggatgagggtgtctgacctggtcaaggacctgatattcctgatcggctccatggagtgttttgcccagctgtatagcactcttaaagaaggaaacccgccctgggaagtcactgaggcagtgcttttcatcatggcagccattgcaaaatccgtggacccggaaaacaacccaacactcgtcgaggttcttgagggcgtagttcggcttcccgagaccgtgcacacggccgtgcgctatactagcatcgagttagttggggagatgtcagaagtggttgatagaaaccctcaatttctgggcaccgctctcgtcctggcgagactcccacttgataagattacagagtgcttatccgagctctgctccgtccaggtgatggcactcaaaaaactgctgtctcaagaaccctcaaatgggatctcttcggatcctacagtgttccttgatagacttgcggtgatatttaggcacactaacccaattgtggaaaacgggcagacccatccctgccaaaaagtgatccaggagatctggcctgtgttatccgagactctgaacaaacatagagccgacaacagaatcgtggagcgctgctgcaggtgcctgcggtttgccgtgcgctgtgtgggaaagggctctgccgcactgttacagccactggtgacccagatggtaaacgtgtatcatgtgcaccagcatagttgtttcctctacctcggatccattctggtggatgagtacgggatggaggaaggctgtagacaaggactactggatatgctgcaggcattatgtatcccgacctttcagctactggaacaacagaacggccttcaaaatcaccctgacactgtcgacgacctcttccgtcttgccacaaggttcattcagcgaagtccagtgactcttctcaggagtcaggtggtgatcccgatcctccagtgggcaattgcctctaccaccctggaccacagggatgcgaattgcagcgtcatgaggtttctgcgcgaccttatccacactggggttgccaatgaccatgaagaggattttgagcttcgtaaagagctgatcggccaggtgatgaaccagctgggacagcaactggtgagccagctgttgcacacttgttgcttctgcctacctccgtacacgctgccggatgtggctgaggtgctctgggaaataatgcaggtagataggcctaccttttgtaggtggcttgaaaattccttaaaaggccttccaaaggaaactacggtgggcgctgttactgtgacccataagcaacttactgactttcacaaacaggtgacgagcgctgaagagtgtaagcaggtttgttgggcactccgcgactttacccgcctgttcagatag

SEQ ID NO: 73239 - DNA, 2580 bp, Artificial Sequence
  derived and/or modified sequence
atggagggcgccaagcccaccctgcagctggtgtaccaggccgtgcaggccctgtaccatgaccctgaccccagcggcaaggagcgggccagcttctggctgggggagctgcagaggtctgtgcacgcctgggagatcagtgaccagctgctgcagatccggcaggatgtggagagctgctactttgctgcccagaccatgaagatgaagatccagaccagcttctatgagctgcccacagacagccacgccagcctgcgggacagcctgctgacccacatccagaacctgaaggacctgagccctgtgattgtgacccagctggccctggccatcgctgacctggccctgcagatgcccagctggaagggctgtgtgcagaccctggtggagaagtacagcaatgatgtgaccagcctgcccttcctgctggagatcctgactgtgctgcctgaggaggtgcacagccgcagcctgagaattggagccaacagaagaacagagatcatcgaggacctggccttctacagcagcacagtggtgtccctgctgatgacctgtgtggagaaggccggcacagatgagaagatgctgatgaaggtgttccgctgcctgggctcctggttcaacctgggcgtgctggacagcaacttcatggccaacaacaagctgctggccctgctgtttgaggtgctgcagcaggacaagaccagcagcaacctgcacgaggccgccagtgactgtgtgtgcagcgccctgtatgccattgaaaatgtggagaccaacctgcccctggccatgcagctgttccagggcgtgctgaccctggagacagcctaccacatggctgtggcccgggaggacctggacaaggtgctgaactactgccgcatcttcacagagctgtgtgagaccttcctggagaagatcgtgtgcaccccaggccagggcctgggggacctgcggaccctggagctgctgctgatctgtgccggccacccccagtatgaggtggtggagatctccttcaacttctggtaccgcctgggggagcacctgtacaagaccaatgatgaggtgatccacggcatcttcaaggcctacatccagaggctgctgcacgccctggcccggcactgccagctggagccagaccacgagggcgtgcctgaggagacagatgactttggagagttcaggatgagggtgtctgacctggtgaaggacctgatcttcctgattggctccatggagtgctttgcccagctgtacagcaccctgaaggagggcaaccccccctgggaggtgacagaagctgtgctcttcatcatggccgccatcgccaagtctgtggaccctgagaacaaccccaccctggtggaggtgctggagggcgtggtgcggctgcctgagaccgtgcacacagctgtgcgctacaccagcattgagctggtgggggagatgtctgaggtggtggacaggaacccccagttcctgggcacagccctggtgctggcccggctgcccctggacaagatcacagaatgtctgtctgagctgtgcagcgtgcaggtgatggccctgaagaagctgctgagccaggagcccagcaatggcatcagcagtgaccccaccgtcttcctggaccggctggccgtcatcttccgccacaccaaccccatcgtggagaatggccagacccacccctgccagaaggtgatccaggagatctggcctgtgctgtctgagaccctgaacaagcacagagctgacaaccgcatcgtggagcgctgctgccgctgcctgcgctttgctgtgcgctgtgtgggcaaaggatctgctgccctgctgcagcccctggtgacccagatggtgaatgtgtaccacgtgcaccagcacagctgcttcctgtacctgggcagcatcctggtggatgaatatggcatggaggagggctgccggcagggcctgctggacatgctgcaggccctgtgcatccccaccttccagctgctggagcagcagaatggcctgcagaaccacccagacacagtggatgacctcttccggctggccacccgcttcatccagaggagccctgtgaccctgctgcggagccaggtggtgatccccatcctgcagtgggccatcgccagcaccaccctggaccacagagatgccaactgcagcgtgatgaggttcctgcgggacctgatccacactggagtggccaatgaccatgaagaagattttgagctgaggaaggagctgattggccaggtgatgaaccagctgggccagcagctggtgtcccagctgctgcacacctgctgcttctgcctgcccccctacaccctgcctgatgtggccgaggtgctgtgggagatcatgcaggtggaccggcccaccttctgccgctggctggagaacagcctgaagggcctgcccaaggagaccaccgtgggcgctgtgacagtgacccacaagcagctgacagacttccacaagcaggtgaccagcgctgaggagtgcaagcaggtgtgctgggccctgcgggacttcaccaggctcttcagatag

SEQ ID NO: 73240 - DNA, 2580 bp, Artificial Sequence
  derived and/or modified sequence
atggagggcgccaagcccaccctgcagctggtgtaccaggccgtgcaggcgttgtaccatgatcctgatccaagcggaaaagagagggcctcattctggctgggagaactgcaacgcagcgtgcacgcatgggaaattagtgaccaactgctacagattcggcaggatgtggagtcctgctacttcgcggcccagactatgaaaatgaagatacagacaagcttttacgaattgcccactgattcacacgctagccttcgagactccctgctcacacatatacaaaacctgaaagacttgagcccagttattgtcacccaactcgcgctggcgatcgctgatctggcactccagatgccttcctggaaggggtgtgtccagacccttgtcgaaaaatattcaaacgatgtaacttccctcccattcctgttagagatcctaactgttctgccggaggaggtgcatagtcgatcgttacggattggagccaaccgacgcacagagatcatagaggatctggccttttactcttccacagtggtctctctgttaatgacctgtgtggaaaaggcaggaacggacgagaagatgctcatgaaggtgtttcgatgtctgggttcttggttcaacttgggcgttctggattccaacttcatggccaacaacaagctgctcgcgttgttgtttgaggtgttgcagcaggacaagacttctagtaacctccatgaagccgcttcagactgtgtgtgttcggctctgtacgctatagagaacgtggaaactaatctgcctcttgctatgcagctgttccagggggttctcactctggaaaccgcctatcacatggctgtcgcccgggaggatctcgacaaagtcctcaactattgtagaatcttcactgaactatgtgaaacatttcttgaaaaaattgtgtgcactcccggacaagggctgggtgatctcagaacactggaattgctactgatctgcgccggacacccacagtacgaggtggtcgaaatcagcttcaacttttggtatagactcggcgaacacctgtacaaaacaaatgatgaggttattcacggcatttttaaagcttacattcaaaggctccttcacgctctggccaggcattgccagcttgagccggatcatgaaggggtacccgaagagactgatgattttggagaatttaggatgagggtgagcgatctggtcaaagacttgatcttcctgatcggcagcatggagtgcttcgcccaactctattcaacactcaaggaaggtaacccaccttgggaggtgactgaggccgtcctctttatcatggcagcaatcgccaagagcgttgaccccgaaaataacccgaccctcgtagaagtactggaaggggtagtgaggctgcctgagacggtacacaccgctgttcgctatacatcaatagaactcgtgggcgagatgtcagaggtggtggaccggaatccccagtttcttggcaccgctctggtcttagctaggctgccactcgataaaattactgaatgcctttccgaattatgttcagtgcaggttatggcgctgaaaaaactgctgagccaggagcccagcaacggaatcagtagtgatcccactgtgttcctcgacaggctcgctgtaatctttagacatacaaatccaatcgtggagaatggccagacacacccctgccagaaagtaatccaagagatatggccagttctgtctgagactctgaataaacatcgagctgacaaccgcattgtggaaaggtgctgccggtgtctgcgctttgccgttcgatgcgtaggtaaggggtccgcagccctgttgcagcccctggtcacccagatggtaaacgtgtaccacgtccatcagcactcctgttttctctatctcgggagtatcctcgtggatgaatacgggatggaggagggctgcagacaggggctcctcgacatgcttcaggcactctgcattcctacatttcaacttctggaacagcagaatgggctgcagaaccatcctgacacagtggacgatctctttaggctggctacaagatttatccagcgatccccagtgactctcctgaggtcccaagtcgtaatccctatcctccagtgggccattgcctccaccaccctggaccatcgcgacgcgaactgcagcgtgatgcgatttctccgcgacttgatccatactggggtggctaatgatcatgaagaagactttgaactcaggaaggaacttataggccaggtgatgaatcagctcggccagcagctggtgtctcagttgctccacacatgttgcttttgcttgcctccatacacattgccagacgtggcagaagtgctctgggagattatgcaagttgaccgtcccaccttttgccggtggttggagaacagtctcaaaggcctgccaaaagagacaacggtgggagctgtaaccgtaacccacaaacagcttaccgatttccataaacaggtcacatcagctgaggagtgtaagcaggtgtgttgggccctgagggacttcacacggctatttagatag

SEQ ID NO: 73241 - DNA, 2580 bp, Artificial Sequence
  derived and/or modified sequence
atggagggcgcaaaaccaaccctacagttggtttaccaggccgtccaagccttgtaccatgatccagacccctccggcaaggagcgcgcatccttctggttaggcgagctgcaacgctcggtgcatgcctgggagatctcggaccagcttcttcaaatccgtcaggatgttgagtcgtgctacttcgccgcacagacgatgaagatgaagattcagaccagcttctacgagctgccgaccgatagccatgcctcactcagggacagcttgttaactcacatccagaatctcaaggacctttcccctgtgatcgtcactcagttagctttagcgatcgctgacctggccctccagatgccatcatggaagggctgtgtccagaccttggtggaaaagtacagtaacgatgtcacttctctgccatttctgctggaaatcctgaccgttctcccagaagaagtccatagtaggtcgctgagaataggtgctaatagacggacagaaatcatcgaggacctcgcgttttacagcagtactgtggtctcgttgctaatgacatgcgtggaaaaagctggtacagatgagaaaatgcttatgaaagtgttccggtgcctgggatcttggttcaacctcggagtgctggactccaacttcatggctaataacaagctcctcgctttgctattcgaggtgctgcagcaagacaaaacttccagcaacctgcatgaggccgcatctgactgtgtctgctccgcgctctatgcaatagagaacgtcgaaactaacctcccactcgccatgcaactgtttcaaggcgttctgacgttagagacagcctatcacatggctgtggctagagaggatttggataaggtgttaaactattgccggatctttaccgaactctgtgagacatttcttgagaaaatcgtttgcacacctggtcaggggttaggcgacctgcgcactttggagctcttgctgatctgcgcaggtcacccccagtacgaagtagttgagataagttttaacttctggtaccgcctgggggagcacttatataagactaatgacgaggtcatacacgggattttcaaggcatatatacagcgcctgctccatgcccttgcacggcactgccagctggagcctgaccatgagggggttcctgaggaaacggatgactttggcgagtttaggatgagagtgtccgacctcgtgaaggatttgatattccttatcggatctatggagtgttttgcccagctttattctactctcaaggagggaaacccaccttgggaggtcacagaggccgttctgtttatcatggctgcaattgccaaatccgttgaccccgagaataatccaacactggtggaggttctggagggggtcgttcggctgcctgaaacagtgcatacggccgtgaggtacacaagtatagagctcgtgggtgagatgtccgaggtggtagaccgcaacccccagttcttagggacagcactggtcctggctagactgccccttgataaaattaccgagtgtctgagtgaactctgtagcgtccaagtaatggcccttaagaaactgctgagccaggaaccctctaacggcatttcaagcgatccgacagttttccttgatcgcttggcagtgatctttcggcatacaaacccgattgttgaaaatggccagacccacccgtgccaaaaagtcatccaagagatttggccagtgctgtctgagacactgaataagcatcgggctgacaatagaatcgttgaacgctgctgcagatgtctgcgctttgcagtgcgctgcgtgggcaaggggagtgccgcattgctgcaacctcttgtgacgcagatggtgaacgtctaccacgtgcatcaacactcgtgtttcctttacttgggttcaattcttgtcgacgagtacggaatggaggaggggtgcagacagggccttctcgacatgcttcaggccctctgtattcccaccttccaactcctggagcaacaaaatggtctgcagaaccatccagacactgtggatgaccttttcaggctagccacgaggtttatccagaggtcccctgtaacactactgcggagccaggtcgtcatacccatcctccagtgggccattgccagtactaccctcgaccaccgtgatgcgaattgctccgtgatgagattcctgcgcgatcttattcacaccggcgtggcaaacgatcacgaggaagattttgaactccggaaggagcttattggtcaggtcatgaaccaactgggtcagcagttggttagtcaactcctgcacacatgttgcttttgtcttcccccttacactttgccagatgtggccgaggtgctttgggagatcatgcaggtggaccgaccaacattttgccgctggttggagaacagtttgaagggcctgcccaaagaaacgactgtgggggctgtcaccgtcacacataaacagttgaccgatttccacaagcaggtgacttccgccgaagagtgcaaacaggtctgctgggcccttagagacttcactaggctgttccggtag

SEQ ID NO: 73242 - DNA, 3283 bp, Artificial Sequence
  derived and/or modified sequence
aaaggtatcggtgctgtcgcttccggtccgggtaaacgaaccttaggtacactggtgtgtggcctcccaagataggcttctgagggcaagtcagcgactgaagacgggagcgccagaatctgtggactcaagagtctagaatcaagtggaaaaaccggaaaaaaggccaggaacctgaatacgacctaatagctgtttccgagggggcaacttccacggagagccttctgccctggtaacggccaaagaggaggagatggcgccagtcagggagcggccgtggcccagacagtgaggaagcgcgaaggcggagcaaccgaggaatcctccggagaagaatcagagccgtcgctaccgccactaccgccaccaccatggaaggagcaaagccgacattgcagctcgtgtaccaggcagtgcaggcgctttaccacgacccagatcccagcggaaaggagcgcgcctctttttggcttggggagctgcagcgttcggttcatgcatgggagatctcagaccagttgttacagatccggcaggatgtggagtcatgctattttgctgcacagaccatgaaaatgaagattcagacctcattttatgagctccccacagactctcatgcctctttacgggactcattgctaacccatatccagaacttgaaagacttgtcacctgttattgtaacgcagctggctttagcaatagcagatcttgccctacagatgccttcctggaagggatgtgtgcaaacactggtggaaaaatacagcaatgatgtgacttctttgccttttttgctggagatccttacagtgttacctgaagaagtacatagtcgttccttacgaattggagctaatcggcgcacagaaattatagaagatttggccttctactctagtacagtagtatctctattgatgacctgtgtagaaaaagcaggaacagatgagaaaatgcttatgaaggtttttcgctgtttgggaagttggtttaacttgggagttttggacagtaacttcatggctaacaataaattactagcactcctttttgaggttttgcaacaggataagacctcgtctaacctacatgaagctgcttcggactgtgtatgctcagctctctatgccattgagaatgtggagactaacttgccattagccatgcaactttttcagggagtgctgacattggagactgcctatcatatggccgtggcacgtgaagatttagacaaagttctgaattactgccgtattttcactgaactatgtgaaacttttcttgaaaaaattgtttgtactccaggccaaggtcttggggaccttcgaactctggagctgctgcttatctgtgcaggccatcctcaatatgaggtagtagaaatttcatttaacttttggtaccgactgggggaacatttgtacaaaactaacgatgaagttattcatggcatcttcaaagcttacattcagaggctgcttcacgccttggctcgacactgccagctggaaccagaccatgagggggttcctgaggagactgatgactttggggagtttcgcatgagggtatcagacctggtaaaggacttgattttcttgatagggtctatggagtgttttgctcagttatattctactctgaaagaaggcaacccaccctgggaggtgacagaagcggttctctttatcatggctgctatagcaaagagtgttgatccggaaaacaatccaacacttgtggaagtcctagaaggagttgtccgcctcccggagaccgtacatacggctgtgcgatacaccagcattgaattggttggagagatgagtgaagtcgttgatcgaaatcctcagttccttgggacagcacttgtcctagcccgattacctttggataagattaccgaatgtcttagtgaactatgttctgttcaggttatggcattgaaaaagctgttgtctcaagagcccagcaatggcatatcctcagatcccacagtgttcttagatcgccttgcagtgatatttaggcataccaatcccattgtggaaaatggacagactcatccgtgtcagaaagtcatacaggaaatatggccagttttatccgagactctaaataagcaccgagctgataatcggattgtagagcgttgttgcaggtgcctgcgctttgctgttcgctgtgtaggcaaaggatctgcagcactgctgcagccactagtcacacagatggtgaatgtgtaccacgtacatcagcattcctgcttcctgtaccttggcagtatccttgtggatgaatatggcatggaagaaggctgtcggcagggactgctagacatgctccaggcactgtgcatccccacctttcagctcctagaacagcagaatggtctccagaatcaccctgacactgtagatgacctgttccggctagccaccaggtttattcagcgtagccctgtcaccttgctgcggagccaagtggtcatccctatcttacagtgggccattgcctctactaccctggaccaccgggatgccaattgtagtgtcatgaggtttctacgagacctcattcatacaggggtagccaatgatcatgaagaagactttgaattacggaaagaactgattggacaggtgatgaaccagcttggacagcagcttgtcagccagctgctgcacacctgctgcttttgcctccccccctataccctaccagatgtggctgaagtgctctgggagatcatgcaggttgacagaccgactttttgtcgatggttagaaaattccttaaaaggtttgccaaaggaaacaaccgtgggagccgtcacagtgacacacaaacaacttacagacttccacaagcaagtcactagtgctgaggaatgtaaacaagtttgctgggccttgcgagacttcaccaggttgtttcgatagctcacactcctgcactgtgcctgtcacccaggaatgtcttttttaattagaagacaggaagaaaacaaaaaccagactgtgtcccacaatcagaaacctccgttgtggcagaggggccttcaccgccaccagggtgtcccgccagacagggagagactccagccttctgaggccatcctgaggagttcctgtttgggggtgtgagggaaaatcagcgcggattttaaaaagatggctgtggcctgcccggcgtggtgggaggggagctggtttcctggtgaactttctaaaaggaaaaataattttaagtaaagaaaaaagaaaaaaaa

SEQ ID NO: 73243 - protein, 922 aa, Artificial Sequence
  derived and/or modified sequence
MITSAAGIISLLDEDEPQLKEFALHKLNAVVNDFWAEISESVDKIEVLYEDEGFRSRQFAALVASKVFYHLGAFEESLNYALGAGDLFNVNDNSEYVETIIAKCIDHYTKQCVENADLPEGEKKPIDQRLEGIVNKMFQRCLDDHKYKQAIGIALETRRLDVFEKTILESNDVPGMLAYSLKLCMSLMQNKQFRNKVLRVLVKIYMNLEKPDFINVCQCLIFLDDPQAVSDILEKLVKEDNLLMAYQICFDLYESASQQFLSSVIQNLRTVGTPIASVPGSTNTGTVPGSEKDSDSMETEEKTSSAFVGKTPEASPEPKDQTLKMIKILSGEMAIELHLQFLIRNNNTDLMILKNTKDAVRNSVCHTATVIANSFMHCGTTSDQFLRDNLEWLARATNWAKFTATASLGVIHKGHEKEALQLMATYLPKDTSPGSAYQEGGGLYALGLIHANHGGDIIDYLLNQLKNASNDIVRHGGSLGLGLAAMGTARQDVYDLLKTNLYQDDAVTGEAAGLALGLVMLGSKNAQAIEDMVGYAQETQHEKILRGLAVGIALVMYGRMEEADALIESLCRDKDPILRRSGMYTVAMAYCGSGNNKAIRRLLHVAVSDVNDDVRRAAVESLGFILFRTPEQCPSVVSLLSESYNPHVRYGAAMALGICCAGTGNKEAINLLEPMTNDPVNYVRQGALIASALIMIQQTEITCPKVNQFRQLYSKVINDKHDDVMAKFGAILAQGILDAGGHNVTISLQSRTGHTHMPSVVGVLVFTQFWFWFPLSHFLSLAYTPTCVIGLNKDLKVSTAVLSITAKAKKKEKEKEKKEEEKMEVDEAEKKEEKEKKKEPEPNFQLLDNPARVMPAQLKVLTMPETCRYQPFKPLSIGGIIILKDTSEDIEELVEPVAAHGPKIEEEEQEPEPPEPFEYIDD

SEQ ID NO: 73244 - DNA, 2769 bp, Artificial Sequence
  derived and/or modified sequence
atgatcaccagcgccgccggcatcatcagcctgctggacgaggacgagccccagctgaaggagttcgccctgcacaagctgaacgccgtggtgaacgacttctgggccgagatcagcgagagcgtggacaagatcgaggtgctgtacgaggacgagggcttcagaagcagacagttcgccgccctggtggccagcaaggtgttctaccacctgggcgccttcgaggagagcctgaactacgccctgggcgccggcgacctgttcaacgtgaacgacaacagcgagtacgtggagaccatcatcgccaagtgcatcgaccactacaccaagcagtgcgtggagaacgccgacctgcccgagggcgagaagaagcccatcgaccagagactggagggcatcgtgaacaagatgttccagagatgcctggacgaccacaagtacaagcaggccatcggcatcgccctggagaccagaagactggacgtgttcgagaagaccatcctggagagcaacgacgtgcccggcatgctggcctacagcctgaagctgtgcatgagcctgatgcagaacaagcagttcagaaacaaggtgctgagagtgctggtgaagatctacatgaacctggagaagcccgacttcatcaacgtgtgccagtgcctgatcttcctggacgacccccaggccgtgagcgacatcctggagaagctggtgaaggaggacaacctgctgatggcctaccagatctgcttcgacctgtacgagagcgccagccagcagttcctgagcagcgtgatccagaacctgagaaccgtgggcacccccatcgccagcgtgcccggcagcaccaacaccggcaccgtgcccggcagcgagaaggacagcgacagcatggagaccgaggagaagaccagcagcgccttcgtgggcaagacccccgaggccagccccgagcccaaggaccagaccctgaagatgatcaagatcctgagcggcgagatggccatcgagctgcacctgcagttcctgatcagaaacaacaacaccgacctgatgatcctgaagaacaccaaggacgccgtgagaaacagcgtgtgccacaccgccaccgtgatcgccaacagcttcatgcactgcggcaccaccagcgaccagttcctgagagacaacctggagtggctggccagagccaccaactgggccaagttcaccgccaccgccagcctgggcgtgatccacaagggccacgagaaggaggccctgcagctgatggccacctacctgcccaaggacaccagccccggcagcgcctaccaggagggcggcggcctgtacgccctgggcctgatccacgccaaccacggcggcgacatcatcgactacctgctgaaccagctgaagaacgccagcaacgacatcgtgagacacggcggcagcctgggcctgggcctggccgccatgggcaccgccagacaggacgtgtacgacctgctgaagaccaacctgtaccaggacgacgccgtgaccggcgaggccgccggcctggccctgggcctggtgatgctgggcagcaagaacgcccaggccatcgaggacatggtgggctacgcccaggagacccagcacgagaagatcctgagaggcctggccgtgggcatcgccctggtgatgtacggcagaatggaggaggccgacgccctgatcgagagcctgtgcagagacaaggaccccatcctgagaagaagcggcatgtacaccgtggccatggcctactgcggcagcggcaacaacaaggccatcagaagactgctgcacgtggccgtgagcgacgtgaacgacgacgtgagaagagccgccgtggagagcctgggcttcatcctgttcagaacccccgagcagtgccccagcgtggtgagcctgctgagcgagagctacaacccccacgtgagatacggcgccgccatggccctgggcatctgctgcgccggcaccggcaacaaggaggccatcaacctgctggagcccatgaccaacgaccccgtgaactacgtgagacagggcgccctgatcgccagcgccctgatcatgatccagcagaccgagatcacctgccccaaggtgaaccagttcagacagctgtacagcaaggtgatcaacgacaagcacgacgacgtgatggccaagttcggcgccatcctggcccagggcatcctggacgccggcggccacaacgtgaccatcagcctgcagagcagaaccggccacacccacatgcccagcgtggtgggcgtgctggtgttcacccagttctggttctggttccccctgagccacttcctgagcctggcctacacccccacctgcgtgatcggcctgaacaaggacctgaaggtgagcaccgccgtgctgagcatcaccgccaaggccaagaagaaggagaaggagaaggagaagaaggaggaggagaagatggaggtggacgaggccgagaagaaggaggagaaggagaagaagaaggagcccgagcccaacttccagctgctggacaaccccgccagagtgatgcccgcccagctgaaggtgctgaccatgcccgagacctgcagataccagcccttcaagcccctgagcatcggcggcatcatcatcctgaaggacaccagcgaggacatcgaggagctggtggagcccgtggccgcccacggccccaagatcgaggaggaggagcaggagcccgagccccccgagcccttcgagtacatcgacgactag

SEQ ID NO: 73245 - DNA, 2769 bp, Artificial Sequence
  derived and/or modified sequence
atgatcactagcgcagccgggatcatttccctgctcgacgaagatgagccacagcttaaagagttcgctctgcataaactcaacgcggtggtcaacgacttttgggcggagatttccgagtctgtggacaagatcgaagtcctgtacgaggacgagggattccggtcacggcagtttgccgctctcgtggctagtaaagtgttttaccatctgggcgcatttgaagaatccctgaattacgctctgggggccggagatctctttaacgtcaacgacaattctgaatacgtggagacaatcatagccaaatgtatcgatcactacacaaagcagtgtgtagaaaatgcggatcttccagaaggagaaaaaaagccaattgatcaacgcctcgagggaattgtgaacaaaatgtttcagcgatgcctcgatgaccacaagtacaaacaggcgattggcatcgcccttgaaactcggagactcgacgttttcgaaaagaccatactcgagtctaatgatgtgcccgggatgctagcatactctttaaagctctgtatgagcctcatgcagaacaagcagttccggaacaaggtcttgagagtgctggtcaagatttacatgaacctggagaagcccgatttcattaacgtgtgccagtgtctaatcttcttggacgatcctcaagctgtcagcgatattctggagaaactggtgaaggaagataatctactcatggcttatcagatctgttttgacctctacgaatctgcctcccagcagttcttgagcagcgtcatccaaaacttaagaactgtgggaacccctattgccagtgtcccggggagcactaataccgggaccgtgcctggatctgaaaaggatagcgacagcatggagaccgaagaaaaaacatctagcgcatttgtaggcaaaacacctgaggcttcccctgagcctaaggatcaaacactgaaaatgattaagatcctgagtggggagatggcgattgaactgcacctgcaattcctgatccgaaacaacaatacagatttgatgatcttgaagaatacgaaggacgctgtgcgaaacagtgtgtgccacacagcaactgtgattgccaacagcttcatgcactgcggaactaccagcgatcagttcttgcgagacaatttggaatggctggcacgggccactaactgggccaaattcactgccaccgcatctttgggagtgatccacaagggtcacgagaaagaggccctacagcttatggccacttatctgccaaaagataccagccctggctcagcatatcaagaggggggcggcctgtacgctctgggactgattcatgccaatcacggcggggacatcatagattatttgttaaaccaactgaagaatgcgtccaacgacattgtacggcatggagggtccctgggtctgggtttggccgccatggggacagcacgccaggacgtgtacgacctcttgaagacgaatctctaccaggacgatgcagtgactggcgaagcagccggcttggcactggggcttgtaatgctggggagtaagaacgcacaggccattgaagacatggtgggatacgcccaggagacacaacatgagaagattctgcgggggcttgctgtgggcatcgctctggtgatgtacggaagaatggaggaggcagatgccctcattgagtctttgtgcagagataaggaccctatcctgaggcgcagcgggatgtacacagtagccatggcgtattgtggcagtggaaacaataaggctatccgccgactcctccatgtggctgttagcgatgtgaacgacgacgtgcgtagggccgcagtggagtccctcggctttatcctcttcagaacccctgagcagtgcccctcggtagtgagcctgctgtctgaatcttataatccccacgtgaggtacggagcagcgatggccctcggaatttgttgcgccgggaccggaaataaggaggcgataaatctgctagagccaatgaccaacgatccagtcaactatgtgaggcaaggggccctgattgcatcagccctgattatgatccagcaaaccgaaatcacttgtccaaaagttaaccagtttcgacaattgtacagtaaggttatcaacgacaaacatgacgatgtcatggccaagttcggcgctattctcgcccagggcatcctggacgccggaggtcataatgtcaccatcagcctccagtcacgcaccggacacacccatatgcctagtgttgtgggcgtccttgtcttcacacaattttggttctggttcccacttagtcacttcttgagcctggcctatacacccacatgtgttattggactcaacaaagatttgaaggtatccactgctgtgctctctatcaccgctaaggccaagaagaaggagaaggagaaagagaagaaggaggaagagaagatggaggtcgatgaagcagaaaagaaggaggaaaaggaaaaaaagaaggagcccgagccaaattttcagctgttggacaaccctgcacgtgtgatgcccgcacaactgaaggtcttgactatgcccgaaacctgtcggtaccaaccattcaaaccgttgtccatcggtggaatcatcattcttaaggacacatctgaggatatagaggagctggttgagccagtcgctgcgcacggacccaaaatcgaggaagaggagcaagaaccagagcccccagaaccctttgagtatattgatgactag

SEQ ID NO: 73246 - DNA, 2769 bp, Artificial Sequence
  derived and/or modified sequence
atgattaccagtgccgcaggaatcatatccctgctagatgaggatgagccccaactcaaggaatttgcactgcacaagctgaacgcggtggttaatgatttttgggctgagatcagcgagtctgtcgataagatcgaggtgttgtacgaagacgaaggtttccggtcgcgtcagttcgcggccctcgtggcctccaaagtgttctaccacctaggtgcctttgaagagtcacttaactatgctcttggagctggcgaccttttcaatgtgaacgacaactccgagtatgtcgagacaattatcgcaaaatgcattgaccactacacaaaacagtgcgtggagaacgcggacctccccgaaggagagaagaagccgatcgaccagagactcgagggcatcgtcaataaaatgttccagagatgtctggatgatcacaagtataaacaggccattggcatcgcactcgaaaccagaagactggacgttttcgagaaaactatattggaatcgaatgacgttcctggcatgctagcgtactcactcaagttgtgcatgtccctaatgcagaataagcagtttagaaacaaggttctccgggtgctggtgaagatttacatgaatctagagaagccagattttatcaacgtgtgccagtgtctaatctttctggacgatccacaggctgtgtctgacatattagaaaaactggttaaggaagacaatcttctcatggcttaccaaatttgcttcgacctgtacgagtcagccagccagcaattcttatcctccgtgatacagaacctgcgcaccgttggcacaccgatagctagtgtgcctggctcaactaataccggtacagtgcccgggtccgagaaagattcagactccatggagaccgaggaaaagacatcaagtgccttcgtaggcaagactcctgaggccagtccggagccgaaggaccaaactctgaagatgatcaaaattctgagtggcgagatggcaatcgagttacatttacaattcctcattcgcaacaacaatactgacctgatgattctaaagaacacgaaggacgccgttcgtaactccgtctgtcataccgctactgtaatcgctaacagctttatgcattgcggaactaccagcgaccagttcctcagagacaacttggaatggctagcaagggctactaactgggcaaaatttactgctacggcttccttgggcgttatccacaagggacatgagaaggaagctcttcagctgatggccacctacctgcccaaggacaccagtcccggatcagcctatcaggaagggggcggactctacgcccttggtctcatacacgccaaccacggcggagacattattgactacctgttgaaccagctcaaaaatgcgtctaatgacattgtgagacacggtggcagcttaggcctcggccttgcggccatgggcaccgcacggcaggacgtgtacgacctgcttaaaaccaatctttaccaggacgatgctgtcactggggaagccgccggcctggctcttggtctggtgatgctgggcagtaagaatgcgcaggccattgaggatatggtgggctacgcccaggaaacccaacatgagaagatcttgaggggactagccgttggaatcgctctagtaatgtacgggagaatggaggaagcagatgctcttatcgaatccctgtgcagagataaagacccgatcttacgccggtcgggtatgtacacggtggcgatggcttattgcggcagcgggaataataaggctatcaggcgactgctccatgtggccgtatcagatgttaacgacgatgtgcggagggcagctgttgagtctctcggattcatactgtttcggacaccagagcagtgcccctcagtggtatccctgctgagcgagtcatacaacccacacgttcgctacggcgccgccatggctctgggaatctgttgtgccggtactgggaataaagaggcgattaacctgctggagcccatgacgaacgacccagtcaactacgttcggcagggagccttaatagctagcgccctgattatgattcagcaaacagagatcacatgcccgaaggtgaaccagttcaggcagttatacagcaaagtgattaatgacaaacacgacgatgtgatggcaaagttcggtgcaattcttgcccagggaatcctggatgccggcggccacaatgtgacaataagtttgcagtcgaggactggacatacccacatgccttccgtggttggagtcctggtattcacccaattttggttttggttcccgctgagccacttcctctctctagcctacactcccacttgtgtcataggtctcaataaagatttgaaagtttccacggcagtattgtcgatcacagccaaagcaaaaaagaaagaaaaagagaaagagaagaaggaagaggaaaaaatggaggttgacgaagctgaaaaaaaggaggaaaaagagaagaagaaagagcctgagcccaatttccaactcctagacaatcccgctagagtgatgccagcacagcttaaagtattaaccatgccagaaacctgtcggtaccaaccttttaaacccctgtccataggcggcatcataatactgaaagataccagcgaggatatcgaggaattggttgagcctgtagcggcccacggtccaaaaatcgaggaggaagagcaggagcccgaaccgcctgagcccttcgaatatatcgacgattag

SEQ ID NO: 73247 - DNA, 3230 bp, Artificial Sequence
  derived and/or modified sequence
ggggtcctggcgagaagcgagccggcggcctgaggaggcgactgactgagcagcgcacccggggagcaaggaggcgcggtgaactgagcggcccctgagctgacagatacactgcgcagctggaacggcgagcgagccgacgggcgagtgaggggcgcagccatgatcacctcggccgctggaattatttctcttctggatgaagatgaaccacagcttaaggaatttgcactacacaaattgaatgcagttgttaatgacttctgggcagaaatttccgagtccgtagacaaaatagaggttttatacgaagatgaaggtttccggagtcggcagtttgcagccttagtggcatctaaagtattttatcacctgggggcttttgaggagtctctgaattatgctcttggagcaggggacctcttcaatgtcaatgataactctgaatatgtggaaactattatagcaaaatgcattgatcactacaccaaacaatgtgtggaaaatgcagatttgcctgaaggagaaaaaaaaccaattgaccagagattggaaggcatcgtaaataaaatgttccagcgatgtctagatgatcacaagtataaacaggctattggcattgctctggagacacgaagactggacgtctttgaaaagaccatactggagtcgaatgatgtcccaggaatgttagcttatagccttaagctctgcatgtctttaatgcagaataaacagtttcggaataaagtactaagagttctagttaaaatctacatgaacttggagaaacctgatttcatcaatgtttgtcagtgcttaattttcttagatgatcctcaggctgtgagtgatatcttagagaaactggtaaaggaagacaacctcctgatggcatatcagatttgttttgatttgtatgaaagtgctagccagcagtttttgtcatctgtaatccagaatcttcgaactgttggcacccctattgcttctgtgcctggatccactaatacgggtactgttccgggatcagagaaagacagtgactcgatggaaacagaagaaaagacaagcagtgcatttgtaggaaagacaccagaagccagtccagagcctaaggaccagactttgaaaatgattaaaattttaagtggtgaaatggctattgagttacatctgcagttcttaatacgaaacaataatacagacctcatgattctaaaaaacacaaaggatgcagtacggaattctgtatgtcatactgcaaccgttatagcaaactcttttatgcactgtgggacaaccagtgaccagtttcttagagataatttggaatggttagccagagccactaactgggcaaaatttactgctacagccagtttgggtgtaattcataagggtcatgaaaaagaagcattacagttaatggcaacataccttcccaaggatacttctccaggatcagcctatcaggaaggtggaggtctctatgcactaggtcttattcatgccaatcatggtggtgatataattgactatctgcttaatcagcttaagaacgccagcaatgatatcgttagacacggtggcagtctgggccttggtttggcagccatgggaactgcacgtcaagatgtttatgatttgctaaaaacaaacctttatcaggatgatgcagtaacaggggaagcagctggcctggccctaggtttggttatgttgggctctaaaaatgctcaggctattgaggacatggttggttatgcacaagaaactcaacatgagaagattctgcgtggtcttgcagttggcatagctttagtaatgtatgggaggatggaagaggctgatgctctcattgaatctctctgtcgtgacaaggacccaattcttcgaaggtctggaatgtatactgtagccatggcttattgtggctctggtaacaacaaagcaattcgacgcctgctacatgttgctgtaagtgatgttaatgatgatgtcaggagggcagcagtagaatcacttgggttcattctattcagaacccctgaacagtgcccaagtgttgtctctttgttgtcagagagttacaaccctcatgtgcgctacggagctgcaatggccttggggatatgctgtgctggtacaggaaacaaggaagccattaatttgctagaaccaatgacaaacgaccccgtgaactacgtgaggcaaggggcactcatagcttcagctctcatcatgatccagcagactgaaatcacttgtccaaaggtgaatcagttcagacagctgtattccaaagtcatcaatgataagcatgatgatgtcatggccaagtttggcgctattctggcccagggcatactggatgcaggtggtcataatgtcacaatctccttgcagtccaggactgggcatactcatatgccttctgtggttggcgtccttgtatttacccagttttggttctggtttcctctttcacacttcctgtcattggcttatacccctacctgtgtcattggccttaacaaggacttaaaggtttctactgctgtattatctataactgccaaggctaaaaagaaggaaaaagaaaaggaaaaaaaggaggaggagaaaatggaagtggatgaggcagagaaaaaggaggaaaaagagaagaaaaaagaacctgagccaaacttccagttattggataacccagcccgagttatgcctgcccagcttaaggtcctaaccatgccggagacctgtagataccagcctttcaaaccactctctattggaggcatcatcattctgaaggataccagtgaagacattgaggagctggtggaacctgtggcagcacatggcccaaaaatcgaggaggaggaacaagagccagaacccccagaaccatttgagtatattgatgattaagggccagaggatctcacttgcttatctgaagaagattgtccaggctcatattgggaatgcttatgaggaaattcatgccgagacctgctattcaatgcatgtatcgttgcctctgcactgacctgaagaaccctgtctccaagtctttggttgaagagaagatatatgactgttgagtgtgctctttcacagaacttggttttcaaataaatataagatctccagatggacaagacatttgtttttcagcctgggtttttaataaatgtatctaatcctccccacaccatgaaatgcct

SEQ ID NO: 73248 - DNA, 2769 bp, Artificial Sequence
  derived and/or modified sequence
atgatcaccagcgctgctggcatcatcagcctgctggatgaagatgagccccagctgaaggagtttgccctgcacaagctgaatgctgtggtgaatgacttctgggccgagatcagcgagagcgtggacaagattgaggtgctgtatgaagatgagggcttccgcagccggcagtttgctgccctggtggccagcaaggtgttctaccacctgggcgcctttgaggagagcctgaactatgccctgggcgctggggacctcttcaacgtgaatgacaacagtgaatatgtggagaccatcatcgccaagtgcatcgaccactacaccaagcagtgtgtggagaatgctgacctgcctgagggggagaagaagcccatcgaccagaggctggagggcatcgtgaacaagatgttccagcgctgcctggatgaccacaagtacaagcaggccatcggcatcgccctggagacccggcggctggatgtgtttgagaagaccatcctggagagcaatgatgtgcccggcatgctggcctacagcctgaagctgtgcatgagcctgatgcagaacaagcagttcaggaacaaggtgctgcgggtgctggtgaagatctacatgaacctggagaagccagacttcatcaacgtgtgccagtgcctgatcttcctggatgacccccaggccgtgtctgacatcctggagaagctggtgaaggaggacaacctgctgatggcctaccagatctgctttgacctgtatgaaagtgccagccagcagttcctgagcagcgtcatccagaacctgaggacagtgggcacccccatcgcctctgtgcccggcagcaccaacacaggcaccgtgcccggcagcgagaaggacagcgacagcatggagacagaggagaagaccagcagcgcctttgtgggcaagaccccagaggccagccctgagcccaaggaccagaccctgaagatgatcaagatcctgagcggggagatggccatcgagctgcacctgcagttcctgatccggaacaacaacacagacctgatgatcctgaagaacaccaaggatgctgtgagaaattctgtgtgccacacagccaccgtgattgccaacagcttcatgcactgcggcaccaccagtgaccagttcctgcgggacaacctggagtggctggcccgggccaccaactgggccaagttcaccgccacagccagcctgggcgtcatccacaagggccacgagaaggaggccctgcagctgatggccacctacctgcccaaggacaccagccctggcagcgcctaccaggagggcggcggcctgtatgccctgggcctcatccacgccaaccacggcggggacatcatcgactacctgctgaaccagctgaagaatgccagcaatgacatcgtgagacatggaggcagcctgggcctgggcctggccgccatgggcacagcccggcaggatgtgtatgacctgctgaagaccaacctgtaccaggatgatgctgtgactggagaggccgccggcctggccctgggcctggtgatgctgggcagcaagaatgcccaggccatcgaggacatggtgggctacgcccaggagacccagcacgagaagatcctgcggggcctggccgtgggcatcgccctggtgatgtatggccgcatggaggaggctgatgccctgattgagagcctgtgccgggacaaggaccccatcctgcggcgcagcggcatgtacacagtggccatggcctactgcggcagcggcaacaacaaggccatccggcggctgctgcacgtggccgtgtctgatgtgaatgatgatgtgagaagagctgctgtggagagcctgggcttcatcctcttccgcaccccagagcagtgccccagcgtggtgtccctgctgtctgagagctacaacccccacgtgcgctacggggccgccatggccctgggcatctgctgtgccggcactggaaacaaggaggccatcaacctgctggagcccatgaccaatgaccctgtgaactacgtgcggcagggcgccctgattgccagcgccctgatcatgatccagcagacagagatcacctgccccaaggtgaaccagttccggcagctgtacagcaaggtgatcaatgacaagcatgatgatgtgatggccaagtttggagccatcctggcccagggcatcctggatgctgggggccacaacgtgaccatcagcctgcagagcaggacaggccacacccacatgcccagcgtggtgggcgtgctggtgttcacccagttctggttctggttccccctgagccacttcctgagcctggcctacacccccacctgtgtgattggcctgaacaaggacctgaaggtgtccacagctgtgctgagcatcacagccaaggccaagaagaaggagaaggagaaggagaagaaggaggaggagaagatggaggtggatgaggccgagaagaaggaggagaaggagaagaagaaggagcctgagcccaacttccagctgctggacaacccagcccgggtgatgcctgcccagctgaaggtgctgaccatgcctgagacctgccgctaccagcccttcaagcccctgagcattggaggcatcatcatcctgaaggacaccagcgaggacatcgaggagctggtggagcctgtggccgcccacggccccaagattgaggaggaggagcaggagcctgagcccccagagccctttgagtacattgatgactag

SEQ ID NO: 73249 - DNA, 2769 bp, Artificial Sequence
  derived and/or modified sequence
atgatcaccagcgccgccggcatcatcagcctgctggacgaggacgagccacagctgaaggaatttgccctgcacaaactcaacgccgtggttaacgatttttgggccgagatctccgaatctgtcgacaagatcgaggtgctttatgaggatgaaggcttccggtctcgccagtttgccgcgctggtggcgtcgaaggtattctatcatctcggagcttttgaggaaagtctgaactacgcgctgggggccggtgatttgttcaacgtcaatgacaatagcgagtacgtcgagaccattattgcgaaatgtatcgaccattacacaaaacagtgtgtggaaaacgcagacttaccggagggcgaaaagaagcccatagaccagcgactcgagggcatcgtgaataaaatgttccagagatgtctcgacgatcacaagtacaagcaggcaataggtatcgcattggagacgcgacgactggatgtcttcgagaaaaccatcctggagtctaatgacgtgcctggtatgttggcttattccctgaaactgtgcatgagcctgatgcagaataaacagtttagaaataaggtgctaagagtgctggtgaagatatacatgaatttggaaaaacctgacttcattaacgtttgtcaatgcttaatatttcttgacgatccacaggctgtttctgatatcctggaaaagttggtgaaagaagacaatctgttaatggcttatcagatctgttttgacctctatgaatcggccagccaacagttcctgagcagtgtgattcagaacctgaggaccgtcggaacaccgatagccagcgtcccagggagtactaacaccggaacggtgccagggtcagaaaaggattcggacagtatggaaacagaagagaaaacttcaagcgcgttcgttgggaagacacccgaggcgtcgccggagccaaaagatcagaccctgaaaatgatcaagatcctgtctggtgagatggcgattgagctccacctgcaattcttgatccgcaacaacaatactgatttaatgattctaaaaaacactaaggatgcagtgaggaactctgtttgccatacagctaccgtgattgctaactcttttatgcactgcggcacgacgagcgatcaattccttcgggataatctcgagtggctcgctcgggctacgaactgggcaaaattcacggctaccgcctcacttggagtcattcacaaagggcatgagaaagaagcactccaattgatggccacctacctacccaaagacacatccccaggctcggcttaccaggaaggcggcggcctgtacgccttaggcctaattcacgcaaatcacggaggagacatcattgactacctgctgaatcaactcaagaacgctagtaacgacattgtgaggcacggtggcagtctggggctcggactagcggccatgggaaccgcgcgccaagatgtatatgatctgcttaagacaaatctctaccaagatgacgcagtgacgggcgaagctgcaggtctcgcattgggcttggtgatgctcggctcgaagaacgcccaggcaattgaagacatggtgggctatgcccaggagactcaacatgagaaaatcctaaggggactggccgttggcatcgctctggtgatgtatggtagaatggaggaagcagacgctttgattgaaagtctctgtcgcgacaaagaccccattctgcggagatctggaatgtacaccgtcgccatggcctattgcggcagtggcaataacaaggccatccggcggttgctgcacgtagccgtgtccgatgttaatgacgatgtgcggcgcgcggccgtcgaatcccttgggttcattctgttccggaccccagaacagtgtccatccgtcgtttccttactaagtgaatcctataatccccatgtgcgctacggcgccgctatggcacttggaatttgctgcgccgggaccgggaacaaggaagccatcaacctgttagagccaatgactaacgaccctgtgaactatgtccgacagggggctctaatagccagtgcgctcattatgattcagcagaccgaaatcacctgccctaaagtaaatcagttcaggcagttgtacagtaaagtgataaatgataagcacgacgatgtgatggccaagttcggcgccatactagcccagggcattctggacgcaggtggccataatgtaacgatcagccttcaatctcggactggacacacccacatgccctctgtcgtgggggtgttggtctttacgcagttttggttttggttcccactgagccatttcctgagcctagcctacaccccaacctgcgtaattggcctaaacaaagacctgaaagtaagcaccgcggtactgtctatcactgctaaggctaaaaagaaggagaaagagaaagagaagaaagaggaagaaaagatggaggttgatgaagcagaaaaaaaagaggaaaaggaaaaaaagaaggagcccgaacccaattttcagctgttagacaacccagcacgagtgatgcccgcccaactcaaggtacttactatgcctgaaacatgtaggtaccagcctttcaagcccctgagcattggaggcattataatactgaaggatacgtctgaggacattgaggaactggtcgaacctgtcgccgcacacggacccaagatcgaagaggaagaacaggagcccgagccgcctgagccgttcgaatacatagacgactag

SEQ ID NO: 73250 - DNA, 2769 bp, Artificial Sequence
  derived and/or modified sequence
atgatcaccagcgccgccggcatcatcagcctgctggacgaggacgagccccagctaaaagagtttgctctgcataagctgaatgcggtggtaaacgacttttgggccgagatcagtgagtctgtggacaaaattgaagtgttatatgaagacgaaggattccgtagcagacagtttgcagcactcgtcgctagcaaggtgttctaccacctgggagcctttgaggaaagtctaaactacgctctgggggccggcgacttgttcaacgtaaacgataactctgagtatgtggagaccatcatcgccaagtgtattgaccactacactaagcagtgtgttgaaaatgcggacctgcccgaaggcgagaagaaacccatcgaccaaagacttgaaggaattgtgaataaaatgtttcaaagatgtctggacgaccacaagtacaaacaggcaatcgggatcgccctggaaacgcgacgcttggacgtgttcgaaaagaccattctggagtctaatgacgtccccggtatgcttgcgtatagtttaaaactgtgcatgtctctcatgcagaacaaacagtttcgcaataaggttctgcgagtgctcgtgaagatttacatgaatctggaaaagccggattttattaatgtctgtcagtgtcttattttcttagacgacccacaagcggtttctgatattttggaaaagttagtgaaagaggataatctgctgatggcctaccagatctgttttgacctgtacgagtcagcctcacagcagttcctttcgagtgtcatccagaatctcagaactgttggaacacctatagcaagtgtacctgggtccacaaacaccggaaccgtgccaggcagtgagaaagattcagatagtatggagaccgaagagaagacctcctctgcctttgtaggaaaaactccagaggcctcccccgaacctaaagaccagaccctgaaaatgatcaaaatcctgagcggcgaaatggcgattgagttgcacctccagttcctgatcaggaataataataccgacctgatgattcttaaaaatactaaggatgccgtgaggaacagcgtatgccataccgccacggtgattgccaattcatttatgcactgcggcactacgtccgatcagtttcttagagataacctcgagtggctggcaagagctacaaattgggctaagttcaccgctacagcttcgctcggcgtgatccacaagggacacgagaaagaggcgctgcagcttatggctacctatctgcccaaggacacatcacccggatcagcttaccaggaaggtggggggctatacgctctcggacttatacatgcgaaccacgggggcgacatcatcgattacctgctaaaccagctgaagaatgcatccaatgacatcgtccggcatggagggtctctcgggctcggccttgccgccatgggcaccgccagacaggatgtgtacgacctgctgaagactaacctgtatcaggacgacgccgtaaccggggaagcagctggactggctctaggtttggtgatgctgggcagcaagaacgcccaggccatcgaggacatggttggttatgcccaggaaactcagcacgagaagattctacgcggattggcggtgggaattgcgctggtgatgtacggcagaatggaagaagcagatgctttgatcgaatctctgtgtagagacaaagatccaatcctgcgcagatcaggtatgtacaccgtcgccatggcttactgcgggtccgggaacaataaggcaatcagaaggctgctccacgtggcagtatctgacgtgaacgacgacgtcagaagggccgctgtggaaagcttaggttttatactctttcgcacacccgagcaatgcccaagcgttgtctctctcctgagcgaatcctacaatcctcacgtacggtatggcgcagctatggctttgggtatctgttgcgccggcactggtaataaagaggctataaacctgctcgagccaatgaccaacgacccagtcaattacgttaggcagggagccctgatcgcatctgcgctgatcatgatccaacaaacggaaattacctgccccaaggtgaaccagttcaggcagctttattccaaagttatcaatgacaagcatgacgatgtaatggcaaaattcggcgctatcctcgcccagggaattctcgacgctggcggtcacaatgtcacaatcagtttgcagagcagaaccggccacacccacatgccgagcgtggtcggggttctggtctttacccaattctggttttggtttcctcttagccacttcctgagtctagcctatactccgacctgtgtcatcggactgaataaggatttgaaggtgagcacggctgtactgtctatcactgcaaaggctaaaaagaaggagaaagagaaggaaaagaaggaggaggagaagatggaggtagacgaagcagagaagaaggaagagaaggagaaaaagaaagaaccagaaccgaatttccagttgcttgacaaccctgccagagtaatgcccgcccagctcaaagtcctgactatgccagaaacttgtcgttaccaaccatttaaaccgctctcaataggcggcattattatcctgaaagacaccagcgaggatatagaggagctggttgaacccgtggcggcccacggccctaagatcgaagaggaggaacaggaaccggagccacccgaaccatttgagtacatcgatgattag

SEQ ID NO: 73251 - DNA, 2901 bp, Artificial Sequence
  derived and/or modified sequence
tgaggaggcgactgactgagcagcgcacccggggagcaaggaggcgcggtgaactgagcggcccctgagctgacagatacactgcgcagctggaacggcgagcgagccgacgggcgagtgaggggcgcagccatgatcacctcggccgctggaattatttctcttctggatgaagatgaaccacagcttaaggaatttgcactacacaaattgaatgcagttgttaatgacttctgggcagaaatttccgagtccgtagacaaaatagaggttttatacgaagatgaaggtttccggagtcggcagtttgcagccttagtggcatctaaagtattttatcacctgggggcttttgaggagtctctgaattatgctcttggagcaggggacctcttcaatgtcaatgataactctgaatatgtggaaactattatagcaaaatgcattgatcactacaccaaacaatgtgtggaaaatgcagatttgcctgaaggagaaaaaaaaccaattgaccagagattggaaggcatcgtaaataaaatgttccagcgatgtctagatgatcacaagtataaacaggctattggcattgctctggagacacgaagactggacgtctttgaaaagaccatactggagtcgaatgatgtcccaggaatgttagcttatagccttaagctctgcatgtctttaatgcagaataaacagtttcggaataaagtactaagagttctagttaaaatctacatgaacttggagaaacctgatttcatcaatgtttgtcagtgcttaattttcttagatgatcctcaggctgtgagtgatatcttagagaaactggtaaaggaagacaacctcctgatggcatatcagatttgttttgatttgtatgaaagtgctagccagcagtttttgtcatctgtaatccagaatcttcgaactgttggcacccctattgcttctgtgcctggatccactaatacgggtactgttccgggatcagagaaagacagtgactcgatggaaacagaagaaaagacaagcagtgcatttgtaggaaagacaccagaagccagtccagagcctaaggaccagactttgaaaatgattaaaattttaagtggtgaaatggctattgagttacatctgcagttcttaatacgaaacaataatacagacctcatgattctaaaaaacacaaaggatgcagtacggaattctgtatgtcatactgcaaccgttatagcaaactcttttatgcactgtgggacaaccagtgaccagtttcttagagataatttggaatggttagccagagccactaactgggcaaaatttactgctacagccagtttgggtgtaattcataagggtcatgaaaaagaagcattacagttaatggcaacataccttcccaaggatacttctccaggatcagcctatcaggaaggtggaggtctctatgcactaggtcttattcatgccaatcatggtggtgatataattgactatctgcttaatcagcttaagaacgccagcaatgatatcgttagacacggtggcagtctgggccttggtttggcagccatgggaactgcacgtcaagatgtttatgatttgctaaaaacaaacctttatcaggatgatgcagtaacaggggaagcagctggcctggccctaggtttggttatgttgggctctaaaaatgctcaggctattgaggacatggttggttatgcacaagaaactcaacatgagaagattctgcgtggtcttgcagttggcatagctttagtaatgtatgggaggatggaagaggctgatgctctcattgaatctctctgtcgtgacaaggacccaattcttcgaaggtctggaatgtatactgtagccatggcttattgtggctctggtaacaacaaagcaattcgacgcctgctacatgttgctgtaagtgatgttaatgatgatgtcaggagggcagcagtagaatcacttgggttcattctattcagaacccctgaacagtgcccaagtgttgtctctttgttgtcagagagttacaaccctcatgtgcgctacggagctgcaatggccttggggatatgctgtgctggtacaggaaacaaggaagccattaatttgctagaaccaatgacaaacgaccccgtgaactacgtgaggcaaggggcactcatagcttcagctctcatcatgatccagcagactgaaatcacttgtccaaaggtgaatcagttcagacagctgtattccaaagtcatcaatgataagcatgatgatgtcatggccaagtttggcgctattctggcccagggcatactggatgcaggtggtcataatgtcacaatctccttgcagtccaggactgggcatactcatatgccttctgtggttggcgtccttgtatttacccagttttggttctggtttcctctttcacacttcctgtcattggcttatacccctacctgtgtcattggccttaacaaggacttaaaggtttctactgctgtattatctataactgccaaggctaaaaagaaggaaaaagaaaaggaaaaaaaggaggaggagaaaatggaagtggatgaggcagagaaaaaggaggaaaaagagaagaaaaaagaacctgagccaaacttccagttattggataacccagcccgagttatgcctgcccagcttaaggtcctaaccatgccggagacctgtagataccagcctttcaaaccactctctattggaggcatcatcattctgaaggataccagtgaagacattgaggagctggtggaacctgtggcagcacatggcccaaaaatcgaggaggaggaacaagagccagaacccccagaaccatttgagtatattgatgattaa

SEQ ID NO: 73252 - DNA, 2769 bp, Artificial Sequence
  derived and/or modified sequence
atgattacatcagccgctggcataatctctctccttgacgaggatgaaccgcagttgaaggaatttgccctgcacaaactcaatgccgttgtgaatgatttttgggccgaaatctccgagtcagtcgataagatcgaagtgctctacgaggacgaaggctttcggagtagacagtttgctgccttggttgcctccaaggtcttttaccatttgggtgccttcgaagaaagcctgaactacgccctcggggcaggcgacctcttcaacgtgaatgacaactccgagtacgtggagacaatcattgcgaagtgtatcgaccactacactaagcaatgtgtggaaaacgccgatctccctgaaggggagaaaaaacccattgaccagcggctggagggcattgttaacaagatgttccagcgctgcctcgacgatcataagtacaagcaggcaatcggtattgctctcgaaaccagacgcctggatgtatttgaaaaaactatcctggagtcaaacgacgtgcctggcatgctggcctattcactgaaactgtgcatgtccctgatgcagaataaacaatttaggaataaagtgctgcgcgtcctggttaaaatttacatgaacctcgagaaacccgattttatcaacgtttgccaatgtctgattttcctggatgacccccaggcagttagcgatattctcgagaagttggtgaaagaagacaatctcctgatggcatatcaaatatgctttgacctctatgagtctgcaagccagcagttcctgtcaagtgtgatccagaatttgcgcactgtggggactccgattgcttccgttccagggagtactaatacaggaactgtgcctggaagcgaaaaggacagtgattctatggagacagaggagaagactagttctgcgttcgtgggtaagacacccgaagcctccccagaacccaaggatcaaaccctgaaaatgatcaaaattctgagcggggaaatggccatagaactgcatctgcagtttctcattaggaacaacaacactgatctgatgattctgaagaacaccaaagatgccgttcgaaattccgtgtgccacaccgcaaccgtgattgctaatagcttcatgcactgcggcacaacttcggatcagttcttgcgcgataatttggaatggctagcacgcgctaccaattgggcgaagtttaccgctacggcatccctgggagtcattcacaaagggcacgagaaagaggccctgcaattgatggccacatacctgcccaaagacaccagcccaggcagtgcttatcaagaaggcggagggctgtacgccttagggctaatccacgcaaaccacgggggtgatataatcgactacttactgaaccaactaaaaaatgcctccaacgatatcgtgcgtcacgggggtagtcttgggctggggctcgctgccatgggcactgcaagacaggatgtttacgacctcctgaaaaccaatctttaccaggatgacgcagttaccggagaggctgctgggcttgccctcggcctggtcatgctcggatcaaagaacgcccaggctattgaagacatggttggctacgcccaggagactcaacacgaaaaaatcctgcggggacttgcagttggcatcgcactcgtaatgtacgggaggatggaggaggctgacgccttgatcgagagcctgtgcagagacaaagatcctattctgaggaggagcgggatgtataccgtagctatggcttactgcggttccgggaataataaagcgattcggaggctcctgcatgtagccgttagtgacgtaaacgacgacgtaaggcgggctgccgtagagagtttaggctttatcctgttccgcacacccgaacagtgtcctagtgtcgtctcactgctgtcggaatcatacaatccccacgtccggtacggcgcagctatggccttaggcatatgctgtgcgggaactggcaataaggaagccataaatctcctggaaccaatgactaacgaccctgttaactacgtgcgccagggcgctctgatagcttcggctcttattatgatacagcaaaccgagattacttgtccaaaagttaaccaattccggcagctctactctaaggtgatcaacgataagcacgatgatgtcatggcaaagttcggggcaatcttggcacaaggcatcctggacgccggaggtcacaacgtaacaatttccctacagtcccgcactggtcacacgcacatgccctccgtggtgggagtgttggtgtttacccagttttggttctggttccctttgagtcactttctgagcctagcctatactcccacctgtgtcatcggtctcaataaagatcttaaggtgtcaacggcggtcctttcgattacggcgaaagcaaaaaagaaagagaaggagaaagagaagaaagaagaggagaaaatggaagtcgatgaggctgaaaagaaagaagaaaaagagaaaaaaaaagagccggaacccaactttcagctgctggacaacccggctcgcgtgatgcctgctcagcttaaagtccttaccatgccggagacatgcaggtaccagccatttaagccactttcaattggtggtattattatcttaaaagacacttcagaagacatcgaggagctggtagagcctgtcgccgctcacgggcctaaaatcgaggaggaggagcaggagcctgaaccacctgaaccattcgagtacattgacgattag

SEQ ID NO: 73253 - DNA, 2769 bp, Artificial Sequence
  derived and/or modified sequence
atgatcacttcagcagccggaataatctcattgttagatgaagatgagccccagttgaaagaattcgcgctccacaagctgaatgcagttgtgaacgatttctgggcagaaatatccgagagcgttgataagattgaggtgctttacgaggatgaggggttccgaagcagacagttcgccgctttggttgcctcaaaggtgttctaccatctcggagctttcgaggagtcgctgaactacgcccttggtgctggcgatttgttcaacgtgaacgataactccgagtatgtggaaaccatcatcgctaagtgtatcgatcattataccaagcagtgcgtggaaaatgcagacttgcctgaaggcgagaagaaacccattgatcagcgattggaaggaatcgtgaacaaaatgttccagcggtgcctggacgatcataagtataagcaggccattgggatcgccttggaaacacgtagactggatgtattcgagaagaccatattagagtcaaatgacgtccctggaatgcttgcatactcccttaaactttgtatgtctctcatgcaaaataaacagttccggaacaaagtcttgcgtgttctggtcaaaatctatatgaacctggaaaaacctgatttcataaacgtatgccaatgccttattttcctcgacgatccacaggctgtgtctgacattctggaaaagctggtcaaggaggataacctcttgatggcataccagatttgcttcgacttgtatgagtccgccagccaacagtttctgtctagcgtgatccagaatcttaggacagtgggcacccccatcgcatccgtgcccggatccacaaacaccggaaccgtacctggatcagagaaagactctgattccatggagacggaagagaagacgagctctgccttcgtcggcaagacccctgaggccagcccagaacccaaagaccaaacactgaagatgattaaaatacttagcggtgaaatggccatcgaactccatcttcagtttctaatccgcaacaataacactgatctcatgatcctgaagaacactaaggacgcagtgaggaacagtgtatgccacacagctacagttatagcgaattcttttatgcactgcggcaccacatccgaccagttcctccgcgacaacctggaatggctggccagggcgaccaactgggcgaagtttaccgctactgccagcctgggagttattcacaaaggccacgaaaaggaagccctgcagctgatggccacgtacctgcctaaagatacgtcacctgggagtgcttaccaagaaggcggaggcttgtacgcgctggggctaatccacgcgaaccatggaggcgacatcattgattatctgctcaaccagctgaagaatgccagtaatgacatcgtgcgacatggcggttctttggggttgggcttggctgctatgggcacggcccgacaggatgtctatgacttgctaaagacaaacctctaccaggatgatgccgtgaccggcgaagctgctggactcgcactaggcttagtcatgctggggagcaagaatgctcaggcaatcgaggatatggttggctatgcacaagagacgcagcacgaaaagattttacgtgggcttgccgtcggcatcgccctcgtcatgtatgggcgtatggaagaggccgatgccctgattgaatccctgtgtagagacaaggatccaatcctgcggcgttcaggaatgtatacagtagcaatggcctactgcgggtctgggaataacaaggccataagacggctgttgcatgtggccgtctcagacgtgaatgatgacgtgcgccgagccgcagtggaatccctcggctttattttatttcgaacaccagaacagtgcccaagtgttgtgagcctactatcagaatcttataatccacacgtgcggtatggtgcagccatggcgctcgggatctgttgcgcgggaacaggcaacaaagaagctataaatctcctggagcccatgacaaatgaccccgtgaattacgtgagacagggtgctctgattgccagtgcgctgatcatgatccagcagaccgagattacatgccctaaggttaatcagttccgccagctgtactcaaaagtcatcaacgataagcatgatgacgtcatggcaaaattcggcgcaatcttggcgcagggcatccttgacgccggtgggcataacgttacaatttccctacaatctcgtactggacatacccacatgccctccgtcgttggcgtacttgtctttacacagttctggttctggtttcccctctctcacttcctgtcattggcctataccccaacctgcgtgatcggtctgaataaagacttaaaagtgtctactgcagtcctgtccatcaccgctaaggcgaaaaagaaggaaaaggagaaagagaagaaggaagaggagaaaatggaggtggacgaggccgagaaaaaggaagaaaaagaaaaaaagaaagagcccgaacctaactttcagctgttagataatcccgctagagttatgcctgcacagctcaaggttctgacgatgcctgagacctgccgttatcagccttttaagcccctctccatagggggaatcattattctgaaagatacatcggaggatattgaagaactggtggagccagtggccgcacatggccctaaaatcgaagaggaggaacaggaacctgagccgccagaaccattcgaatatatagatgactag

SEQ ID NO: 73254 - protein, 1200 aa, Artificial Sequence
  derived and/or modified sequence
MLGESDERCTNAGSGCRRSSPGTSAQQLDATFSTNASLEIFELDLSDPSLDMKSCATFSSSHRYHKLIWGPYKMDSKGDVSGVLIAGGENGNIILYDPSKIIAGDKEVVIAQNDKHTGPVRALDVNIFQTNLVASGANESEIYIWDLNNFATPMTPGAKTQPPEDISCIAWNRQVQHILASASPSGRATVWDLRKNEPIIKVSDHSNRMHCSGLAWHPDVATQMVLASEDDRLPVIQMWDLRFASSPLRVLENHARGILAIAWSMADPELLLSCGKDAKILCSNPNTGEVLYELPTNTQWCFDIQWCPRNPAVLSAASFDGRISVYSIMGGSTDGLRQKQVDKLSSSFGNLDPFGTGQPLPPLQIPQQTAQHSIVLPLKKPPKWIRRPVGASFSFGGKLVTFENVRMPSHQGAEQQQQQHHVFISQVVTEKEFLSRSDQLQQAVQSQGFINYCQKKIDASQTEFEKNVWSFLKVNFEDDSRGKYLELLGYRKEDLGKKIALALNKVDGANVALKDSDQVAQSDGEESPAAEEQLLGEHIKEEKEESEFLPSSGGTFNISVSGDIDGLITQALLTGNFESAVDLCLHDNRMADAIILAIAGGQELLARTQKKYFAKSQSKITRLITAVVMKNWKEIVESCDLKNWREALAAVLTYAKPDEFSALCDLLGTRLENEGDSLLQTQACLCYICAGNVEKLVACWTKAQDGSHPLSLQDLIEKVVILRKAVQLTQAMDTSTVGVLLAAKMSQYANLLAAQGSIAAALAFLPDNTNQPNIMQLRDRLCRAQGEPVAGHESPKIPYEKQQLPKGRPGPVAGHHQMPRVQTQQYYPHGENPPPPGFIMHGNVNPNAAGQLPTSPGHMHTQVPPYPQPQPYQPAQPYPFGTGGSAMYRPQQPVAPPTSNAYPNTPYISSASSYTGQSQLYAAQHQASSPTSSPATSFPPPPSSGASFQHGGPGAPPSSSAYALPPGTTGPQNGWNDPPALNRVPKKKKMPENFMPPVPITSPIMNPLGDPQSQMLQQQPSAPVPLSSQSSFPQPHLPGGQPFHGVQQPLGQTGMPPSFSKPNIEGAPGAPIGNTFQHVQSLPTKKITKKPIPDEHLILKTTFEDLIQRCLSSATDPQTKRKLDDASKRLEFLYDKLREQTLSPTITSGLHNIARSIETRNYSEGLTMHTHIVSTSNFSETSAFMPVLKVVLTQANKLGV

SEQ ID NO: 73255 - DNA, 3603 bp, Artificial Sequence
  derived and/or modified sequence
atgctgggcgagagcgacgagagatgcaccaacgccggcagcggctgcagaagaagcagccccggcaccagcgcccagcagctggacgccaccttcagcaccaacgccagcctggagatcttcgagctggacctgagcgaccccagcctggacatgaagagctgcgccaccttcagcagcagccacagataccacaagctgatctggggcccctacaagatggacagcaagggcgacgtgagcggcgtgctgatcgccggcggcgagaacggcaacatcatcctgtacgaccccagcaagatcatcgccggcgacaaggaggtggtgatcgcccagaacgacaagcacaccggccccgtgagagccctggacgtgaacatcttccagaccaacctggtggccagcggcgccaacgagagcgagatctacatctgggacctgaacaacttcgccacccccatgacccccggcgccaagacccagccccccgaggacatcagctgcatcgcctggaacagacaggtgcagcacatcctggccagcgccagccccagcggcagagccaccgtgtgggacctgagaaagaacgagcccatcatcaaggtgagcgaccacagcaacagaatgcactgcagcggcctggcctggcaccccgacgtggccacccagatggtgctggccagcgaggacgacagactgcccgtgatccagatgtgggacctgagattcgccagcagccccctgagagtgctggagaaccacgccagaggcatcctggccatcgcctggagcatggccgaccccgagctgctgctgagctgcggcaaggacgccaagatcctgtgcagcaaccccaacaccggcgaggtgctgtacgagctgcccaccaacacccagtggtgcttcgacatccagtggtgccccagaaaccccgccgtgctgagcgccgccagcttcgacggcagaatcagcgtgtacagcatcatgggcggcagcaccgacggcctgagacagaagcaggtggacaagctgagcagcagcttcggcaacctggaccccttcggcaccggccagcccctgccccccctgcagatcccccagcagaccgcccagcacagcatcgtgctgcccctgaagaagccccccaagtggatcagaagacccgtgggcgccagcttcagcttcggcggcaagctggtgaccttcgagaacgtgagaatgcccagccaccagggcgccgagcagcagcagcagcagcaccacgtgttcatcagccaggtggtgaccgagaaggagttcctgagcagaagcgaccagctgcagcaggccgtgcagagccagggcttcatcaactactgccagaagaagatcgacgccagccagaccgagttcgagaagaacgtgtggagcttcctgaaggtgaacttcgaggacgacagcagaggcaagtacctggagctgctgggctacagaaaggaggacctgggcaagaagatcgccctggccctgaacaaggtggacggcgccaacgtggccctgaaggacagcgaccaggtggcccagagcgacggcgaggagagccccgccgccgaggagcagctgctgggcgagcacatcaaggaggagaaggaggagagcgagttcctgcccagcagcggcggcaccttcaacatcagcgtgagcggcgacatcgacggcctgatcacccaggccctgctgaccggcaacttcgagagcgccgtggacctgtgcctgcacgacaacagaatggccgacgccatcatcctggccatcgccggcggccaggagctgctggccagaacccagaagaagtacttcgccaagagccagagcaagatcaccagactgatcaccgccgtggtgatgaagaactggaaggagatcgtggagagctgcgacctgaagaactggagagaggccctggccgccgtgctgacctacgccaagcccgacgagttcagcgccctgtgcgacctgctgggcaccagactggagaacgagggcgacagcctgctgcagacccaggcctgcctgtgctacatctgcgccggcaacgtggagaagctggtggcctgctggaccaaggcccaggacggcagccaccccctgagcctgcaggacctgatcgagaaggtggtgatcctgagaaaggccgtgcagctgacccaggccatggacaccagcaccgtgggcgtgctgctggccgccaagatgagccagtacgccaacctgctggccgcccagggcagcatcgccgccgccctggccttcctgcccgacaacaccaaccagcccaacatcatgcagctgagagacagactgtgcagagcccagggcgagcccgtggccggccacgagagccccaagatcccctacgagaagcagcagctgcccaagggcagacccggccccgtggccggccaccaccagatgcccagagtgcagacccagcagtactacccccacggcgagaacccccccccccccggcttcatcatgcacggcaacgtgaaccccaacgccgccggccagctgcccaccagccccggccacatgcacacccaggtgcccccctacccccagccccagccctaccagcccgcccagccctaccccttcggcaccggcggcagcgccatgtacagaccccagcagcccgtggccccccccaccagcaacgcctaccccaacaccccctacatcagcagcgccagcagctacaccggccagagccagctgtacgccgcccagcaccaggccagcagccccaccagcagccccgccaccagcttcccccccccccccagcagcggcgccagcttccagcacggcggccccggcgccccccccagcagcagcgcctacgccctgccccccggcaccaccggcccccagaacggctggaacgacccccccgccctgaacagagtgcccaagaagaagaagatgcccgagaacttcatgccccccgtgcccatcaccagccccatcatgaaccccctgggcgacccccagagccagatgctgcagcagcagcccagcgcccccgtgcccctgagcagccagagcagcttcccccagccccacctgcccggcggccagcccttccacggcgtgcagcagcccctgggccagaccggcatgccccccagcttcagcaagcccaacatcgagggcgcccccggcgcccccatcggcaacaccttccagcacgtgcagagcctgcccaccaagaagatcaccaagaagcccatccccgacgagcacctgatcctgaagaccaccttcgaggacctgatccagagatgcctgagcagcgccaccgacccccagaccaagagaaagctggacgacgccagcaagagactggagttcctgtacgacaagctgagagagcagaccctgagccccaccatcaccagcggcctgcacaacatcgccagaagcatcgagaccagaaactacagcgagggcctgaccatgcacacccacatcgtgagcaccagcaacttcagcgagaccagcgccttcatgcccgtgctgaaggtggtgctgacccaggccaacaagctgggcgtgtag

SEQ ID NO: 73256 - DNA, 3603 bp, Artificial Sequence
  derived and/or modified sequence
atgctcggtgagtctgatgagcggtgcactaacgccggatcgggatgccgccgaagtagtccaggcaccagcgcccagcagctagacgctacgttctccacaaacgccagtttggaaatctttgaacttgatctgagcgacccttccctcgatatgaagagctgcgctaccttcagcagttcccataggtaccacaaacttatttgggggccttacaaaatggactccaaaggtgacgtgagcggcgttttaatcgctgggggtgagaacggaaacattatcttgtatgacccatctaagattatcgcaggagataaggaggttgtaattgcccagaatgataaacatactggaccggtgcgtgcactcgacgtgaatattttccagacaaacctggtggcgagtggcgccaacgagagcgaaatttacatctgggatctcaataacttcgcaacacccatgacaccaggcgcaaaaactcagcctcctgaggatatatcgtgcatcgcctggaatcgccaggtccaacacatacttgcaagcgcatcacccagcggtcgagcaactgtctgggatcttcgcaagaatgagcccattattaaggtgtcagaccacagcaacaggatgcactgctccgggctggcatggcaccctgacgtggcgacccagatggtgctggccagtgaggacgatcggttgcctgttattcagatgtgggatcttagatttgcgtcctccccattaagggttctggagaatcacgctcggggcatcttagcaatagcctggtctatggcagaccctgaactgctgctgagttgcgggaaggacgctaaaatcctgtgtagcaatccaaacaccggagaagtgctatatgaactaccaacaaatacccagtggtgtttcgacatccagtggtgcccccgtaaccctgccgtgcttagtgccgcatcattcgatggaagaatttcggtatactctataatgggcggctccaccgacggcttgagacagaaacaggtggataagctgagcagtagcttcggcaacttagatccattcggcactggtcaacccctaccccccttgcaaattccccagcaaaccgcccaacactccattgtcttgcctctgaagaagcctccaaaatggatccgcagacccgtgggtgccagttttagcttcggcgggaagttggtcactttcgaaaacgtgaggatgccgagtcatcagggagctgaacaacaacagcagcagcatcacgtgttcatctcccaagtggtgaccgagaaggaattcttatcaagatctgaccaactgcagcaagccgtccagtcacaagggttcatcaattattgtcagaaaaagatcgacgcatcccagactgaatttgagaagaacgtgtggtccttcctgaaagttaacttcgaggatgattctcgggggaagtacttggagttgctgggttaccggaaagaggaccttggaaagaagatcgccctggcattaaataaggtcgatggcgccaacgtcgcccttaaagactccgatcaggtcgcccagtcggacggggaggagagtcccgccgcagaggagcagttgcttggggagcatataaaagaagagaaggaagagagcgagttcctgccctccagtggtggaacattcaacatttcagttagtggcgacatcgatggattaattacccaagccttactgacaggcaatttcgaatcggccgtagatctgtgtttacatgacaaccgcatggctgatgccatcatccttgccatcgcgggaggacaggagttattagctagaactcagaagaagtattttgctaagtcccagagtaaaatcactaggctcattacagcagttgtgatgaagaattggaaggaaattgttgaaagctgtgatcttaagaactggcgggaagccctggcagccgtgctgacatacgccaagcctgacgagttcagcgccttgtgcgaccttctggggacccggttagaaaacgaaggggatagtctgctgcagacccaggcctgcctgtgttacatttgcgccggtaacgtcgaaaagctggtggcctgttggacgaaggctcaggatggttcccacccattaagcttacaggatcttattgaaaaagtggtgattctccgcaaagccgtgcagcttacacaggcgatggacactagcacagtcggcgtcctcctggcggcaaagatgtcacaatatgccaatctgctggctgctcagggatcaatcgctgctgcattggccttccttcccgacaacactaatcagccaaatatcatgcagctgcgagatagactttgccgggctcaaggcgagcctgtggctggccatgaatcccctaaaatcccttacgagaagcagcagctgcctaaagggagacccggcccagtcgctggccaccaccagatgccaagagtacagacccagcagtactatcctcacggggaaaacccacccccaccaggtttcattatgcacggcaatgtaaatccaaatgctgctggacagcttcctacaagcccgggccatatgcatacgcaggtgcccccgtacccccagcctcagccctaccagcccgcccaaccatatccattcggcactggaggatcagcaatgtatcgaccccagcagccagtggcaccacctacctctaacgcatacccaaacacaccctacatttcttctgcatcctcttacaccggccagtctcagctgtacgccgcccaacaccaggcgagcagccctacaagcagcccggcaacttcttttccccctcccccgtcttccggtgcatcatttcagcacggcggtcccggggcacccccatcctcatctgcttacgcattgccccccggcaccacgggcccacagaatgggtggaacgatcctcctgctcttaatcgagtacctaaaaaaaagaagatgccagaaaactttatgcccccggtgcccattacaagccccataatgaacccgctgggagaccctcagagccagatgctacagcagcagccatccgctccagtccctctctcatcccagtccagtttcccccaacctcatctacctgggggtcagccctttcatggcgtgcaacagcctctgggtcagacaggcatgccccccagtttcagtaaacctaatatcgagggggcaccaggtgcacccatcggcaacacattccagcatgtgcagtctctgcccacgaagaaaattactaagaagcccatacctgacgagcacctgatcctgaagaccactttcgaggacctgattcaacgatgtctgtctagcgcgaccgatccacagacgaagaggaagctcgatgacgcaagcaagaggttggaatttttgtacgacaagctccgggaacaaacactttccccaaccatcacttccgggctgcataatatagccaggagcattgaaacaaggaactattcggagggattgacgatgcacacccatattgtctccacatccaacttctctgagacttcagctttcatgccagtccttaaagttgttcttacacaggccaacaaactgggcgtgtag

SEQ ID NO: 73257 - DNA, 3603 bp, Artificial Sequence
  derived and/or modified sequence
atgctgggggagagtgatgagcgctgcaccaatgccggcagcggctgcagaagaagcagccctggcaccagcgcccagcagctggatgccaccttcagcaccaatgccagcctggagatctttgagctggacctgagtgaccccagcctggacatgaagagctgtgccaccttcagcagcagccaccgctaccacaagctgatctggggcccctacaagatggacagcaaaggagatgtgtctggagtgctgattgctggaggagaaaatggaaacatcatcctgtatgaccccagcaagatcatcgccggggacaaggaggtggtgattgcccagaatgacaagcacactggacctgtgcgggccctggatgtgaacatcttccagaccaacctggtggccagcggggccaatgaaagtgagatctacatctgggacctgaacaactttgccacccccatgacccctggggccaagacccagcccccagaggacatcagctgcatcgcctggaaccggcaggtgcagcacatcctggccagcgccagccccagcggccgggccaccgtgtgggacctgaggaagaatgagcccatcatcaaggtgtctgaccacagcaacaggatgcactgcagcggcctggcctggcacccagatgtggccacccagatggtgctggcctctgaagatgaccggctgcccgtcatccagatgtgggacctgcgctttgccagcagccccctgcgggtgctggagaaccacgcccggggcatcctggccatcgcctggagcatggctgaccctgagctgctgctgagctgtgggaaggatgccaagatcctgtgcagcaaccccaacacaggagaggtgctgtatgagctgcccaccaacacccagtggtgctttgacatccagtggtgccccagaaatcctgctgtgctgtctgctgccagctttgatggccgcatctctgtgtacagcatcatgggcggcagcacagatggcctgcggcagaagcaggtggacaagctgagcagcagctttggaaacctggaccccttcggcaccggccagcccctgccccccctgcagatcccccagcagacagcccagcacagcatcgtgctgcccctgaagaagccacccaagtggatccggcggcctgtgggcgccagcttctcctttggaggcaagctggtgacctttgaaaatgtgaggatgcccagccaccagggcgctgagcagcagcagcagcagcaccacgtgttcatcagccaggtggtgacagagaaggagttcctgagcagaagtgaccagctgcagcaggccgtgcagagccagggcttcatcaactactgccagaagaagattgatgccagccagacagaatttgagaagaatgtgtggagcttcctgaaggtgaactttgaagatgacagccggggcaagtacctggagctgctgggctacagaaaagaagacctgggcaagaagatcgccctggccctgaacaaggtggatggagccaacgtggccctgaaggacagcgaccaggtggcccagagtgatggagaggagagccctgctgctgaggagcagctgctgggggagcacatcaaggaggagaaggaggagagcgagttcctgcccagcagcggcggcaccttcaacatctctgtgtctggggacattgatggcctcatcacccaggccctgctgaccggcaactttgaatctgctgtggacctgtgcctgcatgacaacaggatggctgatgccatcatcctggccatcgccggcggccaggagctgctggcccggacccagaagaagtactttgccaagagccagagcaagatcaccaggctcatcacagctgtggtgatgaagaactggaaggagatcgtggagagctgtgacctgaagaactggagggaggccctggccgctgtgctgacctacgccaagccagatgagttcagcgccctgtgtgacctgctgggcacccggctggagaatgaaggagacagcctgctgcagacccaggcctgcctgtgctacatctgtgctggaaatgtggagaagctggtggcctgctggaccaaggcccaggacggcagccaccccctgagcctgcaggacctgattgagaaggtggtgatcctgaggaaggctgtgcagctgacccaggccatggacaccagcacagtgggcgtgctgctggccgccaagatgagccagtatgccaacctgctggccgcccagggcagcattgctgctgccctggccttcctgcctgacaacaccaaccagcccaacatcatgcagctgcgggaccggctgtgccgggcccagggcgagcctgtggccggccacgagagccccaagatcccctatgagaagcagcagctgcccaagggccggcccggccctgtggccggccaccaccagatgccccgggtgcagacccagcagtactacccccatggagaaaatcctcctcctcctggcttcatcatgcatggaaatgtgaaccccaatgctgctggccagctgcccaccagccctggccacatgcacacccaggtgcccccctacccccagccccagccctaccagcctgcccagccctaccccttcggcaccggcggcagcgccatgtaccggccccagcagcctgtggccccacccaccagcaatgcctaccccaacaccccctacatcagcagcgccagcagctacacaggccagagccagctgtatgctgcccagcaccaggccagcagccccaccagcagccctgccaccagcttccccccaccacccagcagcggggccagcttccagcacggcggccctggggccccacccagcagcagcgcctatgccctgcccccaggcaccaccggcccccagaatggctggaatgaccccccagccctgaacagagtgcccaagaagaagaagatgcctgagaacttcatgcctcctgtgcccatcaccagccccatcatgaaccccctgggggacccccagagccagatgctgcagcagcagcccagcgcccctgtgcccctgagcagccagagcagcttcccccagccccacctgcccggcggccagcccttccacggcgtgcagcagcccctgggccagacaggcatgccacccagcttcagcaagcccaacatcgagggcgcccctggggcccccatcggcaacaccttccagcacgtgcagagcctgcccaccaagaagatcaccaagaagcccatcccagatgagcacctgatcctgaagaccacctttgaggacctgatccagcgctgcctgagcagcgccacagacccccagaccaagaggaagctggatgatgccagcaagaggctggagttcctgtatgacaagctgcgggagcagaccctgagccccaccatcaccagcggcctgcacaacatcgcccggagcattgagaccaggaactacagcgagggcctgaccatgcacacccacatcgtgtccaccagcaacttcagcgagaccagcgccttcatgcctgtgctgaaggtggtgctgacccaggccaacaagctgggcgtgtag

SEQ ID NO: 73258 - DNA, 3603 bp, Artificial Sequence
  derived and/or modified sequence
atgctgggcgagagcgacgagcggtgcaccaacgccggcagcggctgcagaagaagttcacccggaacctccgcccaacagctcgatgctaccttctcgaccaacgcttcattggagatctttgagctggatctcagcgacccatcattggacatgaaatcctgcgccacattttcctccagccacagataccataagctgatatggggcccctataaaatggattcgaagggcgacgtgtcaggagtgttgatcgcgggaggtgaaaacggcaacatcatcctgtatgacccgtcaaagatcattgccggggataaggaagtagtaattgcacagaacgacaaacataccggacccgtgagggctctggacgtcaacatatttcaaaccaacctagtggcctctggcgcaaacgaatctgagatttacatctgggacctgaacaacttcgccactccaatgacgcccggggccaaaacacagccaccagaggatattagctgcatagcttggaaccggcaggtgcaacacatcctggcttcagcaagtccttccgggcgagccactgtgtgggatctgcgcaaaaatgagcccatcatcaaagtgagcgaccactctaatcggatgcactgcagcggcctggcatggcaccctgacgtggccacacaaatggtcttagcttccgaagacgatcgattgcctgtgatacagatgtgggatcttcgctttgcatcgtctcccctgagggtgctggagaatcacgccagaggtattcttgccattgcgtggtccatggccgatcctgaactgctgctgtcatgcggaaaggacgctaaaattctttgcagtaatcccaatactggagaagtcctatacgaactgccaaccaacactcaatggtgttttgacattcagtggtgtccaaggaatcctgccgtgctttctgccgcttctttcgatggcaggatcagcgtgtattcaattatgggaggtagcactgacggcttgcggcaaaagcaggtggacaagctgagcagctcctttgggaacctggatcctttcggcacagggcagccactgccccccctgcagatcccccaacaaactgcacagcactccatagtcctgcctctgaagaagcccccaaagtggatccggaggcctgtgggcgcctcattcagctttgggggaaaactggtgacctttgaaaacgtacgcatgccctcccaccagggagcggaacagcaacagcagcagcatcacgtctttatctctcaggtcgtgaccgagaaagaatttttatctagaagcgaccagctccagcaagctgtgcagtcccagggcttcataaactactgccagaagaagattgacgcgtcccaaactgaattcgagaagaatgtgtggtcgtttttgaaagtaaactttgaggacgactctcgcggcaaatatctggagctgcttggatacagaaaggaggatttaggaaagaagatagccctagcgctgaacaaggtggacggcgcaaacgtggctctgaaggattccgaccaagtcgcacaaagtgacggtgaggagtctcccgccgcggaggagcagctgttgggcgaacacataaaggaagagaaggaggaatctgaatttcttccctcctcaggagggaccttcaatattagcgtgtccggggacatagacgggcttataacccaggctctgctcacagggaattttgaatcggctgtcgacctatgtctgcacgacaaccggatggctgacgccataatcctggctatcgccggagggcaggagcttcttgcccgaacacaaaaaaaatactttgccaagagccagtcgaagatcacccgactgattacggccgtggtgatgaagaattggaaagaaattgttgagtcgtgcgacctgaagaattggagagaggccctggctgcagtgttgacttatgcgaagcctgatgaattcagcgccctatgtgacctcctaggaaccagacttgaaaatgagggagactccctgctgcagactcaagcttgcctgtgctacatttgcgccggcaatgtagagaaactcgttgcttgttggaccaaggcccaagatggatctcaccccctgtccctccaggatcttatcgaaaaggttgtcattctcaggaaagctgtgcaactaacgcaggctatggatacttccactgtaggtgtcctccttgccgcgaagatgagccaatacgcgaatcttcttgcagcccagggtagcattgctgccgcactggcttttctcccagataatacaaaccagcccaatatcatgcagcttcgggaccgactttgccgcgcccagggggagcctgtcgctggccatgaatcccccaaaattccctacgagaagcagcagttgccaaaagggcgccctggtccagtggctgggcaccatcagatgcctagagtccagacgcaacaatattacccccatggcgagaacccaccaccgcctggcttcattatgcatggtaatgtgaatcctaatgctgcaggacaactaccaacatcgccggggcacatgcacacccaggtgcccccatatccccagcctcagccctaccagccagcacagccatacccctttgggacagggggctccgcaatgtaccggccgcagcagcctgtagcacccccaacaagtaacgcgtatcccaatactccctacatttcttccgcttcatcctataccgggcaatcacaactctacgctgcgcaacaccaggcctcttcgcccacaagttccccggctacctcttttccaccacctccctcctctggggccagcttccagcacgggggaccaggggcaccaccaagtagcagcgcctacgccttgcctcctggcaccacagggccccagaatggctggaacgacccgccggctctgaaccgcgtccccaaaaaaaagaagatgccggaaaactttatgccgccagtgccaataacttcaccgattatgaatcctctcggagatcctcagtctcagatgctgcagcagcagccatccgcccccgtgccactgtccagccagagcagctttccccagccccaccttccgggggggcagccatttcatggtgtgcagcagcctcttggccagaccggtatgcctcctagcttctctaaacctaatattgaaggagctccgggagctccaattggtaatacattccagcatgtacaaagcctccccaccaaaaagatcactaaaaaacctataccagatgaacaccttattttgaagacaacatttgaggatctcatacaaaggtgcctgagtagcgctacagatcctcagaccaaacgtaagttggacgatgcctccaaacgtttagagttcctgtatgacaagcttagggaacagacgctatcaccaaccattactagtgggctacacaacatcgcacggtcgatcgagacccggaattatagcgagggcttaacgatgcacacacatatcgtgtcaaccagcaacttcagcgaaacgtctgcattcatgccagtgctcaaagtcgtacttactcaggcgaacaagctcggagtgtag

SEQ ID NO: 73259 - DNA, 3603 bp, Artificial Sequence
  derived and/or modified sequence
atgctcggggagtcagacgagcggtgcactaacgccggatctggttgtagacgttcttccccaggcacctctgctcaacagctcgatgccacttttagcacgaatgcctccctcgaaattttcgagctagacctgtcagacccctctcttgacatgaaatcatgtgcaaccttcagctcttcccaccggtaccacaaactgatctggggcccttacaagatggatagcaaaggggacgtatctggcgtgctgattgccggaggcgagaatgggaacatcatactctacgacccttctaaaatcattgcaggagataaggaggttgtgatcgcgcaaaatgataagcacacaggccctgtgcgggcactggacgtgaacatcttccagacaaacctcgtcgccagcggagctaacgaatccgaaatctatatctgggatttgaacaactttgcgacccccatgacgccaggagcaaagactcagccaccagaggatattagttgtattgcctggaatcggcaggtccaacatatccttgcctccgcttctcctagcggtcgcgcaacagtgtgggacctccgaaagaacgaaccaataattaaggtttccgatcattccaatagaatgcattgttctggactggcttggcatccagatgtggctacccaaatggtgctggcaagcgaggatgatcggcttccggtgatacaaatgtgggacctcagattcgcaagctccccactacgggtcctggaaaaccacgccaggggcattctggccatcgcatggagtatggccgacccagagctccttctgtcgtgcgggaaggacgctaagatactgtgctccaaccccaatacaggggaagtgctgtatgagctccctacgaacacccagtggtgctttgacatccagtggtgccccagaaacccagccgtgttgagcgctgcctcatttgatgggaggatcagcgtctacagtatcatgggagggtccaccgacgggttgcgtcagaagcaggtcgataagctgtcttctagcttcggcaacctcgatccctttggaaccgggcagcccttgccaccgttacagatacctcagcaaactgcccagcacagcattgtgttaccattgaaaaagcccccaaagtggattagacggccagttggcgcaagcttcagctttgggggtaagctggtgacctttgaaaatgtcagaatgcccagccaccagggcgcagaacagcaacagcagcagcaccacgtcttcatatctcaggtggtcacagagaaggaattcctgtcaagatccgatcagctccaacaggcagtccagtctcagggattcatcaactactgtcagaagaagatcgacgcatcgcagaccgaatttgagaagaacgtctggtcatttctcaaagtcaattttgaggatgacagccgcggaaagtatttggagctgctgggctatcggaaggaagacttgggaaagaaaatcgccctggccctgaacaaagtggacggcgcaaacgtggctctgaaagactcggatcaggtagcgcaaagcgacggcgaggagtcgccggcagccgaagagcaattattgggagaacatattaaagaggagaaggaagagtcagaatttttgccctctagcgggggaacattcaatatcagtgtgtccggcgacattgacggcttaatcacacaggccctcttgacagggaattttgagtcagcagtcgatctgtgcctccacgataaccggatggccgacgccatcatcttggcaatagctggcggtcaagagctgctagccagaacacagaagaagtacttcgccaaatcacagagtaaaattacgcggttaataactgccgtggtgatgaagaattggaaagagatagtcgaatcttgcgatctgaagaattggagggaagctctcgcagcagttctaacatatgcgaaacccgatgaatttagtgcactgtgtgatctactcggaacccggttggaaaatgagggcgacagcttactgcagactcaggcctgtctgtgctatatctgcgccggaaacgtcgaaaagctcgtcgcctgctggaccaaggctcaggacggttcacaccccctgagtctgcaggatcttatagaaaaagtggttatccttagaaaggctgtacaactgacccaggcaatggacactagtactgttggggtgctgcttgcggcaaagatgtcacagtatgctaacctactggcagctcaagggagcattgccgctgccttggcctttctacccgacaatacaaaccaacctaatattatgcagcttagagacagactatgtagggctcagggcgagcccgtagctggccacgagtctccaaagataccctatgagaagcagcagctccccaaaggccgacccggacccgtagcagggcaccatcagatgcctcgagtgcagacgcagcagtactacccccatggcgaaaaccccccaccccctggttttataatgcacggcaatgttaatcccaatgcagccggtcagttacccaccagcccaggccacatgcacacccaggtgcctccctatccccagccgcagccttaccaaccagcacaaccttaccctttcggcaccggcggttctgccatgtacagaccgcagcaacctgttgctccgccaacctctaatgcgtacccaaatacgccctacatctcttcagcctcttcttacacaggtcagagccagctttatgcagcgcaacaccaggcatcttctcccacctccagtccagcgacttcattcccccctcctccttctagcggtgcctcctttcagcacggcggtccgggagcccctccatcttcttccgcatatgccctgccccctggtacgaccgggcctcagaatggctggaatgatcctcctgccctgaatagagtgcccaaaaagaaaaagatgcccgagaacttcatgcctccggtcccgattacaagccccatcatgaatcctctgggagaccctcagagtcagatgctccagcagcagcctagcgcccctgtgccactgtcctcccagagttcgttcccccagccacaccttccgggaggacagccattccacggcgtgcagcagcctctcggtcagactgggatgcctccttcattttccaagccgaacattgaaggcgctcctggcgcacctatcggtaacaccttccagcacgtgcaatctctccctaccaagaaaattaccaaaaaacccatccccgacgagcatttgattctcaaaacaacgttcgaagacctgatccagcgatgcttaagctcagcgactgatccacagaccaagcggaaactcgatgacgcttcaaaacgccttgagtttctttatgacaagcttagagagcagaccctctcacctaccattaccagtgggcttcacaacatagcgagatctatagaaacacgaaactactctgaaggactgactatgcacacccacatagtctcaacctcaaatttcagcgagacaagtgcctttatgcccgtgctgaaggtggtgctcactcaggccaacaagctgggcgtgtag

SEQ ID NO: 73260 - DNA, 4042 bp, Artificial Sequence
  derived and/or modified sequence
ctggccggggaggaggggcggcggcgaatgctgggagagtccgacgagcgctgcactaacgcaggatccggctgccgaaggtcctcgccaggaacatctgctcagcaattggatgcaacatttagtacgaatgcttcccttgagatatttgaattagacctctctgatccatccttggatatgaaatcttgtgccacattctcctcttctcacaggtaccacaagttgatttgggggccttataaaatggattccaaaggagatgtctctggagttctgattgcaggtggtgaaaatggaaatattattctctatgatccttctaaaattatagctggagacaaggaagttgtgattgcccagaatgacaagcatactggcccagtgagagccttggatgtgaacattttccagactaatctggtagcttctggtgctaatgaatctgaaatctacatatgggatctaaataattttgcaaccccaatgacaccaggagccaaaacacagccgccagaagatatcagctgcattgcatggaacagacaagttcagcatattttagcatcagccagtcccagtggccgggccactgtatgggatcttagaaaaaatgagccaatcatcaaagtcagtgaccatagtaacagaatgcattgttctgggttggcatggcatcctgatgttgctactcagatggtccttgcctccgaggatgaccggttaccagtgatccagatgtgggatcttcgatttgcttcctctccacttcgtgtcctggaaaaccatgccagggggattttggcaattgcttggagcatggcagatcctgaattgttactgagctgtggaaaagatgctaagattctctgctccaatccaaacacaggagaggtgttatatgaacttcccaccaacacacagtggtgcttcgatattcagtggtgtccccgaaatcctgctgtcttatcagctgcttcgtttgatgggcgtatcagtgtttattctatcatgggaggtagcacagatggtttaagacagaaacaagttgacaagctttcatcatcttttgggaatcttgatccctttggcacaggacagccccttcctccgttacaaattccacagcagactgctcagcatagtatagtgctgcctctgaagaagccgcccaagtggattcgaaggcctgttggtgcttctttttcatttggaggcaaactggttacgtttgagaatgtcagaatgccttctcatcagggagctgagcagcagcagcagcagcaccatgtgttcattagtcaggttgtaacagaaaaggagttcctcagccgatcagaccaacttcagcaggctgtgcagtcacaaggatttatcaattattgccaaaaaaaaattgatgcttctcagactgaatttgagaaaaatgtgtggtcctttttgaaggtaaactttgaggatgattctcgtggaaaataccttgaacttctaggatacagaaaagaagatctaggaaagaagattgctttggccttgaacaaagtggatggagccaatgtggctcttaaagactctgaccaagtagcacagagtgatggggaggagagccctgctgctgaagagcagctcttgggagagcacattaaagaggaaaaagaagaatctgaatttctaccctcatctggaggaacatttaatatctctgtcagtggggacattgatggtttaattactcaggctttgctgacgggcaattttgagagtgctgttgacctttgtttacatgataaccgcatggccgatgccattatattggccatagcaggtggacaagaactcttggctcgaacccagaaaaaatacttcgcaaaatcccaaagcaaaattaccaggctcatcactgcagtggtgatgaagaactggaaagagattgttgagtcttgtgatcttaaaaattggagagaggctttagctgcagtattgacttatgcaaagccggatgaattttcagccctttgtgatcttttgggaaccaggcttgaaaatgaaggagatagcctcctgcagactcaagcatgtctctgctatatttgtgcagggaatgtagagaaattagttgcatgttggactaaagctcaagatggaagccaccctttgtcacttcaggatctgattgagaaagttgtcatcctgcgaaaagctgtgcaactcactcaagccatggacactagtactgtaggagttctcttggctgcgaagatgagtcagtatgccaatttgttggcagctcagggcagtattgctgcagccttggcttttcttcctgacaacaccaaccagccaaatatcatgcagcttcgtgacagactttgtagagcacaaggagagcctgtagcaggacatgaatcacctaaaattccgtacgagaaacagcagctccccaagggcaggcctggaccagttgctggccaccaccagatgccaagagttcaaactcaacaatattatccccatggagaaaatcctccacctccgggtttcataatgcatggaaatgttaatccaaatgctgctggtcagcttcccacatctccaggtcatatgcacacccaggtaccaccttatccacagccacagccttatcaaccagcccagccgtatcccttcggaacaggggggtcagcaatgtatcgacctcagcagcctgttgctcctcctacttcaaacgcttaccctaacaccccttacatatcttctgcttcttcctatactgggcagtctcagctgtacgcagcacagcaccaggcctcttcacctacctccagccctgctacttctttccctcctcccccttcctctggagcatccttccagcatggcggaccaggagctccaccatcatcttcagcttatgcactgcctcctggaacaacaggtcctcagaatggttggaatgaccctccagctttgaacagagtacccaaaaagaagaagatgcctgaaaacttcatgcctcctgttcccatcacatcaccaatcatgaacccgttgggtgacccccagtcacaaatgctgcagcaacagccttcagctccagtaccactgtcaagccagtcttcattcccacagccacatcttccaggtggccagcccttccatggcgtacagcaacctcttggtcaaacaggcatgccaccatctttttcaaagcccaatattgaaggtgccccaggggctcctattggaaataccttccagcatgtgcagtctttgccaacaaaaaaaattaccaagaaacctattccagatgagcacctcattctaaagaccacatttgaggatcttattcagcgctgcctttcttcagcaacagaccctcaaaccaagaggaagctagatgatgccagcaaacgtttggagtttctgtatgataaacttagggaacagacactttcaccaacaatcaccagtggtttacacaacattgcaaggagcattgaaactcgaaactactcagaaggattgaccatgcatacccacatagttagcaccagcaacttcagtgagacctctgctttcatgccagttctcaaagttgttctcacccaggccaataagctgggtgtctaaaaggacagcttctcttccactcaatattgccatttttccaaagaaacatgttaaaaaaaaaaattataagacatggactagtcctcattagcatgtttgcatagcaaccagtcaagagcatttacactatttctgctgatatactcaccttagaactgctcagaaccctggtgctttatttttgttttaatcttttgttgccagtgatgattttcctattctgcaaatagtgtatttcctggattacacatagtatggtttcctgaagtattctgataaatgtgttttttaaaacctcaatatactttttagaaaaggagcatctggttatgcataaagcagagctaaaactaaatttctttcatgtcctccctacttcctcagtgtcaatcagattaaagtgtgtaatcct

SEQ ID NO: 73261 - DNA, 99 bp, Artificial Sequence
  derived and/or modified sequence
tgagccaccctgcagcagctggagcccgtgaccggccaggtgtgcttctgcgacagccacttccccagaggcgacaacgaggagctgcacctgccctag

SEQ ID NO: 73262 - protein, 709 aa, Artificial Sequence
  derived and/or modified sequence
MESPTKEIEEFESNSLKYLQPEQIEKIWLRLRGLRKYKKTSQRLRSLVKQLERGEASVVDLKKNLEYAATVLESVYIDETRRLLDTEDELSDIQSDAVPSEVRDWLASTFTRQMGMMLRRSDEKPRFKSIVHAVQAGIFVERMYRRTSNMVGLSYPPAVIEALKDVDKWSFDVFSLNEASGDHALKFIFYELLTRYDLISRFKIPISALVSFVEALEVGYSKHKNPYHNLMHAADVTQTVHYLLYKTGVANWLTELEIFAIIFSAAIHDYEHTGTTNNFHIQTRSDPAILYNDRSVLENHHLSAAYRLLQDDEEMNILINLSKDDWREFRTLVIEMVMATDMSCHFQQIKAMKTALQQPEAIEKPKALSLMLHTADISHPAKAWDLHHRWTMSLLEEFFRQGDREAELGLPFSPLCDRKSTMVAQSQVGFIDFIVEPTFTVLTDMTEKIVSPLIDETSQTGGTGQRRSSLNSISSSDAKRSGVKTSGSEGSAPINNSVISVDYKSFKATWTEVVHINRERWRAKVPKEEKAKKEAEEKARLAAEEQQKEMEAKSQAEEGASGKAEKKTSGETKNQVNGTRANKSDNPRGKNSKAEKSSGEQQQNGDFKDGKNKTDKKDHSNIGNDSKKTDGTKQRSHGSPAPSTSSTCRLTLPVIKPPLRHFKRPAYASSSYAPSVSKKTDEHPARYKMLDQRIKMKKIQNISHNWNRK

SEQ ID NO: 73263 - DNA, 2130 bp, Artificial Sequence
  derived and/or modified sequence
atggaatcgcccaccaaggaaatcgaggagtttgaaagcaactcactcaagtacttgcagcccgagcagatagagaagatttggcttaggctgagagggctgaggaaatataaaaaaactagccaacggctccggtcactggttaaacagctcgaaaggggcgaggcttcagtggtggacctgaagaagaatctggaatacgccgcaacagttctggagagtgtgtacatcgatgagacccgacggctgctggataccgaggatgagttgtcagacatccagagcgacgcggtcccaagtgaagtgcgagactggcttgcctcgacctttaccagacaaatggggatgatgttacgcagatcagatgaaaagccccgtttcaagtctatcgtgcatgccgtccaggctggcatattcgtggagagaatgtatcgcagaaccagcaatatggtggggctttcctatcctcccgccgtgatcgaggccctgaaagacgttgacaaatggtcttttgatgtattctcactaaacgaggcaagcggtgaccatgccctgaaatttatattctatgaacttcttactcgatacgatctgatcagccgcttcaaaattcctatttctgcacttgtctcgtttgtggaggctctggaagtgggctatagtaaacacaagaatccctaccacaaccttatgcacgcggccgacgttacccagacagttcattacttactgtacaagaccggcgtggccaactggcttactgagcttgagatctttgccattatcttttcagctgctatccacgactatgagcataccggaacaactaataattttcacatacagacacggtcggaccctgccatcctttacaacgaccggagtgtgctggagaaccaccacctgtcggcagcgtaccgcttactgcaggatgatgaggaaatgaacatcctgatcaacctttccaaggacgactggagagagtttaggactctggtgattgaaatggttatggccaccgatatgtcttgtcactttcaacagatcaaggcaatgaaaactgctctccagcagccggaagccatcgagaagccaaaagccctgagcctcatgttgcatacagccgacatctcccaccccgctaaggcttgggatctccaccatcggtggaccatgagtctgttggaggagttctttcggcagggtgacagagaggccgagctgggacttcctttttctcctctgtgcgatcgtaagagcaccatggtggctcagagtcaagtgggtttcatagattttattgtcgaacccacctttactgtgctgactgatatgacggagaagatcgtttcccctttgatcgacgaaactagccagacaggagggacaggccagagacgatcgtctcttaattctatctcttcgagcgatgcgaaaagatcaggagtgaagacgtccggatccgagggtagcgccccaattaacaactccgtaattagtgtagattataaatcattcaaggccacctggacagaagttgtgcatatcaacagggaaagatggagggccaaggtgcccaaagaagagaaagccaaaaaggaggcagaggagaaagccagactggctgcagaagagcaacagaaggaaatggaagcaaaatcccaggctgaggagggagcttccggcaaagctgaaaagaagaccagcggtgagaccaaaaaccaggtgaacgggacgagagctaataagagcgacaaccccaggggaaaaaacagtaaggcggaaaagagctccggagagcagcagcagaatggcgattttaaagacggcaaaaataagacggacaaaaaggaccactctaatatcggtaatgactctaagaagactgatggcaccaaacagagaagccatgggtcccccgctcccagcacttcttctacttgccgtcttacattaccagtcatcaagccgccactcagacatttcaagcgacccgcctatgcctctagcagttacgcaccctcagtgtctaagaagaccgacgagcatcccgcacggtacaagatgctcgatcagaggatcaaaatgaaaaaaatccaaaatatcagccacaactggaaccggaagtag

SEQ ID NO: 73264 - DNA, 2130 bp, Artificial Sequence
  derived and/or modified sequence
atggaatctcccacaaaggagatcgaagaatttgagtccaacagtcttaaataccttcagcctgaacagattgagaagatttggcttcggctacgaggcctgcgaaagtataagaagacaagccagcgcttgcgatccttggtgaagcagctcgagagaggcgaggcatccgtcgtggacctgaaaaagaatttggagtatgccgccacagttttggaatcagtgtacattgacgagacccgccgcctgctcgacaccgaggacgagcttagcgatattcagagcgatgccgtgccctctgaagttcgtgactggctggcatctacgttcacacgccagatgggtatgatgctgcggcggagtgatgagaagccaaggttcaaaagcatcgtgcacgcagtgcaggcaggaattttcgtggagcggatgtatcggcgcacctccaatatggtaggactgtcatatcctcccgcagtgattgaggcactcaaggatgttgataaatggagctttgatgtgttttctctcaacgaggcaagcggagatcacgccttaaagtttatcttctacgaactcctgaccagatatgatctgatatcgagatttaagatccccataagcgcgctggtgtctttcgttgaggcattggaggtcgggtatagcaagcacaagaatccataccataatctcatgcacgccgccgatgtcacccagaccgtgcactatcttctgtataagacgggagtggccaactggctgaccgagctcgaaattttcgctattatattcagcgcagccatccatgattacgagcacacggggaccacaaataactttcacattcagacaaggagcgatcctgctattctttacaatgaccggtcagtgttggaaaatcatcacttgtccgccgcttaccgcctgttacaagacgatgaagagatgaacatcctaatcaacctgtccaaggacgactggagggagttccgaactctggtaatcgagatggtgatggccactgacatgtcatgtcattttcagcaaatcaaggccatgaagaccgcgttgcagcagccagaggcaatagagaagcctaaggccctgtccctgatgcttcatactgccgatatttctcatcccgctaaagcctgggacctgcaccaccgatggaccatgtctctgctggaggagttcttccgccagggggacagggaagcggaactggggttacctttcagcccactgtgcgatagaaaaagcactatggtcgcacagtctcaggttggcttcatagactttattgttgagccaaccttcactgtgttaactgatatgaccgaaaagattgtgagcccgttgatcgacgagacaagtcagactggcggcacaggccagagacggtcatcactcaacagtataagcagctctgatgcgaaaagaagcggggtcaagacctctggttctgagggctcagccccgatcaacaacagcgtcatctccgtggactacaagtcctttaaagccacctggacggaggttgtgcacatcaacagggagcgctggcgcgctaaagtccccaaggaagaaaaagccaaaaaggaggctgaagagaaggcaaggttggccgctgaggagcagcagaaggagatggaagcgaaatcacaagctgaggagggggcctccggcaaggctgaaaagaaaacttccggcgagactaagaaccaggtgaatgggacacgggccaataagtccgataacccccgcggaaagaatagcaaagccgaaaaaagctctggggagcagcagcaaaatggggacttcaaggacggcaagaacaaaaccgacaagaaggaccacagcaatatcgggaatgattctaagaagaccgacgggactaagcaacgcagccatggctctcccgccccttcaaccagttcaacatgtagacttacgctgccagtgattaagccaccactgcggcacttcaaaaggcccgcctatgcctcaagctcctacgcacctagcgtttctaagaaaacagacgagcatcctgccagatataagatgctcgatcagagaatcaaaatgaagaagatacaaaacatcagccacaattggaaccggaaatag

SEQ ID NO: 73265 - DNA, 2130 bp, Artificial Sequence
  derived and/or modified sequence
atggagagccccaccaaggagattgaggagtttgagagcaacagcctgaagtacctgcagcctgagcagatcgagaagatctggctgcggctgcggggcctgaggaagtacaagaagaccagccagaggctgcggagcctggtgaagcagctggagcggggggaggcctctgtggtggacctgaagaagaacctggagtatgctgccaccgtgctggagagcgtgtacattgatgagacccggcggctgctggacacagaagatgagctgagtgacatccagagtgatgctgtgcccagcgaggtgcgggactggctggccagcaccttcacccggcagatgggcatgatgctgcggcggagtgatgagaagccccgcttcaagagcatcgtgcatgctgtgcaggccggcatctttgtggagaggatgtacagaaggaccagcaacatggtgggcctgagctaccccccagctgtgattgaggccctgaaggatgtggacaagtggagctttgatgtgttcagcctgaatgaggccagcggggaccacgccctgaagttcatcttctatgagctgctgaccaggtatgacctgatcagccgcttcaagatccccatcagcgccctggtgtcctttgtggaggccctggaggtgggctacagcaagcacaagaacccctaccacaacctgatgcatgctgctgatgtgacccagacagtgcactacctgctgtacaagacaggagtggccaactggctgacagagctggagatctttgccatcatcttctctgctgccatccatgactatgagcacacaggcaccaccaacaacttccacatccagaccaggagtgaccctgccatcctgtacaatgacagatctgtgctggagaaccaccacctgtctgctgcctaccgcctgctgcaggatgatgaggagatgaacatcctgatcaacctgagcaaggatgactggagggagttccgcaccctggtgattgagatggtgatggccacagacatgagctgccacttccagcagatcaaggccatgaagacagccctgcagcagcctgaggccatcgagaagcccaaggccctgagcctgatgctgcacacagctgacatcagccacccagccaaggcctgggacctgcaccaccgctggaccatgagcctgctggaggagttcttccggcagggcgaccgggaggccgagctgggcctgcccttcagccccctgtgtgacaggaagagcaccatggtggcccagagccaggtgggcttcatcgacttcatcgtggagcccaccttcaccgtgctgacagacatgacagagaagatcgtgagccccctgattgatgagaccagccagacaggaggcaccggccagaggaggagcagcctgaacagcatcagcagcagtgatgccaagaggtctggagtgaagaccagcggcagcgagggcagcgcccccatcaacaacagcgtcatctctgtggactacaagagcttcaaggccacctggacagaggtggtgcacatcaaccgggagcgctggagggccaaggtgcccaaggaggagaaggccaagaaggaggccgaggagaaggcccggctggccgctgaggagcagcagaaggagatggaggccaagagccaggccgaggagggcgccagcggcaaggccgagaagaagaccagcggggagaccaagaaccaggtgaatggcacccgggccaacaagagtgacaacccccggggcaagaacagcaaggccgagaagagcagcggggagcagcagcagaatggagacttcaaggatggcaagaacaagacagacaagaaggaccacagcaacattggaaatgacagcaagaagacagatggcaccaagcagaggagccacggcagccctgcccccagcaccagcagcacctgccgcctgaccctgcctgtgatcaagccacccctgcggcacttcaagaggcctgcctatgccagcagcagctatgcccccagcgtgtccaagaagacagatgagcacccagcccgctacaagatgctggaccagaggatcaagatgaagaagatccagaacatcagccacaactggaacaggaagtag

SEQ ID NO: 73266 - DNA, 2130 bp, Artificial Sequence
  derived and/or modified sequence
atggagagccccaccaaggagatcgaggagttcgagagcaacagcctgaagtaccttcaacccgaacaaatcgaaaaaatctggctcagattgcggggcctacgcaagtataaaaaaacctcccagcgccttagaagtttggtaaagcaactggagcggggcgaagcatcggtagtggatttaaagaagaatttggaatatgccgccacagtactcgagtcggtttatattgacgagacgcgcagactgcttgacacagaggacgaactctcagacatccaatcagatgcggtgcccagtgaagtcagggactggttggccagtacattcactcggcagatgggaatgatgctgagacgttcagatgagaagccccgctttaagagtattgtgcacgccgtgcaggccggcatcttcgtagaaagaatgtaccgaaggacctcaaacatggtaggtctgtcatatccacctgccgtgatagaggccctgaaagacgtagataagtggagctttgatgtcttctccctgaatgaagcaagcggcgaccacgccttaaaattcatcttctacgagctgttgacccgatatgatctgatcagccgctttaagatccctatcagcgcccttgtgtcattcgtggaagcgcttgaagttgggtatagtaaacataaaaacccatatcataacctgatgcatgccgccgacgtgacacagaccgtccattacctgctgtacaaaaccggagtcgcgaattggctgacggaacttgaaattttcgcaattattttctctgctgctattcatgactatgaacatacagggaccacaaataatttccacattcagactaggagcgatcctgccattttatacaatgacagatcggtgctggaaaatcatcacctgagtgccgcctacaggcttctgcaggacgatgaagaaatgaatattctgataaacctgtcaaaggatgattggcgggagtttcgcacactcgtaatcgaaatggtcatggctactgatatgagttgtcatttccagcagattaaagctatgaaaacagctcttcagcagcccgaggctatcgaaaagccgaaggcgctgtccttaatgcttcatacagccgacatctcccatcctgcaaaggcgtgggacctgcatcatagatggacaatgtctctgttagaggagttttttagacagggcgatcgcgaggcagagctcggcctcccattcagccctttgtgcgacaggaaatctactatggttgcacagagccaggtgggttttatcgattttatagtggaacctacttttacagtcttgaccgacatgaccgagaaaatcgtgagccctctcatcgatgaaacctcacagaccggtgggaccgggcagcgccgcagttccctcaatagcatcagttctagtgacgctaaacgtagtggcgtcaaaacgagtggcagtgaggggtctgcacccataaacaacagcgtgatttccgttgactacaaatcttttaaggcaacgtggacagaggttgtccacatcaatcgggaacggtggcgggcaaaagttccaaaggaagagaaggcaaaaaaggaagcggaagaaaaagctcgtctcgcggccgaggagcagcaaaaggaaatggaggctaaaagtcaggctgaagaaggtgcctcaggaaaagctgaaaaaaaaacgagcggcgaaaccaagaatcaggttaatggcactcgcgccaacaaaagtgataatccacgaggtaagaacagtaaagcagagaagtcatcaggcgagcaacaacagaacggggacttcaaagatggaaagaacaaaactgacaagaaggaccatagcaatatcgggaacgactcgaagaagactgacggaacgaagcagagatcacacggatcgcctgcaccatctacatcttcaacatgtcgcctcactctgcccgtgatcaagccgccactcagacattttaagcgtcctgcatatgcgtcctcctcctatgcacccagcgtttctaagaaaactgacgagcacccagcgcgctacaagatgcttgaccagagaatcaaaatgaagaagattcagaacatttctcataactggaaccgaaaatag

SEQ ID NO: 73267 - DNA, 2130 bp, Artificial Sequence
  derived and/or modified sequence
atggagagccccaccaaggagatcgaggagttcgagagcaacagcctcaagtatctccaacctgaacagattgagaagatatggctgcggctgcgaggcttgaggaagtataaaaagacttcccagaggttacggagccttgtcaagcagcttgaaagaggagaagctagcgtggtggacctcaagaagaatctggaatatgccgcaactgtgctggagagtgtgtacatcgatgaaactcgcaggcttctggatacagaggacgagttgtctgacattcagtcggacgcagtgccttctgaggttcgcgactggctggcgtctaccttcacaagacagatgggtatgatgctgcgccggtccgacgagaaaccaagatttaaatccatagtacacgccgtccaagcaggaatttttgtagagcgtatgtaccgccgaaccagtaacatggtaggcctttcatatccccctgcagttatcgaggccctcaaggatgtggacaagtggtccttcgacgtcttctccctaaatgaggccagcggcgaccatgccttgaagtttattttctacgaactgcttacccggtacgatctcatcagcagatttaaaattcccatttctgctttagttagctttgtagaggctttggaggtaggttattccaagcataagaacccctatcacaacttaatgcacgcagccgatgtcacccaaaccgttcactacttactctataagaccggcgtggcaaattggctgacagagttagaaatattcgccatcattttcagcgcggcaatacacgactacgagcacacagggacgactaacaatttccacatacagacacggtcggatccagcaattctgtacaatgaccgatccgtcctggaaaatcatcatttaagcgcggcctatcgcttacttcaggacgacgaagagatgaatattctcattaacttatccaaggatgactggcgcgagtttcgcacgttagtaatcgaaatggtgatggcaacagacatgagctgccattttcagcaaatcaaggccatgaaaaccgcgctccagcagcctgaggccatcgaaaaacccaaggctctgtcgttgatgttacatacagccgatatttcacacccagcaaaggcatgggatctgcaccaccggtggaccatgagccttctcgaggagtttttcaggcaaggcgatagggaggccgaacttggactgcctttttccccgctttgcgatcggaaatccactatggtggctcagtcccaggtagggttcatagacttcatcgttgagcctaccttcactgtgttgacagacatgacagaaaagatcgtctctccactgattgacgagacctcccagacaggagggacagggcagcggcggagctctcttaattccatttctagttcggatgccaagcgctctggggtcaagaccagcggctccgaggggtccgcccctataaacaatagtgtgatcagcgtggattataagtcttttaaagcgacttggactgaggtcgtgcatattaatagagagcgctggcgagcaaaggttcccaaggaggagaaggctaaaaaggaagctgaggagaaagcacggttagccgcagaggagcagcagaaggagatggaggcaaagtcacaggctgaggagggcgcctctgggaaagcagaaaaaaagacgagtggcgagacaaagaaccaggtaaatgggactcgcgcaaataagtctgataatccccgtggcaagaattccaaggccgagaagagttctggggagcagcagcagaatggtgatttcaaagacgggaaaaacaagacagataaaaaggatcactccaacatcggcaacgatagcaaaaaaaccgatggcaccaaacagcggagccatggttctcctgctccctccacctcatccacgtgccgtttaactttgcctgttatcaaacccccgcttcgtcacttcaaaagaccagcgtacgcttcctcctcatacgcacctagcgtgtcaaagaaaaccgatgagcaccccgcccgctataagatgttagatcaacgcataaagatgaagaagatccaaaatatttcacataactggaaccggaaatag

SEQ ID NO: 73268 - DNA, 2898 bp, Artificial Sequence
  derived and/or modified sequence
agcaagaaaacatcaagagtttttgagtgtggtgtgtggttcccttcgtccccatcagtcgcttcaatatttcaaaatggatccggttctgtggcgggtgcgagagtgaggctgtgggggacctccaggcccaacctccgcgaagcctcgcggcttctgcgtgccctggccccgggaggataaggatttcccttccctcctacttgcgcgcggagccgagctcttgttgaggtgagggttccggaagcccacgcagctccgcaggtcggtggtggccgcggctgccctgcgggggtgagtgtgcccggccggggtcggagcccagcgtgtgcccggcagacggcggtgcccgcgcgcccctccctccgcgcccgcggtgacagcccagacaccagcccgggcgctgacagacgacttttctcacttgtcagttttctcgcttgtcagcagagctgctgctatggagtcgccaaccaaggagattgaagaatttgagagcaactctctgaaatacctgcaaccggaacagatcgagaaaatctggcttcggctccgcgggctgaggaaatataagaaaacgtcccagagattacggtctttggtcaaacaattagagagaggggaagcttcagtggtagatcttaagaagaatttggaatatgcagccacagtgcttgaatctgtgtatattgatgaaacaaggagactcctggatacagaggatgagctcagtgacattcagtcagatgctgtgccttctgaggtccgagactggctggcctccaccttcacgcggcagatggggatgatgctcaggaggagcgacgagaagccccggttcaagagcatcgttcacgcagtgcaggctgggatatttgtggagagaatgtatagacggacatcaaacatggttggactgagctatccaccagctgttattgaggcattaaaggatgtggacaagtggtcctttgacgtcttttccctcaatgaggccagtggggatcatgcactgaaatttattttctatgaactactcacacgttatgatctgatcagccgtttcaagatccccatttctgcacttgtctcatttgtggaggccctggaagtgggatacagcaagcacaaaaatccttaccataacttaatgcacgctgccgatgttacacagacagtgcattacctcctctataagacaggagtggcgaactggctgacggagctggagatctttgctataatcttctcagctgccatccatgactacgagcataccggaaccaccaacaatttccacattcagactcggtctgatccagctattctgtataatgacagatctgtactggagaatcaccatttaagtgcagcttatcgccttctgcaagatgacgaggaaatgaatattttgattaacctctcaaaggatgactggagggagtttcgaaccttggtaattgaaatggtgatggccacagatatgtcttgtcacttccaacaaatcaaagcaatgaagactgctctgcagcagccagaagccattgaaaagccaaaagccttatcccttatgctgcatacagcagatattagccatccagcaaaagcatgggacctccatcatcgctggacaatgtcactcctggaggagttcttcagacagggtgacagagaagcagagctggggctgcctttttctcctctgtgtgaccgaaagtccactatggttgctcagtcacaagtaggtttcattgatttcatcgtggaacccaccttcactgtgcttacggacatgaccgagaagattgtgagtccattaatcgatgaaacctctcaaactggtgggacaggacagaggcgttcgagtttgaatagcatcagctcgtcagatgccaagcgatcaggtgtcaagacctctggttcagagggaagtgccccgatcaacaattctgtcatctccgttgactataagagctttaaagctacttggacggaagtggtgcacatcaatcgggagagatggagggccaaggtacccaaagaggagaaggccaagaaggaagcagaggaaaaggctcgcctggccgcagaggagcagcaaaaggaaatggaagccaaaagccaggctgaagaaggcgcatctggcaaagctgagaaaaagacgtctggagaaactaagaatcaagtcaatggaacacgggcaaacaaaagtgacaaccctcgtgggaaaaactccaaagccgagaagtcatcaggagaacagcaacagaatggtgacttcaaagatggtaaaaataagacagacaagaaggatcactctaacatcggaaatgattcaaagaaaacagatggcacaaaacagcgttctcacggctcaccagccccaagcaccagctccacgtgtcgccttacgttgccagtcatcaagcctcctttgcgtcattttaaacgccctgcttacgcatctagctcctatgcaccttcagtctcaaagaaaactgatgagcatcctgcaaggtacaagatgctggatcagaggatcaaaatgaaaaagattcagaacatctcacataactggaacagaaaataggccgaggggaagaagagagggagtgaaggagggtctacctatctgcttctcagcacccactggccacagcaggacacacctccaagacccttggaggctgttggagcaggtactatcctggttgactccaccaaggtgaaatgaaagttgtatgtgattttcctctttgttgttcttgtatagacttttcaattgctgtatgtgggatcagcccagacgccagcaacaaactagcaagaggggtgtttttatggtataagtctctaaaagtctaaattggaccaaaattaaaatgacacaaacttaaa

SEQ ID NO: 73269 - DNA, 2952 bp, Artificial Sequence
  derived and/or modified sequence
gctcagccgccgcttttctctcccttctcactttctctcctccccacccagccctccttttcacctccaaaccctttagctgcgcgctgatcgcttctgtggctttgtttgggggtagggggagaatacgaatagacccgaggtgctttctcttggagctggagtccaatcccaatccctatctctatccctatccctgtgcttatccctgggcattagcccgggaccatggctggttcccgcagctgcctccggagcgcacctggggccatggtttgccgcgatcggagtccgctctaagtcggagtctgggggcgcagaagggggagcgcgccgagaaagtgccgggcaaacgcgcgccgcgcctggctgggcatcgcgagctgggcgaggagacggggaggggacagcccaaactatctcagcttcaccgccagtggtcacctacctgcagctatggagtcgccaaccaaggagattgaagaatttgagagcaactctctgaaatacctgcaaccggaacagatcgagaaaatctggcttcggctccgcgggctgaggaaatataagaaaacgtcccagagattacggtctttggtcaaacaattagagagaggggaagcttcagtggtagatcttaagaagaatttggaatatgcagccacagtgcttgaatctgtgtatattgatgaaacaaggagactcctggatacagaggatgagctcagtgacattcagtcagatgctgtgccttctgaggtccgagactggctggcctccaccttcacgcggcagatggggatgatgctcaggaggagcgacgagaagccccggttcaagagcatcgttcacgcagtgcaggctgggatatttgtggagagaatgtatagacggacatcaaacatggttggactgagctatccaccagctgttattgaggcattaaaggatgtggacaagtggtcctttgacgtcttttccctcaatgaggccagtggggatcatgcactgaaatttattttctatgaactactcacacgttatgatctgatcagccgtttcaagatccccatttctgcacttgtctcatttgtggaggccctggaagtgggatacagcaagcacaaaaatccttaccataacttaatgcacgctgccgatgttacacagacagtgcattacctcctctataagacaggagtggcgaactggctgacggagctggagatctttgctataatcttctcagctgccatccatgactacgagcataccggaaccaccaacaatttccacattcagactcggtctgatccagctattctgtataatgacagatctgtactggagaatcaccatttaagtgcagcttatcgccttctgcaagatgacgaggaaatgaatattttgattaacctctcaaaggatgactggagggagtttcgaaccttggtaattgaaatggtgatggccacagatatgtcttgtcacttccaacaaatcaaagcaatgaagactgctctgcagcagccagaagccattgaaaagccaaaagccttatcccttatgctgcatacagcagatattagccatccagcaaaagcatgggacctccatcatcgctggacaatgtcactcctggaggagttcttcagacagggtgacagagaagcagagctggggctgcctttttctcctctgtgtgaccgaaagtccactatggttgctcagtcacaagtaggtttcattgatttcatcgtggaacccaccttcactgtgcttacggacatgaccgagaagattgtgagtccattaatcgatgaaacctctcaaactggtgggacaggacagaggcgttcgagtttgaatagcatcagctcgtcagatgccaagcgatcaggtgtcaagacctctggttcagagggaagtgccccgatcaacaattctgtcatctccgttgactataagagctttaaagctacttggacggaagtggtgcacatcaatcgggagagatggagggccaaggtacccaaagaggagaaggccaagaaggaagcagaggaaaaggctcgcctggccgcagaggagcagcaaaaggaaatggaagccaaaagccaggctgaagaaggcgcatctggcaaagctgagaaaaagacgtctggagaaactaagaatcaagtcaatggaacacgggcaaacaaaagtgacaaccctcgtgggaaaaactccaaagccgagaagtcatcaggagaacagcaacagaatggtgacttcaaagatggtaaaaataagacagacaagaaggatcactctaacatcggaaatgattcaaagaaaacagatggcacaaaacagcgttctcacggctcaccagccccaagcaccagctccacgtgtcgccttacgttgccagtcatcaagcctcctttgcgtcattttaaacgccctgcttacgcatctagctcctatgcaccttcagtctcaaagaaaactgatgagcatcctgcaaggtacaagatgctggatcagaggatcaaaatgaaaaagattcagaacatctcacataactggaacagaaaataggccgaggggaagaagagagggagtgaaggagggtctacctatctgcttctcagcacccactggccacagcaggacacacctccaagacccttggaggctgttggagcaggtactatcctggttgactccaccaaggtgaaatgaaagttgtatgtgattttcctctttgttgttcttgtatagacttttcaattgctgtatgtgggatcagcccagacgccagcaacaaactagcaagaggggtgtttttatggtataagtctctaaaagtctaaattggaccaaaattaaaatgacacaaacttaaaaaaaaataaaattcctctcattgccacttttttcaatctctaaaagttagttgccccc

SEQ ID NO: 73270 - DNA, 2130 bp, Artificial Sequence
  derived and/or modified sequence
atggagagccccacgaaagagatcgaagaattcgagagtaatagccttaagtacctgcaacccgagcagatagaaaaaatctggcttcgactccgtggcctccgtaagtataaaaagacttcacagagactgcgttctctagtgaagcagcttgagagaggcgaggccagcgtagtggatctgaaaaagaatctagaatacgctgcaacagtgctggaatccgtctacattgacgagaccaggcgcctccttgacacggaggacgagctgagtgacatccagtctgacgctgtgcctagcgaggttagagattggttggcctccaccttcacaaggcagatgggaatgatgcttcgacgcagcgacgagaagccaaggtttaaatccatagtgcacgctgtccaagccggtatattcgtagagaggatgtaccgcagaacctctaacatggtggggctctcgtacccccctgccgtgatcgaggcactgaaggacgtagataagtggtcctttgacgtctttagtctgaacgaggctagcggggaccatgccttgaaattcattttttatgagctgctgaccagatatgatctaattagcagattcaaaatccccatcagcgccttggtctcttttgtggaggctctcgaggtcggctattcaaagcacaagaacccctatcacaacctgatgcacgcagcagacgtgactcaaacggtgcactacctcctgtacaagactggagtggccaactggctgacagaattggaaattttcgctattatattttccgccgcaatccacgattatgagcacacaggcacaaccaacaattttcatatccaaacccgctccgatccggcaattctctacaacgatcgctctgtgctagaaaatcaccatctgtccgcagcttatcgcctgttacaggacgacgaagagatgaacattctgattaacctctccaaggatgactggcgtgaatttcgcactttagtgattgagatggttatggccaccgatatgtcctgccacttccagcagatcaaagctatgaagacagccctgcagcagcctgaagcaatcgaaaaacctaaagcacttagtttgatgctgcacactgccgatattagccatcctgccaaagcgtgggacctgcatcaccggtggacaatgtcgctgctagaagagttttttcgccagggagaccgcgaggccgaactgggtttaccattctcaccactgtgtgaccggaagagtacaatggtggcgcaaagccaagtgggcttcatcgacttcattgtggaaccaacgtttaccgtgctcacggacatgacggagaaaattgtgtctccattgatcgacgaaacctcacagactggagggacaggccagcgcaggagctccctgaattcaattagcagttctgatgcaaagaggtcaggtgtgaaaacatccggaagtgaaggtagcgcccctatcaataattctgtgatcagtgtagattacaaatcatttaaagccacctggactgaggtcgtccatattaaccgggagcggtggcgggcaaaggtcccaaaggaggagaaagccaagaaggaggcagaagaaaaagctaggctcgcagctgaggaacaacagaaggagatggaggccaagtcccaggcagaagaaggggcaagcggaaaggctgagaagaaaacatcgggcgagactaagaaccaagtcaatggaaccagagccaacaaatctgataaccccaggggtaagaatagcaaagccgaaaagtcatctggtgagcaacagcagaatggtgacttcaaagatggcaagaacaaaacggataagaaggatcactcgaatatcgggaacgacagcaagaagactgacgggacgaagcaaagatctcatggatcccctgctccctcgacgtcctctacttgcaggctgaccctgcccgtaattaagcccccacttcggcatttcaaacgccctgcttatgccagttcctcgtacgcccctagcgtaagcaagaagacagatgagcacccagccaggtacaagatgctcgatcagcgcattaaaatgaagaagatccaaaacatcagccacaactggaacaggaagtag

SEQ ID NO: 73271 - DNA, 2130 bp, Artificial Sequence
  derived and/or modified sequence
atggaaagtcctacgaaggagatcgaggagttcgaatccaactccctcaagtacctccaacctgagcagatcgagaaaatctggttgcgccttcgcggactcaggaaatacaagaagactagccagaggctgcggagcctcgtgaagcagctggagagaggggaggctagcgtagtggacctgaagaagaacctggagtatgcagccaccgtgcttgaaagcgtttacatcgatgagacaagaagactcctggataccgaggatgagttgtccgatatacaaagcgacgcagtccccagtgaggtgcgggactggctggcttccacctttacacggcagatgggtatgatgctgagaaggagcgacgaaaagccccgtttcaaatcaattgtccacgctgtgcaagccggaattttcgtggagaggatgtatcggagaacctctaatatggtgggcctgagctatcctcccgcagtgatcgaagctttgaaggatgtggataagtggtcttttgatgtgttttctcttaacgaagcttcaggagaccacgcactcaaatttattttctatgagcttctaacaaggtacgatctgatctctcgttttaagatccccatatctgccctcgtctcgttcgtcgaagctcttgaggtcggatattccaaacacaagaacccataccataatctcatgcatgcggctgacgtgacacaaactgttcactatttactgtacaagactggagtcgctaactggcttaccgaactggagatattcgcaattatctttagtgctgcgatccacgactatgagcacacaggaaccaccaacaacttccatatacaaaccagatcagatcccgctatactttataatgatagatccgtcctggagaaccatcatctgtcagccgcttaccggctgttgcaagatgacgaggaaatgaacattctgattaacctcagtaaggatgactggagagagtttcggaccctggtgatcgaaatggttatggccaccgatatgtcatgtcattttcagcagataaaggcaatgaaaaccgccctgcagcagcccgaagcaatcgaaaagcccaaggcactgtctctgatgttgcacaccgcggatattagccaccccgctaaggcctgggacctgcatcacaggtggaccatgagcttgctggaggagtttttccgacagggagatcgtgaagccgagctgggactgcccttttcacccctttgtgacagaaaatctacaatggtagcccagagtcaggtcggcttcatcgacttcatcgtggaacccacttttaccgtactcaccgatatgaccgagaaaatcgtgtcacccctaatagatgaaacctcgcagaccggaggcacaggacagcgcaggagcagcttgaactctatcagcagctctgatgcaaagaggagtggcgtcaagaccagcggatccgagggatctgcaccaatcaataactcggtgatttccgtcgattataaatctttcaaggccacctggaccgaggtcgtccatattaaccgggagcggtggcgggcaaaagtgcctaaggaagagaaggccaaaaaggaagcggaggagaaggctaggctcgccgctgaggagcagcagaaggagatggaagcgaaatcacaggccgaagagggagcatctgggaaagccgagaagaagacatctggcgagaccaagaaccaggtgaacggaaccagagccaacaaaagtgacaaccctaggggtaaaaattctaaggccgagaaaagctccggggagcagcagcaaaatggagacttcaaagatgggaagaacaagactgacaagaaggaccactctaatatcggtaacgactcgaagaaaacagatggaaccaagcagaggtcccacggcagcccagcccctagtacatcaagtacatgtagactgaccctgcccgtcataaaaccccctctgaggcactttaaacgcccagcttacgcaagctcctcctacgcacccagcgtgagtaagaaaactgacgagcaccctgcaaggtataaaatgctggaccagcgtataaagatgaaaaaaatccagaacatttcacacaactggaaccgaaagtag

SEQ ID NO: 73272 - DNA, 2130 bp, Artificial Sequence
  derived and/or modified sequence
atggagagccccaccaaggagatcgaggagttcgagagcaacagcctgaagtacctgcagcccgagcagatcgagaagatctggctgagactgagaggcctgagaaagtacaagaagaccagccagagactgagaagcctggtgaagcagctggagagaggcgaggccagcgtggtggacctgaagaagaacctggagtacgccgccaccgtgctggagagcgtgtacatcgacgagaccagaagactgctggacaccgaggacgagctgagcgacatccagagcgacgccgtgcccagcgaggtgagagactggctggccagcaccttcaccagacagatgggcatgatgctgagaagaagcgacgagaagcccagattcaagagcatcgtgcacgccgtgcaggccggcatcttcgtggagagaatgtacagaagaaccagcaacatggtgggcctgagctacccccccgccgtgatcgaggccctgaaggacgtggacaagtggagcttcgacgtgttcagcctgaacgaggccagcggcgaccacgccctgaagttcatcttctacgagctgctgaccagatacgacctgatcagcagattcaagatccccatcagcgccctggtgagcttcgtggaggccctggaggtgggctacagcaagcacaagaacccctaccacaacctgatgcacgccgccgacgtgacccagaccgtgcactacctgctgtacaagaccggcgtggccaactggctgaccgagctggagatcttcgccatcatcttcagcgccgccatccacgactacgagcacaccggcaccaccaacaacttccacatccagaccagaagcgaccccgccatcctgtacaacgacagaagcgtgctggagaaccaccacctgagcgccgcctacagactgctgcaggacgacgaggagatgaacatcctgatcaacctgagcaaggacgactggagagagttcagaaccctggtgatcgagatggtgatggccaccgacatgagctgccacttccagcagatcaaggccatgaagaccgccctgcagcagcccgaggccatcgagaagcccaaggccctgagcctgatgctgcacaccgccgacatcagccaccccgccaaggcctgggacctgcaccacagatggaccatgagcctgctggaggagttcttcagacagggcgacagagaggccgagctgggcctgcccttcagccccctgtgcgacagaaagagcaccatggtggcccagagccaggtgggcttcatcgacttcatcgtggagcccaccttcaccgtgctgaccgacatgaccgagaagatcgtgagccccctgatcgacgagaccagccagaccggcggcaccggccagagaagaagcagcctgaacagcatcagcagcagcgacgccaagagaagcggcgtgaagaccagcggcagcgagggcagcgcccccatcaacaacagcgtgatcagcgtggactacaagagcttcaaggccacctggaccgaggtggtgcacatcaacagagagagatggagagccaaggtgcccaaggaggagaaggccaagaaggaggccgaggagaaggccagactggccgccgaggagcagcagaaggagatggaggccaagagccaggccgaggagggcgccagcggcaaggccgagaagaagaccagcggcgagaccaagaaccaggtgaacggcaccagagccaacaagagcgacaaccccagaggcaagaacagcaaggccgagaagagcagcggcgagcagcagcagaacggcgacttcaaggacggcaagaacaagaccgacaagaaggaccacagcaacatcggcaacgacagcaagaagaccgacggcaccaagcagagaagccacggcagccccgcccccagcaccagcagcacctgcagactgaccctgcccgtgatcaagccccccctgagacacttcaagagacccgcctacgccagcagcagctacgcccccagcgtgagcaagaagaccgacgagcaccccgccagatacaagatgctggaccagagaatcaagatgaagaagatccagaacatcagccacaactggaacagaaagtag

SEQ ID NO: 73273 - protein, 769 aa, Artificial Sequence
  derived and/or modified sequence
MTDAGNRKEGFKKCRSATFSIDGYSFTIVANEAGDKNARPLARFSRSKSQNCLWNSLIDGLTGNVKEKPRPTIVHDPRPPEEILADELPQLDSSEVLVKTSFRLRSLVKQLERGEASVVDLKKNLEYAATVLESVYIDETRRLLDTEDELSDIQSDAVPSEVRDWLASTFTRQMGMMLRRSDEKPRFKSIVHAVQAGIFVERMYRRTSNMVGLSYPPAVIEALKDVDKWSFDVFSLNEASGDHALKFIFYELLTRYDLISRFKIPISALVSFVEALEVGYSKHKNPYHNLMHAADVTQTVHYLLYKTGVANWLTELEIFAIIFSAAIHDYEHTGTTNNFHIQTRSDPAILYNDRSVLENHHLSAAYRLLQDDEEMNILINLSKDDWREFRTLVIEMVMATDMSCHFQQIKAMKTALQQPEAIEKPKALSLMLHTADISHPAKAWDLHHRWTMSLLEEFFRQGDREAELGLPFSPLCDRKSTMVAQSQVGFIDFIVEPTFTVLTDMTEKIVSPLIDETSQTGGTGQRRSSLNSISSSDAKRSGVKTSGSEGSAPINNSVISVDYKSFKATWTEVVHINRERWRAKVPKEEKAKKEAEEKARLAAEEQQKEMEAKSQAEEGASGKAEKKTSGETKNQVNGTRANKSDNPRGKNSKAEKSSGEQQQNGDFKDGKNKTDKKDHSNIGNDSKKTDGTKQRSHGSPAPSTSSTCRLTLPVIKPPLRHFKRPAYASSSYAPSVSKKTDEHPARYKMLDQRIKMKKIQNISHNWNRK

SEQ ID NO: 73274 - DNA, 2310 bp, Artificial Sequence
  derived and/or modified sequence
atgacagatgctggtaatcgaaaggaaggatttaaaaagtgccgcagcgccactttctctatcgacgggtacagcttcaccatagtcgcgaacgaggccggtgacaagaacgcccggcctcttgcccggtttagtcgatcaaaaagtcagaactgcctgtggaactccctgatcgatgggctgacggggaacgtcaaggaaaagcctagaccgactattgtgcatgacccacggcccccggaagagatactggctgatgaattgccgcagctagacagttctgaggtgctggtgaagaccagctttagactgcgcagcctggtgaaacaactggaacgtggtgaagcaagtgtcgttgacctgaagaaaaatctggagtacgccgctaccgtcctcgaaagtgtgtacatagacgagactcgccgtctgctcgatactgaggacgagctcagcgatatccaaagtgacgctgtgcccagcgaggtcagggactggctggcatccaccttcacccgccagatggggatgatgcttcgccgctcagatgagaaaccacgtttcaagagcatcgtacacgccgttcaggcgggcattttcgtcgaaaggatgtatcgccggaccagtaatatggtcggcctttcatacccaccagctgtgattgaggctctgaaggacgtagataaatggtccttcgatgtgttttcgctaaatgaagcctccggcgatcatgccctcaagtttatcttctatgaattgctgaccagatacgatttaatctcgcggtttaaaatccccattagcgcccttgtatcttttgtcgaagccctggaagtgggttactctaaacataaaaatccataccacaatctgatgcacgccgctgacgtgacacagaccgtgcattatttgctgtacaaaacaggcgtggctaactggctaactgagctggaaatctttgcaatcatcttctctgcagctatacacgattacgaacacactgggaccactaataatttccacatccagaccagatctgacccggctattttgtacaacgatcgatctgtgctggaaaatcaccatctgagtgccgcttataggctgctacaggacgatgaggagatgaatattctcatcaatctttctaaggatgattggagagagtttaggacgctggtgatcgaaatggtgatggccaccgatatgtcctgccactttcagcaaattaaggctatgaaaaccgctctgcagcagccagaggctattgaaaaacccaaggcattgagcctgatgttgcatacagctgacatttcccaccctgccaaggcttgggatcttcaccatcgatggacaatgtcccttctggaagaattcttccggcagggcgaccgggaagctgaattgggtctgccattctcacctctgtgtgaccgaaaaagtactatggttgcccagtcccaggtgggcttcattgattttattgtggagcctaccttcaccgtgttgaccgacatgactgagaaaattgtcagtcccctgattgacgaaacgagccagaccggcgggacaggccaaaggaggagctcacttaacagtatctcctcctccgatgccaagcgcagcggcgtgaagacatcaggttctgaaggttctgcccccatcaataactccgtcatcagtgtcgattataagagctttaaggccacctggaccgaagttgtacacataaatagagaacgctggcgtgctaaggtccccaaggaggaaaaggctaagaaggaagccgaagaaaaggcccgactcgctgcagaggagcagcagaaagaaatggaagcgaagtcccaggccgaggaaggagctagcggtaaggctgagaagaagactagcggcgaaacaaagaaccaagtcaatgggacgcgcgccaataagtcggacaatccacgcggaaaaaactctaaggctgaaaaatcatcaggcgaacagcagcagaacggggactttaaggacggtaaaaataagaccgacaagaaggatcactccaacatcggtaacgacagtaagaagaccgatggaacaaaacagcgatcacacggcagcccagctcccagcacatcaagtacatgtcggctgaccctgccagtgatcaagcctccactgcggcatttcaaaaggcctgcatatgcgtcttcttcttatgcccccagtgtgtccaagaagacagatgaacaccctgcgaggtacaagatgctggatcaacggatcaaaatgaaaaaaattcaaaacatctctcataattggaatcgtaaatag

SEQ ID NO: 73275 - DNA, 2310 bp, Artificial Sequence
  derived and/or modified sequence
atgacagatgctggcaacaggaaggagggcttcaagaagtgccgcagcgccaccttcagcattgatggctacagcttcaccatcgtggccaatgaagctggggacaagaatgcccggcccctggcccgcttcagccgcagcaagagccagaactgcctgtggaacagcctgattgatggcctgactggaaatgtgaaggagaagccccggcccaccatcgtgcatgaccccaggcctcctgaggagatcctggctgatgagctgccccagctggacagcagcgaggtgctggtgaagaccagcttccggctgcggagcctggtgaagcagctggagcggggggaggcctctgtggtggacctgaagaagaacctggagtatgctgccaccgtgctggagagcgtgtacattgatgagacccggcggctgctggacacagaagatgagctgagtgacatccagagtgatgctgtgcccagcgaggtgcgggactggctggccagcaccttcacccggcagatgggcatgatgctgcggcggagtgatgagaagccccgcttcaagagcatcgtgcatgctgtgcaggccggcatctttgtggagaggatgtacagaaggaccagcaacatggtgggcctgagctaccccccagctgtgattgaggccctgaaggatgtggacaagtggagctttgatgtgttcagcctgaatgaggccagcggggaccacgccctgaagttcatcttctatgagctgctgaccaggtatgacctgatcagccgcttcaagatccccatcagcgccctggtgtcctttgtggaggccctggaggtgggctacagcaagcacaagaacccctaccacaacctgatgcatgctgctgatgtgacccagacagtgcactacctgctgtacaagacaggagtggccaactggctgacagagctggagatctttgccatcatcttctctgctgccatccatgactatgagcacacaggcaccaccaacaacttccacatccagaccaggagtgaccctgccatcctgtacaatgacagatctgtgctggagaaccaccacctgtctgctgcctaccgcctgctgcaggatgatgaggagatgaacatcctgatcaacctgagcaaggatgactggagggagttccgcaccctggtgattgagatggtgatggccacagacatgagctgccacttccagcagatcaaggccatgaagacagccctgcagcagcctgaggccatcgagaagcccaaggccctgagcctgatgctgcacacagctgacatcagccacccagccaaggcctgggacctgcaccaccgctggaccatgagcctgctggaggagttcttccggcagggcgaccgggaggccgagctgggcctgcccttcagccccctgtgtgacaggaagagcaccatggtggcccagagccaggtgggcttcatcgacttcatcgtggagcccaccttcaccgtgctgacagacatgacagagaagatcgtgagccccctgattgatgagaccagccagacaggaggcaccggccagaggaggagcagcctgaacagcatcagcagcagtgatgccaagaggtctggagtgaagaccagcggcagcgagggcagcgcccccatcaacaacagcgtcatctctgtggactacaagagcttcaaggccacctggacagaggtggtgcacatcaaccgggagcgctggagggccaaggtgcccaaggaggagaaggccaagaaggaggccgaggagaaggcccggctggccgctgaggagcagcagaaggagatggaggccaagagccaggccgaggagggcgccagcggcaaggccgagaagaagaccagcggggagaccaagaaccaggtgaatggcacccgggccaacaagagtgacaacccccggggcaagaacagcaaggccgagaagagcagcggggagcagcagcagaatggagacttcaaggatggcaagaacaagacagacaagaaggaccacagcaacattggaaatgacagcaagaagacagatggcaccaagcagaggagccacggcagccctgcccccagcaccagcagcacctgccgcctgaccctgcctgtgatcaagccacccctgcggcacttcaagaggcctgcctatgccagcagcagctatgcccccagcgtgtccaagaagacagatgagcacccagcccgctacaagatgctggaccagaggatcaagatgaagaagatccagaacatcagccacaactggaacaggaagtag

SEQ ID NO: 73276 - DNA, 2310 bp, Artificial Sequence
  derived and/or modified sequence
atgaccgacgccggcaaccggaaggagggcttcaagaagtgccggagtgcaacattttctatcgacggatactcatttactatcgtggctaatgaggctggagacaaaaacgcccggccactcgctcgcttctcccgatctaaaagccagaactgcctgtggaattctctgatcgacgggttaacgggaaacgtcaaggagaagccccgaccaactattgtccacgatccccgccccccagaagagatcctcgccgacgaactcccccaactcgattcatcagaggtacttgtgaagaccagctttagattgcgctcattagtgaagcagctggagcgcggagaagcttccgtggtggaccttaaaaaaaacttagaatatgctgccacggtcctggaatcggtgtatatcgatgagacacgacgactcctggacacagaggatgaactatccgatatccagagcgatgctgttccgtcagaggtcagggactggctggctagtacattcacacgtcaaatgggaatgatgctcaggcgcagtgacgagaagcccagattcaaatccatcgttcacgccgtgcaggccggtattttcgtcgagaggatgtaccgacggacatccaatatggtgggtttatcttaccccccagcagtgattgaggctctgaaggatgtcgacaaatggtcattcgacgtgttctctttgaatgaagcaagcggcgaccacgcgctcaagttcattttttatgagctgctgacacgttatgatcttatctctagattcaagatccctatttccgcactcgtctcatttgttgaagctctcgaggtgggctactccaagcacaagaacccatatcacaacctcatgcatgctgccgatgtgacacagaccgtccactatctcctctataagaccggagtcgctaattggcttacggagctcgagatcttcgcaataattttctctgcagctattcacgattacgagcataccgggacgaccaacaatttccatatccagactagaagcgacccggctattctgtataatgaccggtcagtgttggaaaaccaccatttgagcgcagcctacagactgctccaggatgatgaagagatgaatattctaatcaatctcagtaaagatgactggcgggagtttaggacgcttgtgatcgagatggtcatggccactgacatgtcatgtcactttcagcagatcaaggctatgaaaactgcactgcaacaacccgaagcgatagagaaaccaaaagctctgtctctcatgctccacaccgcagatatttcccacccagccaaagcgtgggatctgcatcatcggtggactatgagcctcttggaggagttttttagacagggcgaccgtgaggcagagctgggtctgccattctcccccctgtgcgatcggaagagtaccatggtggcccagtcgcaagtgggcttcatcgatttcatcgtggaacctaccttcacagtccttaccgatatgaccgaaaaaatcgtttcccccctgatagacgaaacgtcgcagactggcggcacgggccagcgccggagcagcctgaattccatatcttcctccgacgccaagaggagcggcgtgaaaacctcagggtctgaggggtccgcgcccataaacaattctgtaatatctgtcgattacaagagtttcaaagccacgtggactgaggtggttcacatcaatagagagaggtggagagctaaggtcccgaaagaggagaaagccaagaaagaggccgaagaaaaagctcgcctagctgcagaagaacagcagaaggagatggaggcgaaaagtcaggctgaagagggcgcttccggaaaggccgagaagaagacatcaggcgagaccaagaaccaggtcaacgggacaagagctaacaagtcagacaaccctcggggtaagaacagcaaggcggagaagtccagcggagagcagcaacagaacggcgactttaaggatggtaagaataagaccgacaagaaagaccacagcaacatcgggaatgattccaagaagaccgatggtacaaagcagagatcacatgggagtcccgctcctagtacatcgtctacctgcaggctcacactccctgtaattaaaccacctctacgacacttcaaaagacctgcatacgccagctcatcctacgcccctagcgtgtcaaaaaaaacagacgaacacccagctaggtacaaaatgctagatcagagaataaagatgaaaaagatccagaacatttcccacaattggaataggaagtag

SEQ ID NO: 73277 - DNA, 5109 bp, Artificial Sequence
  derived and/or modified sequence
gacttccttgtttggagtaaacttcggcaacatctcatggctgaggggtttgcctttccatctgttgatgtgctttctggaagctccccggtctgccagagaaaacatatctagaagacgcacgacgccaattcagccattcccttgggtccccaaatccccccagccaccagagacggaaggagaaggtgaagtagaaaacagactttcctgtggcgcgcgggatccgcggctgacagagagtagcgtggccaggcagggatctccgcgcccaccggtcagccccgtccacgcgctcgggcgcgcgtcctcccttcctgacactcctctcgccgcctctggaactcggcttggagatggggcagtcgcgacggctcctgcctccgccgagctcctagcgctttagctgttgacattgggtccccgctgttgtctccaggcgctcagctgccagcgcgcggcggggctgagagtgacagcgcggcgcggccgggggaggattcgccgccgagccccgggctgctcactccgccgtgggggggaccgcagacgccgctggtctcgctgcgaggcccctgcccggccggccgagccatgacggacgccggcaacaggaaggagggcttcaaaaaatgccggagcgccactttcagcatcgatggctacagcttcaccatagttgcaaatgaagctggagacaagaatgccagaccactggcccgcttctctcggtctaagtcacagaactgtctgtggaactccctcatcgatgggctcacagggaatgtcaaggagaagccaaggccaacaattgtccatgaccctcgacccccagaggagatcctagctgatgaattgccacagctggatagctcagaagtcttggtgaagacatccttcagattacggtctttggtcaaacaattagagagaggggaagcttcagtggtagatcttaagaagaatttggaatatgcagccacagtgcttgaatctgtgtatattgatgaaacaaggagactcctggatacagaggatgagctcagtgacattcagtcagatgctgtgccttctgaggtccgagactggctggcctccaccttcacgcggcagatggggatgatgctcaggaggagcgacgagaagccccggttcaagagcatcgttcacgcagtgcaggctgggatatttgtggagagaatgtatagacggacatcaaacatggttggactgagctatccaccagctgttattgaggcattaaaggatgtggacaagtggtcctttgacgtcttttccctcaatgaggccagtggggatcatgcactgaaatttattttctatgaactactcacacgttatgatctgatcagccgtttcaagatccccatttctgcacttgtctcatttgtggaggccctggaagtgggatacagcaagcacaaaaatccttaccataacttaatgcacgctgccgatgttacacagacagtgcattacctcctctataagacaggagtggcgaactggctgacggagctggagatctttgctataatcttctcagctgccatccatgactacgagcataccggaaccaccaacaatttccacattcagactcggtctgatccagctattctgtataatgacagatctgtactggagaatcaccatttaagtgcagcttatcgccttctgcaagatgacgaggaaatgaatattttgattaacctctcaaaggatgactggagggagtttcgaaccttggtaattgaaatggtgatggccacagatatgtcttgtcacttccaacaaatcaaagcaatgaagactgctctgcagcagccagaagccattgaaaagccaaaagccttatcccttatgctgcatacagcagatattagccatccagcaaaagcatgggacctccatcatcgctggacaatgtcactcctggaggagttcttcagacagggtgacagagaagcagagctggggctgcctttttctcctctgtgtgaccgaaagtccactatggttgctcagtcacaagtaggtttcattgatttcatcgtggaacccaccttcactgtgcttacggacatgaccgagaagattgtgagtccattaatcgatgaaacctctcaaactggtgggacaggacagaggcgttcgagtttgaatagcatcagctcgtcagatgccaagcgatcaggtgtcaagacctctggttcagagggaagtgccccgatcaacaattctgtcatctccgttgactataagagctttaaagctacttggacggaagtggtgcacatcaatcgggagagatggagggccaaggtacccaaagaggagaaggccaagaaggaagcagaggaaaaggctcgcctggccgcagaggagcagcaaaaggaaatggaagccaaaagccaggctgaagaaggcgcatctggcaaagctgagaaaaagacgtctggagaaactaagaatcaagtcaatggaacacgggcaaacaaaagtgacaaccctcgtgggaaaaactccaaagccgagaagtcatcaggagaacagcaacagaatggtgacttcaaagatggtaaaaataagacagacaagaaggatcactctaacatcggaaatgattcaaagaaaacagatggcacaaaacagcgttctcacggctcaccagccccaagcaccagctccacgtgtcgccttacgttgccagtcatcaagcctcctttgcgtcattttaaacgccctgcttacgcatctagctcctatgcaccttcagtctcaaagaaaactgatgagcatcctgcaaggtacaagatgctggatcagaggatcaaaatgaaaaagattcagaacatctcacataactggaacagaaaataggccgaggggaagaagagagggagtgaaggagggtctacctatctgcttctcagcacccactggccacagcaggacacacctccaagacccttggaggctgttggagcaggtactatcctggttgactccaccaaggtgaaatgaaagttgtatgtgattttcctctttgttgttcttgtatagacttttcaattgctgtatgtgggatcagcccagacgccagcaacaaactagcaagaggggtgtttttatggtataagtctctaaaagtctaaattggaccaaaattaaaatgacacaaacttaaaaaaaaataaaattcctctcattgccacttttttcaatctctaaaagttagttgcccccaaaagaatattggtttaataatcatcatatttaagaaatgcactgataaaaacatattttccaattttaaatacacctatttaaaatgtaaatacacttatttaaaattcaagtaaatatgtaactatcaaagtaaatgtattcaaaacagaagttgtgcttctgaatgtaaaaatattaaaaggaagagaagacggatgaattgttgtattcatggacatttcagaattcacgcttataaagcaaatccaagttaaaaaacaaaaaaagatttttgtgcctcatgaagattgtgcctcatgcccaataacctcatgtactttgaaggatgtgaaggtttgcaagagatgcatttggcttcattttcctctaatcttttacttctacccacagtagatgatacaaaaaatcttgccttaaagactgcaggtttaagagtcattgcaaaagatgtcagtttgattttgtggtcctaggccaagagggtgtaaaattctgagcctagtttaaattctttattttcagattgttctggactgaaaataaagaatttaaactaggctagagatgcctttaagttacatttcagatcctcttcacagcacgctacatatctaaagcccttgagatcctgattgttctcacagttgttggtggaatccatagttttataactcacctctttttatggtggcattgttagcccttctgtgtctctccctaggatttttaattcaggactaaaatcacagaagtagcaaggaaaggctcaagactagagatagctttcaatctcttcagaaatagcctggtgcagtgagaaaactaggtttgttttcaggccagtctgatcttcatcctattctgtctataactagttgcaggtccttgctcggatggcataattttttgatgcctccatttgcttaactagaaactaggattcatatacacactctgcactttgtattgaagattaatgataatgtaggttttggttgctgtggctgagcctggccagtaataggtgcataacagaagtagctaagagcatttcataatcaggatgaactctccaggacagccctacaaagaaggagctgtttgttcccggatggcctcgaccttccaggcttgattgtaaagagtttagtgtcctctccttctctcattccctgcagttcatttccaataaactgcagttattcaagttgagcaagttccggaatttagtgcctaccatgctattgggcagtttatttataatgtgctttatgatgatacttcagagaaatttaattgctatacaaaaagacgaatcattgtgacttttcgttaaggaggcgattgcaattctttgctccctgcctggtgtctgggttagaaggcccttctgcaggctggtagtgtctgttccacctggattaggttaactcaacaggtaattcctatctgtttatacacagatgctttagcgcttgctgtacaaagtcatttggctacacactgaggaggcccatgggagtagtagcctcctcaaataatgttccctacctatctgtcaataccttccatcttaggtattgagaatttaatgaggctgtgttttcttggctgtgcttcttgatgttggaagccatgttcctggggaacaaatctgtattcttttctcctaagatgtgagtttttttcaacctttgctaatattttaatggagcaaatgtacagatgttgagattttgcactgcttataaaatgcctaccatgttttttgcataatggattgtatagaaatgcagattatattcttacagcaaataaaaagatgcttttaacaga

SEQ ID NO: 73278 - DNA, 2310 bp, Artificial Sequence
  derived and/or modified sequence
atgacggatgccggaaacagaaaggaggggttcaagaaatgccgatccgccacattttcaattgatgggtactccttcaccattgtagctaacgaggctggagataagaacgccagacccttggcccgtttctcacggagcaaatctcagaattgcctctggaattccctgatagacggtcttaccggcaacgtgaaggagaagcctcggcctaccattgtgcacgatcctagaccacccgaggagatcctcgccgacgaactgccccagttggatagctcagaggtcttggtcaaaaccagcttccgtctgaggtcactcgttaagcagcttgagagaggcgaagcttccgtcgtagacttgaagaagaacctcgaatatgccgcaactgtacttgaatccgtctacattgacgaaacccggcgactcctggacactgaggatgaactttctgatatacagagcgatgctgtgccaagcgaagttcgcgactggcttgcctctacgttcactcgccagatgggcatgatgctgcgaagatcagacgagaagcccaggttcaaatccattgtccacgcagtgcaggccggaatttttgtggagcggatgtacaggagaacatctaacatggtaggtttgtcctatccacccgctgtgattgaggccctgaaagacgttgataaatggtcctttgacgtattttccctcaacgaggcctctggagaccatgccctgaagttcatcttttacgagctgctgacacggtatgacctgatcagcaggttcaagatccctatctccgctttggtctctttcgtagaggccttggaggtgggatactccaaacacaaaaacccctaccacaacctgatgcacgcggcagacgtcacccagaccgtacattacctgctgtacaagactggcgtagcgaattggctgacagagctggaaatctttgcaataatttttagcgccgctattcacgattatgaacatacaggcaccacaaataatttccacatccagacgaggtccgatcctgctattctgtacaatgaccggagtgtgctggaaaatcaccacctcagtgcagcgtataggttgttacaggatgatgaggagatgaacatcttaattaatctcagcaaagatgattggcgagagttcagaactctggtgatcgagatggtcatggctaccgacatgtcctgccacttccaacagatcaaggccatgaaaaccgcgctgcagcagcccgaggccatcgagaagcctaaagctctgagtctcatgctgcacactgcagacatcagtcacccggctaaggcatgggacttgcatcataggtggacaatgagccttttagaggagttctttcgacagggagatagagaggcagagttaggcctccctttctctcctctgtgtgatcgcaaatcgactatggtggcccagagccaagtggggtttatagatttcattgtggagccaaccttcacggtcctgacggacatgacagagaagattgtatcacccctgatagacgaaacctctcagaccggaggcacgggccagcggaggtcttccctcaactctatctcgtcatctgacgcaaaacgatcgggtgtaaagacgtccggctctgagggatcagccccaataaacaactcagtgatctcagtggattataagtctttcaaggcaacatggacagaggttgtgcacattaaccgcgaacgctggcgtgctaaagtgccaaaagaggaaaaggctaaaaaagaagccgaagagaaggcaaggcttgccgctgaggagcagcagaaggaaatggaggcaaaatctcaggccgaagagggagctagtggcaaagctgagaagaaaacttccggggaaacaaaaaatcaggtgaatggcacccgggcaaacaaatctgacaacccgaggggaaagaatagcaaggctgagaagagctcaggagagcagcagcagaatggcgattttaaggacggaaagaataaaaccgacaaaaaggaccacagcaatataggcaatgatagtaaaaaaaccgatggcaccaagcagcgtagccacgggtcccccgctccaagcacctcctctacttgtaggctgactctcccagtgatcaaacctccccttcgccacttcaagagacccgcatacgcttctagtagttatgcccctagtgtaagtaaaaagactgatgagcaccccgctcgctacaagatgctggatcagagaataaagatgaaaaaaatccaaaacatctcccataactggaatcgcaagtag

SEQ ID NO: 73279 - DNA, 2310 bp, Artificial Sequence
  derived and/or modified sequence
atgaccgacgccggcaacagaaaggagggcttcaagaagtgcagaagcgccaccttcagcatcgacggctacagcttcaccatcgtggccaacgaggccggcgacaagaacgccagacccctggccagattcagcagaagcaagagccagaactgcctgtggaacagcctgatcgacggcctgaccggcaacgtgaaggagaagcccagacccaccatcgtgcacgaccccagaccccccgaggagatcctggccgacgagctgccccagctggacagcagcgaggtgctggtgaagaccagcttcagactgagaagcctggtgaagcagctggagagaggcgaggccagcgtggtggacctgaagaagaacctggagtacgccgccaccgtgctggagagcgtgtacatcgacgagaccagaagactgctggacaccgaggacgagctgagcgacatccagagcgacgccgtgcccagcgaggtgagagactggctggccagcaccttcaccagacagatgggcatgatgctgagaagaagcgacgagaagcccagattcaagagcatcgtgcacgccgtgcaggccggcatcttcgtggagagaatgtacagaagaaccagcaacatggtgggcctgagctacccccccgccgtgatcgaggccctgaaggacgtggacaagtggagcttcgacgtgttcagcctgaacgaggccagcggcgaccacgccctgaagttcatcttctacgagctgctgaccagatacgacctgatcagcagattcaagatccccatcagcgccctggtgagcttcgtggaggccctggaggtgggctacagcaagcacaagaacccctaccacaacctgatgcacgccgccgacgtgacccagaccgtgcactacctgctgtacaagaccggcgtggccaactggctgaccgagctggagatcttcgccatcatcttcagcgccgccatccacgactacgagcacaccggcaccaccaacaacttccacatccagaccagaagcgaccccgccatcctgtacaacgacagaagcgtgctggagaaccaccacctgagcgccgcctacagactgctgcaggacgacgaggagatgaacatcctgatcaacctgagcaaggacgactggagagagttcagaaccctggtgatcgagatggtgatggccaccgacatgagctgccacttccagcagatcaaggccatgaagaccgccctgcagcagcccgaggccatcgagaagcccaaggccctgagcctgatgctgcacaccgccgacatcagccaccccgccaaggcctgggacctgcaccacagatggaccatgagcctgctggaggagttcttcagacagggcgacagagaggccgagctgggcctgcccttcagccccctgtgcgacagaaagagcaccatggtggcccagagccaggtgggcttcatcgacttcatcgtggagcccaccttcaccgtgctgaccgacatgaccgagaagatcgtgagccccctgatcgacgagaccagccagaccggcggcaccggccagagaagaagcagcctgaacagcatcagcagcagcgacgccaagagaagcggcgtgaagaccagcggcagcgagggcagcgcccccatcaacaacagcgtgatcagcgtggactacaagagcttcaaggccacctggaccgaggtggtgcacatcaacagagagagatggagagccaaggtgcccaaggaggagaaggccaagaaggaggccgaggagaaggccagactggccgccgaggagcagcagaaggagatggaggccaagagccaggccgaggagggcgccagcggcaaggccgagaagaagaccagcggcgagaccaagaaccaggtgaacggcaccagagccaacaagagcgacaaccccagaggcaagaacagcaaggccgagaagagcagcggcgagcagcagcagaacggcgacttcaaggacggcaagaacaagaccgacaagaaggaccacagcaacatcggcaacgacagcaagaagaccgacggcaccaagcagagaagccacggcagccccgcccccagcaccagcagcacctgcagactgaccctgcccgtgatcaagccccccctgagacacttcaagagacccgcctacgccagcagcagctacgcccccagcgtgagcaagaagaccgacgagcaccccgccagatacaagatgctggaccagagaatcaagatgaagaagatccagaacatcagccacaactggaacagaaagtag

SEQ ID NO: 73280 - protein, 138 aa, Artificial Sequence
  derived and/or modified sequence
MYFQQYWRDKRLAYSGIPLNLTLDNRVADQLWVPDTYFLNDKKSFVHGVTVKNRMIRLHPDGTVLYGLRITTTAACMMDLRRYPLDEQNCTLEIESYGYTTDDIEFYWRGGDKAVTGVERIELPQFSIVEHRLVSRNV

SEQ ID NO: 73281 - DNA, 1167 bp, Artificial Sequence
  derived and/or modified sequence
atgtatttccaacaatattggcgagataaacgccttgcttactcaggaattcccttgaatttaaccctcgataacagagtcgcggaccagctgtgggtacctgacacatactttttaaatgataagaaaagtttcgttcacggggtaacagttaaaaacagaatgattagactccatcctgatggaactgtcctgtacggactgcgtatcacaacaactgcagcgtgtatgatggacctgcggcggtacccactggacgaacagaattgcacgctcgaaattgagtcgtatgggtatactacggacgacatcgagttttattggagggggggcgataaggccgtgacaggagtcgaacgcattgaactcccccagtttagtatagtggagcacaggttagtgagccggaacgtggtgttcgcgacgggggcatacccaagactctcgctgtccttcagacttaagaggaatatcggttactttatccttcaaacctatatgccctccatcctgatcacgattctctcttgggtttcattttggataaattacgatgcttccgctgctagggtggccttagggatcaccacagtgcttacaatgacaaccatcaatactcacttgcgtgagacgttgcccaaaattccctacgttaaggccattgacatgtacctgatggggtgtttcgtctttgtctttctcgccttactggagtacgcctttgttaattatatattcttcggtcgagggccacagaggcagaagaagctagctgaaaagactgcaaaagccaagaacgatagaagcaagtctgagtccaaccgggtggacgcccacggtaatatactactgactagcttagaggttcacaacgaaatgaacgaagtttctggcggcattggggacactagaaattccgccatttccttcgataactctggaatccagtaccggaaacagtccatgcctcgcgagggacacggccgttttctgggcgataggtctctgccacataaaaagacccacttgcgccgaaggtccagccagctgaaaataaaaatcccggatctgaccgatgttaacgcaatcgacaggtggagtcgcatcgtgttcccctttacattttcccttttcaatcttgtatattggctctattacgtaaactag

SEQ ID NO: 73282 - DNA, 417 bp, Artificial Sequence
  derived and/or modified sequence
atgtactttcagcaatactggcgcgataaacgattagcctattccggtatacccctaaacctaactctcgataatcgcgtggccgatcagctgtgggtgcccgatacctactttctgaatgataagaaatccttcgtacatggggtcaccgtaaaaaatcgtatgatacggctgcacccggatggaacagtcctctacggcctgagaattacgacaacagcagcctgcatgatggacctgaggcgctaccctctagacgagcagaactgcaccttggagatagagtcgtatggctacacaacagacgatatagaattttactggcgcggcggcgataaggctgtcactggagtggagaggatagaactcccacagttttcaatagtggaacaccgcctcgtgtccagaaatgtgtag

SEQ ID NO: 73283 - DNA, 1167 bp, Artificial Sequence
  derived and/or modified sequence
atgtacttccagcagtactggagggacaagaggctggcctacagcggcatccccctgaacctgaccctggacaacagagtggccgaccagctgtgggtgcctgacacctacttcctgaatgacaagaagagctttgtgcatggagtgacagtgaagaacaggatgatccggctgcacccagatggcaccgtgctgtatggcctgcgcatcaccaccacagctgcctgcatgatggacctgcggcgctaccccctggatgagcagaactgcaccctggagattgagagctatggctacaccacagatgacatcgagttctactggaggggcggggacaaggctgtgactggagtggagagaattgagctgccccagttcagcatcgtggagcaccggctggtgtccagaaatgtggtgtttgccaccggggcctacccccggctgagcctgtccttccggctgaagaggaacatcggctacttcatcctgcagacctacatgcccagcatcctgatcaccatcctgtcctgggtgtccttctggatcaactatgatgccagcgctgcccgggtggccctgggcatcaccaccgtgctgaccatgaccaccatcaacacccacctgcgggagaccctgcccaagatcccctacgtgaaggccatcgacatgtacctgatgggctgctttgtgtttgtgttcctggccctgctggagtatgcctttgtgaactacatcttcttcggccggggcccccagaggcagaagaagctggccgagaagacagccaaggccaagaatgacaggagcaagtctgagagcaacagagtggatgcccacggcaacatcctgctgaccagcctggaggtgcacaatgagatgaatgaggtgtctgggggcatcggggacaccaggaacagcgccatcagctttgacaacagcggcatccagtacaggaagcagagcatgccccgggagggccacggccgcttcctgggggacaggagcctgccccacaagaagacccacctgcggcggcgcagcagccagctgaagatcaagatcccagacctgacagatgtgaatgccatcgaccgctggagcagaattgtgttccccttcaccttcagcctcttcaacctggtgtactggctgtactacgtgaactag

SEQ ID NO: 73284 - DNA, 417 bp, Artificial Sequence
  derived and/or modified sequence
atgtacttccagcagtactggagggacaagaggctggcctacagcggcatccccctgaacctgaccctggacaacagagtggccgaccagctgtgggtgcctgacacctacttcctgaatgacaagaagagctttgtgcatggagtgacagtgaagaacaggatgatccggctgcacccagatggcaccgtgctgtatggcctgcgcatcaccaccacagctgcctgcatgatggacctgcggcgctaccccctggatgagcagaactgcaccctggagattgagagctatggctacaccacagatgacatcgagttctactggaggggcggggacaaggctgtgactggagtggagagaattgagctgccccagttcagcatcgtggagcaccggctggtgtccagaaatgtgtag

SEQ ID NO: 73285 - DNA, 1167 bp, Artificial Sequence
  derived and/or modified sequence
atgtacttccagcagtactggcgggacaagcggctggcctacagcggaattcccctaaacctgacgttagacaatagggtggccgatcagctctgggtacctgacacctactttttgaatgacaagaaaagctttgtccatggcgtcacagtaaaaaaccggatgatacgtctacatccagacggcaccgttctctatggcctacgtatcaccactacggccgcatgtatgatggacctccggaggtatccgctcgacgagcaaaattgtaccctcgagattgaatcttacggatacaccacagacgatattgaattctactggcgggggggcgacaaggccgtgactggagtggaacgcattgagctccctcagtttagtattgtggagcatcggctagtatcaaggaatgttgtgttcgcgaccggtgcttacccccggctgagcctcagtttccgactaaagcgaaacataggctacttcatcttgcagacgtacatgcctagcatactcatcacaattttgtcctgggtttcgttctggatcaactacgacgccagcgccgcccgcgtggctctcggcatcaccaccgtgcttactatgactaccattaatactcatcttagagagacactccctaaaatcccgtatgttaaggctatcgacatgtatctcatgggctgcttcgtgtttgtgtttctcgctctgttagaatatgcctttgttaactacatttttttcgggcggggaccgcagcggcaaaagaagttggcagagaagacagcgaaagcgaagaatgatcgctccaagagcgagagcaaccgggtggatgctcacgggaatatcctgctcacctccctggaggtccacaacgagatgaacgaagtctctggtgggatcggggatacgcgaaattctgctatcagctttgacaatagcgggattcaataccgcaaacagagcatgcctagggaaggccatggacggtttttaggcgacaggagtctcccacataagaagacccacctgaggagacgctcatcccaactgaagatcaaaatcccagatcttactgacgtcaatgccattgaccgttggagccgtatcgtgttccccttcacattttccctctttaacctagtgtactggttgtactatgtgaactag

SEQ ID NO: 73286 - DNA, 417 bp, Artificial Sequence
  derived and/or modified sequence
atgtacttccagcagtactggcgggacaagcggctggcctacagcgggatccccctcaatctcacattggataaccgcgtcgccgatcagctgtgggtgcctgacacctactttctgaatgacaaaaaaagtttcgtgcacggcgtaactgtgaagaacaggatgatccggctgcacccggatggtaccgtcctctacggactccggatcactactacagccgcctgcatgatggacctgcggcggtatcccctggacgagcagaattgcaccctggagatcgagagctatgggtatacaacagacgatatcgagttctactggcgggggggggacaaagccgtcacgggtgtcgagagaatcgagctgccccaattcagtattgtggagcataggctcgtcagccgaaatgtatag

SEQ ID NO: 73287 - DNA, 1167 bp, Artificial Sequence
  derived and/or modified sequence
atgtattttcagcagtactggcgagacaaaaggctggcatacagcgggatccctttgaatctcactctcgataaccgcgtggccgatcagctttgggtacctgacacgtatttccttaacgataaaaaaagcttcgtgcacggtgttactgttaagaacaggatgattcgcctgcatccagatggaacggtactttatggtctcaggataacaaccactgctgcctgtatgatggacttgcgtagataccctttggatgaacagaattgcactttagagatcgaaagctatgggtacacgaccgatgacatagagttttattggagaggcggagataaagccgtgaccggagtggagcgtatcgagcttccccagttctctattgtggagcatcgcttggtgtcacgcaacgtggtcttcgcaacaggcgcataccccagactatctctgagtttcagactgaagcgcaacatcggctattttattctgcagacttacatgccgtcaatcttaattaccattctcagttgggtgtctttttggatcaactatgatgcgtcagctgcccgtgtggccctgggtattacgacggtgctgacaatgacgacaattaatactcacctgcgcgagactctccctaaaataccctacgtaaaggccattgacatgtatctgatgggatgtttcgtcttcgtgtttctcgctctgcttgaatatgccttcgtgaactacatatttttcggcaggggcccacagcggcaaaaaaagttagccgagaaaactgcaaaggccaaaaacgacaggagtaaatctgagtcaaaccgcgtcgatgcccacggtaatatcctgctgacctcccttgaagtgcacaacgagatgaacgaagtgtccggcggaattggagatactaggaattccgctatctctttcgacaatagcggcatacagtaccgcaaacagtcgatgcccagagaaggacacggaaggtttctgggagatcgcagtctgccccataagaagactcatctgcgcaggagatccagtcagttaaaaataaaaattccggacttaaccgacgtgaatgccatagaccgctggagccgtattgtgttccccttcaccttttctttatttaacctagtttattggctctattacgtcaattag

SEQ ID NO: 73288 - DNA, 417 bp, Artificial Sequence
  derived and/or modified sequence
atgtactttcaacaatattggcgggacaagagactcgcctactccggcataccactcaatctgaccctggataatcgagtcgctgaccaattgtgggtacccgacacttatttcctgaatgataaaaagagctttgtccatggtgtgacagtcaagaatagaatgattcgcttacaccccgacggaacagtgctttatggccttagaataaccaccaccgcagcctgtatgatggacttgaggcgctaccccctggacgagcagaactgcactttggagattgaatcctacggatacactacggacgacatcgagttttattggaggggcggtgacaaggctgtgactggcgtagaacgcattgagttgccccaatttagtattgtcgaacataggctggtatcgaggaatgtctag

SEQ ID NO: 73289 - DNA, 1167 bp, Artificial Sequence
  derived and/or modified sequence
atgtacttccagcagtactggagagacaagagactggcctacagcggcatccccctgaacctgaccctggacaacagagtggccgaccagctgtgggtgcccgacacctacttcctgaacgacaagaagagcttcgtgcacggcgtgaccgtgaagaacagaatgatcagactgcaccccgacggcaccgtgctgtacggcctgagaatcaccaccaccgccgcctgcatgatggacctgagaagataccccctggacgagcagaactgcaccctggagatcgagagctacggctacaccaccgacgacatcgagttctactggagaggcggcgacaaggccgtgaccggcgtggagagaatcgagctgccccagttcagcatcgtggagcacagactggtgagcagaaacgtggtgttcgccaccggcgcctaccccagactgagcctgagcttcagactgaagagaaacatcggctacttcatcctgcagacctacatgcccagcatcctgatcaccatcctgagctgggtgagcttctggatcaactacgacgccagcgccgccagagtggccctgggcatcaccaccgtgctgaccatgaccaccatcaacacccacctgagagagaccctgcccaagatcccctacgtgaaggccatcgacatgtacctgatgggctgcttcgtgttcgtgttcctggccctgctggagtacgccttcgtgaactacatcttcttcggcagaggcccccagagacagaagaagctggccgagaagaccgccaaggccaagaacgacagaagcaagagcgagagcaacagagtggacgcccacggcaacatcctgctgaccagcctggaggtgcacaacgagatgaacgaggtgagcggcggcatcggcgacaccagaaacagcgccatcagcttcgacaacagcggcatccagtacagaaagcagagcatgcccagagagggccacggcagattcctgggcgacagaagcctgccccacaagaagacccacctgagaagaagaagcagccagctgaagatcaagatccccgacctgaccgacgtgaacgccatcgacagatggagcagaatcgtgttccccttcaccttcagcctgttcaacctggtgtactggctgtactacgtgaactag

SEQ ID NO: 73290 - DNA, 417 bp, Artificial Sequence
  derived and/or modified sequence
atgtacttccagcagtactggagagacaagagactggcctacagcggcatccccctgaacctgaccctggacaacagagtggccgaccagctgtgggtgcccgacacctacttcctgaacgacaagaagagcttcgtgcacggcgtgaccgtgaagaacagaatgatcagactgcaccccgacggcaccgtgctgtacggcctgagaatcaccaccaccgccgcctgcatgatggacctgagaagataccccctggacgagcagaactgcaccctggagatcgagagctacggctacaccaccgacgacatcgagttctactggagaggcggcgacaaggccgtgaccggcgtggagagaatcgagctgccccagttcagcatcgtggagcacagactggtgagcagaaacgtgtag

SEQ ID NO: 73291 - protein, 402 aa, Artificial Sequence
  derived and/or modified sequence
MWATYQTEEDYTLTMYFQQYWRDKRLAYSGIPLNLTLDNRVADQLWVPDTYFLNDKKSFVHGVTVKNRMIRLHPDGTVLYGLRITTTAACMMDLRRYPLDEQNCTLEIESYGYTTDDIEFYWRGGDKAVTGVERIELPQFSIVEHRLVSRNVVFATGAYPRLSLSFRLKRNIGYFILQTYMPSILITILSWVSFWINYDASAARVALGITTVLTMTTINTHLRETLPKIPYVKAIDMYLMGCFVFVFLALLEYAFVNYIFFGRGPQRQKKLAEKTAKAKNDRSKSESNRVDAHGNILLTSLEVHNEMNEVSGGIGDTRNSAISFDNSGIQYRKQSMPREGHGRFLGDRSLPHKKTHLRRRSSQLKIKIPDLTDVNAIDRWSRIVFPFTFSLFNLVYWLYYVN

SEQ ID NO: 73292 - protein, 388 aa, Artificial Sequence
  derived and/or modified sequence
MYFQQYWRDKRLAYSGIPLNLTLDNRVADQLWVPDTYFLNDKKSFVHGVTVKNRMIRLHPDGTVLYGLRITTTAACMMDLRRYPLDEQNCTLEIESYGYTTDDIEFYWRGGDKAVTGVERIELPQFSIVEHRLVSRNVVFATGAYPRLSLSFRLKRNIGYFILQTYMPSILITILSWVSFWINYDASAARVALGITTVLTMTTINTHLRETLPKIPYVKAIDMYLMGCFVFVFLALLEYAFVNYIFFGRGPQRQKKLAEKTAKAKNDRSKSESNRVDAHGNILLTSLEVHNEMNEVSGGIGDTRNSAISFDNSGIQYRKQSMPREGHGRFLGDRSLPHKKTHLRRRSSQLKIKIPDLTDVNAIDRWSRIVFPFTFSLFNLVYWLYYVN

SEQ ID NO: 73293 - DNA, 1209 bp, Artificial Sequence
  derived and/or modified sequence
atgtgggccacttatcagactgaggaagactataccctgacaatgtatttccaacagtactggcgcgataaacgcctcgcttacagcggcatccccctgaacttaactctagataaccgggtcgctgatcagctctgggttcccgacacatatttcctgaatgacaaaaagtctttcgtgcacggcgtgacagtcaagaaccgtatgattcggcttcaccccgacggcaccgtactttatggtttgcgcatcaccacaaccgctgcatgcatgatggacttaaggagatacccacttgatgaacagaactgtactcttgaaatcgaatcatacggatacacaaccgacgatatcgagttttactggcgaggcggcgataaagccgtcacaggtgtggagcgaattgaactaccccagttcagcatagtcgagcataggctcgtgagtcgcaatgtagtgtttgccacgggagcttacccgagactgagcctgtcgtttagactcaaacggaatattggctactttatcctgcaaacatatatgccaagcatactaattacaatattgtcctgggtttccttttggatcaactacgacgcatctgcagcgagagtcgcacttgggattaccactgtgcttacaatgaccactatcaacacccacctgcgcgaaacgctcccaaaaatcccatacgtgaaggcgattgacatgtaccttatgggttgtttcgtgtttgtctttctcgccctcctggagtatgcctttgtgaactacattttttttggccggggtccacaacgccagaagaaactcgcagaaaaaacggccaaagccaaaaacgacagatccaagtcagagagtaatcgtgtggacgctcatgggaacattctgcttacatccctcgaggtccacaatgagatgaacgaagtgagcggggggatcggcgatacacggaactcggcaattagcttcgataacagcggcattcagtaccgcaagcagtcaatgccacgcgagggacacggacgattcctcggggatcgctctctccctcacaaaaaaacccacttgagacggcgctctagccaattaaagataaagatccccgacttgactgatgtgaatgctattgacaggtggtccaggattgtatttccgttcacattttcattgtttaacttggtatattggttgtattacgtcaactag

SEQ ID NO: 73294 - DNA, 1900 bp, Artificial Sequence
  derived and/or modified sequence
agtcacaacttccggttagcgtggcggaggctctcggagtctttgggacctcagcaccgggataccgggagactccctcgtgtccccatgtgggccacctaccagacagaagaggattataccttaaccatgtattttcaacaatattggagagataaaaggctcgcctattctgggatccctctcaacctcacgcttgacaatcgagtggctgaccagctatgggtgcccgacacatatttcttaaatgacaaaaagtcatttgtgcatggagtgacagtgaaaaaccgcatgatccgtcttcaccctgatgggacagtgctgtatgggctcagaatcaccacgacagcagcatgcatgatggacctcaggagataccccctggacgagcagaactgcactctggaaattgaaagctatggctacaccacggatgacattgagttttactggcgaggcggggacaaggctgttaccggagtggaaaggattgagctcccgcagttctccatcgtggagcaccgtctggtctcgaggaatgttgtcttcgccacaggtgcctatcctcgactgtcactgagctttcggttgaagaggaacattggatacttcattcttcagacttatatgccctctatactgataacgattctgtcgtgggtgtccttctggatcaattatgatgcatctgctgctagagttgccctcgggatcacaactgtgctgacaatgacaaccatcaacacccaccttcgggagaccttgcccaaaatcccctatgtcaaagccattgacatgtaccttatgggctgcttcgtctttgtgttcctggcccttctggagtatgcctttgtcaactacattttctttggaagaggccctcaaaggcagaagaagcttgcagaaaagacagccaaggcaaagaatgaccgttcaaagagcgaaagcaaccgggtggatgctcatggaaatattctgttgacatcgctggaagttcacaatgaaatgaatgaggtctcaggcggcattggcgataccaggaattcagcaatatcctttgacaactcaggaatccagtacaggaaacagagcatgcctcgagaagggcatgggcgattcctgggggacagaagcctcccgcacaagaagacccatctacggaggaggtcttcacagctcaaaattaaaatacctgatctaaccgatgtgaatgccatagacagatggtccaggatcgtgtttccattcactttttctcttttcaacttagtttactggctgtactatgttaactgagtgactgtacttgatttttcaaagacttcatttaacactgagtgaaatattactctgcctgtcaagtttttatacctgtacacacacagacacacaagcagacacacacatatatacatacgcaattgtatatatatgtgaactttctcagcatatatataaaatacacgtgtatatgaggatgtatgtgtatatgtttatacacacaggagtcagtgcccatgtgtatggaagacaaatacacatacatatatacattttgcagctatggacaatttaccacaggatgcatattaaagaaagtcatagtttttttcttttttaattgaaagggacaagtatcatctaaatattatgccttgagaatgagggcgtgaaacacaatatcatccccaaatgtgtcttgtattatcataagttagatgttttagtttaaaaatcagaaagacattcttagttaatctttgaaaactcatacagtggtattgctagtttaaaatgagtcacttacttcatatcctctcgttcagtttagtaagcaaaggcttcttggcttctctggtgatggggtttgttttcatcgggcatacgttttctgcaatgg

SEQ ID NO: 73295 - DNA, 1494 bp, Artificial Sequence
  derived and/or modified sequence
agagctgggctgttactggatatatgccatgtgagctggatggcctgtgaaagagaaaggcagttggtgataaaaataattggatgattcttaaagaaatagaagagacttgctgttggcagtgagaacccacaagaggcctctaaggagatgattataccttaaccatgtattttcaacaatattggagagataaaaggctcgcctattctgggatccctctcaacctcacgcttgacaatcgagtggctgaccagctatgggtgcccgacacatatttcttaaatgacaaaaagtcatttgtgcatggagtgacagtgaaaaaccgcatgatccgtcttcaccctgatgggacagtgctgtatgggctcagaatcaccacgacagcagcatgcatgatggacctcaggagataccccctggacgagcagaactgcactctggaaattgaaagctatggctacaccacggatgacattgagttttactggcgaggcggggacaaggctgttaccggagtggaaaggattgagctcccgcagttctccatcgtggagcaccgtctggtctcgaggaatgttgtcttcgccacaggtgcctatcctcgactgtcactgagctttcggttgaagaggaacattggatacttcattcttcagacttatatgccctctatactgataacgattctgtcgtgggtgtccttctggatcaattatgatgcatctgctgctagagttgccctcgggatcacaactgtgctgacaatgacaaccatcaacacccaccttcgggagaccttgcccaaaatcccctatgtcaaagccattgacatgtaccttatgggctgcttcgtctttgtgttcctggcccttctggagtatgcctttgtcaactacattttctttggaagaggccctcaaaggcagaagaagcttgcagaaaagacagccaaggcaaagaatgaccgttcaaagagcgaaagcaaccgggtggatgctcatggaaatattctgttgacatcgctggaagttcacaatgaaatgaatgaggtctcaggcggcattggcgataccaggaattcagcaatatcctttgacaactcaggaatccagtacaggaaacagagcatgcctcgagaagggcatgggcgattcctgggggacagaagcctcccgcacaagaagacccatctacggaggaggtcttcacagctcaaaattaaaatacctgatctaaccgatgtgaatgccatagacagatggtccaggatcgtgtttccattcactttttctcttttcaacttagtttactggctgtactatgttaactgagtgactgtacttgatttttcaaagacttcatttaacactgagtgaaatattactctgcctgtcaagtttttatacctgtacacacacagacacacaagcagacacacacatatatacatacgcaattgtatatatatgtgaactttctcagcatatatat

SEQ ID NO: 73296 - DNA, 515 bp, Artificial Sequence
  derived and/or modified sequence
ggaaaactgcttacatggaaggcacttcaggggtaaggtccagggtgtgtgtctgtgcttggctctaggttgctccatttgggaggattataccttaaccatgtattttcaacaatattggagagataaaaggctcgcctattctgggatccctctcaacctcacgcttgacaatcgagtggctgaccagctatgggtgcccgacacatatttcttaaatgacaaaaagtcatttgtgcatggagtgacagtgaaaaaccgcatgatccgtcttcaccctgatgggacagtgctgtatgggctcagaatcaccacgacagcagcatgcatgatggacctcaggagataccccctggacgagcagaactgcactctggaaattgaaagctatggctacaccacggatgacattgagttttactggcgaggcggggacaaggctgttaccggagtggaaaggattgagctcccgcagttctccatcgtggagcaccgtctggtctcgaggaatgttg

SEQ ID NO: 73297 - DNA, 1209 bp, Artificial Sequence
  derived and/or modified sequence
atgtgggccacctaccagacagaggaggactacaccctgaccatgtacttccagcagtactggagggacaagaggctggcctacagcggcatccccctgaacctgaccctggacaacagagtggccgaccagctgtgggtgcctgacacctacttcctgaatgacaagaagagctttgtgcatggagtgacagtgaagaacaggatgatccggctgcacccagatggcaccgtgctgtatggcctgcgcatcaccaccacagctgcctgcatgatggacctgcggcgctaccccctggatgagcagaactgcaccctggagattgagagctatggctacaccacagatgacatcgagttctactggaggggcggggacaaggctgtgactggagtggagagaattgagctgccccagttcagcatcgtggagcaccggctggtgtccagaaatgtggtgtttgccaccggggcctacccccggctgagcctgtccttccggctgaagaggaacatcggctacttcatcctgcagacctacatgcccagcatcctgatcaccatcctgtcctgggtgtccttctggatcaactatgatgccagcgctgcccgggtggccctgggcatcaccaccgtgctgaccatgaccaccatcaacacccacctgcgggagaccctgcccaagatcccctacgtgaaggccatcgacatgtacctgatgggctgctttgtgtttgtgttcctggccctgctggagtatgcctttgtgaactacatcttcttcggccggggcccccagaggcagaagaagctggccgagaagacagccaaggccaagaatgacaggagcaagtctgagagcaacagagtggatgcccacggcaacatcctgctgaccagcctggaggtgcacaatgagatgaatgaggtgtctgggggcatcggggacaccaggaacagcgccatcagctttgacaacagcggcatccagtacaggaagcagagcatgccccgggagggccacggccgcttcctgggggacaggagcctgccccacaagaagacccacctgcggcggcgcagcagccagctgaagatcaagatcccagacctgacagatgtgaatgccatcgaccgctggagcagaattgtgttccccttcaccttcagcctcttcaacctggtgtactggctgtactacgtgaactag

SEQ ID NO: 73298 - DNA, 1209 bp, Artificial Sequence
  derived and/or modified sequence
atgtgggccacctaccagaccgaggaggactacaccctgaccatgtacttccagcagtactggagggacaaacgacttgcttacagtggcatccctttaaacctcaccctcgacaatagggtggccgaccaactgtgggttccagacacttatttcttgaatgacaagaagagttttgtgcatggtgtcacagtgaaaaatcgcatgatacgcctccaccccgacggcaccgtattatacggacttcgaatcaccaccacagctgcctgcatgatggacctgcgaaggtacccacttgacgagcaaaactgcaccctagagattgagtcctatggctacactaccgacgatatcgagttttactggcgtggaggtgataaagctgttaccggagtggagcggatcgaactacctcagttttcaattgtcgaacatagactggtgagtcgcaacgtcgtgttcgcaaccggcgcgtatcctcggctgtctctctctttcaggctgaaacggaacatcggctacttcattctccagacttacatgccaagcatccttattactatactcagttgggtgagtttctggatcaactacgatgccagcgcagctcgggtcgctctagggattaccacggtcctcacgatgaccactataaacacgcacctgagagagaccctaccaaagattccctatgtcaaggccatcgatatgtacctgatgggctgtttcgtgtttgtgtttttagcactcctggagtacgccttcgtgaactatatattttttggccgaggaccacagaggcagaaaaaacttgccgagaaaacagcgaaagcaaagaatgaccggtctaagtctgagtccaatagagttgacgctcacggtaacatcctgcttacctctcttgaagtccataatgagatgaacgaggtatccggggggataggtgacacacggaactccgccatatctttcgacaattcgggaatacagtaccgcaaacagagtatgccccgcgaggggcacggaagatttctgggggatagatcacttccacacaagaagacgcatctgcgacggcgtagctctcagctgaaaattaagattcccgatcttaccgacgtcaatgccattgacaggtggagtcggatagttttcccgtttacattctctttattcaatcttgtgtattggctctattatgtcaactag

SEQ ID NO: 73299 - DNA, 1209 bp, Artificial Sequence
  derived and/or modified sequence
atgtgggcaacctatcagacggaggaggactacactctcacgatgtacttccagcaatactggcgagataaacgattggcctattctggaattcctctgaacctgactctggacaatcgggtagcggaccagttatgggtgcctgatacatacttcctcaacgataagaagtctttcgtccacggcgttaccgtcaagaaccgaatgattagattacaccctgacggaaccgtactgtacgggcttaggattaccaccaccgcggcatgcatgatggatctgcgtaggtatccacttgatgaacagaattgcaccttggagattgaatcttacggttataccactgacgatatcgaattctactggaggggcggtgacaaagccgtgaccggagtggagcggatcgagctgcctcaattcagtattgttgagcatagacttgtgagccgcaatgtggtttttgcaacgggagcctatcctcgactcagcctctcctttcggttaaagcgtaacatcggctattttattctgcagacatatatgccaagtattctgattacaattctttcatgggtcagcttttggataaattacgacgcaagtgcagcgagagtggcgctgggtattactacagttctcacaatgaccaccattaacactcaccttagggaaaccctgccaaagattccctatgtgaaggctatagacatgtaccttatgggctgcttcgtgttcgtgtttctggccttgttggaatatgcatttgttaactacatcttctttggcagaggtcctcagcggcagaaaaagctggccgaaaagacggccaaggccaagaatgatcggtctaagtctgaatctaacagagtcgacgctcatggcaacatcctgttaacaagcttggaggtccacaatgagatgaacgaggtatccggtggaattggagatactaggaattctgccatctcctttgataactccggaatccagtaccgcaaacagtctatgccaagagaggggcatgggagattcctgggcgataggtcacttccacataaaaagacccatttgagacgcaggagctcccagttaaagatcaagatccccgacctgactgatgtgaacgctattgaccgttggtccaggatagtgtttcccttcaccttttctctttttaacctggtttattggctttactacgtcaactag

SEQ ID NO: 73300 - DNA, 1209 bp, Artificial Sequence
  derived and/or modified sequence
atgtgggccacctaccagaccgaggaggactacaccctgaccatgtacttccagcagtactggagagacaagagactggcctacagcggcatccccctgaacctgaccctggacaacagagtggccgaccagctgtgggtgcccgacacctacttcctgaacgacaagaagagcttcgtgcacggcgtgaccgtgaagaacagaatgatcagactgcaccccgacggcaccgtgctgtacggcctgagaatcaccaccaccgccgcctgcatgatggacctgagaagataccccctggacgagcagaactgcaccctggagatcgagagctacggctacaccaccgacgacatcgagttctactggagaggcggcgacaaggccgtgaccggcgtggagagaatcgagctgccccagttcagcatcgtggagcacagactggtgagcagaaacgtggtgttcgccaccggcgcctaccccagactgagcctgagcttcagactgaagagaaacatcggctacttcatcctgcagacctacatgcccagcatcctgatcaccatcctgagctgggtgagcttctggatcaactacgacgccagcgccgccagagtggccctgggcatcaccaccgtgctgaccatgaccaccatcaacacccacctgagagagaccctgcccaagatcccctacgtgaaggccatcgacatgtacctgatgggctgcttcgtgttcgtgttcctggccctgctggagtacgccttcgtgaactacatcttcttcggcagaggcccccagagacagaagaagctggccgagaagaccgccaaggccaagaacgacagaagcaagagcgagagcaacagagtggacgcccacggcaacatcctgctgaccagcctggaggtgcacaacgagatgaacgaggtgagcggcggcatcggcgacaccagaaacagcgccatcagcttcgacaacagcggcatccagtacagaaagcagagcatgcccagagagggccacggcagattcctgggcgacagaagcctgccccacaagaagacccacctgagaagaagaagcagccagctgaagatcaagatccccgacctgaccgacgtgaacgccatcgacagatggagcagaatcgtgttccccttcaccttcagcctgttcaacctggtgtactggctgtactacgtgaactag

SEQ ID NO: 73301 - protein, 143 aa, Artificial Sequence
  derived and/or modified sequence
MSRTAYTVGALLLLLGTLLPAAEGKKKGSQGAIPPPDKALHVTERKYLKRDWCKTQPLKQTIHEEGCNSRTIINRFCYGQCNSFYIPRHIRKEEGSFQSCSFCKPKKFTTMMVTLNCPELQPPTKKKRVTRVKQCRCISIDLD

SEQ ID NO: 73302 - DNA, 432 bp, Artificial Sequence
  derived and/or modified sequence
atgagcagaaccgcctacaccgtgggcgccctgctgctgctgctgggcaccctgctgcccgccgccgagggcaagaagaagggcagccagggcgccatccccccccccgacaaggccctgcacgtgaccgagagaaagtacctgaagagagactggtgcaagacccagcccctgaagcagaccatccacgaggagggctgcaacagcagaaccatcatcaacagattctgctacggccagtgcaacagcttctacatccccagacacatcagaaaggaggagggcagcttccagagctgcagcttctgcaagcccaagaagttcaccaccatgatggtgaccctgaactgccccgagctgcagccccccaccaagaagaagagagtgaccagagtgaagcagtgcagatgcatcagcatcgacctggactag

SEQ ID NO: 73303 - DNA, 432 bp, Artificial Sequence
  derived and/or modified sequence
atgtcccgcaccgcctatactgttggcgcactgctgctgctgctcggtacgctactgcccgctgcagagggaaagaagaagggatcacaaggggctataccgcctccagacaaagccttgcatgtcaccgaacgcaagtacttaaagagagactggtgtaaaacacagccgctcaaacaaaccatccatgaagagggctgcaattcacgtactatcataaatagattctgctatggtcagtgtaacagcttctacatacctaggcatatccggaaggaagagggcagttttcagtcctgttcgttctgcaaacctaaaaagtttacaactatgatggtaacactcaattgcccggaactgcagccacctacaaagaagaagcgtgtcacaagagtaaagcagtgtagatgtatttctatcgatttagactag

SEQ ID NO: 73304 - DNA, 432 bp, Artificial Sequence
  derived and/or modified sequence
atgagtcgtactgcttataccgtcggcgcccttttgctcctgctggggactttgctgccagccgccgagggcaaaaagaagggcagccaaggtgccatccctcctcctgacaaggctcttcatgtcacagagcgaaagtacctgaaacgagactggtgtaaaacccagccactgaagcagactattcacgaggaaggctgcaatagccgaaccatcatcaatcggttctgctatggccagtgcaactcattttatattccgcggcacattagaaaggaggaaggttcttttcagtcatgcagtttctgcaagcctaaaaaatttactaccatgatggtgactctcaattgccccgagctgcagccgcccaccaaaaaaaagcgcgtgacacgagtgaagcaatgtcgctgtatttccatcgacctggactag

SEQ ID NO: 73305 - DNA, 3026 bp, Artificial Sequence
  derived and/or modified sequence
atgagccgcacagcctacacggtgggagccctgcttctcctcttggggaccctgctgccggctgctgaagggaaaaagaaagggtcccaaggtgccatccccccgccagacaaggccctgcatgtgacggagcgcaaatacctgaagcgagactggtgcaaaacccagccgcttaagcagaccatccacgaggaaggctgcaacagtcgcaccatcatcaaccgcttctgttacggccagtgcaactctttctacatccccaggcacatccggaaggaggaaggttcctttcagtcctgctccttctgcaagcccaagaaattcactaccatgatggtcacactcaactgccctgaactacagccacctaccaagaagaagagagtcacacgtgtgaagcagtgtcgttgcatatccatcgatttggattaagccaaatccaggtgcacccagcatgtcctaggaatgcagccccaggaagtcccagacctaaaacaaccagattcttacttggcttaaacctagaggccagaagaacccccagctgcctcctggcaggagcctgcttgtgcgtagttcgtgtgcatgagtgtggatgggtgcctgtgggtgtttttagacaccagagaaaacacagtctctgctagagagcactccctattttgtaaacatatctgctttaatggggatgtaccagaaacccacctcaccccggctcacatctaaaggggcggggccgtggtctggttctgactttgtgtttttgtgccctcctggggaccagaatctcctttcggaatgaatgttcatggaagaggctcctctgagggcaagagacctgttttagtgctgcattcgacatggaaaagtccttttaacctgtgcttgcatcctcctttcctcctcctcctcacaatccatctcttcttaagttgatagtgactatgtcagtctaatctcttgtttgccaaggttcctaaattaattcacttaaccatgatgcaaatgtttttcattttgtgaagaccctccagactctgggagaggctggtgtgggcaaggacaagcaggatagtggagtgagaaagggagggtggagggtgaggccaaatcaggtccagcaaaagtcagtagggacattgcagaagcttgaaaggccaataccagaacacaggctgatgcttctgagaaagtcttttcctagtatttaacagaacccaagtgaacagaggagaaatgagattgccagaaagtgattaactttggccgttgcaatctgctcaaacctaacaccaaactgaaaacataaatactgaccactcctatgttcggacccaagcaagttagctaaaccaaaccaactcctctgctttgtccctcaggtggaaaagagaggtagtttagaactctctgcataggggtgggaattaatcaaaaacctcagaggctgaaattcctaatacctttcctttatcgtggttatagtcagctcatttccattccactatttcccataatgcttctgagagccactaacttgattgataaagatcctgcctctgctgagtgtacctgacagtagtctaagatgagagagtttagggactactctgttttagcaagagatattttgggggtctttttgttttaactattgtcaggagattgggctaaagagaagacgacgagagtaaggaaataaagggaattgcctctggctagagagtagttaggtgttaatacctggtagagatgtaagggatatgacctccctttctttatgtgctcactgaggatctgaggggaccctgttaggagagcatagcatcatgatgtattagctgttcatctgctactggttggatggacataactattgtaactattcagtatttactggtaggcactgtcctctgattaaacttggcctactggcaatggctacttaggattgatctaagggccaaagtgcagggtgggtgaactttattgtactttggatttggttaacctgttttcttcaagcctgaggttttatatacaaactccctgaatactctttttgccttgtatcttctcagcctcctagccaagtcctatgtaatatggaaaacaaacactgcagacttgagattcagttgccgatcaaggctctggcattcagagaacccttgcaactcgagaagctgtttttatttcgtttttgttttgatccagtgctctcccatctaacaactaaacaggagccatttcaaggcgggagatattttaaacacccaaaatgttgggtctgattttcaaacttttaaactcactactgatgattctcacgctaggcgaatttgtccaaacacatagtgtgtgtgttttgtatacactgtatgaccccaccccaaatctttgtattgtccacattctccaacaataaagcacagagtggatttaattaagcacacaaatgctaaggcagaattttgagggtgggagagaagaaaagggaaagaagctgaaaatgtaaaaccacaccagggaggaaaaatgacattcagaaccagcaaacactgaatttctcttgttgttttaactctgccacaagaatgcaatttcgttaacggagatgacttaagttggcagcagtaatcttcttttaggagcttgtaccacagtcttgcacataagtgcagatttggctcaagtaaagagaatttcctcaacactaacttcactgggataatcagcagcgtaactaccctaaaagcatatcactagccaaagagggaaatatctgttcttcttactgtgcctatattaagactagtacaaatgtggtgtgtcttccaactttcattgaaaatgccatatctataccatattttattcgagtcactgatgatgtaatgatatattttttcattattatagtagaatatttttatggcaagatatttgtggtcttgatcatacctattaaaataatgccaaacaccaaatatgaattttatgatgtacactttgtgcttggcatt

SEQ ID NO: 73306 - DNA, 432 bp, Artificial Sequence
  derived and/or modified sequence
atgagcaggacagcctacacagtgggcgccctgctgctgctgctgggcaccctgctgcctgctgctgagggcaagaagaagggcagccagggcgccatccccccaccagacaaggccctgcacgtgacagagaggaagtacctgaagagggactggtgcaagacccagcccctgaagcagaccatccacgaggagggctgcaacagcaggaccatcatcaaccgcttctgctacggccagtgcaacagcttctacatccccaggcacatcaggaaggaggagggcagcttccagagctgcagcttctgcaagcccaagaagttcaccaccatgatggtgaccctgaactgcccagagctgcagccccccaccaagaagaagagggtgaccagggtgaagcagtgccgctgcatcagcattgacctggactag

SEQ ID NO: 73307 - DNA, 432 bp, Artificial Sequence
  derived and/or modified sequence
atgagccggaccgcctacaccgtgggcgccctgctgctgctgctggggaccctcctgccagccgctgaagggaagaagaaaggatctcagggcgctattcctccccctgataaggccctgcatgtcaccgagcgcaagtacctgaaaagggactggtgcaagacgcaaccactcaagcagaccattcatgaagagggctgtaacagtcggacgataataaaccgcttctgttatggacagtgcaacagcttctacattcctaggcacatcagaaaggaggaggggtcctttcagagctgctcattttgcaagcccaaaaagttcaccacaatgatggtgactttgaattgccctgaactgcagccccccaccaaaaagaagagagtaacacgagtaaagcagtgcaggtgtatcagcatcgacctagattag

SEQ ID NO: 73308 - DNA, 432 bp, Artificial Sequence
  derived and/or modified sequence
atgagccggaccgcctacaccgtgggcgccctgctgctgctgctgggcactctgctacccgcagccgaaggaaagaagaaggggtcccagggcgcaatcccacctcccgataaggccctgcatgtcaccgaaaggaagtacctcaaaagggattggtgcaaaacacagcctttaaagcagactattcacgaagaggggtgtaactccaggacaatcattaacaggttttgttacggccaatgcaactcattctatatccccaggcacatccgaaaggaagaagggtcattccaatcctgctctttttgcaagcccaagaagttcacgaccatgatggtcacgctcaactgccccgagctccagcctccaacaaagaaaaagcgcgtgacacgggtgaagcagtgtcgctgtattagcatcgacttggattag

SEQ ID NO: 73309 - DNA, 432 bp, Artificial Sequence
  derived and/or modified sequence
atgtctcgtacagcctacacggtcggggcactgctattgctcctgggaacgttgctgccagctgctgaaggaaaaaagaagggttctcagggtgccattcccccaccagacaaggccctccatgttactgagcgcaagtatctcaagcgggattggtgcaaaacacagcccctcaagcagaccatccacgaagaggggtgcaacagtcgcactatcattaacagattttgctatggacagtgtaacagtttctatatacccaggcatataaggaaagaagagggaagcttccagagttgttccttctgcaagcccaaaaagttcacaaccatgatggtgacactgaattgtcccgaactgcagccaccaaccaagaagaaaagggtaacccgggtgaagcaatgtcggtgtatcagtattgacctggactag

SEQ ID NO: 73310 - DNA, 432 bp, Artificial Sequence
  derived and/or modified sequence
atgtctcgcactgcatacactgtgggagcgcttctgctgttgctaggtacattactgcccgcagctgaaggcaaaaagaagggcagccagggcgctatcccaccgcctgacaaggccctccacgtaaccgaaagaaagtatttgaaacgggactggtgcaaaacacagccactgaagcaaaccatacacgaggaaggctgtaattcacgtacaatcattaaccggttctgctatggacagtgtaattctttctacatcccacgacatattcggaaagaagaagggtcatttcagtcttgtagcttctgtaaacctaagaaatttactacaatgatggtcaccctgaactgccctgagctgcagcccccaacgaaaaagaaacgggtcactcgcgttaagcagtgtagatgcatctcaattgacttggattag

SEQ ID NO: 73311 - DNA, 432 bp, Artificial Sequence
  derived and/or modified sequence
atgtctcgtacggcctatacagtcggcgcccttcttctgctccttggtaccttactccctgcggccgaaggcaaaaaaaagggcagtcagggcgctatccctccaccagataaggcattacacgtcactgaaaggaagtatctgaagagagattggtgcaagacccagccactcaaacagactatacatgaagaaggatgcaattcacgcacaattattaataggttctgttacggacagtgtaatagcttctatataccacgccacatcagaaaagaggaggggagtttccagtcctgctccttttgcaagcccaaaaaattcacaactatgatggttaccctgaattgtccagaactacagcctccaactaagaaaaagagagtgactcgggtgaaacagtgcaggtgcatctccattgatctcgactag

SEQ ID NO: 73312 - DNA, 432 bp, Artificial Sequence
  derived and/or modified sequence
atgtccagaacggcatacacagtcggggccctcctattgctgttaggaaccctgctccccgctgctgaaggaaagaagaagggctctcagggcgctatacctccacccgacaaagcgctccatgtgacggagcggaaataccttaagcgagattggtgcaagacccagccacttaaacagaccatccacgaggagggttgcaattcccgcactattatcaaccgattttgctacggacagtgtaactccttctacatacctaggcacattcggaaagaggaaggatctttccagtcctgctcattctgtaagcccaaaaagttcacaacaatgatggtgaccctcaactgtcccgaactgcagccacccacaaagaagaaaagagtgactcgcgtgaagcagtgtagatgcatcagtatcgatttagattag

SEQ ID NO: 73313 - DNA, 432 bp, Artificial Sequence
  derived and/or modified sequence
atgtcacgcacagcatatacagtgggagctttgctgctcctgctgggtactctgcttcccgccgcagaaggcaaaaagaagggatcccaaggcgctatacccccccccgacaaggccctacatgtgactgaacgcaaatatttgaagagggactggtgcaaaacacagccgttgaaacaaacaatacacgaggagggctgcaactcccgcaccattatcaacagattttgctacggccagtgcaactctttctacattcccaggcatatacggaaggaagaaggttcttttcaatcttgctccttctgtaaacctaagaaatttacaactatgatggttaccttaaattgccccgaactgcagccaccaaccaagaagaagcgtgtcacaagggttaaacaatgtcgctgtatctctattgatttagactag

SEQ ID NO: 73314 - RNA, 432 nt, Artificial Sequence
  derived and/or modified sequence
augucucguacggccuauacagucggcgcccuucuucugcuccuugguaccuuacucccugcggccgaaggcaaaaaaaagggcagucagggcgcuaucccuccaccagauaaggcauuacacgucacugaaaggaaguaucugaagagagauuggugcaagacccagccacucaaacagacuauacaugaagaaggaugcaauucacgcacaauuauuaauagguucuguuacggacaguguaauagcuucuauauaccacgccacaucagaaaagaggaggggaguuuccaguccugcuccuuuugcaagcccaaaaaauucacaacuaugaugguuacccugaauuguccagaacuacagccuccaacuaagaaaaagagagugacucgggugaaacagugcaggugcaucuccauugaucucgacuag

SEQ ID NO: 73315 - RNA, 432 nt, Artificial Sequence
  derived and/or modified sequence
auguccagaacggcauacacagucggggcccuccuauugcuguuaggaacccugcuccccgcugcugaaggaaagaagaagggcucucagggcgcuauaccuccacccgacaaagcgcuccaugugacggagcggaaauaccuuaagcgagauuggugcaagacccagccacuuaaacagaccauccacgaggaggguugcaauucccgcacuauuaucaaccgauuuugcuacggacaguguaacuccuucuacauaccuaggcacauucggaaagaggaaggaucuuuccaguccugcucauucuguaagcccaaaaaguucacaacaaugauggugacccucaacugucccgaacugcagccacccacaaagaagaaaagagugacucgcgugaagcaguguagaugcaucaguaucgauuuagauuag

SEQ ID NO: 73316 - RNA, 432 nt, Artificial Sequence
  derived and/or modified sequence
augucacgcacagcauauacagugggagcuuugcugcuccugcuggguacucugcuucccgccgcagaaggcaaaaagaagggaucccaaggcgcuauacccccccccgacaaggcccuacaugugacugaacgcaaauauuugaagagggacuggugcaaaacacagccguugaaacaaacaauacacgaggagggcugcaacucccgcaccauuaucaacagauuuugcuacggccagugcaacucuuucuacauucccaggcauauacggaaggaagaagguucuuuucaaucuugcuccuucuguaaaccuaagaaauuuacaacuaugaugguuaccuuaaauugccccgaacugcagccaccaaccaagaagaagcgugucacaaggguuaaacaaugucgcuguaucucuauugauuuagacuag

SEQ ID NO: 73317 - protein, 211 aa, Artificial Sequence
  derived and/or modified sequence
MASGQGPGPPRQECGEPALPSASEEQVAQDTEEVFRSYVFYRHQQEQEAEGVAAPADPEMVTLPLQPSSTMGQVGRQLAIIGDDINRRYDSEFQTMLQHLQPTAENAYEYFTKIATSLFESGINWGRVVALLGFGYRLALHVYQHGLTGFLGQVTRFVVDFMLHHCIARWIAQRGGWVAALNLGNGPILNVLVVLGVVLLGQFVVRRFFKS

SEQ ID NO: 73318 - protein, 191 aa, Artificial Sequence
  derived and/or modified sequence
MASGQGPGPPRQECGEPALPSASEEQVAQDTEEVFRSYVFYRHQQQPSSTMGQVGRQLAIIGDDINRRYDSEFQTMLQHLQPTAENAYEYFTKIATSLFESGINWGRVVALLGFGYRLALHVYQHGLTGFLGQVTRFVVDFMLHHCIARWIAQRGGWVAALNLGNGPILNVLVVLGVVLLGQFVVRRFFKS

SEQ ID NO: 73319 - protein, 153 aa, Artificial Sequence
  derived and/or modified sequence
MASGQGPGPPRQECGEPALPSASEEQVAQDTEEVFRSYVFYRHQQEQEAEGVAAPADPEMVTLPLQPSSTMGQVGRQLAIIGDDINRRYDSEFQTMLQHLQPTAENAYEYFTKIATRPAATPTACLRVASIGAVWWLFWASATVWPYTSTSMA

SEQ ID NO: 73320 - DNA, 636 bp, Artificial Sequence
  derived and/or modified sequence
atggccagcggacaggggccaggtccgccaaggcaggagtgcggcgagccggcactgccttctgccagtgaggagcaggtggcgcaagataccgaggaggtgttccgtagctatgtgttttaccggcatcagcaggaacaggaagccgaaggggtggccgcacctgcagacccggaaatggtgacgctgccccttcagccctcttcaactatgggccaagtgggacgtcagctcgctattataggggacgatattaaccggagatacgatagcgaattccagactatgctgcagcatctgcagccaacagcggagaatgcttacgaatactttacaaaaattgccacttccctgtttgaaagcgggataaattggggccgagtggttgctctgctgggatttgggtaccggctcgcccttcatgtctaccagcatggactgaccggcttcctcgggcaggttacccgttttgtggtggatttcatgctccatcactgcatcgccaggtggatcgcccagaggggagggtgggttgctgccctgaacctggggaatggaccaatcctgaatgtcttggttgtgttgggggtagtactgttgggccaatttgtggtgaggcggttcttcaaaagttag

SEQ ID NO: 73321 - DNA, 576 bp, Artificial Sequence
  derived and/or modified sequence
atggcctcggggcagggaccaggtccacctcggcaggagtgtggagaaccagcgctgccctctgcttctgaggagcaggtagcccaggacacagaagaggtttttcggagttacgtgttctaccgccaccagcagcaaccgtcctctactatgggccaggtgggccggcagctggccattataggtgatgatataaataggagatatgactctgagtttcagacaatgctgcaacacctacagcccacagccgagaacgcttatgaatacttcaccaagattgctaccagtctgttcgaatctggaataaattggggccgggtggtcgctctgctcggcttcggatatagacttgcactccacgtgtaccaacacgggttgacgggctttctgggacaggtgacccggttcgtggtggacttcatgcttcatcattgcatcgctcgttggatagcccaacggggcggctgggtcgccgcattgaatttagggaacggccctattctgaacgtgctggttgtactgggggtggtgctcttggggcaattcgtagtgaggaggtttttcaagagttag

SEQ ID NO: 73322 - DNA, 636 bp, Artificial Sequence
  derived and/or modified sequence
atggcttcaggtcagggcccggggcctccccgacaggaatgcggggagcctgcccttccatccgcttctgaggagcaggtggcccaagataccgaggaagtttttcgatcttatgtgttctatcggcatcagcaagaacaggaagcagagggagtggccgctcccgcggatcctgagatggtgacacttcctctgcaaccatcatctactatgggccaggtggggcggcaattggcgattatcggagacgatatcaatcggaggtacgactcagaatttcagacaatgctgcaacatctgcagcctactgcggaaaacgcatatgaatattttaccaaaattgctaccagcctgttcgagtcaggcatcaattgggggcgcgtggttgccctgttaggctttggctacagacttgccctgcacgtgtaccaacacggcctcactgggtttctggggcaggttacccgtttcgttgtagacttcatgctgcaccactgcatcgcacgctggatcgcccagcgaggaggttgggttgcagctcttaatcttggaaacggccctattcttaatgtgttggtggtcttaggcgtggtgctgctggggcagtttgttgtgcgacgtttcttcaagtcttag

SEQ ID NO: 73323 - DNA, 462 bp, Artificial Sequence
  derived and/or modified sequence
atggctagcggccagggccccggccccccgagacaggagtgcggagagcccgcgctgcctagcgcatccgaggaacaggttgctcaggatactgaagaagtgttccggtcttacgttttctatcggcaccaacaggaacaggaagcagagggtgtcgccgcgcccgctgaccctgaaatggtgacattgcccctccagccctccagtacaatgggtcaagtgggccggcagctggctattatcggggatgatattaataggagatacgacagcgagttccagaccatgctgcagcatctccagcctacggctgagaacgcttacgagtatttcacgaagatcgccacaagacctgctgccactcccaccgcctgcctgcgggtggcaagcatcggagccgtctggtggttattttgggcctctgctaccgtgtggccctatactagcacttctatggcctag

SEQ ID NO: 73324 - DNA, 636 bp, Artificial Sequence
  derived and/or modified sequence
atggccagcggccagggccctggccccccccggcaggagtgtggggagcccgccctgcccagcgccagcgaggagcaggtggcccaggacacagaggaggtgttccgctcctatgtgttctaccgccaccagcaggagcaggaggccgagggcgtggccgccccagctgaccctgagatggtgaccctgcccctgcagcccagcagcaccatgggccaggtgggccggcagctggccatcattggagatgacatcaacagaagatatgattctgagttccagaccatgctgcagcacctgcagcccacagcagaaaatgcctatgagtacttcaccaagatcgccaccagcctgtttgaaagtggcatcaactggggccgggtggtggccctgctgggcttcggctaccgcctggccctgcacgtgtaccagcacggcctgaccggcttcctgggccaggtgaccaggtttgtggtggacttcatgctgcaccactgcatcgcccgctggatcgcccagagaggaggctgggtggccgccctgaacctgggcaatggccccatcctgaatgtgctggtggtgctgggcgtggtgctgctgggccagtttgtggtgcggcgcttcttcaagagctag

SEQ ID NO: 73325 - DNA, 576 bp, Artificial Sequence
  derived and/or modified sequence
atggccagcggccagggccctggccccccccggcaggagtgtggggagcccgccctgcccagcgccagcgaggagcaggtggcccaggacacagaggaggtgttccgctcctatgtgttctaccgccaccagcagcagcccagcagcaccatgggccaggtgggccggcagctggccatcattggagatgacatcaacagaagatatgattctgagttccagaccatgctgcagcacctgcagcccacagcagaaaatgcctatgagtacttcaccaagatcgccaccagcctgtttgaaagtggcatcaactggggccgggtggtggccctgctgggcttcggctaccgcctggccctgcacgtgtaccagcacggcctgaccggcttcctgggccaggtgaccaggtttgtggtggacttcatgctgcaccactgcatcgcccgctggatcgcccagagaggaggctgggtggccgccctgaacctgggcaatggccccatcctgaatgtgctggtggtgctgggcgtggtgctgctgggccagtttgtggtgcggcgcttcttcaagagctag

SEQ ID NO: 73326 - DNA, 462 bp, Artificial Sequence
  derived and/or modified sequence
atggccagcggccagggccctggccccccccggcaggagtgtggggagcccgccctgcccagcgccagcgaggagcaggtggcccaggacacagaggaggtgttccgctcctatgtgttctaccgccaccagcaggagcaggaggccgagggcgtggccgccccagctgaccctgagatggtgaccctgcccctgcagcccagcagcaccatgggccaggtgggccggcagctggccatcattggagatgacatcaacagaagatatgattctgagttccagaccatgctgcagcacctgcagcccacagcagaaaatgcctatgagtacttcaccaagatcgccaccaggcctgctgccacccccacagcctgcctgcgggtggccagcattggagctgtgtggtggctgttctgggccagcgccaccgtgtggccctacaccagcacctccatggcctag

SEQ ID NO: 73327 - DNA, 636 bp, Artificial Sequence
  derived and/or modified sequence
atggccagcggccagggccccggccccccccggcaggagtgcggcgaacccgcattgccttccgccagcgaagaacaggtagctcaagataccgaagaggtttttagatcgtacgtattctacaggcaccagcaggaacaggaagctgaaggcgttgccgcgcctgctgacccagagatggttacgctgccacttcagccttcatcaacgatgggccaggtcggtcgccaactcgctatcatcggggacgacatcaataggcgctatgattccgagttccaaacgatgcttcagcatctgcagcccaccgcggagaatgcctacgagtacttcacaaaaatagccaccagcctcttcgagtcgggtataaactggggcagagtcgtggctttattaggctttggataccgattggccctgcacgtttaccagcatggcctgacaggctttcttggccaggtcacacgcttcgtggttgacttcatgttgcatcactgcatagccagatggattgcacagagaggcgggtgggtagcggctctgaatctgggtaacggcccaatcctcaacgtactcgttgtgctgggcgtcgtgttgcttggccagttcgtggtccggcgattcttcaagtcctag

SEQ ID NO: 73328 - DNA, 576 bp, Artificial Sequence
  derived and/or modified sequence
atggccagcggccagggccccggccccccccggcaggagtgcggcgagccagcactgcctagcgctagcgaggagcaagtagcccaagatactgaagaagtgtttaggtcctatgtgttctaccgccaccagcagcagccttcatctaccatgggccaggtgggacggcaattagccatcattggtgacgacatcaatcggcggtatgactccgaattccagactatgctgcaacatttgcagcccaccgccgagaacgcatacgagtattttactaaaattgctacaagcctgtttgaatccggaataaactggggacgagtggtggctctgctgggcttcggctaccggctggcgcttcatgtgtaccaacacggcttgaccggctttctgggccaggtgacgcgtttcgtcgtggattttatgttgcatcactgtattgcgaggtggatcgcccaaagaggcggatgggtcgctgctctgaacctgggaaatggaccgattctcaacgtgttggtggtgcttggggttgttttgctgggacagttcgtagtccggcgcttcttcaagtcctag

SEQ ID NO: 73329 - DNA, 636 bp, Artificial Sequence
  derived and/or modified sequence
atggccagcggccagggccccggccccccccggcaggagtgcggcgaaccggcccttccaagcgcctcagaggagcaggtcgcccaggataccgaggaagtttttcggtcgtacgtgttctacaggcaccagcaggagcaagaagccgaaggcgtggccgcaccagctgatcccgagatggttaccctgccgttacagcctagtagtacgatggggcaggtcgggcgccagctcgccataatcggggatgatatcaaccggcgttatgattctgaattccagaccatgctgcagcatttgcaaccaaccgccgaaaatgcctacgagtacttcaccaaaatagctacctcactgttcgaatcgggcatcaattggggacgtgtggtagctttacttgggttcggttaccggttggctctccacgtctatcagcacggcctcacaggcttcctggggcaagtaacgcgattcgttgtggacttcatgcttcaccactgcatcgctcgctggatcgcacagagaggtgggtgggtggccgcactgaatctgggcaacgggcctatcctaaatgtgttagtggtcctcggcgttgtcctcttgggccagttcgtggtgcggcggttcttcaaatcatag

SEQ ID NO: 73330 - DNA, 462 bp, Artificial Sequence
  derived and/or modified sequence
atggccagcggccagggccccggccccccccggcaggagtgcggcgaacccgccctacccagcgcgtccgaagaacaggtggctcaggacacagaagaagtgttccgatcctacgtgttttatcggcaccaacaagaacaagaagccgaaggcgtggcagcccctgcggacccagaaatggtcactttgcctctccagccgagtagtaccatgggccaagtcggccggcaactcgccataattggggatgatataaacagaagatacgattccgaattccaaacaatgctacagcacctgcagcccactgcggaaaatgcgtatgagtatttcaccaagattgcgactcgtcccgccgccactcctaccgcctgtcttagggtcgcctcaatcggagctgtatggtggctgttctgggccagtgctactgtgtggccatatacatcaacaagcatggcatag

SEQ ID NO: 73331 - DNA, 636 bp, Artificial Sequence
  derived and/or modified sequence
atggcttcagggcagggacctggtccgcctaggcaggagtgcggcgagcctgctctcccttcggcttccgaagaacaagtcgcacaagatacagaagaagtttttcgctcttatgtgttttacagacaccagcaggaacaggaagcggagggagtggctgctccagctgaccccgaaatggtcaccttgcctctgcagccaagctccacaatgggccaggtcggcagacagctggcgattattggcgacgatataaatcggcgttacgacagtgaattccaaacaatgctgcagcacctgcagcctacagctgagaatgcatacgagtactttaccaaaatcgcaacatcattgtttgaatctgggatcaattggggaagggtggttgccctcctgggcttcggctacagactagccctgcacgtgtaccagcacggattaaccgggttcctggggcaggtcactcggtttgtggttgacttcatgcttcaccattgcatcgcacgttggatcgctcagagaggaggctgggttgccgcattaaacctcggaaacggcccaatcctaaacgtattggtagtgcttggggtggttcttctgggtcagttcgtagtgcggagattttttaaatcttag

SEQ ID NO: 73332 - DNA, 576 bp, Artificial Sequence
  derived and/or modified sequence
atggccagcggacagggacccggtcctcccagacaggaatgcggtgaacctgctctgccgtcggcttctgaggaacaagtggcccaagacacagaagaggtcttccggagctatgttttttatagacaccagcagcagcccagttctacgatgggccaggttggccgacagttggctataattggcgacgatatcaatcggagatatgactcagaatttcagacaatgctgcaacatttacaacccacagccgagaatgcttacgagtatttcacgaaaatcgccacgtctttattcgagagcggtattaactggggcagagtcgtcgctctccttggattcggctaccggctcgctctgcatgtctatcagcacggactgacaggatttctgggtcaggttactaggttcgttgttgactttatgcttcaccactgcatcgccagatggatcgctcagaggggaggttgggtcgccgcattgaatttaggcaatggaccaatcctgaacgtcctggtagtcttaggagtggtgcttctgggtcagtttgtagtaagacgtttctttaaatcctag

SEQ ID NO: 73333 - DNA, 636 bp, Artificial Sequence
  derived and/or modified sequence
atggccagtggacagggacccggtccgccaagacaggagtgtggagagccggcactgccatctgctagtgaggaacaggtggcccaggacaccgaggaagtttttagatcctacgtgttttataggcatcagcaggaacaggaggccgaaggggtcgcagctcccgcagaccccgaaatggttaccctacccctgcagccctcatcaacaatggggcaggtgggacggcagctcgctatcataggtgacgacatcaataggcggtacgactccgagtttcagactatgcttcagcacctccaacccacagcagagaacgcatatgagtactttactaaaattgcgaccagcctgtttgagagcgggattaattggggcagagtcgtggctcttctcggcttcggttaccgcttggcactgcacgtttatcagcatggtctgactggatttctggggcaagttacaaggtttgtcgtcgactttatgctgcaccactgtatagcccgttggatcgcacagcggggaggttgggttgccgctctgaacctgggcaacggcccaatcttgaatgtgctggttgtgctcggggtggtactcctgggccagttcgtcgtgcgcaggttttttaagtcctag

SEQ ID NO: 73334 - DNA, 462 bp, Artificial Sequence
  derived and/or modified sequence
atggcaagtgggcagggccctggtccacccagacaggagtgtggcgaacctgccttgccatctgcatctgaagagcaggtagcccaggataccgaagaggtgtttcggtcttatgtgttctatcgccaccaacaggagcaggaggccgaaggggtcgctgcacccgcagatccggagatggtgaccctgccactacagccatcctccaccatgggccaggttggcagacagctcgcaattatcggggatgatattaatcggcgatacgacagtgaattccaaaccatgttgcagcacctgcagccaactgctgagaatgcttacgagtacttcacgaaaattgcaacccgcccagccgcaactccaacagcgtgcctcagggtggcttctattggtgccgtttggtggttgttttgggcttccgccacggtttggccttacaccagcacctcaatggcttag

SEQ ID NO: 73335 - DNA, 1321 bp, Artificial Sequence
  derived and/or modified sequence
atgatcactggagtctcgcgggtccctcgggctgcacagggacaagtaaaggctacatccagatgccgggaatgcactgacgcccattcctggaaactgggctcccactcagcccctgggagcagcagccgccagcccctcgggacctccatctccaccctgctgagccacccgggttgggccaggatcccggcagacttcactgggacccatgctggagtaagaataaaaagtcccagaggaggccaggcacggtggctcacacctgtaatcccagcactgtggatggccgaggcagactcacgaggctgatcccgtcctccactgagacctgaaaaatggcttcggggcaaggcccaggtcctcccaggcaggagtgcggagagcctgccctgccctctgcttctgaggagcaggtagcccaggacacagaggaggttttccgcagctacgttttttaccgccatcagcaggaacaggaggctgaaggggtggctgcccctgccgacccagagatggtcaccttacctctgcaacctagcagcaccatggggcaggtgggacggcagctcgccatcatcggggacgacatcaaccgacgctatgactcagagttccagaccatgttgcagcacctgcagcccacggcagagaatgcctatgagtacttcaccaagattgccaccagcctgtttgagagtggcatcaattggggccgtgtggtggctcttctgggcttcggctaccgtctggccctacacgtctaccagcatggcctgactggcttcctaggccaggtgacccgcttcgtggtcgacttcatgctgcatcactgcattgcccggtggattgcacagaggggtggctgggtggcagccctgaacttgggcaatggtcccatcctgaacgtgctggtggttctgggtgtggttctgttgggccagtttgtggtacgaagattcttcaaatcatgactcccaagggtgccctttggggtcccggttcagacccctgcctggacttaagcgaagtctttgccttctctgttcccttgcaggggtcccccctcaagagtacagaagctttagcaagtgtgcactccagcttcggagggcccctgcgtgggggccagtcaggctgcagaggcacctcaacattgcatggtgctagtgggccctctctctgggcccaggggctgtggccgtctcctccctcagctctctgggacctccttagccctgtctgctaggcgctggggagactgataacttggggaggcaagagactgggagccacttctccccagaaagtgtttaacggt

SEQ ID NO: 73336 - DNA, 2132 bp, Artificial Sequence
  derived and/or modified sequence
gtctgcatccggtggccacagagcaacttcctctagagggagctgattggagccgggtgccgctggcacctctatgatcactggagtctcgcgggtccctcgggctgcacagggacaagtaaaggctacatccagatgccgggaatgcactgacgcccattcctggaaactgggctcccactcagcccctgggagcagcagccgccagcccctcgggacctccatctccaccctgctgagccacccgggttgggccaggatcccggcaggctgatcccgtcctccactgagacctgaaaaatggcttcggggcaaggcccaggtcctcccaggcaggagtgcggagagcctgccctgccctctgcttctgaggagcaggtagcccaggacacagaggaggttttccgcagctacgttttttaccgccatcagcagcaacctagcagcaccatggggcaggtgggacggcagctcgccatcatcggggacgacatcaaccgacgctatgactcagagttccagaccatgttgcagcacctgcagcccacggcagagaatgcctatgagtacttcaccaagattgccaccagcctgtttgagagtggcatcaattggggccgtgtggtggctcttctgggcttcggctaccgtctggccctacacgtctaccagcatggcctgactggcttcctaggccaggtgacccgcttcgtggtcgacttcatgctgcatcactgcattgcccggtggattgcacagaggggtggctgggtggcagccctgaacttgggcaatggtcccatcctgaacgtgctggtggttctgggtgtggttctgttgggccagtttgtggtacgaagattcttcaaatcatgactcccaagggtgccctttggggtcccggttcagacccctgcctggacttaagcgaagtctttgccttctctgttcccttgcaggggtcccccctcaagagtacagaagctttagcaagtgtgcactccagcttcggagggcccctgcgtgggggccagtcaggctgcagaggcacctcaacattgcatggtgctagtgggccctctctctgggcccaggggctgtggccgtctcctccctcagctctctgggacctccttagccctgtctgctaggcgctggggagactgataacttggggaggcaagagactgggagccacttctccccagaaagtgtttaacggttttagctttttataatacccttgtgagagcccattcccaccattctacctgaggccaggacgtctggggtgtggggattggtgggtctatgttccccaggattcagctattctggaagatcagcaccctaagagatgggactaggacctgagcctggtcctggccgtccctaagcatgtgtcccaggagcaggacctactaggagaggggggccaaggtcctgctcaactctacccctgctcccattcctccctccggccatactgcctttgcagttggactctcagggattctgggcttggggtgtggggtggggtggagtcgcagaccagagctgtctgaactcacgtgtcagaagcctccaagcctgcctcccaaggtcctctcagttctctcccttcctctctccttatagacacttgctcccaacccattcactacaggtgaaggctctcacccccatccctgggggccttgggtgagtggcctgctaaggctcctccttgcccagactacagggcttaggacttggtttgttatatcagggaaaaggagtagggagttcatctggagggttctaagtgggagaaggactatcaacaccactaggaatcccagaggtgggatcctccctcatggctctggcacagtgtaatccaggggtgtagatgggggaactgtgaatacttgaactctgttcccccaccctccatgctcctcacctgtctaggtctcctcagggtggggggtgacagtgccttctctattgggcacagcctagggtcttgggggtcaggggggagaagttcttgattcagccaaatgcagggaggggaggcagatggagcccataggccaccccctatcctctgagtgtttggaaataaactgtgcaatcccctcaccctg

SEQ ID NO: 73337 - DNA, 2136 bp, Artificial Sequence
  derived and/or modified sequence
gccgggtgccgctggcacctctatgatcactggagtctcgcgggtccctcgggctgcacagggacaagtaaaggctacatccagatgccgggaatgcactgacgcccattcctggaaactgggctcccactcagcccctgggagcagcagccgccagcccctcgggacctccatctccaccctgctgagccacccgggttgggccaggatcccggcaggctgatcccgtcctccactgagacctgaaaaatggcttcggggcaaggcccaggtcctcccaggcaggagtgcggagagcctgccctgccctctgcttctgaggagcaggtagcccaggacacagaggaggttttccgcagctacgttttttaccgccatcagcaggaacaggaggctgaaggggtggctgcccctgccgacccagagatggtcaccttacctctgcaacctagcagcaccatggggcaggtgggacggcagctcgccatcatcggggacgacatcaaccgacgctatgactcagagttccagaccatgttgcagcacctgcagcccacggcagagaatgcctatgagtacttcaccaagattgccaccagcctgtttgagagtggcatcaattggggccgtgtggtggctcttctgggcttcggctaccgtctggccctacacgtctaccagcatggcctgactggcttcctaggccaggtgacccgcttcgtggtcgacttcatgctgcatcactgcattgcccggtggattgcacagaggggtggctgggtggcagccctgaacttgggcaatggtcccatcctgaacgtgctggtggttctgggtgtggttctgttgggccagtttgtggtacgaagattcttcaaatcatgactcccaagggtgccctttggggtcccggttcagacccctgcctggacttaagcgaagtctttgccttctctgttcccttgcaggggtcccccctcaagagtacagaagctttagcaagtgtgcactccagcttcggagggcccctgcgtgggggccagtcaggctgcagaggcacctcaacattgcatggtgctagtgggccctctctctgggcccaggggctgtggccgtctcctccctcagctctctgggacctccttagccctgtctgctaggcgctggggagactgataacttggggaggcaagagactgggagccacttctccccagaaagtgtttaacggttttagctttttataatacccttgtgagagcccattcccaccattctacctgaggccaggacgtctggggtgtggggattggtgggtctatgttccccaggattcagctattctggaagatcagcaccctaagagatgggactaggacctgagcctggtcctggccgtccctaagcatgtgtcccaggagcaggacctactaggagaggggggccaaggtcctgctcaactctacccctgctcccattcctccctccggccatactgcctttgcagttggactctcagggattctgggcttggggtgtggggtggggtggagtcgcagaccagagctgtctgaactcacgtgtcagaagcctccaagcctgcctcccaaggtcctctcagttctctcccttcctctctccttatagacacttgctcccaacccattcactacaggtgaaggctctcacccccatccctgggggccttgggtgagtggcctgctaaggctcctccttgcccagactacagggcttaggacttggtttgttatatcagggaaaaggagtagggagttcatctggagggttctaagtgggagaaggactatcaacaccactaggaatcccagaggtgggatcctccctcatggctctggcacagtgtaatccaggggtgtagatgggggaactgtgaatacttgaactctgttcccccaccctccatgctcctcacctgtctaggtctcctcagggtggggggtgacagtgccttctctattgggcacagcctagggtcttgggggtcaggggggagaagttcttgattcagccaaatgcagggaggggaggcagatggagcccataggccaccccctatcctctgagtgtttggaaataaactgtgcaatcccctca

SEQ ID NO: 73338 - DNA, 2117 bp, Artificial Sequence
  derived and/or modified sequence
cgcgggtccctcgggctgcacagggacaagtaaaggctacatccagatgccgggaatgcactgacgcccattcctggaaactgggctcccactcagcccctgggagcagcagccgccagcccctcgggacctccatctccaccctgctgagccacccgggttgggccaggatcccggcaggctgatcccgtcctccactgagacctgaaaaatggcttcggggcaaggcccaggtcctcccaggcaggagtgcggagagcctgccctgccctctgcttctgaggagcaggtagcccaggacacagaggaggttttccgcagctacgttttttaccgccatcagcaggaacaggaggctgaaggggtggctgcccctgccgacccagagatggtcaccttacctctgcaacctagcagcaccatggggcaggtgggacggcagctcgccatcatcggggacgacatcaaccgacgctatgactcagagttccagaccatgttgcagcacctgcagcccacggcagagaatgcctatgagtacttcaccaagattgccaccaggccagcagcaacacccacagcctgtttgagagtggcatcaattggggccgtgtggtggctcttctgggcttcggctaccgtctggccctacacgtctaccagcatggcctgactggcttcctaggccaggtgacccgcttcgtggtcgacttcatgctgcatcactgcattgcccggtggattgcacagaggggtggctgggtggcagccctgaacttgggcaatggtcccatcctgaacgtgctggtggttctgggtgtggttctgttgggccagtttgtggtacgaagattcttcaaatcatgactcccaagggtgccctttggggtcccggttcagacccctgcctggacttaagcgaagtctttgccttctctgttcccttgcaggggtcccccctcaagagtacagaagctttagcaagtgtgcactccagcttcggagggcccctgcgtgggggccagtcaggctgcagaggcacctcaacattgcatggtgctagtgggccctctctctgggcccaggggctgtggccgtctcctccctcagctctctgggacctccttagccctgtctgctaggcgctggggagactgataacttggggaggcaagagactgggagccacttctccccagaaagtgtttaacggttttagctttttataatacccttgtgagagcccattcccaccattctacctgaggccaggacgtctggggtgtggggattggtgggtctatgttccccaggattcagctattctggaagatcagcaccctaagagatgggactaggacctgagcctggtcctggccgtccctaagcatgtgtcccaggagcaggacctactaggagaggggggccaaggtcctgctcaactctacccctgctcccattcctccctccggccatactgcctttgcagttggactctcagggattctgggcttggggtgtggggtggggtggagtcgcagaccagagctgtctgaactcacgtgtcagaagcctccaagcctgcctcccaaggtcctctcagttctctcccttcctctctccttatagacacttgctcccaacccattcactacaggtgaaggctctcacccccatccctgggggccttgggtgagtggcctgctaaggctcctccttgcccagactacagggcttaggacttggtttgttatatcagggaaaaggagtagggagttcatctggagggttctaagtgggagaaggactatcaacaccactaggaatcccagaggtgggatcctccctcatggctctggcacagtgtaatccaggggtgtagatgggggaactgtgaatacttgaactctgttcccccaccctccatgctcctcacctgtctaggtctcctcagggtggggggtgacagtgccttctctattgggcacagcctagggtcttgggggtcaggggggagaagttcttgattcagccaaatgcagggaggggaggcagatggagcccataggccaccccctatcctctgagtgtttggaaataaactgtgcaatcccctc

SEQ ID NO: 73339 - DNA, 636 bp, Artificial Sequence
  derived and/or modified sequence
atggccagcggccagggccccggcccccccagacaggagtgcggcgagcccgccctgcccagcgccagcgaggagcaggtggcccaggacaccgaggaggtgttcagaagctacgtgttctacagacaccagcaggagcaggaggccgagggcgtggccgcccccgccgaccccgagatggtgaccctgcccctgcagcccagcagcaccatgggccaggtgggcagacagctggccatcatcggcgacgacatcaacagaagatacgacagcgagttccagaccatgctgcagcacctgcagcccaccgccgagaacgcctacgagtacttcaccaagatcgccaccagcctgttcgagagcggcatcaactggggcagagtggtggccctgctgggcttcggctacagactggccctgcacgtgtaccagcacggcctgaccggcttcctgggccaggtgaccagattcgtggtggacttcatgctgcaccactgcatcgccagatggatcgcccagagaggcggctgggtggccgccctgaacctgggcaacggccccatcctgaacgtgctggtggtgctgggcgtggtgctgctgggccagttcgtggtgagaagattcttcaagagctag

SEQ ID NO: 73340 - DNA, 576 bp, Artificial Sequence
  derived and/or modified sequence
atggccagcggccagggccccggcccccccagacaggagtgcggcgagcccgccctgcccagcgccagcgaggagcaggtggcccaggacaccgaggaggtgttcagaagctacgtgttctacagacaccagcagcagcccagcagcaccatgggccaggtgggcagacagctggccatcatcggcgacgacatcaacagaagatacgacagcgagttccagaccatgctgcagcacctgcagcccaccgccgagaacgcctacgagtacttcaccaagatcgccaccagcctgttcgagagcggcatcaactggggcagagtggtggccctgctgggcttcggctacagactggccctgcacgtgtaccagcacggcctgaccggcttcctgggccaggtgaccagattcgtggtggacttcatgctgcaccactgcatcgccagatggatcgcccagagaggcggctgggtggccgccctgaacctgggcaacggccccatcctgaacgtgctggtggtgctgggcgtggtgctgctgggccagttcgtggtgagaagattcttcaagagctag

SEQ ID NO: 73341 - DNA, 462 bp, Artificial Sequence
  derived and/or modified sequence
atggccagcggccagggccccggcccccccagacaggagtgcggcgagcccgccctgcccagcgccagcgaggagcaggtggcccaggacaccgaggaggtgttcagaagctacgtgttctacagacaccagcaggagcaggaggccgagggcgtggccgcccccgccgaccccgagatggtgaccctgcccctgcagcccagcagcaccatgggccaggtgggcagacagctggccatcatcggcgacgacatcaacagaagatacgacagcgagttccagaccatgctgcagcacctgcagcccaccgccgagaacgcctacgagtacttcaccaagatcgccaccagacccgccgccacccccaccgcctgcctgagagtggccagcatcggcgccgtgtggtggctgttctgggccagcgccaccgtgtggccctacaccagcaccagcatggcctag

SEQ ID NO: 73342 - protein, 292 aa, Artificial Sequence
  derived and/or modified sequence
MRPLQIVPSRLISQLYCGLKPPASTRNQICLKMARPSSSMADFRKFFAKAKHIVIISGAGVSAESGVPTFRGAGGYWRKWQAQDLATPLAFAHNPSRVWEFYHYRREVMGSKEPNAGHRAIAECETRLGKQGRRVVVITQNIDELHRKAGTKNLLEIHGSLFKTRCTSCGVVAENYKSPICPALSGKGCEEAGCGGLLRPHVVWFGENLDPAILEEVDRELAHCDLCLVVGTSSVVYPAAMFAPQVAARGVPVAEFNTETTPATNRFRFHFQGPCGTTLPEALACHENETVS

SEQ ID NO: 73343 - DNA, 879 bp, Artificial Sequence
  derived and/or modified sequence
atgagaccacttcagatcgtgccatcgcgactaatcagccaattgtactgcgggttgaagcctcctgcctctaccaggaatcagatttgcctcaaaatggctcgccccagctctagcatggctgatttccgcaagttctttgcaaaagctaagcacattgtgatcataagtggggccggcgtgagcgcggaatcaggggttccaaccttcaggggtgcagggggctactggaggaaatggcaggcccaggatctcgccacaccactggcattcgcacacaacccaagccgggtctgggagttttaccactatcggcgggaagtaatgggaagcaaggaacctaacgccggccacagggcgatcgccgagtgcgaaacaagattaggcaaacagggaaggcgagtggtggtcatcactcagaatatagacgaactacaccgcaaggctgggacaaagaatctcttagagattcacggatccctgtttaaaacccgatgcacaagttgtggcgtcgtagctgaaaactataagagtcccatctgcccagccctgagtggcaagggctgtgaagaagccggctgcggtggcctgctgcgaccgcacgtcgtgtggtttggcgaaaacctagaccctgccattctggaggaggtggatcgggagctggcccattgcgatctgtgcctggtggtggggaccagctctgtggtgtatcccgccgctatgttcgctcctcaagtggccgcaagaggagtgcccgtagcggagttcaatacagagaccacacctgcaacaaacaggtttagatttcacttccaggggccttgtggaaccacacttcctgaagcgctagcatgccatgaaaatgagactgtgtcctag

SEQ ID NO: 73344 - DNA, 879 bp, Artificial Sequence
  derived and/or modified sequence
atgaggcccctgcagatcgtgcccagccgcctcatcagccagctgtactgcggcctgaagcccccagccagcaccaggaaccagatctgcctgaagatggcccggcccagcagctccatggctgacttcaggaagttctttgccaaggccaagcacatcgtcatcatctctggagctggggtgtctgctgagagcggcgtgcccaccttcagaggagctgggggctactggaggaagtggcaggcccaggacctggccacccccctggcctttgcccacaaccccagccgggtgtgggagttctaccactacagaagagaggtgatgggcagcaaggagcccaatgccggccaccgggccatcgcagaatgtgagacccggctgggcaagcagggcagaagagtggtggtgatcacccagaacattgatgagctgcacaggaaggccggcaccaagaacctgctggagatccacggcagcctcttcaagacccgctgcaccagctgtggggtggtggccgagaactacaagagccccatctgcccagccctgagcggcaagggctgtgaggaggccggctgcggcggcctgctgcggccccacgtggtgtggtttggagagaacctggaccctgccatcctggaggaggtggaccgggagctggcccactgtgacctgtgcctggtggtgggcaccagctctgtggtgtacccagctgccatgtttgccccccaggtggccgcccggggcgtgcctgtggccgagttcaacacagagaccaccccagccaccaaccgcttccgcttccacttccagggcccctgtggcaccaccctgcctgaggccctggcctgccatgaaaatgagaccgtgtcctag

SEQ ID NO: 73345 - DNA, 879 bp, Artificial Sequence
  derived and/or modified sequence
atgcggcccctgcagatcgtgcccagccggctgatcagccagctgtactgcggcctaaagccacccgccagtactcgcaatcaaatttgcctgaaaatggcgcgcccctcctcctccatggctgatttcaggaaatttttcgctaaggccaagcacatagtcatcatatccggagccggcgtgtccgctgaatccggagtccccacatttcgcggagccggtggctactggcggaaatggcaggctcaggaccttgctacacccctggctttcgctcacaacccatcacgtgtgtgggagttttaccattaccggagagaagtgatggggtcaaaggaacctaacgctggccaccgcgcaattgccgagtgtgaaaccaggttgggcaagcagggcaggcgggtggtcgtgatcacccagaacatcgatgagttgcatcggaaggctggaacaaaaaacttactggagattcatggatcgctcttcaagacaagatgcactagctgcggggtcgtggcagagaattacaagtcacccatctgcccagctctgagcggtaaaggctgtgaggaagctggctgtggggggttactgcgcccccacgtcgtgtggttcggcgagaatctcgaccccgccatcttggaggaggtggatagagagttagcacactgcgatttatgcctcgtggtggggacaagctcagtggtttaccccgcggccatgttcgccccgcaggtggccgccaggggagtgcccgtggccgagtttaatacagagacaaccccagccacaaacagattcagatttcacttccagggaccttgcggaaccaccctgcctgaggccctggcttgccacgagaatgagacagtgtcttag

SEQ ID NO: 73346 - DNA, 879 bp, Artificial Sequence
  derived and/or modified sequence
atgcggccactccaaattgtcccttcacgcctgatttctcagctttactgcgggctcaagccaccagcctcaaccagaaatcagatatgcttgaagatggccaggccaagttcttccatggccgattttcggaaattctttgccaaggcgaagcatatagtcatcatttctggagcaggggtgtctgccgagtccggcgtcccaaccttccggggtgccggtggctactggcgcaaatggcaggcccaggacctggcaacacccttggccttcgcccacaatccctccagggtatgggaattctatcactacagacgcgaggttatgggttcaaaggagccaaacgcaggtcatcgagcaatcgcggagtgtgaaacacggctggggaagcagggaagacgagtggtggttatcacacaaaacattgatgagctccacagaaaggccggtaccaagaatctgctggagatacatggctccctgttcaagacaaggtgcacaagctgcggagtggtcgcagagaactacaaatccccaatatgtccagccctgagcggcaaagggtgcgaggaggcgggttgtggaggattgctgcgcccacatgtggtctggttcggcgagaatctggatccagcaatactcgaagaagtggatcgtgagcttgcacactgtgacctgtgtctcgtagtagggacaagctctgttgtatatcctgctgccatgtttgcaccacaagtcgctgccaggggcgtgcccgtggcagagtttaataccgaaaccactcccgcaaccaatagatttagattccacttccagggaccctgcggaactacactgcctgaggcacttgcctgtcacgaaaatgagacagtctcctag

SEQ ID NO: 73347 - DNA, 1528 bp, Artificial Sequence
  derived and/or modified sequence
agactgtattcgggggcgcgagctgccccagtaaatggaaatgttttctaacatataaaaacctacagaagaagaaaataattttctggatcaaattagaagtctgtattatattgatgtctccagattcaaatatattagaaagcagccgtggagacaaccatcttcattttgggagaaataactaaagcccgcctcaagcattagaactacagacaaaccctgatgcgacctctccagattgtcccaagtcgattgatttcccagctatattgtggcctgaagcctccagcgtccacacgaaaccagatttgcctgaaaatggctcggccaagttcaagtatggcagattttcgaaagttttttgcaaaagcaaagcacatagtcatcatctcaggagctggtgttagtgcagaaagtggtgttccgaccttcagaggagctggaggttattggagaaaatggcaagcccaggacctggcgactcccctggcctttgcccacaacccgtcccgggtgtgggagttctaccactaccggcgggaggtcatggggagcaaggagcccaacgccgggcaccgcgccatagccgagtgtgagacccggctgggcaagcagggccggcgagtcgtggtcatcacccagaacatcgatgagctgcaccgcaaggctggcaccaagaaccttctggagatccatggtagcttatttaaaactcgatgtacctcttgtggagttgtggctgagaattacaagagtccaatttgtccagctttatcaggaaaagggtgtgaagaggcaggctgcgggggcttgctgcgacctcacgtcgtgtggtttggagaaaacctggatcctgccattctggaggaggttgacagagagctcgcccactgtgatttatgtctagtggtgggcacttcctctgtggtgtacccagcagccatgtttgccccccaggtggctgccaggggcgtgccagtggctgaatttaacacggagaccaccccagctacgaacagattcaggtttcatttccagggaccctgtggaacgactcttcctgaagcccttgcctgtcatgaaaatgaaactgtttcttaagtgtcctggggaagaaagaaattacagtatatctaagaactaggccacacgcagaggagaaatggtcttatgggtggtgagctgagtactgaacaatctaaaaatagcctctgattccctcgctggaatccaacctgttgataagtgatgggggtttagaagtagcaaagagcacccacattcaaaagtcacagaactggaaagttaattcatattatttggtttgaactgaaacgtgaggtatctttgatgtgtatggttggttattgggagggaaaaattttgtaaattagattgtctaaaaaaaatagttattctgattatatttttgttatctgggcaaagtagaagtcaaggggtaaaaaccctactattctgatttttgcacaagttttagtggaaaataaaatcacactctacagta

SEQ ID NO: 73348 - DNA, 879 bp, Artificial Sequence
  derived and/or modified sequence
atgagacccctgcagatcgtgcccagcagactgatcagccagctgtactgcggcctgaagccccccgccagcaccagaaaccagatctgcctgaagatggccagacccagcagcagcatggccgacttcagaaagttcttcgccaaggccaagcacatcgtgatcatcagcggcgccggcgtgagcgccgagagcggcgtgcccaccttcagaggcgccggcggctactggagaaagtggcaggcccaggacctggccacccccctggccttcgcccacaaccccagcagagtgtgggagttctaccactacagaagagaggtgatgggcagcaaggagcccaacgccggccacagagccatcgccgagtgcgagaccagactgggcaagcagggcagaagagtggtggtgatcacccagaacatcgacgagctgcacagaaaggccggcaccaagaacctgctggagatccacggcagcctgttcaagaccagatgcaccagctgcggcgtggtggccgagaactacaagagccccatctgccccgccctgagcggcaagggctgcgaggaggccggctgcggcggcctgctgagaccccacgtggtgtggttcggcgagaacctggaccccgccatcctggaggaggtggacagagagctggcccactgcgacctgtgcctggtggtgggcaccagcagcgtggtgtaccccgccgccatgttcgccccccaggtggccgccagaggcgtgcccgtggccgagttcaacaccgagaccacccccgccaccaacagattcagattccacttccagggcccctgcggcaccaccctgcccgaggccctggcctgccacgagaacgagaccgtgagctag

SEQ ID NO: 73349 - protein, 807 aa, Artificial Sequence
  derived and/or modified sequence
MLERRALLWQREAGPGWGDRARAGTGGAGGGCGGAMAERGPAFCGLYDTSSLLRYCNDDNLSGTSGMEVDDRVSALEQRLQLQEDELAVLKAALADALRRLRACEEQGAALRARGTPKGRAPPRLGTTASVCQLLKGLPTRTPLNGSGPPRRVGGYATSPSSPKKEATSGRSSVRRYLSPERLASVRREDPRSRTTSSSSNCSAKKEGKTKEVIFSVEDGSVKMFLRGRPVPMMIPDELAPTYSLDTRSELPSCRLKLEWVYGYRGRDCRANLYLLPTGEIVYFVASVAVLYSVEEQRQRHYLGHNDDIKCLAIHPDMVTIATGQVAGTTKEGKPLPPHVRIWDSVSLSTLHVLGLGVFDRAVCCVGFSKSNGGNLLCAVDESNDHMLSVWDWAKETKVVDVKCSNEAVLVATFHPTDPTVLITCGKSHIYFWTLEGGSLSKRQGLFEKHEKPKYVLCVTFLEGGDVVTGDSGGNLYVWGKGGNRITQAVLGAHDGGVFGLCALRDGTLVSGGGRNSILQGSVHTGFSLLVQGHVEELWGLATHPSRAQFVTCGQDKLVHLWSSDSHQPLWSRIIEDPARSAGFHPSGSVLAVGTVTGRWLLLDTETHDLVAIHTDGNEQISVVSFSPDGAYLAVGSHDNLVYVYTVDQGGRKVSRLGKCSGHSSFITHLDWAQDSSCFVTNSGDYEILYWDPATCKQITSADAVRNMEWATATCVLGFGVFGIWSEGADGTDINAVARSHDGKLLASADDFGKVHLFSYPCCQPRALSHKYGGHSSHVTNVAFLWDDSMALTTGGKDTSVLQWRVV

SEQ ID NO: 73350 - protein, 850 aa, Artificial Sequence
  derived and/or modified sequence
MLERRALLWQREAGPGWGDRARAGTGGAGGGCGGAMAERGPAFCGLYDTSSLLRYCNDDNLSGTSGMEVDDRVSALEQRLQLQEDELAVLKAALADALRRLRACEEQGAALRARGTPKGRAPPRLGTTASVCQLLKGLPTRTPLNGSGPPRRVGGYATSPSSPKKEATSGRSSVRRYLSPERLASVRREDPRSRTTSSSSNCSAKKEGKTKEVIFSVEDGSVKMFLRGRPVPMMIPDELAPTYSLDTRSELPSCRLKLEWVYGYRGRDCRANLYLLPTGEIVYFVASVAVLYSVEEQRQRHYLGHNDDIKCLAIHPDMVTIATGQVAGTTKEGKPLPPHVRIWDSVSLSTLHVLGLGVFDRAVCCVGFSKSNGGNLLCAVDESNDHMLSVWDWAKETKVVDVKCSNEAVLVATFHPTDPTVLITCGKSHIYFWTLEGGSLSKRQGLFEKHEKPKYVLCVTFLEGGDVVTGDSGGNLYVWGKGGNRITQAVLGAHDGGVFGLCALRDGTLVSGGGRDRRVVLWGSDYSKLQEVEVPEDFGPVRTVAEGHGDTLYVGTTRNSILQGSVHTGFSLLVQGHVEELWGLATHPSRAQFVTCGQDKLVHLWSSDSHQPLWSRIIEDPARSAGFHPSGSVLAVGTVTGRWLLLDTETHDLVAIHTDGNEQISVVSFSPDGAYLAVGSHDNLVYVYTVDQGGRKVSRLGKCSGHSSFITHLDWAQDSSCFVTNSGDYEILYWDPATCKQITSADAVRNMEWATATCVLGFGVFGIWSEGADGTDINAVARSHDGKLLASADDFGKVHLFSYPCCQPRALSHKYGGHSSHVTNVAFLWDDSMALTTGGKDTSVLQWRVV

SEQ ID NO: 73351 - DNA, 2424 bp, Artificial Sequence
  derived and/or modified sequence
atgctggagagaagagccctgctgtggcagagagaggccggccccggctggggcgacagagccagagccggcaccggcggcgccggcggcggctgcggcggcgccatggccgagagaggccccgccttctgcggcctgtacgacaccagcagcctgctgagatactgcaacgacgacaacctgagcggcaccagcggcatggaggtggacgacagagtgagcgccctggagcagagactgcagctgcaggaggacgagctggccgtgctgaaggccgccctggccgacgccctgagaagactgagagcctgcgaggagcagggcgccgccctgagagccagaggcacccccaagggcagagccccccccagactgggcaccaccgccagcgtgtgccagctgctgaagggcctgcccaccagaacccccctgaacggcagcggcccccccagaagagtgggcggctacgccaccagccccagcagccccaagaaggaggccaccagcggcagaagcagcgtgagaagatacctgagccccgagagactggccagcgtgagaagagaggaccccagaagcagaaccaccagcagcagcagcaactgcagcgccaagaaggagggcaagaccaaggaggtgatcttcagcgtggaggacggcagcgtgaagatgttcctgagaggcagacccgtgcccatgatgatccccgacgagctggcccccacctacagcctggacaccagaagcgagctgcccagctgcagactgaagctggagtgggtgtacggctacagaggcagagactgcagagccaacctgtacctgctgcccaccggcgagatcgtgtacttcgtggccagcgtggccgtgctgtacagcgtggaggagcagagacagagacactacctgggccacaacgacgacatcaagtgcctggccatccaccccgacatggtgaccatcgccaccggccaggtggccggcaccaccaaggagggcaagcccctgcccccccacgtgagaatctgggacagcgtgagcctgagcaccctgcacgtgctgggcctgggcgtgttcgacagagccgtgtgctgcgtgggcttcagcaagagcaacggcggcaacctgctgtgcgccgtggacgagagcaacgaccacatgctgagcgtgtgggactgggccaaggagaccaaggtggtggacgtgaagtgcagcaacgaggccgtgctggtggccaccttccaccccaccgaccccaccgtgctgatcacctgcggcaagagccacatctacttctggaccctggagggcggcagcctgagcaagagacagggcctgttcgagaagcacgagaagcccaagtacgtgctgtgcgtgaccttcctggagggcggcgacgtggtgaccggcgacagcggcggcaacctgtacgtgtggggcaagggcggcaacagaatcacccaggccgtgctgggcgcccacgacggcggcgtgttcggcctgtgcgccctgagagacggcaccctggtgagcggcggcggcagaaacagcatcctgcagggcagcgtgcacaccggcttcagcctgctggtgcagggccacgtggaggagctgtggggcctggccacccaccccagcagagcccagttcgtgacctgcggccaggacaagctggtgcacctgtggagcagcgacagccaccagcccctgtggagcagaatcatcgaggaccccgccagaagcgccggcttccaccccagcggcagcgtgctggccgtgggcaccgtgaccggcagatggctgctgctggacaccgagacccacgacctggtggccatccacaccgacggcaacgagcagatcagcgtggtgagcttcagccccgacggcgcctacctggccgtgggcagccacgacaacctggtgtacgtgtacaccgtggaccagggcggcagaaaggtgagcagactgggcaagtgcagcggccacagcagcttcatcacccacctggactgggcccaggacagcagctgcttcgtgaccaacagcggcgactacgagatcctgtactgggaccccgccacctgcaagcagatcaccagcgccgacgccgtgagaaacatggagtgggccaccgccacctgcgtgctgggcttcggcgtgttcggcatctggagcgagggcgccgacggcaccgacatcaacgccgtggccagaagccacgacggcaagctgctggccagcgccgacgacttcggcaaggtgcacctgttcagctacccctgctgccagcccagagccctgagccacaagtacggcggccacagcagccacgtgaccaacgtggccttcctgtgggacgacagcatggccctgaccaccggcggcaaggacaccagcgtgctgcagtggagagtggtgtag

SEQ ID NO: 73352 - DNA, 2553 bp, Artificial Sequence
  derived and/or modified sequence
atgctggagagaagagccctgctgtggcagagagaggccggccccggctggggcgacagagccagagccggcaccggcggcgccggcggcggctgcggcggcgccatggccgagagaggccccgccttctgcggcctgtacgacaccagcagcctgctgagatactgcaacgacgacaacctgagcggcaccagcggcatggaggtggacgacagagtgagcgccctggagcagagactgcagctgcaggaggacgagctggccgtgctgaaggccgccctggccgacgccctgagaagactgagagcctgcgaggagcagggcgccgccctgagagccagaggcacccccaagggcagagccccccccagactgggcaccaccgccagcgtgtgccagctgctgaagggcctgcccaccagaacccccctgaacggcagcggcccccccagaagagtgggcggctacgccaccagccccagcagccccaagaaggaggccaccagcggcagaagcagcgtgagaagatacctgagccccgagagactggccagcgtgagaagagaggaccccagaagcagaaccaccagcagcagcagcaactgcagcgccaagaaggagggcaagaccaaggaggtgatcttcagcgtggaggacggcagcgtgaagatgttcctgagaggcagacccgtgcccatgatgatccccgacgagctggcccccacctacagcctggacaccagaagcgagctgcccagctgcagactgaagctggagtgggtgtacggctacagaggcagagactgcagagccaacctgtacctgctgcccaccggcgagatcgtgtacttcgtggccagcgtggccgtgctgtacagcgtggaggagcagagacagagacactacctgggccacaacgacgacatcaagtgcctggccatccaccccgacatggtgaccatcgccaccggccaggtggccggcaccaccaaggagggcaagcccctgcccccccacgtgagaatctgggacagcgtgagcctgagcaccctgcacgtgctgggcctgggcgtgttcgacagagccgtgtgctgcgtgggcttcagcaagagcaacggcggcaacctgctgtgcgccgtggacgagagcaacgaccacatgctgagcgtgtgggactgggccaaggagaccaaggtggtggacgtgaagtgcagcaacgaggccgtgctggtggccaccttccaccccaccgaccccaccgtgctgatcacctgcggcaagagccacatctacttctggaccctggagggcggcagcctgagcaagagacagggcctgttcgagaagcacgagaagcccaagtacgtgctgtgcgtgaccttcctggagggcggcgacgtggtgaccggcgacagcggcggcaacctgtacgtgtggggcaagggcggcaacagaatcacccaggccgtgctgggcgcccacgacggcggcgtgttcggcctgtgcgccctgagagacggcaccctggtgagcggcggcggcagagacagaagagtggtgctgtggggcagcgactacagcaagctgcaggaggtggaggtgcccgaggacttcggccccgtgagaaccgtggccgagggccacggcgacaccctgtacgtgggcaccaccagaaacagcatcctgcagggcagcgtgcacaccggcttcagcctgctggtgcagggccacgtggaggagctgtggggcctggccacccaccccagcagagcccagttcgtgacctgcggccaggacaagctggtgcacctgtggagcagcgacagccaccagcccctgtggagcagaatcatcgaggaccccgccagaagcgccggcttccaccccagcggcagcgtgctggccgtgggcaccgtgaccggcagatggctgctgctggacaccgagacccacgacctggtggccatccacaccgacggcaacgagcagatcagcgtggtgagcttcagccccgacggcgcctacctggccgtgggcagccacgacaacctggtgtacgtgtacaccgtggaccagggcggcagaaaggtgagcagactgggcaagtgcagcggccacagcagcttcatcacccacctggactgggcccaggacagcagctgcttcgtgaccaacagcggcgactacgagatcctgtactgggaccccgccacctgcaagcagatcaccagcgccgacgccgtgagaaacatggagtgggccaccgccacctgcgtgctgggcttcggcgtgttcggcatctggagcgagggcgccgacggcaccgacatcaacgccgtggccagaagccacgacggcaagctgctggccagcgccgacgacttcggcaaggtgcacctgttcagctacccctgctgccagcccagagccctgagccacaagtacggcggccacagcagccacgtgaccaacgtggccttcctgtgggacgacagcatggccctgaccaccggcggcaaggacaccagcgtgctgcagtggagagtggtgtag

SEQ ID NO: 73353 - DNA, 2424 bp, Artificial Sequence
  derived and/or modified sequence
atgcttgagcgacgtgctttactgtggcaaagagaggccggcccgggctggggggatagagcacgtgccgggacgggaggagctggagggggctgcggaggcgccatggctgaaagggggcctgctttttgcggcctgtatgatacctcttccttgctgcgatattgtaacgacgataatctgagtggaacctctgggatggaagtggatgacagggtgtcagctctcgaacagcgtctccaattgcaggaggatgaactggcagtgctcaaggcagcactggccgacgctctccggagactccgggcctgtgaggaacagggagcagcgttacgagctcgcggcacacccaaaggtcgtgcccccccgagactgggaaccacagcttccgtgtgtcagcttctaaagggcctccccacaaggaccccgctcaacggctcagggcctcctcgaagggtgggtggctacgcgaccagccccagctctcccaaaaaggaggcaacctccggccggagtagtgtcaggaggtacctgtccccagaacggcttgcttccgtccgtagggaggatccacggagccggaccacatctagctcgtcaaattgtagtgccaaaaaggagggcaaaacgaaagaggtgatcttttctgtggaggacggcagtgtgaagatgtttctgagaggcagaccagtaccaatgatgatcccagacgagctcgctcctacctacagcctggatactcggtccgaactgcccagctgtaggctgaaactagagtgggtgtacggataccgcggccgtgattgcagagctaacctgtacctgctgccgacaggggaaatagtttattttgtggcatcggttgccgtgctgtattctgtcgaggagcaacggcagcggcactaccttggccacaacgacgatattaagtgtctggcgattcaccccgatatggttaccatagccaccggccaggtggctggcacaaccaaagaagggaagccgcttcctccacacgtcagaatttgggattcggtgagcctctcaactctgcatgtgttgggcctgggtgtttttgacagggccgtttgctgtgttggctttagcaagtcaaacggcgggaacctgctgtgcgccgtggacgaaagcaacgatcatatgctgagtgtgtgggattgggctaaggaaaccaaagtggtggacgtcaagtgtagcaatgaggccgtgcttgtggctacctttcatcctaccgatcccaccgtgctgattacctgtggcaagtctcacatatacttctggacgttggagggtggatccctctcaaagcggcagggactcttcgagaagcatgagaagcccaaatatgtgctatgtgttaccttcctcgagggtggagatgttgttacaggtgattccggcggaaatctgtacgtgtgggggaagggaggtaataggattacccaagctgtgctgggtgcacacgacggaggagtgtttgggctctgcgcgctgcgcgacgggactctagtgtccggtggtggccggaacagcatcttgcaaggcagtgtgcacacagggttttcgcttctggtgcagggccacgtggaagaactttggggattggccactcacccatcacgagcccaattcgttacctgtggacaggacaagttagtgcatctctggagctcggatagtcatcaacccctgtggtcacgtattatcgaggatcctgcacgatctgctggctttcaccccagcggtagtgtcctggccgttgggaccgttaccggcagatggctgctgttagacaccgaaacacacgatctggttgctattcataccgatgggaacgaacagatcagcgttgtgtctttcagcccggacggcgcctacctggcagtgggaagtcacgataacctggtatacgtgtatacagtggatcagggaggtagaaaagtttcgcgcctgggaaagtgcagcggccattcttcgttcataacacatctggattgggcccaggacagcagctgcttcgtcaccaactcaggggattatgagatcctgtattgggacccggcaacctgcaagcagataacatcagcagacgcagtcaggaacatggagtgggccactgctacctgcgtattaggttttggagtgttcggcatttggtccgagggagcagacggcaccgacataaatgcagtcgctcgaagccacgacggcaagctcctggcaagtgcggacgatttcggaaaagtgcatctgttttcctatccatgctgccagccacgcgcactctctcacaagtacgggggtcacagctctcacgtgacgaacgttgcatttttatgggacgactctatggctctgaccaccgggggcaaggataccagtgttctccagtggagggtggtgtag

SEQ ID NO: 73354 - DNA, 2553 bp, Artificial Sequence
  derived and/or modified sequence
atgctcgagcgtcgggcacttttatggcaaagggaggcaggcccgggctggggtgaccgggccagggccggcactggaggtgctgggggcggatgtggcggggcaatggctgaaagaggtcccgccttttgtggtctctatgacacttctagccttctgagatactgtaacgacgataacttatccggtactagtggcatggaagtggacgatagggtgtcagcgctcgagcagcgtctgcaactgcaggaggacgagttggccgtgctgaaagcagcactggctgatgccctacgacggctgcgagcgtgtgaggaacagggcgcagcccttcgcgccagaggcactcccaaaggcagagcaccccccaggttgggaactacggcttccgtgtgccaacttcttaaaggtcttccaacccgcactcccctcaatggcagtggaccacccaggcgagtcggcggctacgctacatcgccatcttcacctaaaaaggaggctacttctggcagatcttcggtgcgccggtacctttctcctgagagactcgcatccgtgagacgcgaagacccccgctcccggacaacctcttcttcctctaattgttccgctaaaaaagaagggaagaccaaagaggttattttctcagttgaagatggctcagtgaaaatgttcctgagaggacgacctgtccctatgatgatccctgatgagctggccccaacatacagtcttgatacgaggtctgaactgcccagctgtagattgaaactggagtgggtttacggatatcggggccgcgactgtcgggccaacctctatttgctgcccaccggtgaaatagtgtacttcgtagcctcagtagcagtgttatacagcgtcgaagaacagcgacagcgacactatttaggacacaacgatgacatcaaatgcctggccatccacccagatatggttacaattgccacaggacaggtggctggcactaccaaggaagggaaaccattgccgccacacgtgcggatatgggatagcgtcagcctttctacactccatgtgctcggactgggcgtatttgaccgagcagtgtgttgtgtgggcttttcaaaatctaatggcgggaatctcctgtgcgccgtcgacgagtccaacgaccacatgttaagcgtctgggactgggcaaaagaaacaaaggtggtggacgtcaagtgcagcaacgaggctgtcttggttgcgacctttcatcccacagatccaaccgtgctgatcacttgcggcaagagccacatttacttttggacactggagggcggatctctgagcaaacgtcagggtctcttcgaaaaacatgagaagcccaagtacgtgttatgcgtgacttttctggaaggaggcgatgtggtcactggagactccggaggcaatctgtatgtgtgggggaaaggcggaaacagaatcactcaggccgttttaggcgcccatgacggcggagtgttcgggttgtgcgccctccgcgatggaacattggtcagcgggggggggagggatcggagggtggtgctgtggggctcagattactcaaagctccaagaggtggaggttcctgaagatttcggtcccgttcgtaccgtcgctgagggccacggagataccctatacgtcgggacgactaggaactcaatcctacaaggctctgtgcacaccgggttctccttgttggtgcagggacacgttgaagagctgtgggggctcgctacgcacccttctagggctcagttcgtaacatgtggtcaggacaaacttgttcatttgtggagctccgacagccaccaaccactgtggagcagaataatcgaggatcccgcccgctcagctggcttccatccatccgggtccgtcctggccgtcgggacagtcacaggccgctggctcctgcttgataccgagacacacgacctcgtggccatacatactgatggcaatgaacagatcagcgtggtgtcttttagccccgacggcgcatatctggcagtggggtcccacgacaatttggtatatgtgtacacagtagaccaggggggaaggaaggttagcaggctgggaaaatgcagcggacacagtagtttcataacacatctggactgggctcaggactcctcatgtttcgtaacaaactccggagattatgagatcctgtactgggaccctgctacatgcaaacaaattacaagtgccgacgctgtgcggaacatggagtgggccacagctacttgcgtgctcgggtttggagtgtttgggatttggtccgagggggcggatgggacagacattaatgctgtggctcgatcccatgacggtaagctgctggccagtgctgatgacttcgggaaggtgcacctgtttagctacccgtgttgccaaccgagggccttatcccacaagtatggcgggcacagttcccacgttacgaatgtggcatttttgtgggatgattccatggctctgactacgggaggcaaagatacttctgtgcttcagtggcgagtggtatag

SEQ ID NO: 73355 - DNA, 2424 bp, Artificial Sequence
  derived and/or modified sequence
atgctggagcggcgggccctgctgtggcagcgggaggccggccctggctggggagaccgggcccgggccggcactggaggagctgggggcggctgcggcggggccatggccgagcggggccctgccttctgtggcctgtatgacaccagcagcctgctgcgctactgcaatgatgacaacctgagcggcaccagcggcatggaggtggatgacagagtgtctgccctggagcagaggctgcagctgcaggaggatgagctggccgtgctgaaggccgccctggctgatgccctgcggcggctgcgggcctgtgaggagcagggcgccgccctgcgggcccggggcacccccaagggccgggccccaccccggctgggcaccacagcctctgtgtgccagctgctgaagggcctgcccaccaggacccccctgaatggaagtggccccccaagaagagtgggcggctacgccaccagccccagcagccccaagaaggaggccaccagcggccgcagctctgtgcggcgctacctgagccctgagcggctggcctctgtgagaagagaggaccccaggagcaggaccaccagcagcagcagcaactgcagcgccaagaaggagggcaagaccaaggaggtgatcttctctgtggaggatggctctgtgaagatgttcctgcggggccggcctgtgcccatgatgatcccagatgagctggcccccacctacagcctggacaccaggtctgagctgcccagctgccgcctgaagctggagtgggtgtatggctaccggggccgggactgccgggccaacctgtacctgctgcccaccggggagatcgtgtactttgtggcctctgtggccgtgctgtacagcgtggaggagcagaggcagaggcactacctgggccacaatgatgacatcaagtgcctggccatccacccagacatggtgaccatcgccaccggccaggtggccggcaccaccaaggagggcaagcccctgccccctcatgtgcgcatctgggacagcgtgtccctgagcaccctgcacgtgctgggcctgggcgtgtttgacagagctgtgtgctgcgtgggcttcagcaagagcaatggaggcaacctgctgtgtgctgtggatgagagcaatgaccacatgctgtctgtgtgggactgggccaaggagaccaaggtggtggatgtgaagtgcagcaatgaggccgtgctggtggccaccttccaccccacagaccccaccgtgctgatcacctgtgggaagagccacatctacttctggaccctggagggcggcagcctgagcaagaggcagggcctgtttgagaagcatgagaagcccaagtatgtgctgtgtgtgaccttcctggagggcggagatgtggtgactggagacagcggcggcaacctgtatgtgtggggcaaaggaggcaaccgcatcacccaggccgtgctgggcgcccatgatggaggagtgtttggcctgtgtgccctgagagatggcaccctggtgtctgggggcggcagaaattccatcctgcagggctctgtgcacacaggcttcagcctgctggtgcagggccacgtggaggagctgtggggcctggccacccaccccagccgggcccagtttgtgacctgtggccaggacaagctggtgcacctgtggagcagtgacagccaccagcccctgtggagccgcatcatcgaggaccctgcccggtctgctggcttccaccccagcggctctgtgctggccgtgggcaccgtgacaggccgctggctgctgctggacacagagacccatgacctggtggccatccacacagatggaaatgagcagatctctgtggtgtccttctccccagatggagcctacctggccgtgggcagccatgacaacctggtgtatgtgtacacagtggaccagggcggcaggaaggtgtcccggctgggcaaatgttctggccacagcagcttcatcacccacctggactgggcccaggacagcagctgctttgtgaccaacagcggggactatgagatcctgtactgggaccctgccacctgcaagcagatcaccagcgcagatgctgtgaggaacatggagtgggccacagccacctgtgtgctgggctttggagtgtttggcatctggagcgagggcgcagatggaacagacatcaatgctgtggcccggagccatgatggcaagctgctggccagcgcagatgactttgggaaggtgcacctgttctcctacccctgctgccagccccgggccctgagccacaagtatggaggccacagcagccacgtgaccaacgtggccttcctgtgggatgacagcatggccctgaccaccggcggcaaggacacctctgtgctgcagtggagggtggtgtag

SEQ ID NO: 73356 - DNA, 2553 bp, Artificial Sequence
  derived and/or modified sequence
atgctggagcggcgggccctgctgtggcagcgggaggccggccctggctggggagaccgggcccgggccggcactggaggagctgggggcggctgcggcggggccatggccgagcggggccctgccttctgtggcctgtatgacaccagcagcctgctgcgctactgcaatgatgacaacctgagcggcaccagcggcatggaggtggatgacagagtgtctgccctggagcagaggctgcagctgcaggaggatgagctggccgtgctgaaggccgccctggctgatgccctgcggcggctgcgggcctgtgaggagcagggcgccgccctgcgggcccggggcacccccaagggccgggccccaccccggctgggcaccacagcctctgtgtgccagctgctgaagggcctgcccaccaggacccccctgaatggaagtggccccccaagaagagtgggcggctacgccaccagccccagcagccccaagaaggaggccaccagcggccgcagctctgtgcggcgctacctgagccctgagcggctggcctctgtgagaagagaggaccccaggagcaggaccaccagcagcagcagcaactgcagcgccaagaaggagggcaagaccaaggaggtgatcttctctgtggaggatggctctgtgaagatgttcctgcggggccggcctgtgcccatgatgatcccagatgagctggcccccacctacagcctggacaccaggtctgagctgcccagctgccgcctgaagctggagtgggtgtatggctaccggggccgggactgccgggccaacctgtacctgctgcccaccggggagatcgtgtactttgtggcctctgtggccgtgctgtacagcgtggaggagcagaggcagaggcactacctgggccacaatgatgacatcaagtgcctggccatccacccagacatggtgaccatcgccaccggccaggtggccggcaccaccaaggagggcaagcccctgccccctcatgtgcgcatctgggacagcgtgtccctgagcaccctgcacgtgctgggcctgggcgtgtttgacagagctgtgtgctgcgtgggcttcagcaagagcaatggaggcaacctgctgtgtgctgtggatgagagcaatgaccacatgctgtctgtgtgggactgggccaaggagaccaaggtggtggatgtgaagtgcagcaatgaggccgtgctggtggccaccttccaccccacagaccccaccgtgctgatcacctgtgggaagagccacatctacttctggaccctggagggcggcagcctgagcaagaggcagggcctgtttgagaagcatgagaagcccaagtatgtgctgtgtgtgaccttcctggagggcggagatgtggtgactggagacagcggcggcaacctgtatgtgtggggcaaaggaggcaaccgcatcacccaggccgtgctgggcgcccatgatggaggagtgtttggcctgtgtgccctgagagatggcaccctggtgtctgggggcggccgggacagaagagtggtgctgtggggcagtgactacagcaagctgcaggaggtggaggtgcctgaggactttggacctgtgaggacagtggccgagggccacggggacaccctgtatgtgggcaccaccaggaacagcatcctgcagggctctgtgcacacaggcttcagcctgctggtgcagggccacgtggaggagctgtggggcctggccacccaccccagccgggcccagtttgtgacctgtggccaggacaagctggtgcacctgtggagcagtgacagccaccagcccctgtggagccgcatcattgaagatcctgcccggtctgctggcttccaccccagcggctctgtgctggccgtgggcaccgtgacaggccgctggctgctgctggacacagagacccatgacctggtggccatccacacagatggaaatgagcagatctctgtggtgtccttctccccagatggagcctacctggccgtgggcagccatgacaacctggtgtatgtgtacacagtggaccagggcggcaggaaggtgtcccggctgggcaagtgcagcggccacagcagcttcatcacccacctggactgggcccaggacagcagctgctttgtgaccaacagcggggactatgagatcctgtactgggaccctgccacctgcaagcagatcaccagcgcagatgctgtgaggaacatggagtgggccacagccacctgtgtgctgggcttcggcgtgtttggcatctggagcgagggcgcagatggaacagacatcaatgctgtggcccggagccatgatggcaagctgctggccagcgcagatgactttgggaaggtgcacctgttctcctacccctgctgccagccccgggccctgagccacaagtatggaggccacagcagccacgtgaccaacgtggccttcctgtgggatgacagcatggccctgaccactggaggcaaggacacctctgtgctgcagtggagggtggtgtag

SEQ ID NO: 73357 - DNA, 2424 bp, Artificial Sequence
  derived and/or modified sequence
atgctggagcggcgggccctgctgtggcagcgggaggccggccccggctggggcgatagggcgcgcgccggaactgggggcgccggcggcgggtgtggtggtgcaatggccgagcgaggaccagctttctgtggattgtatgatacctcgtccctccttaggtactgcaacgatgacaacctgagcggcacttccggcatggaagtcgacgaccgcgtaagtgctctggagcagaggctacagttgcaggaagacgagttagctgtcctgaaggcggcccttgccgacgctcttaggaggctgcgcgcctgcgaagagcagggcgccgctctgcgcgctcgtggaacaccgaagggaagggcacctcccaggctgggcactaccgcctctgtgtgtcagcttttgaaggggttacccacacgaacacccctgaacggaagcggccccccgcgcagagttggggggtatgccacatcccctagcagccccaagaaggaggccaccagtggacggtcatcggtgcgccggtatttatcacctgaacgtctggctagcgtacggcgagaggatcctcggtctcggacaacatcgtcctcatctaattgttcagcaaagaaagaggggaagactaaagaagtgatcttttccgtggaggatggctccgtgaaaatgttccttcgcggacgaccagttcccatgatgatccccgacgagttggcaccaacttactcgctggacacccgctctgagctgccttcctgtaggctaaaactggagtgggtgtatggatatagaggtcgcgattgcagagccaatctgtatctcctgcccacaggcgaaatcgtctacttcgtggcctcagtcgccgttttgtactccgttgaggaacagcggcagagacattatctgggccataatgacgatattaagtgtctcgctattcaccccgacatggtcaccattgcgacgggtcaggtggcaggcaccacaaaagagggcaaaccactccccccgcatgttagaatttgggattcagtttccctgtctaccctccatgtactgggcctgggggtgtttgatcgggccgtgtgttgcgtcggattttccaaaagtaatggcgggaatctgttatgcgcagtagacgaatcaaacgatcacatgttaagcgtctgggactgggccaaggaaactaaagtggttgatgtaaagtgttctaatgaggctgtgttggttgctacgttccatcctaccgaccctaccgtgttaatcacttgcggcaagtcccacatatacttctggactctggagggcgggagcctgagcaagcgacagggactgttcgaaaaacatgaaaaacccaagtacgtgctgtgcgtgacttttctggaaggcggtgatgttgttacaggcgactctggagggaacttatacgtatggggtaaaggtggcaaccggattacacaagctgtcttaggcgcacatgatgggggcgttttcggattgtgcgcacttcgcgatggcactctcgtatcgggtggcggtcgtaatagtatccttcagggatctgttcacacaggattctctctccttgttcagggccatgtcgaagaactgtggggccttgctactcacccaagtagggcacagtttgtcacgtgcggccaagataagttggtgcatctgtggagctccgactcacaccagcctctttggagccgaattattgaggaccctgcacgatctgctgggttccatccctctggtagcgtcctggctgtcggaaccgtaacaggaaggtggcttctgctggacactgaaactcatgatcttgtcgcaatacacaccgacggcaatgaacagatcagcgttgtgtcattttcccctgatggcgcatatctcgctgtcggctctcacgataatcttgtctacgtgtacaccgttgatcaaggaggaaggaaagtgtcccggctcggaaagtgttctgggcactcctctttcatcacccatttggactgggcccaggattcgagctgcttcgtcacaaacagcggcgattatgagatattatactgggatccagccacctgcaaacagatcacctctgcggacgctgtgcgaaacatggaatgggcaaccgctacttgtgtactgggttttggggtcttcggaatctggagcgagggcgcagatggaactgacataaatgcagttgccagatcccatgacgggaagttgcttgccagtgcagacgactttggcaaggtacatctgttctcatatccctgctgtcagcctagagcactctctcacaagtatggggggcattccagtcatgtaacaaacgtcgccttcctttgggacgattctatggctctcactactgggggaaaagacacctcagtcctgcaatggagggtggtatag

SEQ ID NO: 73358 - DNA, 2553 bp, Artificial Sequence
  derived and/or modified sequence
atgctggagcggcgggccctgctgtggcagcgggaggccggccccggttggggagatagggctcgcgctgggactgggggggcaggcgggggctgcggaggggctatggcagaaagaggaccagcgttctgtggactgtacgatacttcctcactgcttcgatattgtaatgatgacaatctgagcggtactagcgggatggaggtggacgatcgcgttagcgccttggagcaaaggctccagcttcaggaagatgaacttgccgtgcttaaagccgccctggccgatgctcttagacgcctgcgcgcttgcgaagaacagggcgccgccctcagagctcgcgggacgccgaaaggacgggccccccctcgtttgggcactacggccagtgtttgccagctcctgaagggactgccaactagaacaccgcttaacggctctgggccccccagaagagtgggtgggtacgccacttccccaagttcgccgaaaaaagaggccaccagcggacggagttccgtccgacggtacttgtcccccgaaagactcgccagcgttcgcagagaagacccaagaagccgtactacatcttccagctccaattgttcagcgaagaaagagggaaaaacgaaagaggttattttctccgtagaagacgggagcgtaaagatgttccttcgtggcagacctgtgccaatgatgattcctgacgagctcgcccccacctatagtctggacacacggtccgaattaccatcctgtcgactaaagctggaatgggtctatgggtaccgcggcagagattgccgagctaacctgtatctgctgcctaccggcgagattgtgtattttgtggcctccgtcgccgtgctgtactctgttgaagagcaaagacagcggcactatctgggccacaacgatgacatcaagtgcctcgctatacaccccgacatggtgacaatcgctacgggacaggtggcaggaacgaccaaagagggtaagcctctaccaccgcatgtcagaatttgggactccgttagcctgagcacattgcatgtgctgggattaggtgttttcgatcgagctgtatgttgcgtgggattctcaaaaagtaacggcggcaacctgttatgtgccgtggacgaatcgaacgatcacatgctatctgtttgggactgggccaaggagactaaagttgtagacgtcaaatgctctaatgaagcagttttggtggccacctttcaccctaccgaccctacagtgctgatcacttgcgggaagagtcatatttacttttggaccctggagggcgggtccttgagcaagagacagggactctttgagaaacatgaaaagccgaaatatgtgctctgcgttaccttcttagagggcggagatgtggtgacgggtgacagcggtggaaacctatatgtctgggggaagggcggcaatcggatcacacaggcggtcctgggcgcccatgacggcggagtgttcggactatgcgcattgcgggatgggactctggtttcggggggcgggagggaccgccgggtggtcctgtggggtagcgattattctaaattgcaggaggttgaggtgcccgaagactttgggccggtccgcactgtggctgaaggccacggagacaccctgtacgtaggaactactcggaatagcattttgcaagggtccgtacataccgggttcagtttgctcgtgcagggccacgttgaagagctctggggcttggccactcatccaagccgggcacagtttgttacctgtggacaggataaattagttcatctttggagttcggattcccaccagccactgtggagccgcatcatcgaggacccagccagaagtgccgggtttcacccctccgggtctgttctagcagttgggacggtgaccggtcgatggctgctgctggatacagagacccacgacctggtagccatccacacggatgggaacgagcaaatctcggtggtgtctttttctcctgacggcgcatacctcgccgttggatcacatgataacctcgtttacgtttataccgttgaccagggaggacgcaaagtcagtcggctcggtaaatgctcggggcattctagcttcatcacgcatctggactgggctcaggattctagctgtttcgtgaccaatagtggtgactatgagattctctactgggaccccgctacctgcaagcagattacatcagcggatgccgtgcggaatatggaatgggcaactgcaacctgtgtgctcggattcggagtatttggcatttggtctgaaggcgccgacgggactgacatcaatgctgtggccaggtcccacgatgggaaactgctcgcgtccgccgacgactttgggaaggttcatctgttttcttacccgtgttgtcaaccccgcgcgttgtcccacaaatacggagggcactcttcccacgtgactaatgtcgcgtttctgtgggatgatagcatggctttgacaacaggcggtaaagatacttcagtgctccagtggcgggtggtgtag

SEQ ID NO: 73359 - DNA, 2424 bp, Artificial Sequence
  derived and/or modified sequence
atgcttgagcgtagagccctcttgtggcagagggaagctggaccaggctggggagaccgggcaagggccggaaccgggggagcgggaggcggatgtggcggagccatggccgagaggggacctgctttttgtggcctgtacgatacttcgagtctactcagatactgcaatgatgacaatctttccgggacgtctgggatggaggtcgatgatagggtgagtgccttagagcagaggttgcagcttcaggaggatgaactggccgtgttaaaggccgctctcgcagatgccctgaggaggctgcgggcttgtgaggagcagggagctgcattgagggctagaggcacccctaagggccgagcaccccctcggcttggcaccaccgcgtcagtctgtcagctcctcaaaggtcttcctacaaggacccctctgaatggttcagggcctcctcgcagagtagggggttatgctacaagccctagctctccgaaaaaggaggcgacttcggggagatctagcgtgcggagatatttatcccccgaacggctggccagcgttagaagggaggatccgaggagtagaacgacatcaagctcaagcaattgttccgcgaagaaagagggcaagaccaaggaagtgatcttctccgttgaagacggatctgtgaaaatgtttttaaggggtcgaccagtgccaatgatgattccagatgagcttgcccctacatattccttagatacccgcagcgagctgccaagttgtcggctgaaattggagtgggtgtacggctatagaggaagggattgccgcgctaatctgtatctgcttccaactggggagatcgtctatttcgtggcaagcgtcgccgtcctttattcggtcgaggagcagaggcagaggcattatcttggccataatgatgatattaagtgtctggccattcaccccgacatggtcactattgccacaggacaggtggcaggaactacaaaagaaggcaaaccacttcctccacacgtgaggatttgggactctgtgtccctgtctacactgcacgtgcttggcctcggggttttcgatagggctgtatgctgcgtgggtttctccaagagtaacggcggaaatctcctatgtgcagttgatgaatccaatgaccacatgttgagcgtgtgggattgggctaaggaaactaaggtggtggatgtgaagtgctctaatgaggctgtcctggtggcaacctttcacccaacagatcccactgtccttatcacttgcggcaagtcacatatctatttttggacactggagggtgggtctttatcaaaaagacaaggcctttttgagaaacatgaaaaaccgaagtatgtcctttgtgtgacttttcttgaaggcggagatgtcgtgaccggtgactctgggggtaatttatacgtttggggcaaggggggaaaccggattactcaggcggtgctgggggcacacgacggcggagtctttgggctgtgcgccctgcgcgatgggacactggtttccggaggtgggaggaattcgattctccagggttctgttcatacaggctttagcctgctggtgcaagggcacgtcgaagaactttgggggctggccacccacccgagccgggctcagtttgtcacctgcggccaagataagttagtacatctctggtcctcagactcacaccagccgctgtggagcagaatcatcgaagatcctgctcgttccgccggatttcacccaagtggctcagtcctcgctgtgggaaccgtgacaggtaggtggctcctgcttgacacggagactcacgacctggtggccatccacactgatggaaacgagcaaattagcgtcgtgagcttcagccccgacggagcctacctagcagtcgggagccacgataatctcgtgtatgtctatacagtggaccagggaggaaggaaagtctctaggctggggaagtgctccggccactcctccttcatcacacacctagattgggcccaggacagtagctgttttgtgacaaattcaggggattacgaaatcctgtactgggatcctgcaacatgtaaacagataacctcggcagatgccgtgcgcaacatggagtgggcgaccgccacctgtgtgctcggatttggagtgtttgggatctggtcagaaggcgcagatggcaccgatatcaacgctgtggcaaggtcccacgacggtaagttgttggcttctgccgatgattttggcaaagtccatttattctcgtacccttgttgccagccacgcgcactgagccacaaatacggaggtcacagttctcacgtgacaaacgttgcttttttgtgggatgactccatggctctcacaacaggcggtaaggatacatccgtgctccagtggcgagtggtgtag

SEQ ID NO: 73360 - DNA, 2553 bp, Artificial Sequence
  derived and/or modified sequence
atgctggagcgccgagccctcctgtggcagcgtgaggccggaccagggtggggggatagagctcgagcgggtacgggtggagccggtggcggttgtggcggagcaatggccgaacgcggacccgcattttgcggtctttacgacacctcttctctgctgaggtactgcaacgacgacaacctgagcgggacaagcgggatggaagtggacgatcgagtgtcagccctggagcaacgtctgcagctgcaggaggacgaactagcagttctcaaggcagccctcgctgacgcattaagacgtctccgagcttgtgaggagcagggagcagccctacgcgctcgtggaacaccaaagggtcgcgcacctcctaggctcggtactacagcgtctgtctgccagttgttaaagggcctccccaccaggacgccgttgaatggatctggccctcctaggcgtgtgggcggatacgcgacatccccgtcttcccccaagaaggaggctacctctggtcgatctagcgtaaggcggtatctgtccccagagaggctggcctctgtgagaagagaagatcctaggtctcggactacgtctagctcatccaactgctcagctaaaaaggaagggaagactaaggaggttattttctctgtggaggacggttcagttaagatgtttctgagggggaggccagtccctatgatgatccctgacgaactggcaccaacttacagtctggataccaggagcgaacttccctcctgtcgattgaagctggaatgggtgtatggctataggggaagggactgtcgtgcgaacctgtacctgctccctactggggagatagtatactttgttgcttcagtagccgtgttgtactcggtggaagagcagcgtcagcggcattatctcggccacaacgacgacatcaaatgcttggccatccaccccgatatggttacaatcgctactgggcaggtggctggcactacaaaagagggcaagccactccctccacacgtccgcatttgggattccgtgagcttatcaacacttcacgtcctcgggctaggcgtctttgatcgggcagtgtgttgcgtaggttttagcaaaagcaacgggggtaaccttctctgtgctgttgatgagagcaatgatcacatgcttagtgtttgggactgggccaaagagacaaaagtggtggatgtaaaatgcagtaatgaggccgtcctagtcgcaacctttcatcctaccgaccccacagttctcatcacctgtggtaagtcccacatctacttttggactttggaggggggttcactttcgaagaggcaaggactgttcgaaaaacatgaaaaacctaaatacgtgctgtgtgtgacattcttggaaggcggagatgtggtcacgggcgactcgggtgggaatctgtacgtgtgggggaagggaggcaacaggattacccaggctgttctgggcgcacatgatgggggtgtgtttggactctgcgccctcagggacggtacattggttagtggcggaggcagagaccgccgtgttgttttatggggatctgattacagtaagctccaggaggttgaagtaccggaggacttcggtcccgttcggactgtggctgaggggcacggcgatactctgtatgtcggtacaacccgtaattcaattctgcagggttcagtccatactggtttcagcctgctggtgcaagggcacgtggaggagctgtggggcctggccactcatccctcccgggctcaattcgtcacttgcgggcaggacaagctcgtacacctctggtccagtgacagccaccaaccgctctggtcaagaatcattgaggatcccgctcgctctgctggcttccacccttctgggagtgtcctcgcagtggggaccgtgacaggacgttggctgctattggacaccgaaactcacgatttggtggccattcatactgacggtaatgagcagatcagcgtggtatccttttccccagacggcgcatatctcgcagtgggttcacatgacaatctggtttacgtctatacagttgaccagggcggacgtaaggtaagcagactgggaaaatgtagtgggcatagttccttcatcacccatttggactgggctcaagattcctcctgctttgttaccaactccggagactacgagatcctctactgggatccagccacgtgcaagcagataactagtgctgacgctgtgagaaacatggagtgggctaccgctacctgtgtattaggattcggagtgtttggcatctggtcagaaggagcagacggaacagatatcaacgccgtcgcccgaagccatgacggcaagttgttggcttccgcggacgatttcggcaaggtacaccttttcagctacccatgctgccagcctagggctttaagccataagtatggaggccactcaagccacgtaaccaatgtagctttcctgtgggacgacagtatggccctcactacaggaggaaaggacacttctgtgctgcaatggagggtagtgtag

SEQ ID NO: 73361 - DNA, 2706 bp, Artificial Sequence
  derived and/or modified sequence
gatgccaggcgagctgagctggggatgctggaacgaagggcgttgctatggcaacgggaggcagggcctggttggggggaccgggcccgggctgggaccgggggggccggcggtggctgtggtggggcgatggcggagcgcggcccggccttctgcggcctgtacgacacgtcctcgctgctgcgatactgcaacgatgacaatttgtcgggcacgagcggtatggaagtggacgaccgcgtgtcggcgctggagcagcggctgcagttacaggaagacgagctggcggtcctaaaggcggcgctggcggatgctctgcgtcgcctgcgggcatgcgaagaacagggagcggcgctacgcgcgcggggcacccccaagggccgggcgcctccgcgcttaggcaccactgcctcggtgtgtcagctcttgaaaggccttcccaccaggacgccccttaatggctcgggacccccgcggcgcgtgggtggctatgccacgtccccatcctctcccaagaaggaggcgacctccgggcgcagcagtgtccgccgctacttgtcaccagagcgcctcgcctcggtgcgccgtgaggacccccgcagccggaccacatcctccagcagcaactgtagcgccaaaaaggaaggcaaaaccaaagaagttatcttcagtgtggaggatggctccgtgaaaatgttcctgaggggccgccctgtgcccatgatgatcccagacgagctggcacccacctacagcctggacacacgctcggagctgccttcttgccggctcaagctggagtgggtctatggctaccgtggccgagactgccgggccaacctttatttgctgcccaccggggagatagtgtactttgtggcctccgtagccgtgctatacagcgtggaggagcagaggcagcgacactacctgggacacaacgatgacatcaaatgcttggccatccacccagatatggtcaccatcgccacgggacaggtggcgggaaccactaaggaagggaagccgctgccgccccacgtgcgcatctgggactcagtttccctctccaccttacacgtgctgggcttgggggtgtttgacagagccgtgtgctgtgtgggcttctccaaatctaatggaggcaacctgctgtgtgcagtggatgaatccaatgatcacatgctctcggtgtgggactgggccaaggagaccaaggtggtggatgtcaagtgctccaatgaggctgtattggtggccaccttccaccccacggaccccactgtgcttatcacctgcgggaaatctcacatctacttctggaccttggaggggggcagcttgagcaagcggcaaggcctctttgagaaacatgagaaaccgaagtatgtgctgtgtgtgacctttttggaaggtggcgacgtggtcacgggggactctggggggaacctctatgtttggggcaaaggtgggaaccgtatcacacaggcggtgctgggcgcccacgacggcggcgtgtttgggctctgcgccctgcgggacgggacgctggtgtctggagggggccgcaattccatcctgcagggctccgtgcacacaggcttctcactgctggtccagggccatgtggaagagctgtggggcctggccacacaccccagtcgggcccagtttgtgacctgcgggcaggataagctggtgcatctatggagctcagattcccaccagcccctgtggagcaggatcatcgaggaccctgcccgctcagccggcttccaccccagtggctctgtcctggctgtgggtacagtgactggcagatggctgctgctggacacggagacccatgacctggtggctatccacacagacggcaatgaacagatctcagtggtcagcttctccccagacggggcgtacctggccgtgggctcccacgacaacttggtgtacgtgtacacggtggaccagggcggccgcaaggtcagccgcctgggcaagtgctcgggccattccagttttatcacccacctggattgggcccaggacagcagctgctttgtcaccaactccggggactatgagattctgtactgggacccggctacctgtaagcagatcaccagtgcggatgctgtgaggaacatggaatgggccacagctacttgtgtcctagggtttggggtgtttgggatctggtctgagggggcggacggcactgatatcaacgctgtggcccgctctcatgatgggaagttgctggcttcagctgatgactttggcaaagttcacctgtttagctacccctgctgtcagcctcgagccctcagccacaagtacggtggacacagcagccatgtgacaaatgtggccttcttgtgggatgacagcatggccctgaccacagggggcaaggacaccagtgtgctacagtggcgggtggtctgatgcggccagggaagagtcaggtgtcagggcaggaattctattttcgggagatgtctattgccgagtagagtaatatatacccagagtatgtctatagcagagggggttatgggggcgggagggtagactgacatacagaagtctctatttatccgggtgggaagagggagtcacatcgctttggggatccattggtgtttggtttggggtgttttttaagttttttcttttatatcatccagaaataaagacacgtac

SEQ ID NO: 73362 - DNA, 2763 bp, Artificial Sequence
  derived and/or modified sequence
atactccggttgtgggcgggaccagacggtacctagggggatccgggcgcagccaatcctggccctaggattgtgttggggggcttggcaggcggtgtcccgacccccctttctgggcatcctggggatgaccccagcgccgggcccggcgccggccgcctgatgccaggcgagctgagctggggatgctggaacgaagggcgttgctatggcaacgggaggcagggcctggttggggggaccgggcccgggctgggaccgggggggccggcggtggctgtggtggggcgatggcggagcgcggcccggccttctgcggcctgtacgacacgtcctcgctgctgcgatactgcaacgatgacaatttgtcgggcacgagcggtatggaagtggacgaccgcgtgtcggcgctggagcagcggctgcagttacaggaagacgagctggcggtcctaaaggcggcgctggcggatgctctgcgtcgcctgcgggcatgcgaagaacagggagcggcgctacgcgcgcggggcacccccaagggccgggcgcctccgcgcttaggcaccactgcctcggtgtgtcagctcttgaaaggccttcccaccaggacgccccttaatggctcgggacccccgcggcgcgtgggtggctatgccacgtccccatcctctcccaagaaggaggcgacctccgggcgcagcagtgtccgccgctacttgtcaccagagcgcctcgcctcggtgcgccgtgaggacccccgcagccggaccacatcctccagcagcaactgtagcgccaaaaaggaaggcaaaaccaaagaagttatcttcagtgtggaggatggctccgtgaaaatgttcctgaggggccgccctgtgcccatgatgatcccagacgagctggcacccacctacagcctggacacacgctcggagctgccttcttgccggctcaagctggagtgggtctatggctaccgtggccgagactgccgggccaacctttatttgctgcccaccggggagatagtgtactttgtggcctccgtagccgtgctatacagcgtggaggagcagaggcagcgacactacctgggacacaacgatgacatcaaatgcttggccatccacccagatatggtcaccatcgccacgggacaggtggcgggaaccactaaggaagggaagccgctgccgccccacgtgcgcatctgggactcagtttccctctccaccttacacgtgctgggcttgggggtgtttgacagagccgtgtgctgtgtgggcttctccaaatctaatggaggcaacctgctgtgtgcagtggatgaatccaatgatcacatgctctcggtgtgggactgggccaaggagaccaaggtggtggatgtcaagtgctccaatgaggctgtattggtggccaccttccaccccacggaccccactgtgcttatcacctgcgggaaatctcacatctacttctggaccttggaggggggcagcttgagcaagcggcaaggcctctttgagaaacatgagaaaccgaagtatgtgctgtgtgtgacctttttggaaggtggcgacgtggtcacgggggactctggggggaacctctatgtttggggcaaaggtgggaaccgtatcacacaggcggtgctgggcgcccacgacggcggcgtgtttgggctctgcgccctgcgggacgggacgctggtgtctggagggggccgtgatcggcgggtggtcctctggggttctgactacagcaagctgcaggaagtggaggtccctgaggactttggccctgtgcgcaccgtggcagagggccacggagacacactgtacgtggggaccacccgcaattccatcctgcagggctccgtgcacacaggcttctcactgctggtccagggccatgtggaagagctgtggggcctggccacacaccccagtcgggcccagtttgtgacctgcgggcaggataagctggtgcatctatggagctcagattcccaccagcccctgtggagcaggatcatcgaggaccctgcccgctcagccggcttccaccccagtggctctgtcctggctgtgggtacagtgactggcagatggctgctgctggacacggagacccatgacctggtggctatccacacagacggcaatgaacagatctcagtggtcagcttctccccagacggggcgtacctggccgtgggctcccacgacaacttggtgtacgtgtacacggtggaccagggcggccgcaaggtcagccgcctgggcaagtgctcgggccattccagttttatcacccacctggattgggcccaggacagcagctgctttgtcaccaactccggggactatgagattctgtactgggacccggctacctgtaagcagatcaccagtgcggatgctgtgaggaacatggaatgggccacagctacttgtgtcctagggtttggggtgtttgggatctggtctgagggggcggacggcactgatatcaacgctgtggcccgctctcatgatgggaagttgctggcttcagctgatgactttggcaaagttcacctgtttagctacccctgctgtcagcctcgagccctcagccacaagtacggtggacacagcagccatgtgacaaatgtggccttcttgtgggatgacagcatggccctgaccacagggggcaaggacaccagtgtgctacagtggcgggtggtctgatgcggccagggaagagtcaggtgtc

SEQ ID NO: 73363 - protein, 796 aa, Artificial Sequence
  derived and/or modified sequence
MSLDDNLSGTSGMEVDDRVSALEQRLQLQEDELAVLKAALADALRRLRACEEQGAALRARGTPKGRAPPRLGTTASVCQLLKGLPTRTPLNGSGPPRRVGGYATSPSSPKKEATSGRSSVRRYLSPERLASVRREDPRSRTTSSSSNCSAKKEGKTKEVIFSVEDGSVKMFLRGRPVPMMIPDELAPTYSLDTRSELPSCRLKLEWVYGYRGRDCRANLYLLPTGEIVYFVASVAVLYSVEEQRQRHYLGHNDDIKCLAIHPDMVTIATGQVAGTTKEGKPLPPHVRIWDSVSLSTLHVLGLGVFDRAVCCVGFSKSNGGNLLCAVDESNDHMLSVWDWAKETKVVDVKCSNEAVLVATFHPTDPTVLITCGKSHIYFWTLEGGSLSKRQGLFEKHEKPKYVLCVTFLEGGDVVTGDSGGNLYVWGKGGNRITQAVLGAHDGGVFGLCALRDGTLVSGGGRDRRVVLWGSDYSKLQEVEVPEDFGPVRTVAEGHGDTLYVGTTRNSILQGSVHTGFSLLVQGHVEELWGLATHPSRAQFVTCGQDKLVHLWSSDSHQPLWSRIIEDPARSAGFHPSGSVLAVGTVTGRWLLLDTETHDLVAIHTDGNEQISVVSFSPDGAYLAVGSHDNLVYVYTVDQGGRKVSRLGKCSGHSSFITHLDWAQDSSCFVTNSGDYEILYWDPATCKQITSADAVRNMEWATATCVLGFGVFGIWSEGADGTDINAVARSHDGKLLASADDFGKVHLFSYPCCQPRALSHKYGGHSSHVTNVAFLWDDSMALTTGGKDTSVLQWRVV

SEQ ID NO: 73364 - DNA, 2391 bp, Artificial Sequence
  derived and/or modified sequence
atgagcctggacgacaacctgagcggcaccagcggcatggaggtggacgacagagtgagcgccctggagcagagactgcagctgcaggaggacgagctggccgtgctgaaggccgccctggccgacgccctgagaagactgagagcctgcgaggagcagggcgccgccctgagagccagaggcacccccaagggcagagccccccccagactgggcaccaccgccagcgtgtgccagctgctgaagggcctgcccaccagaacccccctgaacggcagcggcccccccagaagagtgggcggctacgccaccagccccagcagccccaagaaggaggccaccagcggcagaagcagcgtgagaagatacctgagccccgagagactggccagcgtgagaagagaggaccccagaagcagaaccaccagcagcagcagcaactgcagcgccaagaaggagggcaagaccaaggaggtgatcttcagcgtggaggacggcagcgtgaagatgttcctgagaggcagacccgtgcccatgatgatccccgacgagctggcccccacctacagcctggacaccagaagcgagctgcccagctgcagactgaagctggagtgggtgtacggctacagaggcagagactgcagagccaacctgtacctgctgcccaccggcgagatcgtgtacttcgtggccagcgtggccgtgctgtacagcgtggaggagcagagacagagacactacctgggccacaacgacgacatcaagtgcctggccatccaccccgacatggtgaccatcgccaccggccaggtggccggcaccaccaaggagggcaagcccctgcccccccacgtgagaatctgggacagcgtgagcctgagcaccctgcacgtgctgggcctgggcgtgttcgacagagccgtgtgctgcgtgggcttcagcaagagcaacggcggcaacctgctgtgcgccgtggacgagagcaacgaccacatgctgagcgtgtgggactgggccaaggagaccaaggtggtggacgtgaagtgcagcaacgaggccgtgctggtggccaccttccaccccaccgaccccaccgtgctgatcacctgcggcaagagccacatctacttctggaccctggagggcggcagcctgagcaagagacagggcctgttcgagaagcacgagaagcccaagtacgtgctgtgcgtgaccttcctggagggcggcgacgtggtgaccggcgacagcggcggcaacctgtacgtgtggggcaagggcggcaacagaatcacccaggccgtgctgggcgcccacgacggcggcgtgttcggcctgtgcgccctgagagacggcaccctggtgagcggcggcggcagagacagaagagtggtgctgtggggcagcgactacagcaagctgcaggaggtggaggtgcccgaggacttcggccccgtgagaaccgtggccgagggccacggcgacaccctgtacgtgggcaccaccagaaacagcatcctgcagggcagcgtgcacaccggcttcagcctgctggtgcagggccacgtggaggagctgtggggcctggccacccaccccagcagagcccagttcgtgacctgcggccaggacaagctggtgcacctgtggagcagcgacagccaccagcccctgtggagcagaatcatcgaggaccccgccagaagcgccggcttccaccccagcggcagcgtgctggccgtgggcaccgtgaccggcagatggctgctgctggacaccgagacccacgacctggtggccatccacaccgacggcaacgagcagatcagcgtggtgagcttcagccccgacggcgcctacctggccgtgggcagccacgacaacctggtgtacgtgtacaccgtggaccagggcggcagaaaggtgagcagactgggcaagtgcagcggccacagcagcttcatcacccacctggactgggcccaggacagcagctgcttcgtgaccaacagcggcgactacgagatcctgtactgggaccccgccacctgcaagcagatcaccagcgccgacgccgtgagaaacatggagtgggccaccgccacctgcgtgctgggcttcggcgtgttcggcatctggagcgagggcgccgacggcaccgacatcaacgccgtggccagaagccacgacggcaagctgctggccagcgccgacgacttcggcaaggtgcacctgttcagctacccctgctgccagcccagagccctgagccacaagtacggcggccacagcagccacgtgaccaacgtggccttcctgtgggacgacagcatggccctgaccaccggcggcaaggacaccagcgtgctgcagtggagagtggtgtag

SEQ ID NO: 73365 - DNA, 2391 bp, Artificial Sequence
  derived and/or modified sequence
atgagcctggatgacaacttgagcggcactagcgggatggaagtcgatgacagagtgtcggctctcgagcagagactgcaactgcaggaggatgaactggccgtcctcaaagcagcactagccgatgcactgaggcgtttgagggcctgcgaagagcagggagccgcgctgcgggcgcgcggcacacccaagggaagagcaccccctcggctcggcaccactgccagcgtttgccaattgcttaaaggcctccccacaaggacccccctgaacggaagtggccctcccagacgggttggcggttatgccacatcaccaagctccccgaaaaaggaggcaacctcgggcagatcctcggtcagaaggtacctgtcacctgagagactggcaagcgtgcggcgagaggacccaagaagccgcacgaccagtagtagttctaactgctctgcaaagaaagaaggtaaaaccaaagaggttatcttcagtgtggaggacgggtctgtcaaaatgtttttgcggggtcggcccgtgccaatgatgattccagacgaactcgcaccaacttatagcctggacaccagatcagagctccctagttgtagactgaagctcgagtgggtgtatggatatcgcggacgagactgcagggccaacctctaccttctgcccacgggcgaaatagtctatttcgtcgccagcgtggccgtgctgtactcagtggaggagcaacggcaaagacattatcttgggcataacgatgacattaagtgcctggccattcatccagatatggtgacgattgcaacagggcaggttgcaggcactacaaaagaggggaaaccactgcccccacacgtacggatctgggatagtgtcagtctcagcacccttcatgttctaggacttggagtcttcgacagggcagtgtgctgcgtggggttttcgaagagcaatggaggcaaccttttatgcgccgtggacgaaagtaatgaccacatgctgtccgtatgggactgggctaaagaaactaaagtcgtggacgtcaaatgttcaaacgaggccgtcctcgtggctacatttcaccctacggacccaaccgttctgataacgtgcggtaagagccacatctacttctggactttggaaggcggctccctctctaaacgacagggactattcgagaaacacgaaaaaccaaaatatgtcctgtgtgtgactttcctggagggcggtgacgttgtgaccggtgattccggcgggaacctctatgtttgggggaaggggggcaaccgtatcacccaagccgttctcggggctcatgatggcggggtgttcgggttatgtgcgctgagggatggtacactggtaagtggggggggcagagacaggcgagtcgtgctctggggaagcgattacagtaaattgcaggaagttgaggtgcccgaagactttgggccagtccgcacagtagccgagggccacggtgatacgctgtacgtcggaactacgcgtaattctatcctgcaggggtccgttcatactggcttttcgctattagtgcaaggacacgttgaagaactctgggggctggctacccacccttccagggctcaatttgtcacttgtggtcaggacaagctcgttcatttgtggagctccgacagccaccaacctctctggagtcggattatcgaggaccctgctcgctccgcaggcttccatccttctggatcagtcctggccgttgggactgtcacaggaaggtggctgttgctggataccgagacacacgacctcgtggctattcacactgatggcaacgagcagatctcagttgtgagctttagccctgacggggcttatctggctgtaggaagccacgataaccttgtctacgtgtacacagtggatcagggaggccgtaaggtttcgaggctgggcaagtgttcgggacacagctcatttatcactcatctcgactgggcccaggatagttcttgtttcgtcaccaattctggggattacgagattctgtactgggatcctgcaacgtgtaagcaaatcacatcagccgacgctgtgcggaacatggagtgggctacagccacctgcgtcctcggcttcggcgtgttcggcatttggagtgagggggctgacggaaccgatattaacgccgtagctagaagccacgacggcaagctgctggcaagtgctgacgattttgggaaggtgcatctgtttagctacccatgttgtcagccccgggccctcagccacaaatacggcggtcattcgagtcacgtgacaaacgtcgctttcctctgggatgatagtatggccctgaccaccggggggaaagatacttcggtcctgcaatggcgggtggtttag

SEQ ID NO: 73366 - DNA, 2391 bp, Artificial Sequence
  derived and/or modified sequence
atgagcctggatgacaacctgagcggcaccagcggcatggaggtggatgacagagtgtctgccctggagcagaggctgcagctgcaggaggatgagctggccgtgctgaaggccgccctggctgatgccctgcggcggctgcgggcctgtgaggagcagggcgccgccctgcgggcccggggcacccccaagggccgggccccaccccggctgggcaccacagcctctgtgtgccagctgctgaagggcctgcccaccaggacccccctgaatggaagtggccccccaagaagagtgggcggctacgccaccagccccagcagccccaagaaggaggccaccagcggccgcagctctgtgcggcgctacctgagccctgagcggctggcctctgtgagaagagaggaccccaggagcaggaccaccagcagcagcagcaactgcagcgccaagaaggagggcaagaccaaggaggtgatcttctctgtggaggatggctctgtgaagatgttcctgcggggccggcctgtgcccatgatgatcccagatgagctggcccccacctacagcctggacaccaggtctgagctgcccagctgccgcctgaagctggagtgggtgtatggctaccggggccgggactgccgggccaacctgtacctgctgcccaccggggagatcgtgtactttgtggcctctgtggccgtgctgtacagcgtggaggagcagaggcagaggcactacctgggccacaatgatgacatcaagtgcctggccatccacccagacatggtgaccatcgccaccggccaggtggccggcaccaccaaggagggcaagcccctgccccctcatgtgcgcatctgggacagcgtgtccctgagcaccctgcacgtgctgggcctgggcgtgtttgacagagctgtgtgctgcgtgggcttcagcaagagcaatggaggcaacctgctgtgtgctgtggatgagagcaatgaccacatgctgtctgtgtgggactgggccaaggagaccaaggtggtggatgtgaagtgcagcaatgaggccgtgctggtggccaccttccaccccacagaccccaccgtgctgatcacctgtgggaagagccacatctacttctggaccctggagggcggcagcctgagcaagaggcagggcctgtttgagaagcatgagaagcccaagtatgtgctgtgtgtgaccttcctggagggcggagatgtggtgactggagacagcggcggcaacctgtatgtgtggggcaaaggaggcaaccgcatcacccaggccgtgctgggcgcccatgatggaggagtgtttggcctgtgtgccctgagagatggcaccctggtgtctgggggcggccgggacagaagagtggtgctgtggggcagtgactacagcaagctgcaggaggtggaggtgcctgaggactttggacctgtgaggacagtggccgagggccacggggacaccctgtatgtgggcaccaccaggaacagcatcctgcagggctctgtgcacacaggcttcagcctgctggtgcagggccacgtggaggagctgtggggcctggccacccaccccagccgggcccagtttgtgacctgtggccaggacaagctggtgcacctgtggagcagtgacagccaccagcccctgtggagccgcatcattgaagatcctgcccggtctgctggcttccaccccagcggctctgtgctggccgtgggcaccgtgacaggccgctggctgctgctggacacagagacccatgacctggtggccatccacacagatggaaatgagcagatctctgtggtgtccttctccccagatggagcctacctggccgtgggcagccatgacaacctggtgtatgtgtacacagtggaccagggcggcaggaaggtgtcccggctgggcaagtgcagcggccacagcagcttcatcacccacctggactgggcccaggacagcagctgctttgtgaccaacagcggggactatgagatcctgtactgggaccctgccacctgcaagcagatcaccagcgcagatgctgtgaggaacatggagtgggccacagccacctgtgtgctgggcttcggcgtgtttggcatctggagcgagggcgcagatggaacagacatcaatgctgtggcccggagccatgatggcaagctgctggccagcgcagatgactttgggaaggtgcacctgttctcctacccctgctgccagccccgggccctgagccacaagtatggaggccacagcagccacgtgaccaacgtggccttcctgtgggatgacagcatggccctgaccactggaggcaaggacacctctgtgctgcagtggagggtggtgtag

SEQ ID NO: 73367 - DNA, 2391 bp, Artificial Sequence
  derived and/or modified sequence
atgagcctggacgacaacctgagcggcaccagcggcatggaggtggacgaccgggtcagcgctctcgagcaacggctgcaattacaggaagacgagttagcagtgctgaaggccgcactcgctgacgcactgcgaaggctcagggcatgcgaagaacagggggctgccctccgagccaggggtacccccaaaggaagagcccctccccgcctgggcaccaccgcctccgtttgtcaactcctcaagggcttgccaacccgcacacccttgaatgggtctggccccccgcgtagggtggggggatacgcaaccagcccatcgagtcccaagaaggaggcgactagcggacgctcgtccgtgcggcgatatctctccccagaaagactggctagcgtacgccgggaagatcctcgttctcggactacatctagcagctcaaattgctctgcaaagaaagaaggaaaaacaaaagaggtgatcttctccgtagaagacggatccgtgaaaatgttcctcaggggacgccctgtccctatgatgatccctgacgagctggcccctacatattctctagacacgaggagcgagctgcctagctgtaggctgaaactggagtgggtctacggctacaggggcagggactgcagagctaacttgtatctgctgcctaccggagagattgtgtacttcgtggcaagtgtggccgtcttatacagtgtcgaggagcagaggcaacggcactatcttggacacaacgacgacatcaaatgcctcgctatccatcccgacatggtaacaattgctacaggccaggtggccggcacaaccaaggaagggaaaccactgccgccacacgtgagaatttgggatagcgtgtctctgagtaccttacatgtgttaggtctcggagtcttcgatagggcagtgtgttgtgtgggattttctaaaagtaatggggggaatctgctttgtgctgtggatgagagcaacgaccatatgctgagcgtgtgggattgggccaaggaaacaaaggtggtggacgtgaagtgctctaatgaagccgtactggtcgccaccttccatcctactgatcccacggtcctgataacatgtggcaagagtcacatctacttttggaccctcgagggaggatcactcagcaagagacagggcctgtttgaaaagcacgagaaacctaagtatgtcctttgcgttacttttctcgaagggggagacgtggtgacaggtgattctggaggtaacctctacgtctgggggaagggaggcaataggatcactcaggccgtcctgggtgctcatgatggcggcgtgttcggtttgtgtgccctgagagatgggaccctggtgtctggcggggggcgcgaccggcgtgttgtgctgtgggggtccgactactccaagcttcaggaagtggaagtgcccgaggattttggacctgtcagaaccgttgcagagggccacggagacacgttatacgtgggaaccacccgtaactcaatcctccaaggatctgtgcatacaggcttcagcctgctggtccaggggcacgtagaggagctttggggattggccacgcacccttcaagagcacagttcgtcacatgtggccaagacaaattggttcacttatggtcaagtgactctcaccagcctctatggtcaaggatcattgaggatccagctaggtcagccggatttcaccctagtggctctgtgctcgcagtcgggactgtaacagggcggtggcttctgctggacacggagactcacgatctagtcgctatacatactgatggaaatgagcaaatcagtgtggtgagtttttctcctgacggggcatacctagccgtcggttcgcatgataacttagtgtatgtgtacactgttgatcagggcggtagaaaggtcagtcgactaggcaaatgttcaggacatagcagtttcatcactcatctggactgggcccaggatagcagttgcttcgttactaattctggggattatgagattctctattgggatccagccacgtgcaagcagataacatcagcagatgccgttagaaacatggaatgggccaccgccacatgtgtgctcggcttcggcgtctttgggatttggagcgaaggtgccgacgggacagacatcaatgccgtggctcgatctcatgacggcaagctgctcgcctctgctgatgacttcggtaaagttcacttgttcagctatccctgctgccagccacgcgctctctcccacaaatatggcgggcatagctctcatgtgaccaatgtggcatttctttgggacgattcaatggccctgaccacaggcgggaaggatacttctgtgctgcagtggcgcgttgtctag

SEQ ID NO: 73368 - DNA, 2391 bp, Artificial Sequence
  derived and/or modified sequence
atgagtctggacgacaacctgtcaggcacgtctggcatggaggtggacgacagagtgtcagcccttgaacagcgcctgcagctccaagaggatgaattggccgtgctaaaggccgctcttgcagatgccctccgccgactccgggcttgcgaagaacagggagcggctttgcgggctcgcggaactcccaagggaagggcccctccacgacttggaaccactgcctccgtgtgtcaattattaaagggccttcccactaggactcctctcaacggctcagggccacctcgacgcgtggggggttatgccacatcaccatcttcacccaagaaagaagcaacttccggccgatctagtgtgcgcaggtacctaagcccagaacgactagccagcgttcgtagagaagaccctcgttctaggaccacttcatcaagcagcaattgtagcgctaagaaagaagggaagacaaaggaggttatcttttcagtggaagatgggagcgtgaagatgttcttacgcggtcgtccggtgccaatgatgatacctgacgaactcgcgccaacctattcactcgatactcgatctgagcttccttcttgcagactgaagcttgaatgggtgtacggctatcggggacgggactgtcgagcaaatctctacctgttgcctaccggtgaaatcgtatacttcgtggccagcgtggcagttctgtactctgtggaagagcagcggcaaagacattacctggggcacaacgatgacatcaaatgcctggccatccaccctgacatggttaccatcgcgactggccaggtggccggaaccacgaaggaaggtaaaccgttaccgcctcacgtgcgcatctgggactccgtttccctctcaacactgcacgttctagggttaggcgtttttgatagggcggtgtgctgtgtcggcttcagcaagagtaacggtgggaatttactgtgcgctgtagatgagagtaatgatcacatgctgagtgtttgggactgggccaaggagacaaaggtggtggacgtcaaatgttccaacgaggctgttctcgttgctacatttcatccgaccgatcccaccgttctgatcacctgtggaaagagccacatatacttttggaccctggaaggtggcagtctgagcaagcggcagggactgtttgaaaagcacgagaagccgaagtacgtactctgcgtcaccttcctggagggtggcgatgtggtgaccggggactcaggcggaaatttatatgtgtggggcaaagggggaaatagaatcacacaggctgtgctcggtgcccatgacgggggagtgtttggcctatgcgcgcttcgagacggtacactggtgagcgggggaggcagggaccggcgtgtagttctctggggtagcgactacagcaagctgcaagaggttgaagtgcctgaggattttgggcctgtgaggaccgtagccgaggggcacggtgatactctgtacgttggcactacacggaatagtattctgcagggttctgtccacacaggctttagcttgctggtccagggccacgtggaggaactttggggtctggcgacccatcctagtcgcgcacaattcgttacttgcggtcaggacaaactggtgcatctgtggtctagtgatagccatcagccactgtggtcgcggatcattgaagaccccgctcgttctgcaggattccatccctcaggtagtgtgttggccgtgggtacagtgacaggacgctggctcctcctcgataccgaaacacatgacctcgtcgccatccacacagatggcaacgaacagatctccgtggtttcctttagcccagatggggcatatctcgcggtcggcagccatgacaacctcgtgtacgtgtatacggtagatcagggtggccgtaaggtgagccggctgggcaagtgctctgggcattcttcctttataacccacttagattgggctcaggacagctcttgcttcgtaaccaactcaggcgactatgagattctctattgggatcccgctacctgtaagcagataactagtgctgatgcagtccgcaatatggagtgggcgacagctacatgcgtgctgggcttcggcgtttttgggatttggtcagaaggcgcagatggtacagacatcaacgccgtggcgcgaagtcatgacggcaaactgttggcatccgcagacgacttcggaaaagtgcacttattctcctacccttgctgtcagcctcgtgcgctcagtcataagtacggagggcattctagccacgttaccaacgtcgcctttctctgggatgacagcatggcactcacaactggaggcaaggacacgtccgtcctgcagtggagagtcgtgtag

SEQ ID NO: 73369 - DNA, 2791 bp, Artificial Sequence
  derived and/or modified sequence
actgcggagcccagagggccagctgcgcggcctgtggacgcgggatggcaggggcgagctccacgccctgtccccgtctaagctaccacctttacttccaccaggctgggaaccagggcttccttggttgtggtcagcaatgagtctggatgacaatttgtcgggcacgagcggtatggaagtggacgaccgcgtgtcggcgctggagcagcggctgcagttacaggaagacgagctggcggtcctaaaggcggcgctggcggatgctctgcgtcgcctgcgggcatgcgaagaacagggagcggcgctacgcgcgcggggcacccccaagggccgggcgcctccgcgcttaggcaccactgcctcggtgtgtcagctcttgaaaggccttcccaccaggacgccccttaatggctcgggacccccgcggcgcgtgggtggctatgccacgtccccatcctctcccaagaaggaggcgacctccgggcgcagcagtgtccgccgctacttgtcaccagagcgcctcgcctcggtgcgccgtgaggacccccgcagccggaccacatcctccagcagcaactgtagcgccaaaaaggaaggcaaaaccaaagaagttatcttcagtgtggaggatggctccgtgaaaatgttcctgaggggccgccctgtgcccatgatgatcccagacgagctggcacccacctacagcctggacacacgctcggagctgccttcttgccggctcaagctggagtgggtctatggctaccgtggccgagactgccgggccaacctttatttgctgcccaccggggagatagtgtactttgtggcctccgtagccgtgctatacagcgtggaggagcagaggcagcgacactacctgggacacaacgatgacatcaaatgcttggccatccacccagatatggtcaccatcgccacgggacaggtggcgggaaccactaaggaagggaagccgctgccgccccacgtgcgcatctgggactcagtttccctctccaccttacacgtgctgggcttgggggtgtttgacagagccgtgtgctgtgtgggcttctccaaatctaatggaggcaacctgctgtgtgcagtggatgaatccaatgatcacatgctctcggtgtgggactgggccaaggagaccaaggtggtggatgtcaagtgctccaatgaggctgtattggtggccaccttccaccccacggaccccactgtgcttatcacctgcgggaaatctcacatctacttctggaccttggaggggggcagcttgagcaagcggcaaggcctctttgagaaacatgagaaaccgaagtatgtgctgtgtgtgacctttttggaaggtggcgacgtggtcacgggggactctggggggaacctctatgtttggggcaaaggtgggaaccgtatcacacaggcggtgctgggcgcccacgacggcggcgtgtttgggctctgcgccctgcgggacgggacgctggtgtctggagggggccgtgatcggcgggtggtcctctggggttctgactacagcaagctgcaggaagtggaggtccctgaggactttggccctgtgcgcaccgtggcagagggccacggagacacactgtacgtggggaccacccgcaattccatcctgcagggctccgtgcacacaggcttctcactgctggtccagggccatgtggaagagctgtggggcctggccacacaccccagtcgggcccagtttgtgacctgcgggcaggataagctggtgcatctatggagctcagattcccaccagcccctgtggagcaggatcatcgaggaccctgcccgctcagccggcttccaccccagtggctctgtcctggctgtgggtacagtgactggcagatggctgctgctggacacggagacccatgacctggtggctatccacacagacggcaatgaacagatctcagtggtcagcttctccccagacggggcgtacctggccgtgggctcccacgacaacttggtgtacgtgtacacggtggaccagggcggccgcaaggtcagccgcctgggcaagtgctcgggccattccagttttatcacccacctggattgggcccaggacagcagctgctttgtcaccaactccggggactatgagattctgtactgggacccggctacctgtaagcagatcaccagtgcggatgctgtgaggaacatggaatgggccacagctacttgtgtcctagggtttggggtgtttgggatctggtctgagggggcggacggcactgatatcaacgctgtggcccgctctcatgatgggaagttgctggcttcagctgatgactttggcaaagttcacctgtttagctacccctgctgtcagcctcgagccctcagccacaagtacggtggacacagcagccatgtgacaaatgtggccttcttgtgggatgacagcatggccctgaccacagggggcaaggacaccagtgtgctacagtggcgggtggtctgatgcggccagggaagagtcaggtgtcagggcaggaattctattttcgggagatgtctattgccgagtagagtaatatatacccagagtatgtctatagcagagggggttatgggggcgggagggtagactgacatacagaagtctctatttatccgggtgggaagagggagtcacatcgctttggggatccattggtgtttggtttggggtgttttttaagttttttcttttatatcatccagaaataaagacacgtacact

SEQ ID NO: 73370 - protein, 500 aa, Artificial Sequence
  derived and/or modified sequence
MNLELLESFGQNYPEEADGTLDCISMALTCTFNRWGTLLAVGCNDGRIVIWDFLTRGIAKIISAHIHPVCSLCWSRDGHKLVSASTDNIVSQWDVLSGDCDQRFRFPSPILKVQYHPRDQNKVLVCPMKSAPVMLTLSDSKHVVLPVDDDSDLNVVASFDRRGEYIYTGNAKGKILVLKTDSQDLVASFRVTTGTSNTTAIKSIEFARKGSCFLINTADRIIRVYDGREILTCGRDGEPEPMQKLQDLVNRTPWKKCCFSGDGEYIVAGSARQHALYIWEKSIGNLVKILHGTRGELLLDVAWHPVRPIIASISSGVVSIWAQNQVENWSAFAPDFKELDENVEYEERESEFDIEDEDKSEPEQTGADAAEDEEVDVTSVDPIAAFCSSDEELEDSKALLYLPIAPEVEDPEENPYGPPPDAVQTSLMDEGASSEKKRQSSADGSQPPKKKPKTTNIELQGVPNDEVHPLLGVKGDGKSKKKQAGRPKGSKAGGAISELL

SEQ ID NO: 73371 - DNA, 1503 bp, Artificial Sequence
  derived and/or modified sequence
atgaatctggagcttctggaatccttcggacagaattaccctgaggaagctgacggaacgcttgattgcatttcaatggccctgacctgcacctttaaccgttggggcacgttactagcggtgggctgtaacgatgggagaattgtgatttgggatttccttactagaggtatcgctaagatcatttccgcacacattcaccctgtgtgttcgttgtgctggtcccgcgacggtcataagctggtcagcgcaagtactgacaacatagtctcccagtgggatgtgctgtccggagattgtgatcaaagattcaggttccccagccctattttaaaagtgcaataccatccgagagatcagaataaggtgctggtgtgcccaatgaagtccgcacccgttatgctcaccctgtctgactccaaacacgtcgtattacctgtagacgatgatagtgatctgaacgtcgtggcctcattcgaccggcggggggaatatatttatacaggcaacgcaaagggaaagatcctcgtattgaagactgatagccaagatctggtggctagcttcagagtgactactggaacatcaaatactacagccattaaaagcatcgagttcgctagaaagggtagctgcttccttattaatacagccgatagaatcatccgggtgtacgatggccgtgagatcctcacatgcgggcgggacggggagcctgaacctatgcaaaaactccaggacctagttaatcggacaccttggaagaagtgctgcttcagtggggatggcgagtacatcgtcgcagggagcgcaagacagcacgccctgtacatttgggagaagagcatcggaaacttagtgaagatcctacacggaacacgcggggagctgctgttggacgtggcctggcaccctgtccgcccaattatcgcgagcatttctagcggcgtggtcagcatctgggcccagaatcaagtggagaattggtccgctttcgcacctgactttaaggaacttgacgagaatgttgaatacgaagagagggagtccgagtttgatattgaggatgaggacaagagcgagcccgagcaaactggcgccgatgccgccgaagacgaggaggtggacgtcacctcagtagatccaatcgctgctttctgtagctcagatgaggagcttgaggactccaaggccctgctctacctgccgatcgctcctgaggtggaagaccctgaggagaacccttatggtccgccaccagatgccgtccagacctcactcatggatgaaggagccagtagcgaaaagaagcggcagagttcggccgatgggagccagcctccaaaaaaaaagcctaagaccaccaacattgagctgcaaggtgtgccaaatgatgaggtccatccactccttggggttaaaggtgatggaaagtcgaagaaaaagcaggcagggcgccctaagggaagcaaggcaggaggtgccattagcgagcttctctag

SEQ ID NO: 73372 - DNA, 1503 bp, Artificial Sequence
  derived and/or modified sequence
atgaacctggagctgctggagagctttggccagaactacccagaggaggctgatggcaccctggactgcatctccatggccctgacctgcaccttcaaccgctggggcaccctgctggccgtgggctgcaatgatggccgcatcgtcatctgggacttcctgacccggggcatcgccaagatcatcagcgcccacatccaccctgtgtgcagcctgtgctggagcagagatggccacaagctggtgtctgccagcacagacaacatcgtgtcccagtgggatgtgctgagcggggactgtgaccagcgcttccgcttccccagccccatcctgaaggtgcagtaccacccccgggaccagaacaaggtgctggtgtgccccatgaagagcgcccctgtgatgctgaccctgagtgacagcaagcacgtggtgctgcctgtggatgatgacagcgacctgaatgtggtggccagctttgacagaagaggagagtacatctacacaggaaatgccaagggcaagatcctggtgctgaagacagacagccaggacctggtggccagcttccgggtgaccaccggcaccagcaacaccacagccatcaagagcattgaatttgccaggaagggcagctgcttcctgatcaacacagctgaccgcatcatccgggtgtatgatggccgggagatcctgacctgtggcagagatggagagcctgagcccatgcagaagctgcaggacctggtgaacagaacaccctggaagaagtgctgcttctctggagatggagagtacatcgtggccggcagcgcccggcagcacgccctgtacatctgggagaagagcatcggcaacctggtgaagatcctgcacggcaccagaggagagctgctgctggatgtggcctggcaccctgtgcggcccatcatcgccagcatcagcagtggagtggtgtccatctgggcccagaaccaggtggagaactggagcgcctttgccccagacttcaaggagctggatgaaaatgtggagtatgaggagcgggagagcgagtttgatattgaagatgaggacaagtctgagcctgagcagacaggagcagatgctgctgaagatgaggaggtggatgtgacctctgtggaccccatcgccgccttctgcagcagtgatgaggagctggaggacagcaaggccctgctgtacctgcccatcgcccctgaggtggaggaccctgaggagaacccctacggccccccaccagatgctgtgcagaccagcctgatggatgaaggagccagcagcgagaagaagaggcagagcagcgcagatggcagccagccccccaagaagaagcccaagaccaccaacatcgagctgcagggcgtgcccaatgatgaggtgcaccccctgctgggcgtgaagggagatggcaagagcaagaagaagcaggccggccggcccaagggcagcaaggccggcggggccatcagcgagctgctgtag

SEQ ID NO: 73373 - DNA, 1503 bp, Artificial Sequence
  derived and/or modified sequence
atgaacctggagctgctggagagcttcggccagaactaccccgaggaggcggacgggaccctggactgcatttctatggccttgacatgtacatttaatcggtggggaacgcttctggccgtgggttgtaacgacggcaggattgtgatctgggactttctcacgcgcggcatcgccaaaataatctcagcccacatacaccctgtgtgctctctgtgttggagcagagacggtcacaagctggtatcagccagcacggacaacatagttagccaatgggacgtgctatctggcgactgcgaccagcgctttagattcccctctccgatccttaaggttcagtatcatccacgcgaccagaataaggtgcttgtgtgtcccatgaagagcgcacctgtaatgctgacactgtcggattccaaacacgttgtgctgcctgtggacgacgattccgacctaaacgtggtcgccagctttgacagacggggcgagtacatctacaccggaaacgcaaaaggaaagatcctggtgctaaagacagatagtcaagacctggtagcgagtttcagggtgacgaccggaaccagcaataccaccgccattaagtcaatagaattcgcccggaaggggtcctgtttcctaattaatactgctgatagaataatccgtgtttacgacggccgagagatactcacctgcgggcgagatggggagccagaacctatgcaaaagctgcaggatctcgtgaaccgaacaccctggaagaagtgttgtttttccggagatggcgaatatatcgtggccggcagcgcgaggcagcacgcactgtatatctgggaaaaatccattggaaatttagttaagatcctacacggaacccgaggagagttactcctggatgtcgcctggcatcccgtcaggccgatcattgccagtatctcgagtggtgtcgtttcaatctgggctcaaaatcaggtagagaactggagcgcattcgctccagactttaaagagttggatgaaaacgtggaatacgaagagagggaaagcgaatttgacatcgaagatgaggataaaagtgagcccgagcagactggggccgacgcagccgaggatgaggaggtggacgtgacgtcggtcgaccctatagccgcattttgtagctctgacgaggagttggaggattctaaagccctgctgtatttgcctatagcccccgaggtggaagatcccgaagaaaatccctatgggcctccgcccgacgcggttcaaacatctctgatggatgagggtgccagctccgaaaagaaaaggcagagcagtgccgatgggtctcagccacccaagaaaaagcctaaaacgacaaacattgagctgcaaggcgtgccaaacgacgaggtgcacccgctcctgggagtcaaaggggacggaaagagcaagaagaagcaggctgggaggcccaagggatccaaagctggaggtgcaatatctgaattgctctag

SEQ ID NO: 73374 - DNA, 1503 bp, Artificial Sequence
  derived and/or modified sequence
atgaatctcgagctcttggagtcattcggacagaactatccggaagaggccgacggaaccttggactgcatctccatggctttaacttgcacctttaaccgctggggcactctgctggccgttggctgtaacgatggcaggatcgtcatttgggattttctgactagagggattgctaaaatcatctcggcacatatccacccagtatgctccctgtgctggtcccgcgatggtcacaagctcgtgtctgccagcacggacaatattgtgtcccagtgggacgtgctgagtggagactgtgaccagcggttccgctttccgtcccctatccttaaagtgcaatatcaccctagagaccagaataaagttctcgtctgtccgatgaaatctgcgccagtcatgctaacattgtccgattctaagcacgtggtgcttcctgtcgacgatgactctgatctcaacgtagtggcatctttcgatagaagaggggaatacatttacaccgggaacgcaaagggcaaaatcctcgtactgaagacggattctcaagacctggttgcatcgtttcgggtgacgaccggtacatccaatacgaccgccattaagtctatcgaatttgctcgcaaagggagttgcttcctcatcaatactgccgaccgcatcattcgggtgtatgatggcagggagattctgacttgcggtcgcgatggcgagcctgagccaatgcagaagctacaggatttagtaaacagaactccctggaagaaatgttgtttttcaggggacggagaatacattgtggctggcagtgcacgccaacatgccctttatatctgggagaaatccattggcaatctggttaaaattctccacggaaccaggggggagttgctgctagacgtggcttggcacccagtcagaccaatcatagcttccatatcatcaggagtggtctcgatctgggcgcagaatcaggtggagaactggagcgcattcgcacctgattttaaagagttggacgagaacgtcgagtacgaggagcgcgagtctgaattcgacatcgaagatgaggacaaatctgagccggaacagaccggagcagatgctgctgaagatgaagaggttgacgttactagcgttgatccaattgccgctttctgctcttccgacgaggagctcgaagacagtaaagctctgctgtacctcccaatcgccccagaggtggaagaccccgaagaaaacccctacggcccacctcccgacgccgtccagacaagtttgatggatgagggagcgtcttcagagaaaaagaggcagagcagcgcggacgggtctcagcctcctaagaagaaacctaagacaactaacattgagctacaaggtgtccccaatgacgaggtgcatcctttgcttggggtcaagggagacggaaagtcaaaaaaaaagcaggcaggacgccctaagggcagtaaagcgggaggggctatttccgaattgctttag

SEQ ID NO: 73375 - DNA, 4290 bp, Artificial Sequence
  derived and/or modified sequence
gcggggccttctaaggccgaaagtcttcggagcttgcgccagtctcttcgcggcgtccaccacttagacgcaagttgctgaagccggccggggagaaggtgttgttgccggagctgagaccgggcggccacagtccgcagggatgaacctcgagttgctggagtcctttgggcagaactatccagaggaagctgatggaactttggattgtatcagcatggctttgacttgcacctttaacaggtggggcacactgcttgcagttggctgtaatgatggccgaattgtcatctgggatttcttgacaagaggcattgctaaaataattagtgcacacatccatccagtgtgttctttatgctggagccgagatggtcataaactcgtgagtgcttccactgataacatagtgtcacagtgggatgttctttcaggcgactgtgaccagaggtttcgattcccttcacccatcttaaaagtccaatatcatccacgagatcagaacaaggttctcgtgtgtcccatgaaatctgctcctgtcatgttgaccctttcagattccaaacatgttgttctgccggtggacgatgactccgatttgaacgttgtggcatcttttgataggcgaggggaatatatttatacgggaaacgcaaaaggcaagattttggtcctaaaaacagattctcaggatcttgttgcttccttcagagtgacaactggaacaagcaataccacagccattaagtcaattgagtttgcccggaaggggagttgctttttaattaacacggcagatcgaataatcagagtttatgatggcagagaaatcttaacatgtggaagagatggagagcctgaacctatgcagaaattgcaggatttggtgaataggaccccatggaagaaatgttgtttctctggggatggggaatacatcgtggcaggttctgcccggcagcatgccctgtacatctgggagaagagcattggcaacctggtgaagattctccatgggacgagaggagaactcctcttggatgtagcttggcatcctgttcgacccatcatagcatccatttccagtggagtggtatctatctgggcacagaatcaagtagaaaactggagtgcatttgcaccagacttcaaagaattggatgaaaatgtagaatacgaagaaagggaatcagagtttgatattgaagatgaagataagagtgagcctgagcagacaggggctgatgctgcagaagatgaggaagtggatgtcaccagcgtggaccctattgctgccttctgtagcagtgatgaagagctggaagattcaaaggctctattgtatttacccattgcccctgaggtagaagacccagaagaaaatccttacggccccccaccggatgcagtccaaacctccttgatggatgaaggggctagttcagagaagaagaggcagtcctcagcagatgggtcccagccacctaagaagaaacccaaaacaaccaatatagaacttcaaggagtaccaaatgatgaagtccatccactactgggtgtgaagggggatggcaaatccaagaagaagcaagcaggccggcctaaaggatcaaaagcaggaggagcaatctcagaactgttatgaagaccttcgaagttcttcattctttctcactttgccatcatgtggcctctggacactgtggtcagtcatttgaaaattgactttaatttaaaacaaaggcctgtgcctcccacccaggaggtgggagggtgaattttatgtttaaatgaagaagtgaattatggaagaagagtatacgaccttcccttccctttcaagcataagtccaaatagactctcaggaatgaagatttgtgaagacatcagataggaattttgactcatttaaactttgatgcttagttatgttgctggagaaaagatacttatgttttgctcatctaacttcattgtacccagcgtcattttgacatgtcatttcctatctcccatttgccttcggtcctcaatgcatgtctttgagtgacttcttatctgaaattttgctactggtatcctaggaaagcttttgttggatactctcattttaaacttctcctctccccagatacctcctatatttccatattgtgtgcaaaggatgggcagaaaagaaagtgcttgaaagatttcaaattttcagaaagggaacaacgaaggccctctcttcctctcataccacgttttgctcaagaagctgggctgtaacaattcagggttttcccttgttttcctctcattgcatgtttccctccaatattggttcattgtcatcaatcatggtttttgaagatagctagttttatccatctccagcaaagaatcatcaatagtttatattgctttacctgtgctggcttccagagatggaaacaaacccaggtgtctctcaacaagctacttttttactggggtgggggaatctatgcaaggagtaaagtaaaaccatccagaatcaaagcagcaaccacatagttcaaatcaaagatcaaggtgaattttttgtatcactgcctgtggaaatctatcctcatcagtcattgcatttttccctgcctatacctgtgctcctttttcttactgtgttttcagtcacttcctttctgtgaaaggttgcttagctttttttttgacatttgttgttctttataaaaataacagattggatagatgtgtacatttggtgtttgaaattctctgaaaatcccattaggaaaccaggtgtgaaaagggctcagtagcttctctgagtggcgtttttagctgactggaagtgcttaatctggatcgtcttttttttttttttttttttttcaatattttaaaaggagaatttaaatactgtgcttactgtgaaatatatcagttggtgagccgggcgtggtgggtcacgcctgtaatcccagcactttgggaggccaaggcgggttgatcacccgaggtcaggagttcaagaccagcctggccaacgtggtgaaagcctgtatctattaaaagacaaaaattagctgggcgtggtagtacatgcctgtaatcccagctacactggaggctgagtcaggagaatcacttgaacgtgggaggcagaggttgcagtgagtggagatcgcaccactgccctccagcctaggtgacagaatgagactctatctcaaaaaaaaaaaaaaaatgatatcagttggtggatgctcctataggtagccaaacacattgattacctgttagattttaggatagaaatcaaagtagagcacgtcagcaagagcctctttgtctcactccatcatttaaaaccagtatattcagtagttgaagaaagagctctccctgagtcagttgcaaaacgtctatatttttagatgccactacttttttcttaaatattcattttgagactgtcatgagttagaccagtggttgagattagtagatggctcactagacatgtttttgttttgcagacattatatccattccagtcctctgcactgtacactgcagcagtgtgcaaactatgggacttagagggtttctgccatctttccacgtgtgaagtagcttggtttcctctgcctgtgcatttggatgtttgtgctatgtccacctcctaaactggctactgagaaaatcatcttcagccctgtcagattgtctctggcagtagctcctaataattatttatgtttttggaatttttttttcaacttttaaaaaaccttctatccatttcaatttgaattatttgatttgtacaatatatgtatattctcttcttcctttttgtcatccctgccctgccacccccaaaattttgtttttaaaaatattctgggctgggcatggtggctcacacctgtaatcccagcacttggggaggccgaggctggtggatcatctgaggtcaggtgtttgagaccagcctggtcaacatggtgaaaccccgtctctactaaaaatacaaaaattagctgggcgtggtggcgggcacctgtaatcctagctactcgggaggctgaggcaggagaattgcttgaatccaggaggcagaggttgcagtgagctgagattgcgccactgcactccagcctgggtgacagagcaagactccatctcaaaaaaaaaaaaaaaaaaaaatctgtagttttgtacaagatgagacttagccttgggtacttcttgctgaagctttaatgctttgtaaataaaatcggatgtttattaaagaa

SEQ ID NO: 73376 - DNA, 1503 bp, Artificial Sequence
  derived and/or modified sequence
atgaacctggagctgctggagagcttcggccagaactaccccgaggaggccgacggcaccctggactgcatcagcatggccctgacctgcaccttcaacagatggggcaccctgctggccgtgggctgcaacgacggcagaatcgtgatctgggacttcctgaccagaggcatcgccaagatcatcagcgcccacatccaccccgtgtgcagcctgtgctggagcagagacggccacaagctggtgagcgccagcaccgacaacatcgtgagccagtgggacgtgctgagcggcgactgcgaccagagattcagattccccagccccatcctgaaggtgcagtaccaccccagagaccagaacaaggtgctggtgtgccccatgaagagcgcccccgtgatgctgaccctgagcgacagcaagcacgtggtgctgcccgtggacgacgacagcgacctgaacgtggtggccagcttcgacagaagaggcgagtacatctacaccggcaacgccaagggcaagatcctggtgctgaagaccgacagccaggacctggtggccagcttcagagtgaccaccggcaccagcaacaccaccgccatcaagagcatcgagttcgccagaaagggcagctgcttcctgatcaacaccgccgacagaatcatcagagtgtacgacggcagagagatcctgacctgcggcagagacggcgagcccgagcccatgcagaagctgcaggacctggtgaacagaaccccctggaagaagtgctgcttcagcggcgacggcgagtacatcgtggccggcagcgccagacagcacgccctgtacatctgggagaagagcatcggcaacctggtgaagatcctgcacggcaccagaggcgagctgctgctggacgtggcctggcaccccgtgagacccatcatcgccagcatcagcagcggcgtggtgagcatctgggcccagaaccaggtggagaactggagcgccttcgcccccgacttcaaggagctggacgagaacgtggagtacgaggagagagagagcgagttcgacatcgaggacgaggacaagagcgagcccgagcagaccggcgccgacgccgccgaggacgaggaggtggacgtgaccagcgtggaccccatcgccgccttctgcagcagcgacgaggagctggaggacagcaaggccctgctgtacctgcccatcgcccccgaggtggaggaccccgaggagaacccctacggccccccccccgacgccgtgcagaccagcctgatggacgagggcgccagcagcgagaagaagagacagagcagcgccgacggcagccagccccccaagaagaagcccaagaccaccaacatcgagctgcagggcgtgcccaacgacgaggtgcaccccctgctgggcgtgaagggcgacggcaagagcaagaagaagcaggccggcagacccaagggcagcaaggccggcggcgccatcagcgagctgctgtag

SEQ ID NO: 73377 - protein, 667 aa, Artificial Sequence
  derived and/or modified sequence
METLESELTCPICLELFEDPLLLPCAHSLCFNCAHRILVSHCATNESVESITAFQCPTCRHVITLSQRGLDGLKRNVTLQNIIDRFQKASVSGPNSPSETRRERAFDANTMTSAEKVLCQFCDQDPAQDAVKTCVTCEVSYCDECLKATHPNKKPFTGHRLIEPIPDSHIRGLMCLEHEDEKVNMYCVTDDQLICALCKLVGRHRDHQVAALSERYDKLKQNLESNLTNLIKRNTELETLLAKLIQTCQHVEVNASRQEAKLTEECDLLIEIIQQRRQIIGTKIKEGKVMRLRKLAQQIANCKQCIERSASLISQAEHSLKENDHARFLQTAKNITERVSMATASSQVLIPEINLNDTFDTFALDFSREKKLLECLDYLTAPNPPTIREELCTASYDTITVHWTSDDEFSVVSYELQYTIFTGQANVVSLCNSADSWMIVPNIKQNHYTVHGLQSGTKYIFMVKAINQAGSRSSEPGKLKTNSQPFKLDPKSAHRKLKVSHDNLTVERDESSSKKSHTPERFTSQGSYGVAGNVFIDSGRHYWEVVISGSTWYAIGLAYKSAPKHEWIGKNSASWALCRCNNNWVVRHNSKEIPIEPAPHLRRVGILLDYDNGSIAFYDALNSIHLYTFDVAFAQPVCPTFTVWNKCLTIITGLPIPDHLDCTEQLP

SEQ ID NO: 73378 - protein, 552 aa, Artificial Sequence
  derived and/or modified sequence
METLESELTCPICLELFEDPLLLPCAHSLCFNCAHRILVSHCATNESVESITAFQCPTCRHVITLSQRGLDGLKRNVTLQNIIDRFQKASVSGPNSPSETRRERAFDANTMTSAEKVLCQFCDQDPAQDAVKTCVTCEVSYCDECLKATHPNKKPFTGHRLIEPIPDSHIRGLMCLEHEDEKVNMYCVTDDQLICALCKLVGRHRDHQVAALSERYDKLKQNLESNLTNLIKRNTELETLLAKLIQTCQHVEVNASRQEAKLTEECDLLIEIIQQRRQIIGTKIKEGKVMRLRKLAQQIANCKQCIERSASLISQAEHSLKENDHARFLQTAKNITERVSMATASSQVLIPEINLNDTFDTFALDFSREKKLLECLDYLTAPNPPTIREELCTASYDTITVHWTSDDEFSVVSYELQYTIFTGQANVVSLCNSADSWMIVPNIKQNHYTVHGLQSGTKYIFMVKAINQAGSRSSEPGKLKTNSQPFKLDPKSAHRKLKVSHDNLTVERDESSSKKSHTPERFTSQGSYGVAGNVFIDSGRHYWEVVISGSTW

SEQ ID NO: 73379 - protein, 483 aa, Artificial Sequence
  derived and/or modified sequence
METLESELTCPICLELFEDPLLLPCAHSLCFNCAHRILVSHCATNESVESITAFQCPTCRHVITLSQRGLDGLKRNVTLQNIIDRFQKASVSGPNSPSETRRERAFDANTMTSAEKVLCQFCDQDPAQDAVKTCVTCEVSYCDECLKATHPNKKPFTGHRLIEPIPDSHIRGLMCLEHEDEKVNMYCVTDDQLICALCKLVGRHRDHQVAALSERYDKLKQNLESNLTNLIKRNTELETLLAKLIQTCQHVEVNASRQEAKLTEECDLLIEIIQQRRQIIGTKIKEGKVMRLRKLAQQIANCKQCIERSASLISQAEHSLKENDHARFLQTAKNITERVSMATASSQVLIPEINLNDTFDTFALDFSREKKLLECLDYLTAPNPPTIREELCTASYDTITVHWTSDDEFSVVSYELQYTIFTGQANVVSLCNSADSWMIVPNIKQNHYTVHGLQSGTKYIFMVKAINQAGSRSSEPGKLKTNS

SEQ ID NO: 73380 - DNA, 6217 bp, Artificial Sequence
  derived and/or modified sequence
gattggcgaagctcctccgcggcccaagccagccacctacaacgtctctgagaactgatttgaaataagagccaggcggtcctcgcttccctgcgaccgacttttcataggctgggggagaaaaggttgagaaacttgacattgtctcgagcagagtgcgtgtagcaacagatcaaagaaaaagaggacgaaaacgtgctctttgctgcccgtagatttcgccgggttgcttttgtcttgcgggctcctgtcgggttcggtgtttccgctctgaagactgcgacgcgggctccgatgcagctcgctccctgccggatgggtcatgggattctaaacatgaggcagatagctgatcagcttccttgggttttgctgatgacacaagagagctttgcctgaagatggaaacactggagtcagaactgacctgccctatttgtctggagctctttgaggaccctcttctactgccctgcgcacacagcctctgcttcaactgcgcccaccgcatcctagtatcacactgtgccaccaacgagtctgtggagtccatcaccgccttccagtgccccacctgccggcatgtcatcaccctcagccagcgaggtctagacgggctcaagcgcaacgtcaccctacagaacatcatcgacaggttccagaaagcatcagtgagcgggcccaactctcccagcgagacccgtcgggagcgggcctttgacgccaacaccatgacctccgccgagaaggtcctctgccagttttgtgaccaggatcctgcccaggacgctgtgaagacctgtgtcacttgtgaagtatcctactgtgacgagtgcctgaaagccactcacccgaataagaagccctttacaggccatcgtctgattgagccaattccggactctcacatccgggggctgatgtgcttggagcatgaggatgagaaggtgaatatgtactgtgtgaccgatgaccagttaatctgtgccttgtgtaaactggttgggcggcaccgcgatcatcaggtggcagctttgagtgagcgctatgacaaattgaagcaaaacttagagagtaacctcaccaaccttattaagaggaacacagaactggagacccttttggctaaactcatccaaacctgtcaacatgttgaagtcaatgcatcacgtcaagaagccaaattgacagaggagtgtgatcttctcattgagatcattcagcaaagacgacagattattggaaccaagatcaaagaagggaaggtgatgaggcttcgcaaactggctcagcagattgcaaactgcaaacagtgcattgagcggtcagcatcactcatctcccaagcggaacactctctgaaggagaatgatcatgcgcgtttcctacagactgctaagaatatcaccgagagagtctccatggcaactgcatcctcccaggttctaattcctgaaatcaacctcaatgacacatttgacacctttgccttagatttttcccgagagaagaaactgctagaatgtctggattaccttacagctcccaaccctcccacaattagagaagagctctgcacagcttcatatgacaccatcactgtgcattggacctccgatgatgagttcagcgtggtctcctacgagctccagtacaccatattcaccggacaagccaacgtcgttagtctgtgtaattcggctgatagctggatgatagtacccaacatcaagcagaaccactacacggtgcacggtctgcagagcggcaccaagtacatcttcatggtcaaggccatcaaccaggcgggcagccgcagcagtgagcctgggaagttgaagacaaacagccaaccatttaaactggatcccaaatctgctcatcgaaaactgaaggtgtcccatgataacttgacagtagaacgtgatgagtcatcatccaagaagagtcacacacctgaacgcttcaccagccaggggagctatggagtagctggaaatgtgtttattgatagtggccggcattattgggaagtggtcataagtggaagcacatggtatgccattggtcttgcttacaaatcagccccgaagcatgaatggattgggaagaactctgcttcctgggcgctctgccgctgcaacaataactgggtggtgagacacaatagcaaggaaatccccattgagcctgccccccacctccggcgcgtgggcatcctgctggactatgataacggctctatcgccttttatgatgctttgaactccatccacctctacaccttcgacgtcgcatttgcgcagcctgtttgccccaccttcaccgtgtggaacaagtgtctgacgattatcactgggctccctatcccagaccatttggactgcacagagcagctgccgtgagcgtctggccacatggagctgctttctggggaacagtaaggttcaggccactatttaggggactgagaaagcacaggcttcatgagtgtaatgaaatctcaccagaagtgtcccgaaatcggctcagatagggctcaaaacaagagattcctctccttttactgtgtcttgtattaagtacgggctttaataatttctttaatttttttgtatttagaggaaaatctatagattatttataagagaaacataatcaggattacaacttttaggaattacttggttttgcacattaagaggcccataagtttatcagctatttacaaccttcatttcatcacaatctgtgggcttacaaaaaaacaaaaacttttgtagttttgtatgttactcatcttcttacctgatatcccatgatgatcccatggtaggtcttctcacctcgatggtgcataacaggatgtgtttgaacctagtaggggaggaaacaggctttcttactctggtttaatttgaagtgttttaattgtgatgtcaaaaagttgtatcagatcaactaaaatggagagcaagacagagaatgaaaagagttgattttggacctcggaccttgccgtggctaaatctttaccttctcatagctgatgggataatgttggaaagaaaggttctgaatcctttggccacattttgccctgcttctctcagggttaagggttctggaagaacattaagaatgagattgcaattgaaaatagtcattttgaatcctattgattattcaaaaattcaggctgatttgtcttttatcagaggtaggattctgttttatagtatagaatctactttatccttccttttaatagttcctttagacctgtgaaatttcttcactacatttaatagttctcctatttcccgctcccccatatcaattttccttttgtctccggggctgagtaaataaacatgttctgtcacaaatagcagcaccactttggattgattttgctctccaggacatcagcacatggccctgatcagcactaccacatccaaacataagtcactgaaaaacacttaatatttatgagttggtaatgacaagggacattgtataaagtactatttgctagattcatgcctcaaaagttattataaacagacctttattaaacacatcttgaaagatgtagaagtccctctatagtctagtatagtttacaatagagttgtaagaccaaaaaaaaaaaaaaaaaattcaaactcgttattcaggaacctgcttataaaatgtcagctgggattctttgcatgccaatctgatgcgttggaatggtccatgaattaaggctttcttgagcagttcttggcccagaactctggcattggttctagtttgatgaagggcatgacctctataaatggtttcaattgctaaaatatttacctgggatactgggtcagccattttgactgagcagactagtggatttagacattgtttttagttattttgtttttaaccaaatcaaccaactgcctccctgaaataagtcaatgaactcattgtttcagcatcacgtggccaaaggtcatgtgattgcaaatctggatttcaagggaggccaagccagcttcctgggtccttccatcctcttccctagcagacactctcctttttcttaacagatagattctatatatttactatattatttatacccagatgaatattttgatagatacctaagacaatttcacatctaaaagatggacgcctcaatggaaaaaaaacaatctttctctggaaaccttataggtttttctttttattacaatataaaagcaatgtgtgtttgccttctctgagtaaactgaaagggttgtctcagtaatttttacatacattttgggtaactggataatggatattttaatgcactttgtacactaacaggttctaaataaaagggtctaaaactcagcttctgagtttttaaaatcacggtctccaggtaccaataaatgctacagtttgccttatgatgttaacataaaacacttagtagaaggacaatatttccatgaaaataatgtttttcaatattaagaagttactactcaaattttcacagtaagccatttagggtatgtttggctatttttataaggacatgagagattatgtcataattttgttgtggaagtctcactcttggctaacttaaaagcattgtggatagtagcagttactagttccaggttgtcatatttacaggaaaatatgtatatggtgaaaggccaccgtgtttaattactataatgatgtagaaaagattcccgtgtgaattttttttttgaaagtctaaaaaatgtatgctgtaaaaatttgctgcagtgtaattttgcattctctttaaactgattgaggtcacagtattttattatttggggtcctcaccacaggaaacactgcgatacaggggcaaaagagatggcagtgccaattaaattaatacaacaaaatcaatgcagcaccaaccaagactgccaggtctggtgtcatgggtatgcccagagcccaggagttcagaagggccctaagcctgatttaatgctctgctgttgatgtcttgaaattcttaacaatttttgaacaaggggcctgcgttttcacttcgcactgggccttgcaaattacatagcgagtgctcataaaagaactcagaaacgtggtacctctcttcctggtggatacaaataaagaaatctggatccaaagttgaaagttgctggcgatatcattcaagtaggactctaaatagtggattaagatgagggtgggcctgggtgaagattctttccagctttaaaagaaagtgacttcaaaaactgactgcaaatattgacgatggtttctgctggaggaaaagaaacagcttgaatacagacaggcttttttattacggtactgatatattgaccttaaacttgctgaggaactgaactaacgtcctccagtgaccgtggaattccatctcagctccaggaacatgcagatacctgcaaagagacacgcatatatgctggcatacatgtgcatttggtgttgggaagttgaccatctggtctatcttaataaaatggtaaaaagcacaccaagacaatgatgggggcaggaggatgtttttgaaaacagcgcttctcaaccagtgctcgattttgccccccaggagacatttggcaatgcaatggcaacttttggttgtcgcagccggggaagggaagctaccagcatctagtgcgtagaggtcatggacgccgttaaacatcctacagtgcaagcgcagcccccgaccacgaagagttgtcttgctcaaatatcaacagtgctgcagtgtagaaacttgatcgttggttttcttttaatgcaaaactctcataaaaacctttcacttttcctgtcattgattatatgcttgatacacccaaaaagaaaaggggaggggcaccaattcacctacactccagtggctccatcacctttaaaaatatttataaaatagttccaaaaatctgatatctgaaaagcaatccaagcctgtgtaaatgggaatcactgataagtatcatcatctgtatcagcttggcttggacatgaaaaattgattctctttatgtcactccttgcacctggacaaattcaatccccggtacttaagtcacactgccaagccctcggccctgactattgtcttgattgctgttcctttctggttcaaaataaaatcatttttgtggcaccaaga

SEQ ID NO: 73381 - DNA, 2004 bp, Artificial Sequence
  derived and/or modified sequence
atggagacattggaatctgagctcacttgtcccatctgcctggagctgttcgaagaccccttgcttctcccttgcgctcattccctctgtttcaattgtgcccatcggattctggttagccactgtgccactaacgaatcggttgaaagcattaccgccttccagtgtccaacatgtagacacgtgattaccctatcacaaagaggtctggacgggctgaagaggaacgtcacactgcaaaatatcatagataggtttcaaaaggcctccgtatctgggccaaattcaccgtcagaaacaagacgtgagagagcctttgacgctaacaccatgacaagtgcagagaaggtcctgtgccagttttgcgatcaagatccagctcaagatgctgtgaagacctgcgtgacttgtgaggtcagctactgcgacgaatgtctgaaggccacccaccccaacaagaagccattcaccgggcacagattgatcgagcccattcctgactcccatattcgcggcctgatgtgtctggagcacgaagatgagaaggtgaacatgtactgcgtaacagacgaccagctgatctgcgctttgtgtaagttagttggaaggcacagagatcaccaggtcgcagccctttcagaacgatatgataagcttaaacagaacttggaatccaacctgactaacctaattaagaggaacactgaacttgagactttgctcgccaaattaatacagacttgccaacatgtcgaggttaacgcaagccgacaagaggccaagctgacagaagagtgcgatcttcttattgaaattatccagcagcggcgtcagatcattggtacaaagattaaggaaggtaaagtgatgagattgcgcaaactggcccagcagattgcaaattgcaaacagtgcattgagcgctcagcgagcctaattagccaagcggaacactctttgaaagaaaatgaccacgcccgatttctgcaaacagcaaagaacatcacggaaagggtgtccatggcaactgcatcctcgcaggtactgatcccggaaattaatttgaacgacacgttcgacaccttcgccctggatttcagtagagagaagaaacttttagaatgtttggattacctgaccgcacccaacccacctacgattagggaggagctatgcacagccagttacgacacaatcaccgtccattggacaagtgatgatgagttctctgtggttagttatgagctgcagtatacaatttttaccggacaagccaacgtggtctcactctgtaatagcgcagactcctggatgatagttccaaacatcaaacagaatcactacacagtgcacggcctgcagagcgggactaaatatatctttatggtcaaagccatcaatcaggcagggagtcgttcatccgagccggggaagctaaagactaattcgcagccattcaaacttgacccaaaaagtgctcataggaaactgaaagtgagccacgataatcttacagtggagcgagacgagagctcgtctaagaagtcccacacacccgaacgtttcacaagtcagggatcatatggggtggccggaaatgtgtttatcgatagcggccgacattattgggaggtggtcattagcggtagcacgtggtacgctatcgggctggcttacaagagcgcacccaaacacgaatggattggcaagaactcagcgtcttgggcactgtgtcggtgtaacaataattgggtggtgagacacaattcaaaagagattcccatcgagccggccccgcacttgcgtcgagtgggcattttgcttgactacgacaatggaagcatcgcattctacgacgctcttaattctatccacctgtatacgttcgatgtggccttcgcacagccagtgtgtccgacatttaccgtatggaacaagtgtctaacaatcatcaccggcctgcccatcccggatcacctcgattgcactgagcaattgccgtag

SEQ ID NO: 73382 - DNA, 2004 bp, Artificial Sequence
  derived and/or modified sequence
atggaaactctcgagtccgagctaacctgtccaatctgtctggagctcttcgaggaccccctcttactcccatgcgctcattccctgtgcttcaactgcgcgcataggatcctggtcagccactgcgccaccaatgagtcagtcgagtccatcactgcctttcaatgtcccacctgtagacacgtgatcacactctcccaaagaggtctggatggcttgaaacgcaacgtgactctgcagaacataatcgatcgttttcagaaggcaagcgtgagcgggccaaactctccatccgaaacacgtcgtgagagggcttttgacgctaataccatgacctcagcggaaaaggtgctttgccagttctgcgaccaggatcccgctcaagacgccgtgaaaacatgcgtgacatgtgaggtgtcctattgtgatgagtgtctgaaggctacacatccgaataagaaaccatttaccggtcataggcttattgaacctatccctgactcccacatcaggggactgatgtgccttgagcacgaagatgagaaggtcaatatgtactgtgtgaccgacgatcaactgatctgcgctctctgcaaactggtgggacgtcaccgagatcaccaggtggctgcactctctgagcgctatgataaacttaagcagaatctggaaagcaatctcacaaatctgatcaaacgaaacaccgagctggagacactgctggcaaagctgatccagacatgccagcacgtggaggtaaacgcgtcacggcaagaagccaagctgacggaggagtgcgatctccttatagagattattcagcagcggagacagatcatcggtaccaaaatcaaggagggcaaggttatgcggctgcgcaaactggcccagcagattgcgaactgcaagcagtgtatcgagagaagcgcaagcctgattagccaggccgaacatagtcttaaggaaaacgaccatgcccggttcctacagaccgccaagaatatcacagaaagagtgagcatggcgaccgcaagctcacaagtcctcattccagagataaatttgaatgacaccttcgacactttcgccctggatttcagccgggaaaagaaattgttggaatgtttagattacttgaccgcacctaacccaccaacgatccgcgaagagctgtgcactgcctcttatgacacaataacagtccattggaccagcgatgatgaatttagcgtcgtatcttacgagcttcagtatactatttttacaggacaggcgaacgttgtctctctgtgtaacagtgctgattcttggatgatcgttcctaatatcaagcaaaaccactacactgttcatggccttcagagcgggaccaaatacatctttatggtaaaggctattaatcaggcagggagcagaagttcggagcccgggaagctcaagacaaactcacagcccttcaaactagacccgaagagtgctcacagaaagcttaaagtttcgcatgataacctgaccgtggagcgcgatgagtcatccagcaaaaagtcacatactcccgaacgattcacttcgcagggtagttacggcgttgccggaaacgtgttcattgatagcggtcggcactactgggaagtggtgatttctggctctacctggtacgcaattggtttggcatataaaagcgcaccaaaacacgaatggattggaaagaactctgcctcctgggcactttgccgatgcaataataattgggtggtccgccacaatagcaaagaaatccccattgagcccgccccccatctgagaagagtggggattcttctcgactacgacaacgggagtattgctttctacgatgcattgaactctatccacttatacacgttcgatgtcgccttcgcccaacccgtgtgtccaactttcactgtgtggaacaagtgccttaccataattaccggtctgcctattcccgatcatcttgattgtaccgagcagctcccctag

SEQ ID NO: 73383 - DNA, 2004 bp, Artificial Sequence
  derived and/or modified sequence
atggagaccctggagagtgaactgacttgccccatttgccttgagcttttcgaggatcctctgctgcttccatgcgctcactcactttgttttaactgcgctcaccgaatcctggtctctcattgtgccacaaacgaatcggtagaaagcattacagctttccaatgccctacatgccgtcatgtcataacactgtcccagcgcggcctagatggattgaaacgcaatgtcacgctgcagaacattatcgacaggtttcagaaggcgtctgttagcggcccaaacagccctagcgagaccaggcgggaaagagcattcgacgctaacactatgacatctgccgagaaggtactctgccagttctgcgatcaggatcctgcacaggacgccgttaaaacctgtgttacttgtgaggtctcgtattgcgacgaatgcctgaaggcaactcacccaaacaaaaagccctttacaggacaccggctgattgagccaataccagactcacacattcggggtctgatgtgtctggaacacgaagacgagaaggttaacatgtattgcgtgacggatgaccaactgatctgtgccctctgcaaacttgtggggaggcatcgagatcatcaggtggcagctctcagcgagcggtatgataagcttaagcagaatcttgaatccaatctgactaatcttattaagagaaacacagaactggagacactactggcgaaacttatccaaacatgccaacatgtggaggtcaatgctagccgccaggaagcgaagctcactgaggagtgtgacttactcattgaaatcatccagcagcggcggcagataattgggactaaaataaaggaaggaaaggtgatgcgactgaggaaacttgcgcaacagatcgctaattgtaagcagtgtatcgaacgcagtgctagcctgatcagtcaggcagagcattcgttgaaggagaacgaccatgctaggttcttgcagaccgccaagaatatcaccgagcgcgttagcatggccacagcttcaagccaggtcctcattcccgaaattaatctcaatgacacatttgataccttcgcacttgatttttccagggagaagaaactgctggagtgcctcgactacttaaccgctccgaatccgcccaccatccgtgaggagctctgcaccgcctcttacgatactattacggttcattggacctccgacgacgagttctccgttgtctcatacgagctgcaatacaccatttttaccggacaggctaatgttgtgagtctctgcaattctgccgatagttggatgatcgtgccgaacatcaagcagaaccattatacggtgcatgggctgcagagcggaaccaaatacattttcatggtcaaggccatcaaccaggcggggtctaggtcttctgaaccaggaaaactgaagaccaacagccagcccttcaagcttgacccaaaaagcgctcaccggaagctgaaagtgtctcacgacaatctcactgtggaaagggatgaatccagctctaagaagtctcatacgccagaaagattcactagtcagggcagctatggagttgcaggcaatgtgtttattgattcaggccggcattactgggaagtggtcattagcgggagcacatggtacgccatcgggttggcctataaaagcgctcctaaacacgaatggatagggaagaacagtgcttcatgggcattgtgtaggtgtaacaataattgggtggtgagacataactccaaggagatcccaattgagcctgcaccccatttgcgacgagtaggaatcctgctggattacgataatggtagtatcgcattttacgatgcactgaacagcatccacctgtataccttcgacgtagcttttgcccagccagtgtgtccaacgttcactgtgtggaataagtgcctaacgattatcaccggcctgcccatccccgaccacttagattgcacggagcagcttccatag

SEQ ID NO: 73384 - DNA, 1659 bp, Artificial Sequence
  derived and/or modified sequence
atggagaccctagaatccgaactgacctgccctatttgtctggaactcttcgaggaccccctgttactcccctgtgcacactctctttgctttaactgcgctcatcgtattctggtctcacactgcgccaccaacgagtccgtcgaaagcattaccgcatttcaatgccctacttgccgccatgtcataacactgtcccaaagaggcctggacggtctcaagcggaatgtgacacttcagaatattattgatagattccagaaggcatccgtgtccggaccaaactccccttccgagacccgcagggagcgagccttcgacgccaacacaatgaccagcgccgagaaggtgctgtgtcagttttgcgatcaggacccagcccaggacgccgtaaagacttgcgtaacctgcgaagtgtcctactgcgatgagtgccttaaagccacccacccaaataaaaagccatttaccggtcacagactgatcgaaccaatcccagattcgcacatccggggcctgatgtgtttagagcatgaggatgaaaaggtcaacatgtactgtgttacagacgatcagctgatctgtgctctatgtaagctggtcggaaggcacagggatcaccaggtggccgccttatctgagcgctacgataaactgaagcagaacctggagagtaatcttactaacctcatcaaaagaaatacagaactagaaaccctactcgcaaagctgatccagacgtgccaacacgtggaggtgaatgcctcgagacaggaagcaaaactgacggaagaatgtgacctcctgatcgaaatcatccagcaaagacggcaaatcattggtaccaagatcaaggaggggaaggtcatgcgcctgcgcaaactggcacagcaaattgcaaattgtaagcagtgcatcgagcggtctgcatcactgatttcacaggctgagcacagcctaaaggagaatgaccatgcccgattcctgcagaccgcaaaaaacataactgaaagggtcagcatggccactgcttcatcacaggtgctgatacccgagattaacctgaacgatacattcgatacttttgcactcgatttcagccgagaaaagaaattgctggaatgcttagactacctaactgctcccaatcctccgaccatcagagaagagctttgtacagcctcctacgacacaataactgtccactggacctcagatgatgaattcagcgttgtttcctatgagttacagtacacaatatttaccggacaggcaaatgtggtatcactgtgcaacagcgcagacagttggatgatcgtccccaacatcaaacagaaccattatacggtgcacggtctccagagtggcactaaatacatattcatggtgaaggcaattaaccaggccggaagccggagctcagaacccggcaaactaaaaaccaacagtcagccatttaaactggatcctaaatctgcgcaccgcaagctgaaggtatctcacgataacctcaccgtagaacgcgacgagagcagctccaagaagagccacacgccagaaagatttacgtcccaggggagctatggtgtggctggaaacgtctttattgactctgggcggcattattgggaagtggtaatcagtggctccacctggtag

SEQ ID NO: 73385 - DNA, 2004 bp, Artificial Sequence
  derived and/or modified sequence
atggaaacactggaatccgagcttacctgccccatctgcctggaactgtttgaagatccactgctgttgccctgcgcacactctctgtgcttcaattgtgctcatagaatactcgtgagtcattgcgctactaacgaatccgtcgaatctatcactgcctttcagtgtcctacctgccgccatgtgattacactatcacaacggggactggacggtcttaaacgcaacgtgacattacagaacatcattgataggtttcaaaaagctagcgtaagtggccctaactcgcccagcgaaactcgccgcgagagagcctttgatgctaacacgatgacctccgctgagaaggtgctctgtcaattttgtgaccaggacccggcgcaggatgcggtgaaaacctgtgttacctgcgaagtgagttattgtgatgagtgtctcaaggccacccaccctaacaagaagcccttcactggccatcgcttgattgaacccattccagacagtcacatccgcggattgatgtgtcttgaacatgaggacgagaaagtcaacatgtactgcgtaacagacgatcagttgatttgtgcgctgtgcaaactggtgggccgccacagagatcatcaggtggcagcactcagcgaacggtacgacaagttaaagcagaatttggagtctaacctgactaacctgattaaaaggaacacagagctggagactctgttggccaagctgatccagacctgtcagcatgtcgaggtgaatgcttctagacaggaggccaaactgacagaggagtgcgacctcctcattgaaataatccagcaacgcaggcagataatcggcaccaagatcaaggaaggcaaagtaatgcggctgaggaaactcgcacagcagatagccaattgcaaacaatgcatcgagcgaagcgctagccttatcagtcaggctgagcatagcctgaaagaaaatgatcacgctagattccttcaaaccgccaagaatatcactgagcgcgtgagcatggccacagcttccagccaggttctcatacccgagataaatctcaacgatacattcgacacattcgccctggacttctcaagggaaaaaaagctactggaatgcctcgattacctgacagccccgaaccctcccaccatccgcgaggaactgtgtacggcctcctacgatacaatcactgtgcactggaccagcgatgatgaattcagcgtcgttagttatgaacttcagtacacaattttcaccggccaggcaaatgtggtgagcctgtgcaactccgcagattcttggatgattgtgcctaatatcaaacagaaccactatacagtacatggcctgcagtccggcaccaagtatatatttatggtgaaagctataaaccaggccggcagtcgctcgtctgaaccaggaaagctgaagactaattctcagccctttaagttggatccgaaatccgctcaccgtaagctgaaggtgtcgcatgacaacttgaccgtcgagcgcgacgaaagcagctcgaagaaaagccatacacccgagagatttacttcccagggcagctatggcgtggccggcaatgtgttcattgactctggccggcattactgggaggtagtcatctcaggcagtacatggtatgccattggattggcatataaatccgcgcctaagcatgaatggattggaaaaaactcggccagctgggccctgtgccgttgtaataataattgggtagtgaggcacaatagtaaagaaatccccattgagccagcccctcacttgcggagggtgggtattttactcgattacgacaacgggagcattgccttctacgatgccctcaactctattcacctctatacattcgatgtggccttcgcccagccggtctgcccaacgtttaccgtatggaataagtgtttgacaatcataacaggtctccctatcccagaccatctggactgcaccgagcagttgccctag

SEQ ID NO: 73386 - DNA, 2004 bp, Artificial Sequence
  derived and/or modified sequence
atggagactctcgagtccgagctcacatgccctatatgccttgaactgttcgaagacccgttgctgctgccttgcgctcactccctgtgttttaactgcgcccaccggattctggtttcacattgcgcaacaaacgagtctgttgaatccattacagcttttcagtgccctacttgtcgccatgttattacactctcccagagaggactggatgggctgaagaggaatgtgaccctgcagaatatcattgaccgatttcagaaagcaagtgtgtcaggccccaacagcccgtcagagacacggcgcgagcgagcttttgacgccaacaccatgactagtgcagaaaaggtgctgtgccagttctgcgatcaagaccctgcccaggatgccgttaagacatgtgtaacatgtgaggtgtcatactgcgacgagtgcctgaaggctacacatcctaacaagaagccatttacaggccaccggctcattgagccaattcctgactctcatatacgtggcctgatgtgtttagagcatgaagacgaaaaagtgaacatgtattgtgtcactgacgatcagctcatctgcgccttatgcaagttggttggccgccatcgagaccatcaggttgccgcattatcagagaggtacgataaactcaaacagaatttggaaagcaacttgaccaatctgatcaaacgcaataccgaactcgagactctcctcgctaagctgattcagacatgccagcacgtagaggttaatgcctcgcggcaggaggctaaacttactgaggagtgtgatctgctcatcgagatcatccagcagagaaggcagatcatagggaccaagattaaagagggcaaggtaatgaggctccggaaactggcccagcagattgccaactgtaaacaatgcattgagagatccgcctctttaattagtcaggccgaacactccttgaaagagaatgaccacgctcgctttctccagaccgccaagaacatcacagaacgggtgtcgatggccacagcttcatcgcaggtgttgatacccgagataaatctgaacgatacatttgacacatttgctttggatttttcgagagaaaaaaagcttctggagtgcctggactacctgaccgcacctaatcctccgaccatacgagaggagctgtgcacagcctcctatgataccattacagtgcattggacatctgacgatgagttctccgtggtgagctacgagttgcagtacaccatatttacggggcaggccaacgtggtgtctctctgtaattctgccgatagttggatgatagtccccaatattaagcagaaccactataccgtgcacggacttcagtccggcacgaagtatatttttatggtgaaggcaatcaatcaggccgggagcagatcctcagagcctggcaagctgaaaacaaactcccagccctttaagttagatcccaagagtgcccaccggaaactgaaagtttcccacgataacctgacagtagagcgcgacgaatcgtctagtaaaaagtcccacacccccgagcgctttacgagtcaggggagttacggcgtggcagggaacgtgttcatcgactctggacgacattactgggaggtagtgatatctggaagcacttggtacgccattggactcgcttacaagtcggctccaaaacacgaatggatcggaaagaattcagcttcgtgggcgctgtgtaggtgcaataacaactgggtagtgcggcataattccaaggagatacccattgaacccgcacctcatctccggcgggttggaattttgctggattatgacaacggctcaattgctttctatgacgccttgaatagtatacacctctatactttcgacgtcgccttcgcacagcccgtttgcccaacgtttaccgtatggaataaatgtctcacaataatcaccggattaccgatcccagaccatctcgactgcactgagcagctgccctag

SEQ ID NO: 73387 - DNA, 1452 bp, Artificial Sequence
  derived and/or modified sequence
atggaaaccctggagtccgaactgacctgtcccatctgtctcgaacttttcgaagatccactcttgttgccatgtgcacactctttgtgttttaactgcgcgcatagaattctggtgagtcattgcgccaccaacgagtccgtggagagtatcaccgctttccagtgtcctacatgtcggcatgttataacactcagtcagcgggggcttgacggccttaaacggaacgtcactctgcagaacatcatcgaccggttccaaaaggcctccgtgtctggtcctaactcaccctctgagacccgccgggagcgggcttttgatgctaataccatgacgagcgcagaaaaggtactgtgccagttttgtgaccaggacccagcccaagacgcagttaagacatgcgtcacctgcgaggtgagctactgcgacgagtgcctgaaggctacccaccctaataagaagcccttcacggggcaccggctcatagaacccatcccggactcacacatcaggggactgatgtgtctggaacacgaggatgaaaaggtgaatatgtactgtgtaactgatgaccagctcatctgtgccctgtgtaagctcgtggggaggcacagggaccaccaggttgctgcgttatctgagaggtacgataagctcaaacagaatttggagtccaatctgacaaatctgataaagaggaacactgaactggagacactcttagccaagcttatacagacctgccaacatgtggaagtgaacgcgagtcggcaggaggctaaacttaccgaagaatgcgatctgctgattgagattatccagcagcggagacagattatcggtaccaaaattaaggaaggaaaggtgatgcgactgcgcaaattggcgcagcagattgccaactgtaagcagtgtatcgaaaggtcggcgtccctgatatcccaggctgaacattcattgaaggaaaacgaccacgctcggttcctgcagacagccaaaaacatcacagaaagggttagcatggcgacagccagctcgcaggtgctgatcccagaaataaatcttaatgacacatttgacactttcgctctggacttttcccgagaaaaaaagctgctggaatgcctggactatctgacggctcccaatcctcctacgatccgcgaggaactttgtacggccagctatgacaccattacagtccattggaccagcgatgatgagttctccgtggtgagttacgaattgcaatatacgatatttacagggcaggcaaacgtcgtgtcactatgcaactctgcggactcctggatgattgtccccaatatcaaacagaaccactacaccgttcacggcctgcaatccgggaccaagtacatcttcatggttaaagccattaaccaggccgggagccgtagctccgaacccggcaagttgaagaccaactcctag

SEQ ID NO: 73388 - DNA, 2004 bp, Artificial Sequence
  derived and/or modified sequence
atggaaactctggagtccgaactgacatgcccaatatgccttgagctcttcgaggaccctcttctgctgccctgtgcccactctttgtgttttaattgtgcccaccggatcctggtttcccactgcgctactaatgaaagcgtggaatcaattacagcatttcagtgcccaacctgtagacacgtaattaccctgagtcagaggggtcttgatggtttgaaacggaatgttacgctccagaatataatcgatcggtttcagaaggcttccgtgagcggacctaattccccctctgaaactagacgtgaaagagcctttgacgctaataccatgacctccgcagaaaaggtcctgtgccagttttgcgaccaggatcctgcccaggatgcggtgaaaacctgtgttacctgcgaggtgagctattgcgacgagtgcctaaaggccactcacccaaacaagaaaccattcaccggccaccgccttatagagcctatcccggactcacatatacgtggtctgatgtgcctcgaacatgaggacgaaaaggtgaatatgtactgcgtgactgacgaccaactgatatgcgctctctgcaagttggtgggcagacaccgggaccaccaggtagccgcgctctccgagcgttacgacaaactcaaacagaatctggaaagtaacctgacaaatctcattaaaagaaacactgaactggagactctgttagccaaactcatacaaacttgccagcacgtcgaagtcaacgcctcacgacaggaggctaagttaactgaagagtgcgacttgctgatcgagatcatccaacaacgaaggcaaatcatcggcaccaagattaaggagggaaaggtgatgagattgcgcaaactcgctcaacaaatcgctaactgcaagcagtgcatcgagcgatcagcttcattgattagccaggcagagcattccctgaaagagaacgatcacgccaggttcctccagaccgccaagaacatcactgagagggtcagtatggccaccgcttcttcgcaggtgctgatcccggaaattaatttgaacgacacatttgacacatttgccctcgatttttctcgggaaaagaaattgctggaatgtttggactatctgactgctccaaaccctcccaccattcgcgaagaactgtgtactgcgtcctatgacactattaccgtacactggacaagtgacgacgagttctccgtagtgtcctacgaactgcaatataccatctttacaggtcaagctaatgtggtctccctgtgtaactctgcagactcctggatgatcgtccccaatataaaacaaaaccattataccgtccacggcctgcagagtggaacgaaatacatatttatggtaaaagccatcaatcaggcgggcagtcggtcaagtgaaccaggcaaactcaaaacaaattcccagccttttaagctggatcccaaatccgcccatcggaagctgaaagtaagccatgacaacctgaccgtggaaagagatgagagttcaagcaaaaagagccatacgcctgagcgatttacttctcaaggatcctacggagtggccggaaacgtgttcattgacagtggccgccattattgggaggtggtgatcagtggaagcacctggtacgctatcggattggcctacaaatctgcccccaagcatgaatggatcgggaaaaactctgcgtcttgggcactgtgtcggtgtaacaacaattgggtagtgcgccacaattcaaaagagattcccatcgagcctgctccccaccttcgaagagttggcatactgcttgactacgacaatggtagcatcgctttctatgatgccttgaactccatacatctctatacctttgatgtcgcctttgcacaaccggtttgcccgacatttaccgtgtggaataagtgtctgactattatcacaggattgcccatcccagaccacttagattgtaccgagcagctgccttag

SEQ ID NO: 73389 - DNA, 2004 bp, Artificial Sequence
  derived and/or modified sequence
atggagaccctggagagcgagctgacctgccccatctgcctggagctgtttgaggaccccctgctgctgccctgtgcccacagcctgtgcttcaactgtgcccaccgcatcctggtgagccactgtgccaccaatgaatctgtggagagcatcacagccttccagtgccccacctgcagacatgtgatcaccctgagccagaggggcctggatggcctgaagagaaatgtgaccctgcagaacatcatcgaccgcttccagaaggcctctgtgtctggccccaacagccccagcgagacccggcgggagcgggcctttgatgccaacaccatgaccagcgctgagaaggtgctgtgccagttctgtgaccaggaccctgcccaggatgctgtgaagacctgtgtgacctgtgaggtgtcctactgtgatgagtgcctgaaggccacccaccccaacaagaagcccttcaccggccacaggctcatcgagcccatcccagacagccacatccggggcctgatgtgcctggagcatgaagatgagaaggtgaacatgtactgtgtgacagatgaccagctgatctgtgccctgtgcaagctggtgggccgccaccgggaccaccaggtggccgccctgtctgaaagatatgacaagctgaagcagaacctggagagcaacctgaccaacctgatcaagaggaacacagagctggagaccctgctggccaagctgatccagacctgccagcacgtggaggtgaatgccagccggcaggaggccaagctgacagaagaatgtgacctgctgattgagatcatccagcagaggcggcagatcatcggcaccaagatcaaggagggcaaggtgatgaggctgaggaagctggcccagcagatcgccaactgcaagcagtgcatcgagaggtctgccagcctcatcagccaggccgagcacagcctgaaggaaaatgaccacgcccgcttcctgcagacagccaagaacatcacagagcgggtgtccatggccacagccagcagccaggtgctgatccctgagatcaacctgaatgacacctttgacacctttgccctggacttcagccgggagaagaagctgctggagtgcctggactacctgacagcccccaacccccccaccatccgggaggagctgtgcacagccagctatgacaccatcaccgtgcactggaccagtgatgatgagttctctgtggtgtcctatgagctgcagtacaccatcttcaccggccaggccaacgtggtgtccctgtgcaacagcgctgacagctggatgattgtgcccaacatcaagcagaaccactacacagtgcacggcctgcagagcggcaccaagtacatcttcatggtgaaggccatcaaccaggccggcagccgcagcagcgagcccgggaagctgaagaccaacagccagcccttcaagctggaccccaagagcgcccacaggaagctgaaggtgtcccatgacaacctgactgtggagagagatgagagcagcagcaagaagagccacaccccagagcgcttcaccagccagggcagctatggagtggccggaaatgtgttcatcgacagcggccgccactactgggaggtggtgatcagcggcagcacctggtacgccatcggcctggcctacaagagcgcccccaagcatgagtggattggcaagaacagcgcctcctgggccctgtgccgctgcaacaacaactgggtggtgcgccacaacagcaaggagatccccattgaaccagccccccacctgcggcgggtgggcatcctgctggactatgacaatggcagcatcgccttctatgatgccctgaacagcatccacctgtacacctttgatgtggcctttgcccagcctgtgtgccccaccttcaccgtgtggaacaagtgcctgaccatcatcaccggcctgcccatcccagaccacctggactgcacagagcagctgccctag

SEQ ID NO: 73390 - DNA, 1659 bp, Artificial Sequence
  derived and/or modified sequence
atggagaccctggagagcgagctgacctgccccatctgcctggagctgtttgaggaccccctgctgctgccctgtgcccacagcctgtgcttcaactgtgcccaccgcatcctggtgagccactgtgccaccaatgaatctgtggagagcatcacagccttccagtgccccacctgcagacatgtgatcaccctgagccagaggggcctggatggcctgaagagaaatgtgaccctgcagaacatcatcgaccgcttccagaaggcctctgtgtctggccccaacagccccagcgagacccggcgggagcgggcctttgatgccaacaccatgaccagcgctgagaaggtgctgtgccagttctgtgaccaggaccctgcccaggatgctgtgaagacctgtgtgacctgtgaggtgtcctactgtgatgagtgcctgaaggccacccaccccaacaagaagcccttcaccggccacaggctcatcgagcccatcccagacagccacatccggggcctgatgtgcctggagcatgaagatgagaaggtgaacatgtactgtgtgacagatgaccagctgatctgtgccctgtgcaagctggtgggccgccaccgggaccaccaggtggccgccctgtctgaaagatatgacaagctgaagcagaacctggagagcaacctgaccaacctgatcaagaggaacacagagctggagaccctgctggccaagctgatccagacctgccagcacgtggaggtgaatgccagccggcaggaggccaagctgacagaagaatgtgacctgctgattgagatcatccagcagaggcggcagatcatcggcaccaagatcaaggagggcaaggtgatgaggctgaggaagctggcccagcagatcgccaactgcaagcagtgcatcgagaggtctgccagcctcatcagccaggccgagcacagcctgaaggaaaatgaccacgcccgcttcctgcagacagccaagaacatcacagagcgggtgtccatggccacagccagcagccaggtgctgatccctgagatcaacctgaatgacacctttgacacctttgccctggacttcagccgggagaagaagctgctggagtgcctggactacctgacagcccccaacccccccaccatccgggaggagctgtgcacagccagctatgacaccatcaccgtgcactggaccagtgatgatgagttctctgtggtgtcctatgagctgcagtacaccatcttcaccggccaggccaacgtggtgtccctgtgcaacagcgctgacagctggatgattgtgcccaacatcaagcagaaccactacacagtgcacggcctgcagagcggcaccaagtacatcttcatggtgaaggccatcaaccaggccggcagccgcagcagcgagcccgggaagctgaagaccaacagccagcccttcaagctggaccccaagagcgcccacaggaagctgaaggtgtcccatgacaacctgactgtggagagagatgagagcagcagcaagaagagccacaccccagagcgcttcaccagccagggcagctatggagtggccggaaatgtgttcatcgacagcggccgccactactgggaggtggtgatcagcggcagcacctggtag

SEQ ID NO: 73391 - DNA, 1452 bp, Artificial Sequence
  derived and/or modified sequence
atggagaccctggagagcgagctgacctgccccatctgcctggagctgtttgaggaccccctgctgctgccctgtgcccacagcctgtgcttcaactgtgcccaccgcatcctggtgagccactgtgccaccaatgaatctgtggagagcatcacagccttccagtgccccacctgcagacatgtgatcaccctgagccagaggggcctggatggcctgaagagaaatgtgaccctgcagaacatcatcgaccgcttccagaaggcctctgtgtctggccccaacagccccagcgagacccggcgggagcgggcctttgatgccaacaccatgaccagcgctgagaaggtgctgtgccagttctgtgaccaggaccctgcccaggatgctgtgaagacctgtgtgacctgtgaggtgtcctactgtgatgagtgcctgaaggccacccaccccaacaagaagcccttcaccggccacaggctcatcgagcccatcccagacagccacatccggggcctgatgtgcctggagcatgaagatgagaaggtgaacatgtactgtgtgacagatgaccagctgatctgtgccctgtgcaagctggtgggccgccaccgggaccaccaggtggccgccctgtctgaaagatatgacaagctgaagcagaacctggagagcaacctgaccaacctgatcaagaggaacacagagctggagaccctgctggccaagctgatccagacctgccagcacgtggaggtgaatgccagccggcaggaggccaagctgacagaagaatgtgacctgctgattgagatcatccagcagaggcggcagatcatcggcaccaagatcaaggagggcaaggtgatgaggctgaggaagctggcccagcagatcgccaactgcaagcagtgcatcgagaggtctgccagcctcatcagccaggccgagcacagcctgaaggaaaatgaccacgcccgcttcctgcagacagccaagaacatcacagagcgggtgtccatggccacagccagcagccaggtgctgatccctgagatcaacctgaatgacacctttgacacctttgccctggacttcagccgggagaagaagctgctggagtgcctggactacctgacagcccccaacccccccaccatccgggaggagctgtgcacagccagctatgacaccatcaccgtgcactggaccagtgatgatgagttctctgtggtgtcctatgagctgcagtacaccatcttcaccggccaggccaacgtggtgtccctgtgcaacagcgctgacagctggatgattgtgcccaacatcaagcagaaccactacacagtgcacggcctgcagagcggcaccaagtacatcttcatggtgaaggccatcaaccaggccggcagccgcagcagcgagcccgggaagctgaagaccaacagctag

SEQ ID NO: 73392 - DNA, 6463 bp, Artificial Sequence
  derived and/or modified sequence
gattggcgaagctcctccgcggcccaagccagccacctacaacgtctctgagaactgatttgaaataagagccaggcggtcctcgcttccctgcgaccgacttttcataggctgggggagaaaaggttgagaaacttgacattgtctcgagcagagtgcgtgtagcaacagatcaaagaaaaagaggacgaaaacgtgctctttgctgcccgtagatttcgccgggttgcttttgtcttgcgggctcctgtcgggttcggtgtttccgctctgaagactgcgacgcgggctccgatgcagctcgctccctgccggatgggtcatgggattctaaacatgaggcagatagctgatcagcttccttgggttttgctgatgacacaagagagctttgcctgaagatggaaacactggagtcagaactgacctgccctatttgtctggagctctttgaggaccctcttctactgccctgcgcacacagcctctgcttcaactgcgcccaccgcatcctagtatcacactgtgccaccaacgagtctgtggagtccatcaccgccttccagtgccccacctgccggcatgtcatcaccctcagccagcgaggtctagacgggctcaagcgcaacgtcaccctacagaacatcatcgacaggttccagaaagcatcagtgagcgggcccaactctcccagcgagacccgtcgggagcgggcctttgacgccaacaccatgacctccgccgagaaggtcctctgccagttttgtgaccaggatcctgcccaggacgctgtgaagacctgtgtcacttgtgaagtatcctactgtgacgagtgcctgaaagccactcacccgaataagaagccctttacaggccatcgtctgattgagccaattccggactctcacatccgggggctgatgtgcttggagcatgaggatgagaaggtgaatatgtactgtgtgaccgatgaccagttaatctgtgccttgtgtaaactggttgggcggcaccgcgatcatcaggtggcagctttgagtgagcgctatgacaaattgaagcaaaacttagagagtaacctcaccaaccttattaagaggaacacagaactggagacccttttggctaaactcatccaaacctgtcaacatgttgaagtcaatgcatcacgtcaagaagccaaattgacagaggagtgtgatcttctcattgagatcattcagcaaagacgacagattattggaaccaagatcaaagaagggaaggtgatgaggcttcgcaaactggctcagcagattgcaaactgcaaacagtgcattgagcggtcagcatcactcatctcccaagcggaacactctctgaaggagaatgatcatgcgcgtttcctacagactgctaagaatatcaccgagagagtctccatggcaactgcatcctcccaggttctaattcctgaaatcaacctcaatgacacatttgacacctttgccttagatttttcccgagagaagaaactgctagaatgtctggattaccttacagctcccaaccctcccacaattagagaagagctctgcacagcttcatatgacaccatcactgtgcattggacctccgatgatgagttcagcgtggtctcctacgagctccagtacaccatattcaccggacaagccaacgtcgttagtctgtgtaattcggctgatagctggatgatagtacccaacatcaagcagaaccactacacggtgcacggtctgcagagcggcaccaagtacatcttcatggtcaaggccatcaaccaggcgggcagccgcagcagtgagcctgggaagttgaagacaaacagccaaccatttaaactggatcccaaatctgctcatcgaaaactgaaggtgtcccatgataacttgacagtagaacgtgatgagtcatcatccaagaagagtcacacacctgaacgcttcaccagccaggggagctatggagtagctggaaatgtgtttattgatagtggccggcattattgggaagtggtcataagtggaagcacatggtatgccattggtcttgcttacaaatcagccccgaagcatgaatggattgggaagaactctgcttcctgggcgctctgccgctgcaacaataactgggtggtgagacacaatagcaaggaaatccccattgagcctgccccccacctccggcgcgtgggcatcctgctggactatgataacggctctatcgccttttatgatgctttgaactccatccacctctacaccttcgacgtcgcatttgcgcagcctgtttgccccaccttcaccgtgtggaacaagtgtctgacgattatcactgggctccctatcccagaccatttggactgcacagagcagctgccgtgagcgtctggccacatggagctgctttctggggaacagtaaggttcaggccactatttaggggactgagaaagcacaggcttcatgagtgtaatgaaatctcaccagaagtgtcccgaaatcggctcagatagggctcaaaacaagagattcctctccttttactgtgtcttgtattaagtacgggctttaataatttctttaatttttttgtatttagaggaaaatctatagattatttataagagaaacataatcaggattacaacttttaggaattacttggttttgcacattaagaggcccataagtttatcagctatttacaaccttcatttcatcacaatctgtgggcttacaaaaaaacaaaaacttttgtagttttgtatgttactcatcttcttacctgatatcccatgatgatcccatggtaggtcttctcacctcgatggtgcataacaggatgtgtttgaacctagtaggggaggaaacaggctttcttactctggtttaatttgaagtgttttaattgtgatgtcaaaaagttgtatcagatcaactaaaatggagagcaagacagagaatgaaaagagttgattttggacctcggaccttgccgtggctaaatctttaccttctcatagctgatgggataatgttggaaagaaaggttctgaatcctttggccacattttgccctgcttctctcagggttaagggttctggaagaacattaagaatgagattgcaattgaaaatagtcattttgaatcctattgattattcaaaaattcaggctgatttgtcttttatcagaggtaggattctgttttatagtatagaatctactttatccttccttttaatagttcctttagacctgtgaaatttcttcactacatttaatagttctcctatttcccgctcccccatatcaattttccttttgtctccggggctgagtaaataaacatgttctgtcacaaatagcagcaccactttggattgattttgctctccaggacatcagcacatggccctgatcagcactaccacatccaaacataagtcactgaaaaacacttaatatttatgagttggtaatgacaagggacattgtataaagtactatttgctagattcatgcctcaaaagttattataaacagacctttattaaacacatcttgaaagatgtagaagtccctctatagtctagtatagtttacaatagagttgtaagaccaaaaaaaaaaaaaaaaaattcaaactcgttattcaggaacctgcttataaaatgtcagctgggattctttgcatgccaatctgatgcgttggaatggtccatgaattaaggctttcttgagcagttcttggcccagaactctggcattggttctagtttgatgaagggcatgacctctataaatggtttcaattgctaaaatatttacctgggatactgggtcagccattttgactgagcagactagtggatttagacattgtttttagttattttgtttttaaccaaatcaaccaactgcctccctgaaataagtcaatgaactcattgtttcagcatcacgtggccaaaggtcatgtgattgcaaatctggatttcaagggaggccaagccagcttcctgggtccttccatcctcttccctagcagacactctcctttttcttaacagatagattctatatatttactatattatttatacccagatgaatattttgatagatacctaagacaatttcacatctaaaagatggacgcctcaatggaaaaaaaacaatctttctctggaaaccttataggtttttctttttattacaatataaaagcaatgtgtgtttgccttctctgagtaaactgaaagggttgtctcagtaatttttacatacattttgggtaactggataatggatattttaatgcactttgtacactaacaggttctaaataaaagggtctaaaactcagcttctgagtttttaaaatcacggtctccaggtaccaataaatgctacagtttgccttatgatgttaacataaaacacttagtagaaggacaatatttccatgaaaataatgtttttcaatattaagaagttactactcaaattttcacagtaagccatttagggtatgtttggctatttttataaggacatgagagattatgtcataattttgttgtggaagtctcactcttggctaacttaaaagcattgtggatagtagcagttactagttccaggttgtcatatttacaggaaaatatgtatatggtgaaaggccaccgtgtttaattactataatgatgtagaaaagattcccgtgtgaattttttttttgaaagtctaaaaaatgtatgctgtaaaaatttgctgcagtgtaattttgcattctctttaaactgattgaggtcacagtattttattatttggggtcctcaccacaggaaacactgcgatacaggggcaaaagagatggcagtgccaattaaattaatacaacaaaatcaatgcagcaccaaccaagactgccaggtctggtgtcatgggtatgcccagagcccaggagttcagaagggccctaagcctgatttaatgctctgctgttgatgtcttgaaattcttaacaatttttgaacaaggggcctgcgttttcacttcgcactgggccttgcaaattacatagcgagtgctcataaaagaactcagaaacgtggtacctctcttcctggtggatacaaataaagaaatctggatccaaagttgaaagttgctggcgatatcattcaagtaggactctaaatagtggattaagatgagggtgggcctgggtgaagattctttccagctttaaaagaaagtgacttcaaaaactgactgcaaatattgacgatggtttctgctggaggaaaagaaacagcttgaatacagacaggcttttttattacggtactgatatattgaccttaaacttgctgaggaactgaactaacgtcctccagtgaccgtggaattccatctcagctccaggaacatgcagatacctgcaaagagacacgcatatatgctggcatacatgtgcatttggtgttgggaagttgaccatctggtctatcttaataaaatggtaaaaagcacaccaagacaatgatgggggcaggaggatgtttttgaaaacagcgcttctcaaccagtgctcgattttgccccccaggagacatttggcaatgcaatggcaacttttggttgtcgcagccggggaagggaagctaccagcatctagtgcgtagaggtcatggacgccgttaaacatcctacagtgcaagcgcagcccccgaccacgaagagttgtcttgctcaaatatcaacagtgctgcagtgtagaaacttgatcgttggttttcttttaatgcaaaactctcataaaaacctttcacttttcctgtcattgattatatgcttgatacacccaaaaagaaaaggggaggggcaccaattcacctacactccagtggctccatcacctttaaaaatatttataaaatagttccaaaaatctgatatctgaaaagcaatccaagcctgtgtaaatgggaatcactgataagtatcatcatctgtatcagcttggcttggacatgaaaaattgattctctttatgtcactccttgcacctggacaaattcaatccccggtacttaagtcacactgccaagccctcggccctgactattgtcttgattgctgttcctttctggttcaaaataaaatcatttttgtggcaccaagaccctctgtctctgcctgtctctgttgccttttcatcattttgtgtttttgcagttatgatgttgacaaatatttattcaacatctaccatttattcatactactttatgacatataattcattttcttttactgtctctcatccactatttgcctttccctattcaaaatacaattcttttgcaacactcaaaatattctccagggaatttttaaaacacaataaaagaaagcctatatagaagtg

SEQ ID NO: 73393 - DNA, 6044 bp, Artificial Sequence
  derived and/or modified sequence
gaccgattttcctgttgtgtttcactgttgacgcactcacagacacacaggaccgctccagcactgcctgccacccaccgtctggtctcggtggcctgtctatcatttcgtgggtccccatcctctgcctacggcgatgtttcttcaaaaagaactagtgtgcagtccattgatagctgatcagcttccttgggttttgctgatgacacaagagagctttgcctgaagatggaaacactggagtcagaactgacctgccctatttgtctggagctctttgaggaccctcttctactgccctgcgcacacagcctctgcttcaactgcgcccaccgcatcctagtatcacactgtgccaccaacgagtctgtggagtccatcaccgccttccagtgccccacctgccggcatgtcatcaccctcagccagcgaggtctagacgggctcaagcgcaacgtcaccctacagaacatcatcgacaggttccagaaagcatcagtgagcgggcccaactctcccagcgagacccgtcgggagcgggcctttgacgccaacaccatgacctccgccgagaaggtcctctgccagttttgtgaccaggatcctgcccaggacgctgtgaagacctgtgtcacttgtgaagtatcctactgtgacgagtgcctgaaagccactcacccgaataagaagccctttacaggccatcgtctgattgagccaattccggactctcacatccgggggctgatgtgcttggagcatgaggatgagaaggtgaatatgtactgtgtgaccgatgaccagttaatctgtgccttgtgtaaactggttgggcggcaccgcgatcatcaggtggcagctttgagtgagcgctatgacaaattgaagcaaaacttagagagtaacctcaccaaccttattaagaggaacacagaactggagacccttttggctaaactcatccaaacctgtcaacatgttgaagtcaatgcatcacgtcaagaagccaaattgacagaggagtgtgatcttctcattgagatcattcagcaaagacgacagattattggaaccaagatcaaagaagggaaggtgatgaggcttcgcaaactggctcagcagattgcaaactgcaaacagtgcattgagcggtcagcatcactcatctcccaagcggaacactctctgaaggagaatgatcatgcgcgtttcctacagactgctaagaatatcaccgagagagtctccatggcaactgcatcctcccaggttctaattcctgaaatcaacctcaatgacacatttgacacctttgccttagatttttcccgagagaagaaactgctagaatgtctggattaccttacagctcccaaccctcccacaattagagaagagctctgcacagcttcatatgacaccatcactgtgcattggacctccgatgatgagttcagcgtggtctcctacgagctccagtacaccatattcaccggacaagccaacgtcgttagtctgtgtaattcggctgatagctggatgatagtacccaacatcaagcagaaccactacacggtgcacggtctgcagagcggcaccaagtacatcttcatggtcaaggccatcaaccaggcgggcagccgcagcagtgagcctgggaagttgaagacaaacagccaaccatttaaactggatcccaaatctgctcatcgaaaactgaaggtgtcccatgataacttgacagtagaacgtgatgagtcatcatccaagaagagtcacacacctgaacgcttcaccagccaggggagctatggagtagctggaaatgtgtttattgatagtggccggcattattgggaagtggtcataagtggaagcacatggtatgccattggtcttgcttacaaatcagccccgaagcatgaatggattgggaagaactctgcttcctgggcgctctgccgctgcaacaataactgggtggtgagacacaatagcaaggaaatccccattgagcctgccccccacctccggcgcgtgggcatcctgctggactatgataacggctctatcgccttttatgatgctttgaactccatccacctctacaccttcgacgtcgcatttgcgcagcctgtttgccccaccttcaccgtgtggaacaagtgtctgacgattatcactgggctccctatcccagaccatttggactgcacagagcagctgccgtgagcgtctggccacatggagctgctttctggggaacagtaaggttcaggccactatttaggggactgagaaagcacaggcttcatgagtgtaatgaaatctcaccagaagtgtcccgaaatcggctcagatagggctcaaaacaagagattcctctccttttactgtgtcttgtattaagtacgggctttaataatttctttaatttttttgtatttagaggaaaatctatagattatttataagagaaacataatcaggattacaacttttaggaattacttggttttgcacattaagaggcccataagtttatcagctatttacaaccttcatttcatcacaatctgtgggcttacaaaaaaacaaaaacttttgtagttttgtatgttactcatcttcttacctgatatcccatgatgatcccatggtaggtcttctcacctcgatggtgcataacaggatgtgtttgaacctagtaggggaggaaacaggctttcttactctggtttaatttgaagtgttttaattgtgatgtcaaaaagttgtatcagatcaactaaaatggagagcaagacagagaatgaaaagagttgattttggacctcggaccttgccgtggctaaatctttaccttctcatagctgatgggataatgttggaaagaaaggttctgaatcctttggccacattttgccctgcttctctcagggttaagggttctggaagaacattaagaatgagattgcaattgaaaatagtcattttgaatcctattgattattcaaaaattcaggctgatttgtcttttatcagaggtaggattctgttttatagtatagaatctactttatccttccttttaatagttcctttagacctgtgaaatttcttcactacatttaatagttctcctatttcccgctcccccatatcaattttccttttgtctccggggctgagtaaataaacatgttctgtcacaaatagcagcaccactttggattgattttgctctccaggacatcagcacatggccctgatcagcactaccacatccaaacataagtcactgaaaaacacttaatatttatgagttggtaatgacaagggacattgtataaagtactatttgctagattcatgcctcaaaagttattataaacagacctttattaaacacatcttgaaagatgtagaagtccctctatagtctagtatagtttacaatagagttgtaagaccaaaaaaaaaaaaaaaaaattcaaactcgttattcaggaacctgcttataaaatgtcagctgggattctttgcatgccaatctgatgcgttggaatggtccatgaattaaggctttcttgagcagttcttggcccagaactctggcattggttctagtttgatgaagggcatgacctctataaatggtttcaattgctaaaatatttacctgggatactgggtcagccattttgactgagcagactagtggatttagacattgtttttagttattttgtttttaaccaaatcaaccaactgcctccctgaaataagtcaatgaactcattgtttcagcatcacgtggccaaaggtcatgtgattgcaaatctggatttcaagggaggccaagccagcttcctgggtccttccatcctcttccctagcagacactctcctttttcttaacagatagattctatatatttactatattatttatacccagatgaatattttgatagatacctaagacaatttcacatctaaaagatggacgcctcaatggaaaaaaaacaatctttctctggaaaccttataggtttttctttttattacaatataaaagcaatgtgtgtttgccttctctgagtaaactgaaagggttgtctcagtaatttttacatacattttgggtaactggataatggatattttaatgcactttgtacactaacaggttctaaataaaagggtctaaaactcagcttctgagtttttaaaatcacggtctccaggtaccaataaatgctacagtttgccttatgatgttaacataaaacacttagtagaaggacaatatttccatgaaaataatgtttttcaatattaagaagttactactcaaattttcacagtaagccatttagggtatgtttggctatttttataaggacatgagagattatgtcataattttgttgtggaagtctcactcttggctaacttaaaagcattgtggatagtagcagttactagttccaggttgtcatatttacaggaaaatatgtatatggtgaaaggccaccgtgtttaattactataatgatgtagaaaagattcccgtgtgaattttttttttgaaagtctaaaaaatgtatgctgtaaaaatttgctgcagtgtaattttgcattctctttaaactgattgaggtcacagtattttattatttggggtcctcaccacaggaaacactgcgatacaggggcaaaagagatggcagtgccaattaaattaatacaacaaaatcaatgcagcaccaaccaagactgccaggtctggtgtcatgggtatgcccagagcccaggagttcagaagggccctaagcctgatttaatgctctgctgttgatgtcttgaaattcttaacaatttttgaacaaggggcctgcgttttcacttcgcactgggccttgcaaattacatagcgagtgctcataaaagaactcagaaacgtggtacctctcttcctggtggatacaaataaagaaatctggatccaaagttgaaagttgctggcgatatcattcaagtaggactctaaatagtggattaagatgagggtgggcctgggtgaagattctttccagctttaaaagaaagtgacttcaaaaactgactgcaaatattgacgatggtttctgctggaggaaaagaaacagcttgaatacagacaggcttttttattacggtactgatatattgaccttaaacttgctgaggaactgaactaacgtcctccagtgaccgtggaattccatctcagctccaggaacatgcagatacctgcaaagagacacgcatatatgctggcatacatgtgcatttggtgttgggaagttgaccatctggtctatcttaataaaatggtaaaaagcacaccaagacaatgatgggggcaggaggatgtttttgaaaacagcgcttctcaaccagtgctcgattttgccccccaggagacatttggcaatgcaatggcaacttttggttgtcgcagccggggaagggaagctaccagcatctagtgcgtagaggtcatggacgccgttaaacatcctacagtgcaagcgcagcccccgaccacgaagagttgtcttgctcaaatatcaacagtgctgcagtgtagaaacttgatcgttggttttcttttaatgcaaaactctcataaaaacctttcacttttcctgtcattgattatatgcttgatacacccaaaaagaaaaggggaggggcaccaattcacctacactccagtggctccatcacctttaaaaatatttataaaatagttccaaaaatctgatatctgaaaagcaatccaagcctgtgtaaatgggaatcactgataagtatcatcatctgtatcagcttggcttggacatgaaaaattgattctctttatgtcactccttgcacctggacaaattcaatccccggtacttaagtcacactgccaagccctcggccctgactattgtcttgattgctgttcctttctggttcaaaataaaatcatttttgtggcaccaaga

SEQ ID NO: 73394 - DNA, 6195 bp, Artificial Sequence
  derived and/or modified sequence
ccctttcttctttatctcggtgtctgaggagttttgtctgcggcttgtcttgctacatttcttggttccctgaccaggaagcgaggtgattaacagacggttgaggcagctccttaggtggctttagcctgccctgtggaacatccctgcgggggactccaaccagccggagcgacgcggatcctgagagcgctcccgggtaggcatttgcccaggtgggacgcctcgccagagccgtgtgtggcaggcccccgtggaggatcaacgcagtggctgaacactgggaaggaactggcacttggagtccagacatctaaaacttgatagctgatcagcttccttgggttttgctgatgacacaagagagctttgcctgaagatggaaacactggagtcagaactgacctgccctatttgtctggagctctttgaggaccctcttctactgccctgcgcacacagcctctgcttcaactgcgcccaccgcatcctagtatcacactgtgccaccaacgagtctgtggagtccatcaccgccttccagtgccccacctgccggcatgtcatcaccctcagccagcgaggtctagacgggctcaagcgcaacgtcaccctacagaacatcatcgacaggttccagaaagcatcagtgagcgggcccaactctcccagcgagacccgtcgggagcgggcctttgacgccaacaccatgacctccgccgagaaggtcctctgccagttttgtgaccaggatcctgcccaggacgctgtgaagacctgtgtcacttgtgaagtatcctactgtgacgagtgcctgaaagccactcacccgaataagaagccctttacaggccatcgtctgattgagccaattccggactctcacatccgggggctgatgtgcttggagcatgaggatgagaaggtgaatatgtactgtgtgaccgatgaccagttaatctgtgccttgtgtaaactggttgggcggcaccgcgatcatcaggtggcagctttgagtgagcgctatgacaaattgaagcaaaacttagagagtaacctcaccaaccttattaagaggaacacagaactggagacccttttggctaaactcatccaaacctgtcaacatgttgaagtcaatgcatcacgtcaagaagccaaattgacagaggagtgtgatcttctcattgagatcattcagcaaagacgacagattattggaaccaagatcaaagaagggaaggtgatgaggcttcgcaaactggctcagcagattgcaaactgcaaacagtgcattgagcggtcagcatcactcatctcccaagcggaacactctctgaaggagaatgatcatgcgcgtttcctacagactgctaagaatatcaccgagagagtctccatggcaactgcatcctcccaggttctaattcctgaaatcaacctcaatgacacatttgacacctttgccttagatttttcccgagagaagaaactgctagaatgtctggattaccttacagctcccaaccctcccacaattagagaagagctctgcacagcttcatatgacaccatcactgtgcattggacctccgatgatgagttcagcgtggtctcctacgagctccagtacaccatattcaccggacaagccaacgtcgttagtctgtgtaattcggctgatagctggatgatagtacccaacatcaagcagaaccactacacggtgcacggtctgcagagcggcaccaagtacatcttcatggtcaaggccatcaaccaggcgggcagccgcagcagtgagcctgggaagttgaagacaaacagccaaccatttaaactggatcccaaatctgctcatcgaaaactgaaggtgtcccatgataacttgacagtagaacgtgatgagtcatcatccaagaagagtcacacacctgaacgcttcaccagccaggggagctatggagtagctggaaatgtgtttattgatagtggccggcattattgggaagtggtcataagtggaagcacatggtatgccattggtcttgcttacaaatcagccccgaagcatgaatggattgggaagaactctgcttcctgggcgctctgccgctgcaacaataactgggtggtgagacacaatagcaaggaaatccccattgagcctgccccccacctccggcgcgtgggcatcctgctggactatgataacggctctatcgccttttatgatgctttgaactccatccacctctacaccttcgacgtcgcatttgcgcagcctgtttgccccaccttcaccgtgtggaacaagtgtctgacgattatcactgggctccctatcccagaccatttggactgcacagagcagctgccgtgagcgtctggccacatggagctgctttctggggaacagtaaggttcaggccactatttaggggactgagaaagcacaggcttcatgagtgtaatgaaatctcaccagaagtgtcccgaaatcggctcagatagggctcaaaacaagagattcctctccttttactgtgtcttgtattaagtacgggctttaataatttctttaatttttttgtatttagaggaaaatctatagattatttataagagaaacataatcaggattacaacttttaggaattacttggttttgcacattaagaggcccataagtttatcagctatttacaaccttcatttcatcacaatctgtgggcttacaaaaaaacaaaaacttttgtagttttgtatgttactcatcttcttacctgatatcccatgatgatcccatggtaggtcttctcacctcgatggtgcataacaggatgtgtttgaacctagtaggggaggaaacaggctttcttactctggtttaatttgaagtgttttaattgtgatgtcaaaaagttgtatcagatcaactaaaatggagagcaagacagagaatgaaaagagttgattttggacctcggaccttgccgtggctaaatctttaccttctcatagctgatgggataatgttggaaagaaaggttctgaatcctttggccacattttgccctgcttctctcagggttaagggttctggaagaacattaagaatgagattgcaattgaaaatagtcattttgaatcctattgattattcaaaaattcaggctgatttgtcttttatcagaggtaggattctgttttatagtatagaatctactttatccttccttttaatagttcctttagacctgtgaaatttcttcactacatttaatagttctcctatttcccgctcccccatatcaattttccttttgtctccggggctgagtaaataaacatgttctgtcacaaatagcagcaccactttggattgattttgctctccaggacatcagcacatggccctgatcagcactaccacatccaaacataagtcactgaaaaacacttaatatttatgagttggtaatgacaagggacattgtataaagtactatttgctagattcatgcctcaaaagttattataaacagacctttattaaacacatcttgaaagatgtagaagtccctctatagtctagtatagtttacaatagagttgtaagaccaaaaaaaaaaaaaaaaaattcaaactcgttattcaggaacctgcttataaaatgtcagctgggattctttgcatgccaatctgatgcgttggaatggtccatgaattaaggctttcttgagcagttcttggcccagaactctggcattggttctagtttgatgaagggcatgacctctataaatggtttcaattgctaaaatatttacctgggatactgggtcagccattttgactgagcagactagtggatttagacattgtttttagttattttgtttttaaccaaatcaaccaactgcctccctgaaataagtcaatgaactcattgtttcagcatcacgtggccaaaggtcatgtgattgcaaatctggatttcaagggaggccaagccagcttcctgggtccttccatcctcttccctagcagacactctcctttttcttaacagatagattctatatatttactatattatttatacccagatgaatattttgatagatacctaagacaatttcacatctaaaagatggacgcctcaatggaaaaaaaacaatctttctctggaaaccttataggtttttctttttattacaatataaaagcaatgtgtgtttgccttctctgagtaaactgaaagggttgtctcagtaatttttacatacattttgggtaactggataatggatattttaatgcactttgtacactaacaggttctaaataaaagggtctaaaactcagcttctgagtttttaaaatcacggtctccaggtaccaataaatgctacagtttgccttatgatgttaacataaaacacttagtagaaggacaatatttccatgaaaataatgtttttcaatattaagaagttactactcaaattttcacagtaagccatttagggtatgtttggctatttttataaggacatgagagattatgtcataattttgttgtggaagtctcactcttggctaacttaaaagcattgtggatagtagcagttactagttccaggttgtcatatttacaggaaaatatgtatatggtgaaaggccaccgtgtttaattactataatgatgtagaaaagattcccgtgtgaattttttttttgaaagtctaaaaaatgtatgctgtaaaaatttgctgcagtgtaattttgcattctctttaaactgattgaggtcacagtattttattatttggggtcctcaccacaggaaacactgcgatacaggggcaaaagagatggcagtgccaattaaattaatacaacaaaatcaatgcagcaccaaccaagactgccaggtctggtgtcatgggtatgcccagagcccaggagttcagaagggccctaagcctgatttaatgctctgctgttgatgtcttgaaattcttaacaatttttgaacaaggggcctgcgttttcacttcgcactgggccttgcaaattacatagcgagtgctcataaaagaactcagaaacgtggtacctctcttcctggtggatacaaataaagaaatctggatccaaagttgaaagttgctggcgatatcattcaagtaggactctaaatagtggattaagatgagggtgggcctgggtgaagattctttccagctttaaaagaaagtgacttcaaaaactgactgcaaatattgacgatggtttctgctggaggaaaagaaacagcttgaatacagacaggcttttttattacggtactgatatattgaccttaaacttgctgaggaactgaactaacgtcctccagtgaccgtggaattccatctcagctccaggaacatgcagatacctgcaaagagacacgcatatatgctggcatacatgtgcatttggtgttgggaagttgaccatctggtctatcttaataaaatggtaaaaagcacaccaagacaatgatgggggcaggaggatgtttttgaaaacagcgcttctcaaccagtgctcgattttgccccccaggagacatttggcaatgcaatggcaacttttggttgtcgcagccggggaagggaagctaccagcatctagtgcgtagaggtcatggacgccgttaaacatcctacagtgcaagcgcagcccccgaccacgaagagttgtcttgctcaaatatcaacagtgctgcagtgtagaaacttgatcgttggttttcttttaatgcaaaactctcataaaaacctttcacttttcctgtcattgattatatgcttgatacacccaaaaagaaaaggggaggggcaccaattcacctacactccagtggctccatcacctttaaaaatatttataaaatagttccaaaaatctgatatctgaaaagcaatccaagcctgtgtaaatgggaatcactgataagtatcatcatctgtatcagcttggcttggacatgaaaaattgattctctttatgtcactccttgcacctggacaaattcaatccccggtacttaagtcacactgccaagccctcggccctgactattgtcttgattgctgttcctttctggttcaaaataaaatcatttttgtggcaccaaga

SEQ ID NO: 73395 - DNA, 5902 bp, Artificial Sequence
  derived and/or modified sequence
atttcgccgggttgcttttgtcttgcgggctcctgtcgggttcggtgtttccgctctgaagactgcgacgcgggctccgatgcagctcgctccctgccggatgggtcatgggattctaaacatgaggcagatagctgatcagcttccttgggttttgctgatgacacaagagagctttgcctgaagatggaaacactggagtcagaactgacctgccctatttgtctggagctctttgaggaccctcttctactgccctgcgcacacagcctctgcttcaactgcgcccaccgcatcctagtatcacactgtgccaccaacgagtctgtggagtccatcaccgccttccagtgccccacctgccggcatgtcatcaccctcagccagcgaggtctagacgggctcaagcgcaacgtcaccctacagaacatcatcgacaggttccagaaagcatcagtgagcgggcccaactctcccagcgagacccgtcgggagcgggcctttgacgccaacaccatgacctccgccgagaaggtcctctgccagttttgtgaccaggatcctgcccaggacgctgtgaagacctgtgtcacttgtgaagtatcctactgtgacgagtgcctgaaagccactcacccgaataagaagccctttacaggccatcgtctgattgagccaattccggactctcacatccgggggctgatgtgcttggagcatgaggatgagaaggtgaatatgtactgtgtgaccgatgaccagttaatctgtgccttgtgtaaactggttgggcggcaccgcgatcatcaggtggcagctttgagtgagcgctatgacaaattgaagcaaaacttagagagtaacctcaccaaccttattaagaggaacacagaactggagacccttttggctaaactcatccaaacctgtcaacatgttgaagtcaatgcatcacgtcaagaagccaaattgacagaggagtgtgatcttctcattgagatcattcagcaaagacgacagattattggaaccaagatcaaagaagggaaggtgatgaggcttcgcaaactggctcagcagattgcaaactgcaaacagtgcattgagcggtcagcatcactcatctcccaagcggaacactctctgaaggagaatgatcatgcgcgtttcctacagactgctaagaatatcaccgagagagtctccatggcaactgcatcctcccaggttctaattcctgaaatcaacctcaatgacacatttgacacctttgccttagatttttcccgagagaagaaactgctagaatgtctggattaccttacagctcccaaccctcccacaattagagaagagctctgcacagcttcatatgacaccatcactgtgcattggacctccgatgatgagttcagcgtggtctcctacgagctccagtacaccatattcaccggacaagccaacgtcgttagtctgtgtaattcggctgatagctggatgatagtacccaacatcaagcagaaccactacacggtgcacggtctgcagagcggcaccaagtacatcttcatggtcaaggccatcaaccaggcgggcagccgcagcagtgagcctgggaagttgaagacaaacagccaaccatttaaactggatcccaaatctgctcatcgaaaactgaaggtgtcccatgataacttgacagtagaacgtgatgagtcatcatccaagaagagtcacacacctgaacgcttcaccagccaggggagctatggagtagctggaaatgtgtttattgatagtggccggcattattgggaagtggtcataagtggaagcacatggtgagacacaatagcaaggaaatccccattgagcctgccccccacctccggcgcgtgggcatcctgctggactatgataacggctctatcgccttttatgatgctttgaactccatccacctctacaccttcgacgtcgcatttgcgcagcctgtttgccccaccttcaccgtgtggaacaagtgtctgacgattatcactgggctccctatcccagaccatttggactgcacagagcagctgccgtgagcgtctggccacatggagctgctttctggggaacagtaaggttcaggccactatttaggggactgagaaagcacaggcttcatgagtgtaatgaaatctcaccagaagtgtcccgaaatcggctcagatagggctcaaaacaagagattcctctccttttactgtgtcttgtattaagtacgggctttaataatttctttaatttttttgtatttagaggaaaatctatagattatttataagagaaacataatcaggattacaacttttaggaattacttggttttgcacattaagaggcccataagtttatcagctatttacaaccttcatttcatcacaatctgtgggcttacaaaaaaacaaaaacttttgtagttttgtatgttactcatcttcttacctgatatcccatgatgatcccatggtaggtcttctcacctcgatggtgcataacaggatgtgtttgaacctagtaggggaggaaacaggctttcttactctggtttaatttgaagtgttttaattgtgatgtcaaaaagttgtatcagatcaactaaaatggagagcaagacagagaatgaaaagagttgattttggacctcggaccttgccgtggctaaatctttaccttctcatagctgatgggataatgttggaaagaaaggttctgaatcctttggccacattttgccctgcttctctcagggttaagggttctggaagaacattaagaatgagattgcaattgaaaatagtcattttgaatcctattgattattcaaaaattcaggctgatttgtcttttatcagaggtaggattctgttttatagtatagaatctactttatccttccttttaatagttcctttagacctgtgaaatttcttcactacatttaatagttctcctatttcccgctcccccatatcaattttccttttgtctccggggctgagtaaataaacatgttctgtcacaaatagcagcaccactttggattgattttgctctccaggacatcagcacatggccctgatcagcactaccacatccaaacataagtcactgaaaaacacttaatatttatgagttggtaatgacaagggacattgtataaagtactatttgctagattcatgcctcaaaagttattataaacagacctttattaaacacatcttgaaagatgtagaagtccctctatagtctagtatagtttacaatagagttgtaagaccaaaaaaaaaaaaaaaaaattcaaactcgttattcaggaacctgcttataaaatgtcagctgggattctttgcatgccaatctgatgcgttggaatggtccatgaattaaggctttcttgagcagttcttggcccagaactctggcattggttctagtttgatgaagggcatgacctctataaatggtttcaattgctaaaatatttacctgggatactgggtcagccattttgactgagcagactagtggatttagacattgtttttagttattttgtttttaaccaaatcaaccaactgcctccctgaaataagtcaatgaactcattgtttcagcatcacgtggccaaaggtcatgtgattgcaaatctggatttcaagggaggccaagccagcttcctgggtccttccatcctcttccctagcagacactctcctttttcttaacagatagattctatatatttactatattatttatacccagatgaatattttgatagatacctaagacaatttcacatctaaaagatggacgcctcaatggaaaaaaaacaatctttctctggaaaccttataggtttttctttttattacaatataaaagcaatgtgtgtttgccttctctgagtaaactgaaagggttgtctcagtaatttttacatacattttgggtaactggataatggatattttaatgcactttgtacactaacaggttctaaataaaagggtctaaaactcagcttctgagtttttaaaatcacggtctccaggtaccaataaatgctacagtttgccttatgatgttaacataaaacacttagtagaaggacaatatttccatgaaaataatgtttttcaatattaagaagttactactcaaattttcacagtaagccatttagggtatgtttggctatttttataaggacatgagagattatgtcataattttgttgtggaagtctcactcttggctaacttaaaagcattgtggatagtagcagttactagttccaggttgtcatatttacaggaaaatatgtatatggtgaaaggccaccgtgtttaattactataatgatgtagaaaagattcccgtgtgaattttttttttgaaagtctaaaaaatgtatgctgtaaaaatttgctgcagtgtaattttgcattctctttaaactgattgaggtcacagtattttattatttggggtcctcaccacaggaaacactgcgatacaggggcaaaagagatggcagtgccaattaaattaatacaacaaaatcaatgcagcaccaaccaagactgccaggtctggtgtcatgggtatgcccagagcccaggagttcagaagggccctaagcctgatttaatgctctgctgttgatgtcttgaaattcttaacaatttttgaacaaggggcctgcgttttcacttcgcactgggccttgcaaattacatagcgagtgctcataaaagaactcagaaacgtggtacctctcttcctggtggatacaaataaagaaatctggatccaaagttgaaagttgctggcgatatcattcaagtaggactctaaatagtggattaagatgagggtgggcctgggtgaagattctttccagctttaaaagaaagtgacttcaaaaactgactgcaaatattgacgatggtttctgctggaggaaaagaaacagcttgaatacagacaggcttttttattacggtactgatatattgaccttaaacttgctgaggaactgaactaacgtcctccagtgaccgtggaattccatctcagctccaggaacatgcagatacctgcaaagagacacgcatatatgctggcatacatgtgcatttggtgttgggaagttgaccatctggtctatcttaataaaatggtaaaaagcacaccaagacaatgatgggggcaggaggatgtttttgaaaacagcgcttctcaaccagtgctcgattttgccccccaggagacatttggcaatgcaatggcaacttttggttgtcgcagccggggaagggaagctaccagcatctagtgcgtagaggtcatggacgccgttaaacatcctacagtgcaagcgcagcccccgaccacgaagagttgtcttgctcaaatatcaacagtgctgcagtgtagaaacttgatcgttggttttcttttaatgcaaaactctcataaaaacctttcacttttcctgtcattgattatatgcttgatacacccaaaaagaaaaggggaggggcaccaattcacctacactccagtggctccatcacctttaaaaatatttataaaatagttccaaaaatctgatatctgaaaagcaatccaagcctgtgtaaatgggaatcactgataagtatcatcatctgtatcagcttggcttggacatgaaaaattgattctctttatgtcactccttgcacctggacaaattcaatccccggtacttaagtcacactgccaagccctcggccctgactattgtcttgattgctgttcctttctggttcaaaataaaatcatttttgtggcaccaaga

SEQ ID NO: 73396 - DNA, 6092 bp, Artificial Sequence
  derived and/or modified sequence
cccagcctgcttgaaggacctacaggtttgtctcttccagatcagaactgaggaacaaaaacccccatcctgggaaaaatggggaagctgatttcgccgggttgcttttgtcttgcgggctcctgtcgggttcggtgtttccgctctgaagactgcgacgcgggctccgatgcagctcgctccctgccggatgggtcatgggattctaaacatgaggcagatagctgatcagcttccttgggttttgctgatgacacaagagagctttgcctgaagatggaaacactggagtcagaactgacctgccctatttgtctggagctctttgaggaccctcttctactgccctgcgcacacagcctctgcttcaactgcgcccaccgcatcctagtatcacactgtgccaccaacgagtctgtggagtccatcaccgccttccagtgccccacctgccggcatgtcatcaccctcagccagcgaggtctagacgggctcaagcgcaacgtcaccctacagaacatcatcgacaggttccagaaagcatcagtgagcgggcccaactctcccagcgagacccgtcgggagcgggcctttgacgccaacaccatgacctccgccgagaaggtcctctgccagttttgtgaccaggatcctgcccaggacgctgtgaagacctgtgtcacttgtgaagtatcctactgtgacgagtgcctgaaagccactcacccgaataagaagccctttacaggccatcgtctgattgagccaattccggactctcacatccgggggctgatgtgcttggagcatgaggatgagaaggtgaatatgtactgtgtgaccgatgaccagttaatctgtgccttgtgtaaactggttgggcggcaccgcgatcatcaggtggcagctttgagtgagcgctatgacaaattgaagcaaaacttagagagtaacctcaccaaccttattaagaggaacacagaactggagacccttttggctaaactcatccaaacctgtcaacatgttgaagtcaatgcatcacgtcaagaagccaaattgacagaggagtgtgatcttctcattgagatcattcagcaaagacgacagattattggaaccaagatcaaagaagggaaggtgatgaggcttcgcaaactggctcagcagattgcaaactgcaaacagtgcattgagcggtcagcatcactcatctcccaagcggaacactctctgaaggagaatgatcatgcgcgtttcctacagactgctaagaatatcaccgagagagtctccatggcaactgcatcctcccaggttctaattcctgaaatcaacctcaatgacacatttgacacctttgccttagatttttcccgagagaagaaactgctagaatgtctggattaccttacagctcccaaccctcccacaattagagaagagctctgcacagcttcatatgacaccatcactgtgcattggacctccgatgatgagttcagcgtggtctcctacgagctccagtacaccatattcaccggacaagccaacgtcgttagtctgtgtaattcggctgatagctggatgatagtacccaacatcaagcagaaccactacacggtgcacggtctgcagagcggcaccaagtacatcttcatggtcaaggccatcaaccaggcgggcagccgcagcagtgagcctgggaagttgaagacaaacagccaaccatttaaactggatcccaaatctgctcatcgaaaactgaaggtgtcccatgataacttgacagtagaacgtgatgagtcatcatccaagaagagtcacacacctgaacgcttcaccagccaggggagctatggagtagctggaaatgtgtttattgatagtggccggcattattgggaagtggtcataagtggaagcacatggtatgccattggtcttgcttacaaatcagccccgaagcatgaatggattgggaagaactctgcttcctgggcgctctgccgctgcaacaataactgggtggtgagacacaatagcaaggaaatccccattgagcctgccccccacctccggcgcgtgggcatcctgctggactatgataacggctctatcgccttttatgatgctttgaactccatccacctctacaccttcgacgtcgcatttgcgcagcctgtttgccccaccttcaccgtgtggaacaagtgtctgacgattatcactgggctccctatcccagaccatttggactgcacagagcagctgccgtgagcgtctggccacatggagctgctttctggggaacagtaaggttcaggccactatttaggggactgagaaagcacaggcttcatgagtgtaatgaaatctcaccagaagtgtcccgaaatcggctcagatagggctcaaaacaagagattcctctccttttactgtgtcttgtattaagtacgggctttaataatttctttaatttttttgtatttagaggaaaatctatagattatttataagagaaacataatcaggattacaacttttaggaattacttggttttgcacattaagaggcccataagtttatcagctatttacaaccttcatttcatcacaatctgtgggcttacaaaaaaacaaaaacttttgtagttttgtatgttactcatcttcttacctgatatcccatgatgatcccatggtaggtcttctcacctcgatggtgcataacaggatgtgtttgaacctagtaggggaggaaacaggctttcttactctggtttaatttgaagtgttttaattgtgatgtcaaaaagttgtatcagatcaactaaaatggagagcaagacagagaatgaaaagagttgattttggacctcggaccttgccgtggctaaatctttaccttctcatagctgatgggataatgttggaaagaaaggttctgaatcctttggccacattttgccctgcttctctcagggttaagggttctggaagaacattaagaatgagattgcaattgaaaatagtcattttgaatcctattgattattcaaaaattcaggctgatttgtcttttatcagaggtaggattctgttttatagtatagaatctactttatccttccttttaatagttcctttagacctgtgaaatttcttcactacatttaatagttctcctatttcccgctcccccatatcaattttccttttgtctccggggctgagtaaataaacatgttctgtcacaaatagcagcaccactttggattgattttgctctccaggacatcagcacatggccctgatcagcactaccacatccaaacataagtcactgaaaaacacttaatatttatgagttggtaatgacaagggacattgtataaagtactatttgctagattcatgcctcaaaagttattataaacagacctttattaaacacatcttgaaagatgtagaagtccctctatagtctagtatagtttacaatagagttgtaagaccaaaaaaaaaaaaaaaaaattcaaactcgttattcaggaacctgcttataaaatgtcagctgggattctttgcatgccaatctgatgcgttggaatggtccatgaattaaggctttcttgagcagttcttggcccagaactctggcattggttctagtttgatgaagggcatgacctctataaatggtttcaattgctaaaatatttacctgggatactgggtcagccattttgactgagcagactagtggatttagacattgtttttagttattttgtttttaaccaaatcaaccaactgcctccctgaaataagtcaatgaactcattgtttcagcatcacgtggccaaaggtcatgtgattgcaaatctggatttcaagggaggccaagccagcttcctgggtccttccatcctcttccctagcagacactctcctttttcttaacagatagattctatatatttactatattatttatacccagatgaatattttgatagatacctaagacaatttcacatctaaaagatggacgcctcaatggaaaaaaaacaatctttctctggaaaccttataggtttttctttttattacaatataaaagcaatgtgtgtttgccttctctgagtaaactgaaagggttgtctcagtaatttttacatacattttgggtaactggataatggatattttaatgcactttgtacactaacaggttctaaataaaagggtctaaaactcagcttctgagtttttaaaatcacggtctccaggtaccaataaatgctacagtttgccttatgatgttaacataaaacacttagtagaaggacaatatttccatgaaaataatgtttttcaatattaagaagttactactcaaattttcacagtaagccatttagggtatgtttggctatttttataaggacatgagagattatgtcataattttgttgtggaagtctcactcttggctaacttaaaagcattgtggatagtagcagttactagttccaggttgtcatatttacaggaaaatatgtatatggtgaaaggccaccgtgtttaattactataatgatgtagaaaagattcccgtgtgaattttttttttgaaagtctaaaaaatgtatgctgtaaaaatttgctgcagtgtaattttgcattctctttaaactgattgaggtcacagtattttattatttggggtcctcaccacaggaaacactgcgatacaggggcaaaagagatggcagtgccaattaaattaatacaacaaaatcaatgcagcaccaaccaagactgccaggtctggtgtcatgggtatgcccagagcccaggagttcagaagggccctaagcctgatttaatgctctgctgttgatgtcttgaaattcttaacaatttttgaacaaggggcctgcgttttcacttcgcactgggccttgcaaattacatagcgagtgctcataaaagaactcagaaacgtggtacctctcttcctggtggatacaaataaagaaatctggatccaaagttgaaagttgctggcgatatcattcaagtaggactctaaatagtggattaagatgagggtgggcctgggtgaagattctttccagctttaaaagaaagtgacttcaaaaactgactgcaaatattgacgatggtttctgctggaggaaaagaaacagcttgaatacagacaggcttttttattacggtactgatatattgaccttaaacttgctgaggaactgaactaacgtcctccagtgaccgtggaattccatctcagctccaggaacatgcagatacctgcaaagagacacgcatatatgctggcatacatgtgcatttggtgttgggaagttgaccatctggtctatcttaataaaatggtaaaaagcacaccaagacaatgatgggggcaggaggatgtttttgaaaacagcgcttctcaaccagtgctcgattttgccccccaggagacatttggcaatgcaatggcaacttttggttgtcgcagccggggaagggaagctaccagcatctagtgcgtagaggtcatggacgccgttaaacatcctacagtgcaagcgcagcccccgaccacgaagagttgtcttgctcaaatatcaacagtgctgcagtgtagaaacttgatcgttggttttcttttaatgcaaaactctcataaaaacctttcacttttcctgtcattgattatatgcttgatacacccaaaaagaaaaggggaggggcaccaattcacctacactccagtggctccatcacctttaaaaatatttataaaatagttccaaaaatctgatatctgaaaagcaatccaagcctgtgtaaatgggaatcactgataagtatcatcatctgtatcagcttggcttggacatgaaaaattgattctctttatgtcactccttgcacctggacaaattcaatccccggtacttaagtcacactgccaagccctcggccctgactattgtcttgattgctgttcctttctggttcaaaataaaatcatttttgtggcaccaaga

SEQ ID NO: 73397 - DNA, 5973 bp, Artificial Sequence
  derived and/or modified sequence
acttgccccagcccagcctgcttgaaggacctacaggtttgtctcttccagatcagaactgaggaacaaaaacccccatcctgggaaaaatggggaagctgatagctgatcagcttccttgggttttgctgatgacacaagagagctttgcctgaagatggaaacactggagtcagaactgacctgccctatttgtctggagctctttgaggaccctcttctactgccctgcgcacacagcctctgcttcaactgcgcccaccgcatcctagtatcacactgtgccaccaacgagtctgtggagtccatcaccgccttccagtgccccacctgccggcatgtcatcaccctcagccagcgaggtctagacgggctcaagcgcaacgtcaccctacagaacatcatcgacaggttccagaaagcatcagtgagcgggcccaactctcccagcgagacccgtcgggagcgggcctttgacgccaacaccatgacctccgccgagaaggtcctctgccagttttgtgaccaggatcctgcccaggacgctgtgaagacctgtgtcacttgtgaagtatcctactgtgacgagtgcctgaaagccactcacccgaataagaagccctttacaggccatcgtctgattgagccaattccggactctcacatccgggggctgatgtgcttggagcatgaggatgagaaggtgaatatgtactgtgtgaccgatgaccagttaatctgtgccttgtgtaaactggttgggcggcaccgcgatcatcaggtggcagctttgagtgagcgctatgacaaattgaagcaaaacttagagagtaacctcaccaaccttattaagaggaacacagaactggagacccttttggctaaactcatccaaacctgtcaacatgttgaagtcaatgcatcacgtcaagaagccaaattgacagaggagtgtgatcttctcattgagatcattcagcaaagacgacagattattggaaccaagatcaaagaagggaaggtgatgaggcttcgcaaactggctcagcagattgcaaactgcaaacagtgcattgagcggtcagcatcactcatctcccaagcggaacactctctgaaggagaatgatcatgcgcgtttcctacagactgctaagaatatcaccgagagagtctccatggcaactgcatcctcccaggttctaattcctgaaatcaacctcaatgacacatttgacacctttgccttagatttttcccgagagaagaaactgctagaatgtctggattaccttacagctcccaaccctcccacaattagagaagagctctgcacagcttcatatgacaccatcactgtgcattggacctccgatgatgagttcagcgtggtctcctacgagctccagtacaccatattcaccggacaagccaacgtcgttagtctgtgtaattcggctgatagctggatgatagtacccaacatcaagcagaaccactacacggtgcacggtctgcagagcggcaccaagtacatcttcatggtcaaggccatcaaccaggcgggcagccgcagcagtgagcctgggaagttgaagacaaacagccaaccatttaaactggatcccaaatctgctcatcgaaaactgaaggtgtcccatgataacttgacagtagaacgtgatgagtcatcatccaagaagagtcacacacctgaacgcttcaccagccaggggagctatggagtagctggaaatgtgtttattgatagtggccggcattattgggaagtggtcataagtggaagcacatggtatgccattggtcttgcttacaaatcagccccgaagcatgaatggattgggaagaactctgcttcctgggcgctctgccgctgcaacaataactgggtggtgagacacaatagcaaggaaatccccattgagcctgccccccacctccggcgcgtgggcatcctgctggactatgataacggctctatcgccttttatgatgctttgaactccatccacctctacaccttcgacgtcgcatttgcgcagcctgtttgccccaccttcaccgtgtggaacaagtgtctgacgattatcactgggctccctatcccagaccatttggactgcacagagcagctgccgtgagcgtctggccacatggagctgctttctggggaacagtaaggttcaggccactatttaggggactgagaaagcacaggcttcatgagtgtaatgaaatctcaccagaagtgtcccgaaatcggctcagatagggctcaaaacaagagattcctctccttttactgtgtcttgtattaagtacgggctttaataatttctttaatttttttgtatttagaggaaaatctatagattatttataagagaaacataatcaggattacaacttttaggaattacttggttttgcacattaagaggcccataagtttatcagctatttacaaccttcatttcatcacaatctgtgggcttacaaaaaaacaaaaacttttgtagttttgtatgttactcatcttcttacctgatatcccatgatgatcccatggtaggtcttctcacctcgatggtgcataacaggatgtgtttgaacctagtaggggaggaaacaggctttcttactctggtttaatttgaagtgttttaattgtgatgtcaaaaagttgtatcagatcaactaaaatggagagcaagacagagaatgaaaagagttgattttggacctcggaccttgccgtggctaaatctttaccttctcatagctgatgggataatgttggaaagaaaggttctgaatcctttggccacattttgccctgcttctctcagggttaagggttctggaagaacattaagaatgagattgcaattgaaaatagtcattttgaatcctattgattattcaaaaattcaggctgatttgtcttttatcagaggtaggattctgttttatagtatagaatctactttatccttccttttaatagttcctttagacctgtgaaatttcttcactacatttaatagttctcctatttcccgctcccccatatcaattttccttttgtctccggggctgagtaaataaacatgttctgtcacaaatagcagcaccactttggattgattttgctctccaggacatcagcacatggccctgatcagcactaccacatccaaacataagtcactgaaaaacacttaatatttatgagttggtaatgacaagggacattgtataaagtactatttgctagattcatgcctcaaaagttattataaacagacctttattaaacacatcttgaaagatgtagaagtccctctatagtctagtatagtttacaatagagttgtaagaccaaaaaaaaaaaaaaaaaattcaaactcgttattcaggaacctgcttataaaatgtcagctgggattctttgcatgccaatctgatgcgttggaatggtccatgaattaaggctttcttgagcagttcttggcccagaactctggcattggttctagtttgatgaagggcatgacctctataaatggtttcaattgctaaaatatttacctgggatactgggtcagccattttgactgagcagactagtggatttagacattgtttttagttattttgtttttaaccaaatcaaccaactgcctccctgaaataagtcaatgaactcattgtttcagcatcacgtggccaaaggtcatgtgattgcaaatctggatttcaagggaggccaagccagcttcctgggtccttccatcctcttccctagcagacactctcctttttcttaacagatagattctatatatttactatattatttatacccagatgaatattttgatagatacctaagacaatttcacatctaaaagatggacgcctcaatggaaaaaaaacaatctttctctggaaaccttataggtttttctttttattacaatataaaagcaatgtgtgtttgccttctctgagtaaactgaaagggttgtctcagtaatttttacatacattttgggtaactggataatggatattttaatgcactttgtacactaacaggttctaaataaaagggtctaaaactcagcttctgagtttttaaaatcacggtctccaggtaccaataaatgctacagtttgccttatgatgttaacataaaacacttagtagaaggacaatatttccatgaaaataatgtttttcaatattaagaagttactactcaaattttcacagtaagccatttagggtatgtttggctatttttataaggacatgagagattatgtcataattttgttgtggaagtctcactcttggctaacttaaaagcattgtggatagtagcagttactagttccaggttgtcatatttacaggaaaatatgtatatggtgaaaggccaccgtgtttaattactataatgatgtagaaaagattcccgtgtgaattttttttttgaaagtctaaaaaatgtatgctgtaaaaatttgctgcagtgtaattttgcattctctttaaactgattgaggtcacagtattttattatttggggtcctcaccacaggaaacactgcgatacaggggcaaaagagatggcagtgccaattaaattaatacaacaaaatcaatgcagcaccaaccaagactgccaggtctggtgtcatgggtatgcccagagcccaggagttcagaagggccctaagcctgatttaatgctctgctgttgatgtcttgaaattcttaacaatttttgaacaaggggcctgcgttttcacttcgcactgggccttgcaaattacatagcgagtgctcataaaagaactcagaaacgtggtacctctcttcctggtggatacaaataaagaaatctggatccaaagttgaaagttgctggcgatatcattcaagtaggactctaaatagtggattaagatgagggtgggcctgggtgaagattctttccagctttaaaagaaagtgacttcaaaaactgactgcaaatattgacgatggtttctgctggaggaaaagaaacagcttgaatacagacaggcttttttattacggtactgatatattgaccttaaacttgctgaggaactgaactaacgtcctccagtgaccgtggaattccatctcagctccaggaacatgcagatacctgcaaagagacacgcatatatgctggcatacatgtgcatttggtgttgggaagttgaccatctggtctatcttaataaaatggtaaaaagcacaccaagacaatgatgggggcaggaggatgtttttgaaaacagcgcttctcaaccagtgctcgattttgccccccaggagacatttggcaatgcaatggcaacttttggttgtcgcagccggggaagggaagctaccagcatctagtgcgtagaggtcatggacgccgttaaacatcctacagtgcaagcgcagcccccgaccacgaagagttgtcttgctcaaatatcaacagtgctgcagtgtagaaacttgatcgttggttttcttttaatgcaaaactctcataaaaacctttcacttttcctgtcattgattatatgcttgatacacccaaaaagaaaaggggaggggcaccaattcacctacactccagtggctccatcacctttaaaaatatttataaaatagttccaaaaatctgatatctgaaaagcaatccaagcctgtgtaaatgggaatcactgataagtatcatcatctgtatcagcttggcttggacatgaaaaattgattctctttatgtcactccttgcacctggacaaattcaatccccggtacttaagtcacactgccaagccctcggccctgactattgtcttgattgctgttcctttctggttcaaaataaaatcatttttgtggcaccaaga

SEQ ID NO: 73398 - DNA, 1729 bp, Artificial Sequence
  derived and/or modified sequence
ctgaagtgttagtatgtagtggagctggtggtgtgaagctgattcattttgtttcaaagccccaaatggcatgctgccgaacacaggcacaagcacagcagcgtctccttagaaataatgactccaaggcaaacagccctcattgcaaaatgtagaagactgccatctgcttgtctccactgtggtttattcgtttcagggttttaaatgacgtaataaaaagatagctgatcagcttccttgggttttgctgatgacacaagagagctttgcctgaagatggaaacactggagtcagaactgacctgccctatttgtctggagctctttgaggaccctcttctactgccctgcgcacacagcctctgcttcaactgcgcccaccgcatcctagtatcacactgtgccaccaacgagtctgtggagtccatcaccgccttccagtgccccacctgccggcatgtcatcaccctcagccagcgaggtctagacgggctcaagcgcaacgtcaccctacagaacatcatcgacaggttccagaaagcatcagtgagcgggcccaactctcccagcgagacccgtcgggagcgggcctttgacgccaacaccatgacctccgccgagaaggtcctctgccagttttgtgaccaggatcctgcccaggacgctgtgaagacctgtgtcacttgtgaagtatcctactgtgacgagtgcctgaaagccactcacccgaataagaagccctttacaggccatcgtctgattgagccaattccggactctcacatccgggggctgatgtgcttggagcatgaggatgagaaggtgaatatgtactgtgtgaccgatgaccagttaatctgtgccttgtgtaaactggttgggcggcaccgcgatcatcaggtggcagctttgagtgagcgctatgacaaattgaagcaaaacttagagagtaacctcaccaaccttattaagaggaacacagaactggagacccttttggctaaactcatccaaacctgtcaacatgttgaagtcaatgcatcacgtcaagaagccaaattgacagaggagtgtgatcttctcattgagatcattcagcaaagacgacagattattggaaccaagatcaaagaagggaaggtgatgaggcttcgcaaactggctcagcagattgcaaactgcaaacagtgcattgagcggtcagcatcactcatctcccaagcggaacactctctgaaggagaatgatcatgcgcgtttcctacagactgctaagaatatcaccgagagagtctccatggcaactgcatcctcccaggttctaattcctgaaatcaacctcaatgacacatttgacacctttgccttagatttttcccgagagaagaaactgctagaatgtctggattaccttacagctcccaaccctcccacaattagagaagagctctgcacagcttcatatgacaccatcactgtgcattggacctccgatgatgagttcagcgtggtctcctacgagctccagtacaccatattcaccggacaagccaacgtcgttagtctgtgtaattcggctgatagctggatgatagtacccaacatcaagcagaaccactacacggtgcacggtctgcagagcggcaccaagtacatcttcatggtcaaggccatcaaccaggcgggcagccgcagcagtgagcctgggaagttgaagacaaacagcc

SEQ ID NO: 73399 - DNA, 6393 bp, Artificial Sequence
  derived and/or modified sequence
gattctatgcagggtcactatgaaagaggcagcctgccccagtttgggtattctgaagtgttagtatgtagtggagctggtggtgtgaagctgattcattttgtttcaaagccccaaatggcatgctgccgaacacaggcacaagcacagcagcgtctccttagaaataatgactccaaggcaaacagccctcattgcaaaatgtagaagactgccatctgcttgtctccactgtggtttattcgtttcagggttttaaatgacgtaataaaaagatagctgatcagcttccttgggttttgctgatgacacaagagagctttgcctgaagatggaaacactggagtcagaactgacctgccctatttgtctggagctctttgaggaccctcttctactgccctgcgcacacagcctctgcttcaactgcgcccaccgcatcctagtatcacactgtgccaccaacgagtctgtggagtccatcaccgccttccagtgccccacctgccggcatgtcatcaccctcagccagcgaggtctagacgggctcaagcgcaacgtcaccctacagaacatcatcgacaggttccagaaagcatcagtgagcgggcccaactctcccagcgagacccgtcgggagcgggcctttgacgccaacaccatgacctccgccgagaaggtcctctgccagttttgtgaccaggatcctgcccaggacgctgtgaagacctgtgtcacttgtgaagtatcctactgtgacgagtgcctgaaagccactcacccgaataagaagccctttacaggccatcgtctgattgagccaattccggactctcacatccgggggctgatgtgcttggagcatgaggatgagaaggtgaatatgtactgtgtgaccgatgaccagttaatctgtgccttgtgtaaactggttgggcggcaccgcgatcatcaggtggcagctttgagtgagcgctatgacaaattgaagcaaaacttagagagtaacctcaccaaccttattaagaggaacacagaactggagacccttttggctaaactcatccaaacctgtcaacatgttgaagtcaatgcatcacgtcaagaagccaaattgacagaggagtgtgatcttctcattgagatcattcagcaaagacgacagattattggaaccaagatcaaagaagggaaggtgatgaggcttcgcaaactggctcagcagattgcaaactgcaaacagtgcattgagcggtcagcatcactcatctcccaagcggaacactctctgaaggagaatgatcatgcgcgtttcctacagactgctaagaatatcaccgagagagtctccatggcaactgcatcctcccaggttctaattcctgaaatcaacctcaatgacacatttgacacctttgccttagatttttcccgagagaagaaactgctagaatgtctggattaccttacagctcccaaccctcccacaattagagaagagctctgcacagcttcatatgacaccatcactgtgcattggacctccgatgatgagttcagcgtggtctcctacgagctccagtacaccatattcaccggacaagccaacgtcgttagtctgtgtaattcggctgatagctggatgatagtacccaacatcaagcagaaccactacacggtgcacggtctgcagagcggcaccaagtacatcttcatggtcaaggccatcaaccaggcgggcagccgcagcagtgagcctgggaagttgaagacaaacagccaaccatttaaactggatcccaaatctgctcatcgaaaactgaaggtgtcccatgataacttgacagtagaacgtgatgagtcatcatccaagaagagtcacacacctgaacgcttcaccagccaggggagctatggagtagctggaaatgtgtttattgatagtggccggcattattgggaagtggtcataagtggaagcacatggtatgccattggtcttgcttacaaatcagccccgaagcatgaatggattgggaagaactctgcttcctgggcgctctgccgctgcaacaataactgggtggtgagacacaatagcaaggaaatccccattgagcctgccccccacctccggcgcgtgggcatcctgctggactatgataacggctctatcgccttttatgatgctttgaactccatccacctctacaccttcgacgtcgcatttgcgcagcctgtttgccccaccttcaccgtgtggaacaagtgtctgacgattatcactgggctccctatcccagaccatttggactgcacagagcagctgccgtgagcgtctggccacatggagctgctttctggggaacagtaaggttcaggccactatttaggggactgagaaagcacaggcttcatgagtgtaatgaaatctcaccagaagtgtcccgaaatcggctcagatagggctcaaaacaagagattcctctccttttactgtgtcttgtattaagtacgggctttaataatttctttaatttttttgtatttagaggaaaatctatagattatttataagagaaacataatcaggattacaacttttaggaattacttggttttgcacattaagaggcccataagtttatcagctatttacaaccttcatttcatcacaatctgtgggcttacaaaaaaacaaaaacttttgtagttttgtatgttactcatcttcttacctgatatcccatgatgatcccatggtaggtcttctcacctcgatggtgcataacaggatgtgtttgaacctagtaggggaggaaacaggctttcttactctggtttaatttgaagtgttttaattgtgatgtcaaaaagttgtatcagatcaactaaaatggagagcaagacagagaatgaaaagagttgattttggacctcggaccttgccgtggctaaatctttaccttctcatagctgatgggataatgttggaaagaaaggttctgaatcctttggccacattttgccctgcttctctcagggttaagggttctggaagaacattaagaatgagattgcaattgaaaatagtcattttgaatcctattgattattcaaaaattcaggctgatttgtcttttatcagaggtaggattctgttttatagtatagaatctactttatccttccttttaatagttcctttagacctgtgaaatttcttcactacatttaatagttctcctatttcccgctcccccatatcaattttccttttgtctccggggctgagtaaataaacatgttctgtcacaaatagcagcaccactttggattgattttgctctccaggacatcagcacatggccctgatcagcactaccacatccaaacataagtcactgaaaaacacttaatatttatgagttggtaatgacaagggacattgtataaagtactatttgctagattcatgcctcaaaagttattataaacagacctttattaaacacatcttgaaagatgtagaagtccctctatagtctagtatagtttacaatagagttgtaagaccaaaaaaaaaaaaaaaaaattcaaactcgttattcaggaacctgcttataaaatgtcagctgggattctttgcatgccaatctgatgcgttggaatggtccatgaattaaggctttcttgagcagttcttggcccagaactctggcattggttctagtttgatgaagggcatgacctctataaatggtttcaattgctaaaatatttacctgggatactgggtcagccattttgactgagcagactagtggatttagacattgtttttagttattttgtttttaaccaaatcaaccaactgcctccctgaaataagtcaatgaactcattgtttcagcatcacgtggccaaaggtcatgtgattgcaaatctggatttcaagggaggccaagccagcttcctgggtccttccatcctcttccctagcagacactctcctttttcttaacagatagattctatatatttactatattatttatacccagatgaatattttgatagatacctaagacaatttcacatctaaaagatggacgcctcaatggaaaaaaaacaatctttctctggaaaccttataggtttttctttttattacaatataaaagcaatgtgtgtttgccttctctgagtaaactgaaagggttgtctcagtaatttttacatacattttgggtaactggataatggatattttaatgcactttgtacactaacaggttctaaataaaagggtctaaaactcagcttctgagtttttaaaatcacggtctccaggtaccaataaatgctacagtttgccttatgatgttaacataaaacacttagtagaaggacaatatttccatgaaaataatgtttttcaatattaagaagttactactcaaattttcacagtaagccatttagggtatgtttggctatttttataaggacatgagagattatgtcataattttgttgtggaagtctcactcttggctaacttaaaagcattgtggatagtagcagttactagttccaggttgtcatatttacaggaaaatatgtatatggtgaaaggccaccgtgtttaattactataatgatgtagaaaagattcccgtgtgaattttttttttgaaagtctaaaaaatgtatgctgtaaaaatttgctgcagtgtaattttgcattctctttaaactgattgaggtcacagtattttattatttggggtcctcaccacaggaaacactgcgatacaggggcaaaagagatggcagtgccaattaaattaatacaacaaaatcaatgcagcaccaaccaagactgccaggtctggtgtcatgggtatgcccagagcccaggagttcagaagggccctaagcctgatttaatgctctgctgttgatgtcttgaaattcttaacaatttttgaacaaggggcctgcgttttcacttcgcactgggccttgcaaattacatagcgagtgctcataaaagaactcagaaacgtggtacctctcttcctggtggatacaaataaagaaatctggatccaaagttgaaagttgctggcgatatcattcaagtaggactctaaatagtggattaagatgagggtgggcctgggtgaagattctttccagctttaaaagaaagtgacttcaaaaactgactgcaaatattgacgatggtttctgctggaggaaaagaaacagcttgaatacagacaggcttttttattacggtactgatatattgaccttaaacttgctgaggaactgaactaacgtcctccagtgaccgtggaattccatctcagctccaggaacatgcagatacctgcaaagagacacgcatatatgctggcatacatgtgcatttggtgttgggaagttgaccatctggtctatcttaataaaatggtaaaaagcacaccaagacaatgatgggggcaggaggatgtttttgaaaacagcgcttctcaaccagtgctcgattttgccccccaggagacatttggcaatgcaatggcaacttttggttgtcgcagccggggaagggaagctaccagcatctagtgcgtagaggtcatggacgccgttaaacatcctacagtgcaagcgcagcccccgaccacgaagagttgtcttgctcaaatatcaacagtgctgcagtgtagaaacttgatcgttggttttcttttaatgcaaaactctcataaaaacctttcacttttcctgtcattgattatatgcttgatacacccaaaaagaaaaggggaggggcaccaattcacctacactccagtggctccatcacctttaaaaatatttataaaatagttccaaaaatctgatatctgaaaagcaatccaagcctgtgtaaatgggaatcactgataagtatcatcatctgtatcagcttggcttggacatgaaaaattgattctctttatgtcactccttgcacctggacaaattcaatccccggtacttaagtcacactgccaagccctcggccctgactattgtcttgattgctgttcctttctggttcaaaataaaatcatttttgtggcaccaagaccctctgtctctgcctgtctctgttgccttttcatcattttgtgtttttgcagttatgatgttgacaaatatttattcaacatctaccatttattcatactactttatgacatataattcattttcttttactgtctctcatccactatttgcctttccctattcaaaatacaattcttttgcaacactcaaaatattctccagggaatttttaaaacacaataaaagaaagcctatatagaagtg

SEQ ID NO: 73400 - DNA, 2004 bp, Artificial Sequence
  derived and/or modified sequence
atggagaccctggagagcgagctgacctgccccatctgcctggagctgtttgaagatccgctgctgctgccctgtgcgcactccctgtgtttcaattgtgctcacagaattctcgtttcacactgtgctactaacgagtctgtagaaagtatcacagcattccaatgccccacctgcaggcacgtaataacgctgagccaaagaggacttgatggtctgaagagaaacgtgaccttgcagaacattatcgatcggtttcaaaaagcttctgtgtctggccctaactctcctagtgagacgcggagggaacgggccttcgatgccaacaccatgacaagtgccgagaaggtcctctgccagttttgtgatcaggacccagcccaggatgcagtaaaaacatgcgttacctgcgaggttagctactgtgacgagtgtctgaaggctactcatccaaataaaaagccgtttactggccatcgtcttattgagcccatccccgatagccatatcagaggtttgatgtgcctggagcacgaggacgagaaagttaatatgtactgtgtgacggatgatcagttaatctgcgcgctgtgcaaactcgtgggccgccatcgggaccaccaggtcgctgccctgtcagaaaggtacgacaagctaaaacagaacctcgagtcaaacctgaccaatctcattaagcggaatacagagctggagacgctcttggctaagctgattcaaacatgtcaacatgtcgaggtgaatgcctcccgtcaggaggctaagctcacagaagagtgtgatctattaatcgagatcattcagcagcgacggcagattatagggacgaagattaaggaggggaaagttatgagattacgcaagctggcccaacagatcgctaactgtaaacagtgcattgagcgctccgcctctctcattagtcaagcagaacattctctgaaggagaatgatcatgcccggtttttgcagacggctaagaatatcacagaaagggtctccatggccactgcgtcctcacaggtcctgatccccgaaatcaatctcaacgatacattcgacacttttgccctggacttctcaagggaaaaaaaactgcttgagtgtctggactacctgaccgctcctaatccccctaccattcgagaggagctgtgcacagcctcatacgacaccatcacggtgcattggacaagtgatgatgagttttccgtagtgtcatatgaactccagtacacaatcttcacgggacaggccaatgttgtctcattgtgcaatagcgctgattcgtggatgatcgtgcccaatattaagcagaaccactacactgtgcacgggttgcagtctgggacaaagtacatcttcatggtgaaggccataaaccaagccgggtcccgaagttccgagccaggtaagttgaaaacgaattctcagccattcaagttagaccctaagagcgctcataggaagctcaaagtgagccacgataatttaacagtggaacgcgacgaaagttcaagtaagaaatcacacactcccgaaaggtttaccagccagggaagctacggcgtagccggtaatgtgtttattgattcaggtcggcactattgggaagtggtgatctccgggagcacttggtatgccattggcttagcatataaatcagcacctaagcacgagtggattggtaagaattcagcgagttgggccctgtgtcgctgtaataataactgggtggtgaggcataattccaaagagatccccatcgagcctgcacctcatctgcggagggtcggaattttgctggattacgacaatggttccattgcgttctatgatgccctgaactccatccacctctacacatttgatgtggccttcgcccagcctgtgtgtcctacgttcacagtgtggaataaatgccttacaatcattacgggcctcccgatcccagaccaccttgactgtacagaacagctcccttag

SEQ ID NO: 73401 - DNA, 2004 bp, Artificial Sequence
  derived and/or modified sequence
atggagaccctggagagcgagctgacctgccccatctgcctggagctctttgaggatcctttactgctaccttgtgcccactcactatgcttcaactgtgcccatcgcatcctagtgagtcactgtgctacaaacgagtcagtggagagtattaccgccttccagtgcccgacgtgtcgccatgtgattacgctgagccagagaggtctcgacggcttgaagcgaaacgtgactctgcaaaatatcatagacagatttcagaaggcgagtgtaagcggacctaacagcccttcagaaaccaggagggaaagagcgttcgatgccaacacaatgaccagtgcagagaaagtgctttgccagttttgcgaccaggacccagcacaagatgcagtaaaaacctgcgtgacctgtgaggtgtcctactgcgacgaatgtttgaaggccacacatcctaacaaaaaaccctttaccggccatagactgatcgaaccgattcccgatagtcacatacgaggattaatgtgcctcgagcacgaggacgagaaagtaaacatgtattgcgtgacggacgatcaactgatttgcgccctgtgcaagctggtaggaaggcaccgcgaccatcaagtggcggccctgtcagaaagatacgataagctgaagcagaatttggaatcgaacctcaccaatctcattaagcgcaacacagaactcgagacgctgttagccaaactcatccagacatgtcagcacgtggaggtcaacgcaagtaggcaagaggcaaagcttacagaggaatgcgacctgttgatcgagattatacaacagcggcgtcagattataggaactaagatcaaggagggcaaagtgatgcggctccgcaaactggcacagcagattgccaactgcaaacaatgcattgaacggtccgctagcctgatctcccaagctgagcactctttgaaggaaaacgatcatgcccgcttcctccaaacagctaaaaacattacggagcgggtgtccatggctacggcctcatctcaggttttgatccctgaaattaacctaaatgacacctttgacacctttgcactggacttttcgcgggagaaaaaactgctcgagtgcctggattatctgacagcccccaatccacctactatccgtgaagaattatgtacagctagctacgacactatcacagtgcattggaccagcgacgacgagttctccgtcgtctcatatgagctccagtacacgatctttacaggccaggccaatgttgtgtcactgtgtaactccgcggatagctggatgatcgtgcccaatataaaacaaaaccactacacggtgcatggcctccaatccggcactaaatatatttttatggtgaaagcgataaaccaggctggatcaagatctagtgagcccggtaaacttaaaaccaactctcagccgtttaaactggacccaaagtcagctcatcggaaactgaaagtgagccacgacaatcttacagtcgagagggacgagagtagtagcaagaagagccatactccggagaggtttacttcacaagggtcttatggcgttgcgggaaatgtttttattgattccgggcgacactattgggaagtggtaattagcggaagcacgtggtacgcaatcggcttggcatacaaatccgcccccaagcatgagtggatcggaaagaacagcgcgtcatgggccctctgccgttgtaacaacaactgggttgtccggcataattctaaagaaattccaatagagcctgccccacacctgcggcgcgtcgggatcctcctagattatgacaacgggtcgatcgccttttatgacgcactgaattctatccacctgtacacatttgacgtcgctttcgcccagccggtgtgccccactttcaccgtgtggaataaatgtctgactatcattaccggcctacctataccggaccatctggactgcactgagcaactcccctag

SEQ ID NO: 73402 - DNA, 2004 bp, Artificial Sequence
  derived and/or modified sequence
atggagaccctggagagcgagctgacctgccccatctgcctggagctctttgaggaccccctgctgctgccctgcgcacactccctttgcttcaactgtgctcaccgcatccttgtgtcccactgtgctactaacgagtccgtagaatcaattacagcattccagtgcccaacatgccgccatgtgataaccttgtcccaaagagggctcgatggactaaagcgtaacgtgactttacagaatattatcgatcggttccaaaaggccagtgtgagtgggcctaactcaccctctgaaactcgaagggaaagagcgttcgatgccaataccatgacgtctgctgaaaaggtcctgtgtcagttctgcgatcaggaccctgcccaagacgctgttaagacatgtgtcacctgcgaagtctcctactgcgacgagtgtctcaaagcaacgcacccaaacaaaaaacccttcactggccacagactgatcgaaccaatccccgatagccacattcggggtctcatgtgcctggaacacgaggacgaaaaagtgaacatgtattgtgtgactgatgaccaactgatctgtgccctgtgtaaacttgtaggccgtcaccgggaccaccaggtcgccgccctttcagaaagatacgacaagctgaaacagaatctagagtcaaatcttactaatcttatcaaacgcaataccgagcttgagaccctgctcgccaagctcatccagacttgccaacatgtggaagtaaatgcaagcagacaggaggccaaactgacagaagaatgcgatttgttgatcgagataatccagcagagacgccagatcataggcacaaagataaaagagggtaaagtgatgcgtctgcgaaaactggcccaacagatcgcgaattgtaaacagtgtatcgaaagaagtgcgagcctgatttctcaggccgagcactctctcaaggagaatgaccacgctcggtttctgcagacagcaaaaaacataacagagcgagtgagcatggcaacagcaagctcacaggtgctgatacctgagattaatctaaatgacacattcgacacctttgcattggatttttcaagggaaaagaagctcctcgagtgtctggactatcttactgcaccgaacccccccaccattagagaggaactgtgcaccgcctcttatgacacaatcactgtgcattggacgagtgacgacgaatttagcgtggtctcttacgagctgcagtacacaatctttaccggtcaagcgaatgtcgtgtcattgtgtaactcggcagatagttggatgattgttcccaacattaagcagaaccactataccgtgcacggattgcagagcggcaccaaatatatctttatggtgaaggccattaaccaggctggttcacggagctctgaacctggtaagttaaagaccaacagtcagccatttaagttagatcccaagtccgcccaccggaaactcaaagtgtcccatgacaatcttacagtcgaacgggacgagtcttcttctaaaaaatcccacactcccgagcgctttacctcacagggaagctatggggtggcggggaacgttttcatagattcagggcgccactactgggaggtcgtcatcagcggctcaacctggtacgctatcggacttgcgtataagtccgcacccaaacatgagtggattggcaagaactcagcatcatgggccctctgccggtgtaacaataattgggtggtgaggcacaatagtaaggagataccaatcgaaccagccccccaccttcggagggtagggatcttattagactatgacaacgggagtattgccttctacgacgctcttaattccatccacctctatacattcgacgttgccttcgcccagccggtgtgtccaacattcaccgtgtggaataaatgtctgaccatcatcaccggtctgccgattcccgaccacctggactgcacggaacaactaccatag

SEQ ID NO: 73403 - DNA, 1659 bp, Artificial Sequence
  derived and/or modified sequence
atggagaccctggagagcgagctgacctgccccatctgcctggagttattcgaagatccactgctgctcccctgtgctcactctctgtgcttcaattgtgcgcataggatcctggtgagccactgcgccaccaacgagtctgtggagtccattaccgcctttcagtgtcctacttgtcggcacgttattactctctctcagcgcggtctcgacggactgaaacgaaacgtcacactccagaacatcattgacaggtttcagaaggcatccgtgagcggcccgaattcacccagtgagaccaggagggagagagccttcgatgctaataccatgacatcggctgagaaagtcttatgccagttctgcgatcaggatcccgcacaggacgccgtgaaaacttgcgtgacttgcgaggtgtcatattgtgatgagtgcttgaaggcaacgcacccaaacaaaaagccattcacgggccatcggcttatcgagcccatcccggacagccatatccgcggcctgatgtgcctggaacacgaggatgaaaaggtaaacatgtattgtgtgaccgatgatcagctcatttgtgcactgtgtaagctcgtagggaggcacagagatcaccaagtcgccgccctgtcagaacgctacgataaactcaaacagaatttggagtcaaatctcaccaatcttatcaagcgcaatacggaactggaaacgttgcttgctaagcttattcagacttgccagcacgtcgaggtaaatgcctctagacaggaggccaagttaactgaagagtgcgatctgctgatcgagatcatccagcaacgccggcagattattgggaccaagatcaaggaggggaaagtgatgcggcttcgaaaactggcacagcagatcgctaactgcaaacagtgtatcgagcggtcagcaagccttatctcccaagcagagcattccctcaaagagaatgaccacgctagattcctgcagactgccaaaaacattaccgaacgggttagtatggcgacggccagttctcaggtgttgatccccgaaatcaacttgaatgacacttttgacacattcgcccttgattttagcagagagaaaaagctgctagagtgtctcgattatctaactgcacccaatcctccaacaattagagaagagctttgtaccgcttcctacgataccattaccgttcactggaccagcgatgacgagttttcggtggtgagttacgaacttcagtacacaattttcacagggcaggccaacgtggtttccctgtgcaactctgccgacagttggatgatcgtaccaaatatcaagcaaaaccactacactgtgcacgggctgcagagcggaacgaaatacatcttcatggtcaaggccataaatcaggctgggagtagatcatccgagcccgggaagctgaagacaaactcccagccttttaagctggatccaaagtccgcccacagaaagctgaaggttagtcacgacaatctgacagtggaaagggatgagagctcctccaaaaagtctcacacccctgagaggttcacaagtcagggaagctatggggtagcgggcaacgtgtttatagactccgggcggcattactgggaagttgtcatctctgggtccacctggtag

SEQ ID NO: 73404 - DNA, 2004 bp, Artificial Sequence
  derived and/or modified sequence
atggagaccctggagagcgagctgacctgccccatctgcctggagctcttcgaggacccgctcctgctgccttgcgcccattctctgtgttttaactgcgcgcataggatcctggtaagtcactgtgctaccaatgagtcagtagagtccatcacagctttccagtgccccacctgccgacatgtgatcaccctgagtcagcgcggcctggacggcttgaagcggaacgtgactctgcagaatattatagacaggtttcagaaggcgagcgtcagtggccccaattcaccatccgagacacggagggagcgagcgtttgatgctaacactatgacgagcgcggagaaggttctgtgtcagttttgtgatcaagatccggctcaggacgcggttaaaacctgtgtaacctgcgaggtgagttattgcgatgaatgtctgaaggcaacacatccgaataaaaagcccttcacaggccaccggctcatcgaaccaattccggactcccatatcagagggctaatgtgcctggaacatgaggacgaaaaggttaatatgtactgcgttaccgacgatcagcttatttgcgcgctgtgtaagctggtgggaagacatcgggaccatcaggttgccgcactctcagagcggtatgacaaactaaaacagaatctggagtctaatctaacaaacctgataaagcgtaacaccgagcttgagaccctcctggcgaagctcattcaaacatgccaacacgtggaggtgaatgcatcacgccaggaagccaaactgaccgaggagtgcgatttgctgatagaaattatacagcagcgtcgccaaatcattgggacgaaaatcaaagagggcaaagttatgcggctcaggaagttggctcagcagattgcaaactgcaagcaatgcattgagcgctctgcaagcctgatctcacaagctgaacactcactgaaagaaaacgaccatgcccgttttttgcagaccgccaagaacattactgaaagagtttcaatggcaactgccagcagtcaggtcctgatccccgagattaatctgaatgatacctttgatacctttgctttggattttagccgtgaaaagaagctgcttgagtgcctagattacctgactgccccaaacccccctactattcgagaggagctgtgtaccgcctcttacgatacaatcactgtgcattggacaagtgatgatgagttctccgtggtgtcgtacgaactccaatatacgatattcactggacaggctaatgtcgtttcactgtgcaactctgccgatagctggatgattgtgccaaatattaaacaaaatcactatactgtgcacggcctgcagagtgggactaagtacatttttatggtgaaggctatcaatcaggcaggctcccggtcttcagaaccaggcaaactaaagactaattctcagcccttcaaacttgacccaaagtccgcacacaggaagttgaaagtcagccatgacaatctgactgtggaacgagatgagtcttcgagcaagaagtctcatactcctgagcggttcacatctcaggggagctatggagtggctggtaatgtttttatcgactccggccggcactattgggaggtggtcattagtgggtccacctggtatgccatcgggctggcctataaaagtgcaccgaagcacgagtggatcggcaagaactcggcgtcttgggccctctgtaggtgtaataacaattgggttgtaaggcacaattctaaggagatccccatcgaacccgcaccgcatttgagacgtgtggggattctgctagattatgacaacgggtccatcgccttttacgacgctctgaacagcatccatctatataccttcgacgtggcttttgcacaaccggtgtgtcccacttttacagtgtggaacaaatgccttacgattatcaccggcctaccaataccagaccacctggactgcacagaacagttaccgtag

SEQ ID NO: 73405 - DNA, 2004 bp, Artificial Sequence
  derived and/or modified sequence
atggagaccctggagagcgagctgacctgccccatctgcctggagctttttgaagacccattgcttctcccttgcgcacacagcctctgctttaattgcgcgcaccgaattcttgtgtcccactgcgctacgaacgagagcgttgagagcataactgcatttcagtgccctacttgcaggcacgtgattacccttagtcagcggggcctcgatggtcttaaaaggaacgttacccttcagaatatcatcgatcggttccagaaagcctctgtgtctggacctaacagtccgagcgaaaccagaagggagcgcgctttcgatgccaacacaatgacatccgctgaaaaggtgctgtgtcagttctgtgaccaagaccctgcccaggacgccgtcaagacttgtgtgacatgtgaggtgtcttactgtgacgagtgtctgaaagctactcaccctaataagaaaccatttaccggccacaggctgatcgagccaatcccagattcacatatccgggggttgatgtgtctcgaacacgaagacgagaaggtgaacatgtactgcgttactgacgaccagctgatctgtgccctgtgcaaactcgtgggaaggcatagagatcaccaggtcgcagctctgagcgagaggtacgacaagctgaagcaaaatcttgagtctaacctgaccaacctaatcaagaggaacacggaacttgagaccctgctggcaaagctgatccagacatgccagcacgtggaggttaatgcctcccgacaggaagccaagctcactgaagaatgcgaccttctgatcgagattattcaacagaggaggcagattattggcaccaagattaaagagggtaaggtgatgagactacgcaaattagcccagcagatagcaaattgtaagcaatgcattgaacgcagtgcttccctgatttcccaggctgagcactcacttaaagaaaatgaccacgccaggtttctacagaccgccaagaacataacagaaagagtgtctatggccaccgcctcgtcccaggtcctcatccccgaaattaacttgaacgataccttcgacacatttgcattagatttcagccgagaaaagaagctgctggaatgcctggattacctgaccgctcctaacccacctaccattagggaggagttgtgtacagccagttacgacaccattacagtgcactggacctccgacgacgagttttcggtggttagttatgagctgcaatacacaatcttcacagggcaggctaatgtggtctcgctgtgtaactccgccgattcttggatgatcgttcccaatattaaacagaatcattacacagtgcacggcttgcagagcggcactaaatatatttttatggtgaaagccatcaaccaggccgggtctaggtccagcgaaccaggcaaattgaagactaattcgcagccattcaaacttgaccctaaatccgcacaccggaaactgaaagttagccacgacaatttgaccgtcgagcgcgatgaatcttcctcaaagaaaagtcacacccccgagcgcttcacctcccaaggctcatacggagtggctggaaatgtattcatcgattctggaaggcactactgggaagttgtgatatctgggtctacttggtacgcgattgggttagcctataaatcagcccctaaacatgaatggatagggaaaaactctgcatcctgggccctttgccgctgcaacaacaattgggtagtaaggcataatagcaaggaaattcccatcgaaccagccccccatcttcgacgggtaggcattctcctggactacgataatggaagcattgcgttctatgatgcgctgaacagtatacacctgtatacgtttgacgtggctttcgcacaacctgtatgtcccacctttaccgtgtggaacaagtgcctcacaataatcaccgggctcccgatccccgaccacctggattgtaccgaacagttaccttag

SEQ ID NO: 73406 - DNA, 1452 bp, Artificial Sequence
  derived and/or modified sequence
atggagaccctggagagcgagctgacctgccccatctgcctggagcttttcgaggaccctctcttgctcccctgcgcccacagcctgtgtttcaactgtgcacatcgtattctcgtgtcacactgcgctactaatgagagtgtagagtccataactgcctttcagtgtcccacttgcagacatgtcatcaccctttctcagaggggcttggacggtctcaagcggaatgtaacactccaaaacatcatcgatcgattccaaaaagcatccgtgagcggaccaaattctccttctgagacccgaagagaaagagcattcgacgccaataccatgacttctgccgaaaaagtgctgtgccagttctgcgatcaggatccggcccaagacgctgtgaaaacttgcgttacctgcgaggtgagctattgtgacgagtgcttgaaagcgactcatcctaataagaaaccattcacaggccataggttgatcgagccgatccccgacagtcacattcgaggcctaatgtgtctcgagcacgaggacgagaaggttaacatgtattgtgtgacagatgatcagttgatctgtgccctttgtaaattggtgggccgtcatagggaccatcaagttgcagctctctcggagaggtatgacaagttgaagcagaaccttgagtcaaatctgactaacctgatcaaacggaacaccgagttggaaacactcctggctaagctcattcagacatgccagcacgtggaagtcaatgccagtcgtcaggaggccaaactgactgaagaatgtgatctgctgatcgagattatccagcaacgtagacagataattgggactaaaatcaaagaaggcaaggtgatgcgactgcgtaaattggcacaacagatcgccaactgcaagcagtgtatcgaacggagcgccagcctgataagtcaggccgagcactcactgaaagaaaacgaccacgcacgttttctgcagacagcaaaaaatatcactgagcgagttagcatggccactgctagctcccaggtgctcattccagaaataaatttgaatgacactttcgatacatttgccctagactttagcagggagaagaagctgcttgaatgcttagactatctaaccgcacccaatccacccacaatccgagaagagttatgtacagcgtcttatgacacaattaccgtgcactggacatctgatgatgaatttagcgtggttagctacgagctgcagtacaccatctttactggacaggctaacgtggtttctctttgcaacagcgccgattcctggatgattgtccccaacataaagcagaatcactataccgtccacgggctgcagagcgggactaaatacatcttcatggtcaaagccattaatcaagccggctctaggtcaagtgagcccggtaaactgaaaactaactcttag

SEQ ID NO: 73407 - DNA, 2004 bp, Artificial Sequence
  derived and/or modified sequence
atggagaccctggagagcgagctgacctgccccatctgcctggagctgttcgaggacccactgctcttgccttgcgcacacagtttgtgttttaactgtgcccatcggatactggtgtctcattgcgccaccaacgagtctgtggagtctataacagcctttcagtgtccaacgtgtagacacgtgatcaccctctcccaacgtggactggacggactgaagaggaatgtcacccttcagaacattatcgatcgcttccagaaggcgtcggtgagtggccccaatagtccttctgagacaagaagggagcgggccttcgacgctaataccatgacatctgccgagaaggtgctgtgtcagttttgcgatcaggaccctgcccaggatgcggttaagacttgtgttacgtgcgaggttagctattgtgacgagtgtctgaaggcgacccatccaaataagaagccctttactggacatcggctgatcgaacccatcccagatagtcatatcagaggactcatgtgcttagagcatgaggatgaaaaggtaaatatgtattgtgttacagacgaccaattaatatgcgcactatgtaagctcgtggggaggcatagagaccaccaagttgccgccctgagcgagcggtatgataaattaaagcaaaacctggaatctaatctgaccaatttaattaaacgtaatactgaactggagacactgctcgccaagctgatccagacctgccaacatgtggaggtgaatgcctcgaggcaggaagccaagctcaccgaggaatgtgacttgcttatcgaaatcatccagcagcgcagacagattatagggactaaaattaaagagggtaaggttatgcgattgaggaagctggcacagcagatcgctaactgtaagcagtgtatcgaacggtcagcatctctgatatcacaggctgagcattccttgaaggagaacgaccacgcccgattcctgcagactgccaagaatattaccgaacgagtctccatggcaacagcgtctagccaggtgctgatccctgagattaacctcaatgacacgtttgatacctttgctctcgacttttcccgtgaaaaaaaattgctggaatgtttggattatttgactgccccaaaccctcccactatccgggaggagttgtgcactgctagttacgatacaattactgtgcattggacatccgatgatgaattttcggtcgtgagttatgaactccaatatactatctttaccggccaggcgaatgtagtttccctatgtaactctgccgatagctggatgattgttcctaatatcaaacagaaccactatactgtccatgggctgcagtcgggaaccaaatacattttcatggtgaaagccatcaatcaggctggctctcgatctagtgaaccaggtaagctgaaaaccaattcacagcccttcaaacttgatcccaaaagtgcgcatcggaagttgaaggtctctcacgataaccttactgtagagcgcgacgagagttcttcaaaaaaaagccacacgcccgaacggtttactagccagggttcctacggcgttgcaggcaacgtgttcatcgacagcggacgccattattgggaggtcgtgatcagcgggtctacatggtatgcaattggtctggcgtataaatccgcgccgaagcatgaatggatcggtaagaactcagcaagttgggccctgtgtcgttgcaataataattgggtggtaagacacaatagcaaagagattccaatagagccagccccacacctgcggcgagtgggaatcctgctcgattacgataatgggtccattgctttctacgatgctctgaactcgatccacctctatacattcgacgtagcgttcgcccagcctgtctgcccgactttcacagtctggaacaaatgccttactatcatcaccgggctccccattcccgaccatctggactgcacagaacagctgccctag

SEQ ID NO: 73408 - DNA, 2004 bp, Artificial Sequence
  derived and/or modified sequence
atggaaaccctcgagtctgagctgacatgccctatctgtctggaattgttcgaggacccacttttgctgccttgcgctcacagcctgtgtttcaattgtgcacatcgaattttagtatcccattgtgccaccaatgagagtgtcgaatccataactgccttccagtgcccgacttgcaggcatgtcataacattgtcccagaggggacttgacggactaaagaggaacgtaaccctccaaaatatcatcgaccggtttcaaaaagcatccgtgagtggacctaacagcccaagcgaaacgcgcagagagcgcgctttcgacgctaatacaatgacaagtgccgagaaggtcctttgtcagttctgcgaccaggatcctgcccaggacgccgttaagacatgcgtgacatgtgaagtgtcatattgcgacgagtgcctcaaggctacacatcccaacaagaaaccttttacaggtcataggttgatcgaacccatacctgatagccacattagaggtttaatgtgccttgaacacgaagacgaaaaggtcaacatgtattgcgtaacggacgatcagctcatctgcgcactctgcaaattggtgggtagacacagagatcatcaagtcgctgcgctcagcgagcgatacgacaagctgaaacagaacctggaatctaatctgaccaaccttattaagcgaaacaccgaactggaaacactgttggctaagctgatacagacttgccagcatgtggaggtgaacgcttcccggcaagaggccaagctcacagaagagtgtgacctacttattgagattattcagcagcgcaggcaaatcatagggactaaaatcaaagagggcaaagttatgagactgcggaagctggcacagcagatagccaattgtaaacaatgtattgagcggtctgcctctctcatttctcaggcagagcacagtctcaaagaaaacgaccatgcccgattccttcagacggccaagaatattacagaaagagtgtccatggctaccgcgtcgtctcaggttctcatccctgagatcaatctgaacgacacctttgacacctttgccttggatttcagccgcgagaaaaagctgctcgaatgcttagactacctcaccgctccgaatccccctaccatccgagaggagctgtgcactgcatcatacgacactatcaccgtgcattggacctcagatgatgagttttcagtggtaagctatgagcttcagtacacgatctttactggccaagccaacgttgtgtccctgtgtaacagtgccgatagctggatgatagtgccgaacattaaacagaaccattacacggtgcatgggcttcagtccggcaccaaatatatttttatggtgaaagccatcaatcaagcgggatccaggtcttcagagcctgggaagttaaaaaccaacagtcagccattcaaactggatcctaagtcagcacaccgcaaattgaaggtgtcccatgataatctgacggtcgagagggacgaaagctctagcaagaaatcacatacacctgagagatttacctcccaagggagttatggggtcgcaggaaatgtgttcatcgacagcggacggcactactgggaagtggtgatctccgggtcaacgtggtacgctattggattggcttacaagtcggcccctaaacacgaatggatcggcaaaaactctgctagctgggcgctgtgtagatgcaataacaactgggtggtccgtcacaatagtaaagaaatccccattgaacctgcccctcatttacgtcgagtcggaatactcttagactacgataacggctccatcgccttctacgatgccctgaatagcatccacctgtacacttttgatgtggcgttcgcacagccggtttgccctacctttactgtgtggaacaagtgtctgaccattataaccggtctacctattccggaccaccttgactgcaccgagcagttgccgtag

SEQ ID NO: 73409 - DNA, 2004 bp, Artificial Sequence
  derived and/or modified sequence
atggagactctggagtccgagctaacttgtccaatttgcctggaactgttcgaggatcctctgctgctgccgtgcgcacacagtctgtgtttcaactgtgcgcaccggattctcgtgtcccactgcgcgacgaacgaatcggtggaaagcattaccgcctttcagtgtccaacttgccgacacgttattactctcagccagagaggtctagatgggcttaaacgaaacgtaaccctccagaatattattgatcgcttccagaaggcctccgtttccgggccaaacagccccagtgaaactaggagagaacgtgctttcgatgctaacactatgacaagtgctgaaaaggtactctgccagttttgtgaccaggaccccgcacaagacgccgtgaagacgtgcgtcacgtgtgaggtctcctattgcgacgaatgtctcaaagctacacacccaaataagaagcccttcactgggcaccgtttgatcgagcctatccccgactctcacatccgtggcctcatgtgtctcgagcatgaagacgaaaaagtaaacatgtactgcgtaacagacgatcagttgatctgtgcactctgcaaacttgtgggtagacatcgggaccatcaagtggcggcacttagcgaacgctatgataagctgaaacagaatctggaaagcaatcttaccaacttaataaaacgcaatactgagctcgaaactctcctggcaaaactgattcaaacctgccagcacgtagaagtaaacgcatcgagacaggaagcgaaacttacagaagagtgtgatcttctgatcgagataatccagcagaggcggcagatcattggtacaaaaatcaaagaggggaaagtaatgcggctgcgtaagctggcgcagcaaatcgccaactgcaagcaatgtattgaaaggtctgcttccctgatatcgcaagcagagcactctttaaaagagaatgaccacgccagattcctccaaacggctaaaaacattaccgaacgggtgtctatggccacggcttctagtcaggttcttatccccgaaatcaatctaaacgatactttcgatacttttgcgttagacttcagccgggaaaaaaagctgctagaatgtctggactacttaaccgctcctaacccccctacaattcgtgaagaattgtgcactgcctcttatgacaccatcacagtgcattggacaagcgacgacgagttctctgtagtaagctatgagttgcagtacaccatctttactggccaggccaacgttgtgtctttgtgcaattccgccgactcttggatgatagtgcccaacatcaagcagaatcattacactgttcacgggttacagagcggcactaagtatattttcatggtaaaggcaataaatcaggccggttctagatcgtcagagccagggaagctaaagacgaattcacaaccgtttaagctagacccaaaaagcgcccacagaaagctcaaggtgtcacacgacaacctgaccgtcgagcgcgatgagagctcttcaaaaaaatcccatacccctgagcgatttaccagtcaagggtcatatggggtggccggaaatgtgttcatagactctggtcggcattattgggaggtcgtcatctccggatcgacgtggtacgctatcgggctggcctataaatctgcacccaagcatgaatggataggaaaaaattcggcaagttgggcactttgtcgctgcaataacaattgggtggtcagacacaacagcaaggagattcctatcgaacccgctccgcatttaagacgagtgggtatacttctcgactacgacaatggttcaatcgccttttacgacgccctgaactccatccatctgtacaccttcgatgtggcattcgcccagcctgtttgtccaaccttcactgtatggaacaagtgcttgaccataatcacaggactacctattcccgaccatctcgactgtaccgagcaactcccatag

SEQ ID NO: 73410 - DNA, 2004 bp, Artificial Sequence
  derived and/or modified sequence
atggaaacgctggagtcagaactcacatgtcctatttgtttggagctgtttgaagaccccctgctattaccttgcgcccactcactttgtttcaattgcgctcaccgaattctggtgtcccactgtgcaacgaacgagtccgtggagtccataaccgccttccagtgccccacctgtcggcatgtcataacattaagccagagaggcctggacggcctcaagcgaaacgttaccctgcagaacataatcgatcgttttcagaaagcctcagtgtctgggccaaattcgccctcagaaactcgccgagaacgcgcattcgatgcaaatactatgaccagcgccgagaaagtcctgtgtcaattctgtgatcaagaccccgctcaggatgccgtcaagacatgtgtgacttgcgaggtaagctactgtgatgaatgtttgaaggctacccaccccaacaagaagccgtttacaggtcacaggctgatagaacctatccctgactctcacattcgcggactcatgtgtctagagcacgaggacgaaaaagtgaacatgtattgcgttacggacgaccagctgatttgtgcattgtgcaaacttgtcggacggcacagggatcaccaagtggccgcactctccgaacgctacgataagctaaagcagaatcttgagagcaatctcacgaacctgataaaacgaaataccgagttagagacgcttttggctaagctgattcaaacttgtcagcatgtggaggtgaacgcctctcgccaagaagccaaactgacagaagagtgtgacctgttaatcgagattatacagcaacggagacagattatagggacaaaaattaaggaaggaaaggttatgagactgagaaaactggctcagcagattgcaaactgtaaacaatgtattgaacggtctgccagtctcatatcccaggcagagcacagccttaaagagaacgaccacgctcggttcttacagacagcaaagaacatcacagagagagtctcaatggctacggcatcgtcccaggttcttataccggagatcaacttaaacgatacatttgatacctttgccttggattttagcagggaaaagaagctgctagagtgtttagactacctgaccgcacctaacccccctacaatccgggaagagttatgcacggcttcttatgacactatcacagtgcactggacaagtgatgatgaatttagcgtagtatcttacgagctgcaatacacaatatttacaggacaggcaaacgtggtgtctctctgtaacagtgcagatagctggatgatcgtcccgaacattaagcagaaccactacacagtacacgggttacagtccggcacaaagtacatctttatggtaaaagccatcaaccaggccggatctagatcgtccgagcctggcaaattgaagacaaattcacagcccttcaaactcgatcccaagagtgcccaccgcaagcttaaagtgtcgcatgacaatctgactgtggagcgcgacgagagctcctccaaaaagtcccatactcccgagcgcttcactagccagggtagctacggcgtcgctgggaatgtgttcatcgacagcggtcgacattactgggaagtggttatctcaggcagcacgtggtacgctatcgggctggcctataaaagcgctccaaaacacgagtggatcggaaagaactccgcttcttgggccctctgtcggtgcaacaataactgggtggttcggcacaactctaaggagattcccatagagccagcccctcatctcagacgggtcggcatcctcctagactacgataatggttccatcgctttctacgacgccctgaactccattcatctctacacctttgacgtagcgtttgcccagcccgtctgtccaacatttaccgtgtggaataagtgtctcaccattattaccggactgccaatcccggatcatctggattgcaccgagcaactgccatag

SEQ ID NO: 73411 - DNA, 1659 bp, Artificial Sequence
  derived and/or modified sequence
atggagactctggagtccgaacttacttgccccatctgtttagagctgttcgaagatcctctcctgctgccctgcgcacacagcctgtgcttcaactgcgcacacaggattctggtctcccactgcgccactaacgagagcgtggagtccatcaccgcctttcagtgtcccacatgccgccacgtaattacactttcacagagaggcctggacgggttgaaacgaaacgtgaccctgcagaacattatcgatagattccagaaagcttccgttagtggcccaaatagcccctcagagactcggagggagcgcgcatttgacgcaaacacgatgacaagcgccgagaaggtgctgtgccaattttgcgatcaggaccctgcccaggatgccgtgaagacctgcgtcacatgtgaagtgagctattgcgatgaatgtctaaaagcgactcatcctaacaaaaaaccgtttacaggccatcgcttaatagaacccattcctgattctcacatccgtggcctgatgtgcttagagcacgaggacgagaaggtcaacatgtattgcgttacagatgatcagctgatctgtgccctctgcaaactcgtgggtaggcaccgggaccaccaggtcgctgccctgtcagaaagatacgataagctaaagcaaaacctggagtcaaatttaactaatctcatcaagcgcaacaccgagctcgaaaccctgttggccaagctgatccagacctgccagcatgtcgaggtgaacgcctcacgccaggaggcaaaactgaccgaggaatgtgaccttctgatagaaatcattcaacagcgccgacagattatagggaccaagattaaggagggaaaagtgatgcggcttaggaagttggcccagcagatagccaactgtaaacagtgcatcgagagatcagctagcttgatcagtcaggcagagcactccctaaaggagaatgatcatgctcgattcctccaaaccgcgaagaatattactgaacgggtgtccatggccactgcttctagccaagtgctgatccccgagattaatttgaatgataccttcgacacctttgccctggacttctcaagagaaaagaagcttttagaatgccttgactatctgaccgctcctaatccacccaccatacgcgaagaattatgcactgcttcttatgacaccatcactgtgcactggaccagtgatgatgaattttctgtcgtgtcctatgaactgcagtacactatcttcacaggtcaggctaatgtcgtgtccctgtgcaattctgcagattcatggatgatcgtccccaatataaagcaaaatcactataccgtgcacggtttgcaaagcgggactaaatacatttttatggtcaaagcgatcaatcaggcaggttcaaggtctagtgaacctggcaagcttaagacaaactctcaaccctttaagctagaccccaaatccgcacacagaaaattgaaagtgtcccacgacaatctgaccgtggagcgagatgaatcaagtagcaaaaaatcgcacaccccggaaaggtttactagccaagggtcatatggggtagccggaaacgtgttcatcgactctggtagacactattgggaggtcgtcattagtgggagcacatggtag

SEQ ID NO: 73412 - DNA, 2004 bp, Artificial Sequence
  derived and/or modified sequence
atggaaaccttggagtcggaactgacatgcccaatctgccttgaactattcgaagacccactgcttctgccttgcgctcatagcctgtgctttaactgtgcccaccgtatcctggtgagccattgtgccacaaatgagtccgtggaaagtataaccgcctttcagtgccccacctgcagacatgtgattacactttcccagcggggtctagacggcctgaaacgcaatgtgaccctgcagaatatcattgataggttccagaaagcttccgtgagcgggcctaattcaccttccgagacccgcagggagagggcatttgacgctaacaccatgacaagcgccgagaaggtcctttgtcagttttgtgatcaggaccccgctcaggacgccgtgaagacctgcgtgacctgtgaggtgtcatactgcgatgagtgtctgaaagcgactcatcccaataaaaaacctttcaccgggcatcggttgatagagcctatccctgatagtcatataagaggattaatgtgtctcgagcacgaggacgagaaagtcaacatgtattgcgtgaccgacgaccagctcatctgcgctctgtgtaagctggttggcagacaccgagaccatcaggttgccgcactgtccgaaagatacgataaactcaaacagaatcttgagagtaatctgaccaatctgatcaagagaaatactgaactagaaactctcctggccaagctcatacagacctgtcagcacgtggaggtcaacgcaagccgccaggaagctaagttgaccgaagagtgtgatttgttgatcgagattatccagcagaggcggcagatcatcgggaccaagataaaggaaggcaaagtcatgcggttgcgtaagctggcccagcaaattgcgaactgtaaacagtgtatcgaaagatctgcatcactgattagccaggctgaacactctcttaaggagaacgatcatgctagattcctccagactgctaagaatatcaccgagcgggtgtctatggccaccgcatctagccaggtgctcatacccgaaataaatctgaatgacacttttgatacgtttgccctcgatttttctcgagaaaagaagctgttggaatgtctggattatttgacagcccctaatcctccaaccatccgggaagagctgtgcaccgccagctatgataccatcactgtgcactggaccagtgacgacgagttcagcgttgtgagttatgaattgcaatatactattttcacagggcaggctaatgtcgtatccctttgtaactcagccgattcgtggatgatcgtgcctaatatcaagcaaaaccactacaccgtgcacggattgcagtcaggcaccaaatacatttttatggtcaaagccattaaccaggccggatcacgcagctctgagccaggcaaactgaaaacaaactctcagccatttaaactcgacccaaagtcggctcatcgcaagttgaaggtgagccatgacaatctgaccgtggagagagacgaaagttctagtaaaaaaagccacacccccgaacgattcacatctcaggggtcttacggcgtggctggaaatgtcttcatcgatagtggacggcactactgggaggtcgtcatatcgggatccacatggtatgcaatcggccttgcatacaaaagcgccccaaagcacgaatggattggtaagaactcggcctcatgggcactatgtagatgcaataataactgggtagtgagacacaattcaaaagagatccccatcgaaccagcccctcaccttcgaagggtggggatcctcctggattacgacaatggtagcatcgccttttatgacgccttgaatagcattcacctttacacttttgatgtcgcattcgcacaaccagtgtgtccgacctttaccgtgtggaacaaatgcttgaccatcatcacaggtctgccgataccagatcacctagattgtacagagcagctgccttag

SEQ ID NO: 73413 - DNA, 2004 bp, Artificial Sequence
  derived and/or modified sequence
atggaaaccttggagtccgaattaacttgtccaatatgcctggaactcttcgaggatccattgctgctcccatgcgcacatagtctctgtttcaactgtgcacaccgcattcttgtaagtcactgcgccaccaacgaatctgtggaatctatcacagcatttcagtgtccaacgtgcagacatgtcattactctgagtcagcgcggtctcgacggcctcaagcgcaatgtgactctgcaaaacattattgacagatttcaaaaagcatcagtgtctggaccgaacagcccttcggagacacggagagagagggcctttgacgccaacaccatgacgtctgccgagaaagtgctttgtcagttttgcgatcaggatcctgcccaggacgcagtcaagacttgtgtgacctgcgaggtgagttactgtgatgaatgtctcaaagccacacatcccaacaaaaagccattcacaggccatagattgatcgaacccatcccagactctcacatcagaggcttgatgtgcctggaacatgaggacgagaaggtgaacatgtactgcgtgaccgacgaccagctgatctgtgctttgtgcaagctggtcggcagacaccgggaccaccaggtggccgcactgtccgagagatacgacaaactgaagcagaatctcgaatctaatctcacaaatctcatcaagcgaaacacagagctggagactctgctggccaaactgatccaaacctgccaacacgttgaagtgaacgcctcgcggcaggaggccaagcttactgaggaatgcgatctgctgatcgaaatcatccaacaaaggaggcagataattggcacaaagattaaggaagggaaagttatgaggctcaggaaattggcccagcaaatagccaactgcaagcagtgtattgaaaggtccgcaagcctgatttctcaggctgagcacagcctgaaggaaaatgaccacgccaggtttctacagaccgctaagaatataactgagagggtctctatggcgacggcttcaagccaagtcctgattccagagattaatctgaatgatacctttgatactttcgcgctggacttttctcgtgagaaaaaacttctggagtgcctcgattaccttactgctcccaatcctcctaccatcagggaagagctctgtacagcctcatatgatactatcaccgtgcactggactagcgacgatgaattctccgtggtctcctacgagctccaatataccatcttcactggacaggccaacgttgtgtcattgtgcaactcagcagactcttggatgatcgtccccaacatcaaacagaatcattatacagtccacgggttacagagcggcacaaagtacatcttcatggtcaaagctattaaccaggcgggatctcgctcaagcgagccaggcaagctgaagaccaactcccaaccatttaagctcgatcctaaatcagcacatagaaagctgaaggtgtctcatgacaacctgaccgtggagagggacgagagctccagcaagaagagccacactcccgaaagattcacatctcagggaagctacggcgtggctgggaacgtttttatagattccgggagacactactgggaagtcgtgatctcaggatccacctggtacgccatcggcttagcatacaaatcagccccaaagcacgagtggattggcaagaacagtgcatcctgggccctttgccggtgtaacaataattgggtggtacgccacaattccaaggagattcctattgaacccgcacctcatctcagacgagtcgggatcctgttagactatgacaatgggtctatcgcattctacgatgcactgaattcaattcatttgtatacgttcgatgtggccttcgcccagcccgtgtgccctaccttcaccgtatggaacaaatgtcttacgataatcacagggctgcccattccagaccacctggactgtacggaacagctgccatag

SEQ ID NO: 73414 - DNA, 1452 bp, Artificial Sequence
  derived and/or modified sequence
atggaaactctggagtccgagttaacctgccctatctgtctagagctctttgaagatcctctccttttgccttgcgcccattccctgtgctttaactgtgcccacaggatcctggtgtcccactgcgccacaaacgaatcagttgagagtattacagccttccagtgtcctacttgtagacatgtcattacactcagtcagcggggtctggatgggctgaagcgcaatgtgacccttcagaacattatcgaccgctttcaaaaagccagcgtctccggacctaattccccgtcagagaccagacgtgagcgagcattcgatgcgaacaccatgaccagcgcagagaaagtcctatgtcagttctgtgatcaggaccccgcacaggatgctgtgaaaacctgcgtgacctgcgaagtgagctattgcgacgaatgcctgaaagccacgcatcctaacaagaagccgtttactggacacaggctcatcgagcctattcctgacagccacattcgcggacttatgtgcctggagcacgaagacgagaaggtgaatatgtactgcgtaactgatgaccagctcatctgcgcgttgtgcaaactcgtaggtcgccaccgcgatcatcaggtcgcagctctgagtgaacgatatgataagcttaaacagaatctagaatccaatcttaccaacctgattaagaggaataccgagctggaaactctgctggcaaaattgattcagacatgccagcatgtggaggtgaatgcgtccagacaggaggccaagctgaccgaggaatgcgacctgctgattgagatcatccaacagaggaggcaaatcattggcacaaagattaaagagggcaaggtgatgagactaagaaagttagcccagcagatcgcgaactgtaaacagtgtatagaacgctctgcttccctcatatcacaagccgagcactccctcaaagaaaacgatcacgccaggtttctgcaaaccgcaaaaaacatcaccgaacgagtgtcaatggcgacagcgtcatctcaggtgctgattccggagattaacttgaatgatacttttgacacgttcgcgctcgactttagccgggagaagaaactgctcgaatgtctcgactacttgactgctcccaacccacccactattagagaagaactttgcacagccagctatgacacaattacagtgcactggaccagcgatgacgagttttctgtggttagctacgagcttcaatatacgatcttcacagggcaggccaacgtagtatcactatgtaacagcgccgattcatggatgatcgtgcccaatatcaagcaaaaccactacaccgtgcacgggctgcagagtggaactaaatacatattcatggtcaaagccatcaaccaggccggatctaggtcatcagagccaggcaaattaaagacaaactcctag

SEQ ID NO: 73415 - DNA, 2004 bp, Artificial Sequence
  derived and/or modified sequence
atggagacactcgagtctgagcttacttgtcccatctgtcttgagctgtttgaggatcctttgttgttgccctgtgcccattccctctgcttcaattgtgcccaccggatactggtatctcattgtgccaccaacgaatccgtggagtctattacagcattccagtgccctacctgccggcacgtcattaccctgagccaacgtggtctggacggcctcaagcgaaatgtcaccttacagaatattattgaccgttttcagaaagcttccgtgtccggtccgaacagccctagtgaaacgagaagggaaagggcatttgacgctaatacgatgacgagtgccgagaaggtcctctgccagttctgcgatcaggaccccgcacaggatgctgtgaagacttgcgtaacctgtgaagtttcctattgtgacgagtgcctcaaggcgacacatcccaacaagaagccattcacaggtcaccggctcatcgaacctattccggactcccatatacggggactgatgtgcctggaacacgaggacgagaaggtcaatatgtattgtgttaccgacgaccagctgatctgtgcactgtgtaagctcgtcggacgtcatagggaccatcaggtggccgcactgtctgagcgatatgacaaattaaagcagaatctcgaaagcaatctgacaaatcttataaaaaggaacactgagctcgagactctgctggcgaaactcatccagacatgtcagcatgtggaagtcaacgcttcaagacaggaggcaaagctgaccgaggagtgcgatctgctcatcgagattatccagcagagaagacaaatcatcggcaccaaaatcaaggagggaaaggtgatgcggctcagaaagcttgctcagcaaattgctaactgcaagcagtgcattgaacgcagtgccagcctcatttctcaggccgaacacagtctcaaagagaatgatcatgccagattccttcagactgccaaaaacattacggaaagggtctccatggccactgcttctagtcaggtgctcattccagagatcaatcttaacgatacattcgatacatttgcgctggacttcagccgggagaagaaactgctggagtgtctggattacctcaccgctcctaatcctcctacaatcagagaagagctgtgtaccgcctcctacgacacgatcacagtgcattggacctccgacgatgagtttagcgtggtcagttacgagctgcaatacacaatctttaccgggcaggccaatgtggtgtccctgtgcaacagtgctgattcctggatgattgtgccaaatattaagcagaaccattacacagttcatgggttacagtccggtactaagtatatcttcatggttaaagccataaaccaggctgggtcgcgttcttcggagcccggtaagcttaagacaaattcccaaccgttcaaattggaccccaagagtgctcacagaaaactgaaagtgagccatgacaacctgaccgtagagcgtgacgagtcatcatccaaaaagtcgcacacacctgaacggttcacttcacagggtagttacggagtggctggcaacgtctttatcgactctggacgacattattgggaagtggtgatatccggaagcacatggtacgccatcggattagcctacaaatccgctcctaagcacgagtggattggaaaaaactccgcctcgtgggccctgtgcaggtgtaacaataactgggtcgtgaggcacaactcaaaagaaatccctattgaaccagctccacacctgcgcagagtagggatactcctagattacgacaatggtagcatcgcgttttacgacgccctgaattctatacatctgtatacgttcgacgttgccttcgcacagcctgtgtgtcccacatttacagtctggaacaaatgcctgacgattattacaggcctgcctatacccgaccatctggactgcacagagcagctgccatag

SEQ ID NO: 73416 - DNA, 2004 bp, Artificial Sequence
  derived and/or modified sequence
atggagaccctggagagcgagctgacctgccccatctgcctggagctgttcgaggaccccctgctgctgccctgcgcccacagcctgtgcttcaactgcgcccacagaatcctggtgagccactgcgccaccaacgagagcgtggagagcatcaccgccttccagtgccccacctgcagacacgtgatcaccctgagccagagaggcctggacggcctgaagagaaacgtgaccctgcagaacatcatcgacagattccagaaggccagcgtgagcggccccaacagccccagcgagaccagaagagagagagccttcgacgccaacaccatgaccagcgccgagaaggtgctgtgccagttctgcgaccaggaccccgcccaggacgccgtgaagacctgcgtgacctgcgaggtgagctactgcgacgagtgcctgaaggccacccaccccaacaagaagcccttcaccggccacagactgatcgagcccatccccgacagccacatcagaggcctgatgtgcctggagcacgaggacgagaaggtgaacatgtactgcgtgaccgacgaccagctgatctgcgccctgtgcaagctggtgggcagacacagagaccaccaggtggccgccctgagcgagagatacgacaagctgaagcagaacctggagagcaacctgaccaacctgatcaagagaaacaccgagctggagaccctgctggccaagctgatccagacctgccagcacgtggaggtgaacgccagcagacaggaggccaagctgaccgaggagtgcgacctgctgatcgagatcatccagcagagaagacagatcatcggcaccaagatcaaggagggcaaggtgatgagactgagaaagctggcccagcagatcgccaactgcaagcagtgcatcgagagaagcgccagcctgatcagccaggccgagcacagcctgaaggagaacgaccacgccagattcctgcagaccgccaagaacatcaccgagagagtgagcatggccaccgccagcagccaggtgctgatccccgagatcaacctgaacgacaccttcgacaccttcgccctggacttcagcagagagaagaagctgctggagtgcctggactacctgaccgcccccaacccccccaccatcagagaggagctgtgcaccgccagctacgacaccatcaccgtgcactggaccagcgacgacgagttcagcgtggtgagctacgagctgcagtacaccatcttcaccggccaggccaacgtggtgagcctgtgcaacagcgccgacagctggatgatcgtgcccaacatcaagcagaaccactacaccgtgcacggcctgcagagcggcaccaagtacatcttcatggtgaaggccatcaaccaggccggcagcagaagcagcgagcccggcaagctgaagaccaacagccagcccttcaagctggaccccaagagcgcccacagaaagctgaaggtgagccacgacaacctgaccgtggagagagacgagagcagcagcaagaagagccacacccccgagagattcaccagccagggcagctacggcgtggccggcaacgtgttcatcgacagcggcagacactactgggaggtggtgatcagcggcagcacctggtacgccatcggcctggcctacaagagcgcccccaagcacgagtggatcggcaagaacagcgccagctgggccctgtgcagatgcaacaacaactgggtggtgagacacaacagcaaggagatccccatcgagcccgccccccacctgagaagagtgggcatcctgctggactacgacaacggcagcatcgccttctacgacgccctgaacagcatccacctgtacaccttcgacgtggccttcgcccagcccgtgtgccccaccttcaccgtgtggaacaagtgcctgaccatcatcaccggcctgcccatccccgaccacctggactgcaccgagcagctgccctag

SEQ ID NO: 73417 - DNA, 1659 bp, Artificial Sequence
  derived and/or modified sequence
atggagaccctggagagcgagctgacctgccccatctgcctggagctgttcgaggaccccctgctgctgccctgcgcccacagcctgtgcttcaactgcgcccacagaatcctggtgagccactgcgccaccaacgagagcgtggagagcatcaccgccttccagtgccccacctgcagacacgtgatcaccctgagccagagaggcctggacggcctgaagagaaacgtgaccctgcagaacatcatcgacagattccagaaggccagcgtgagcggccccaacagccccagcgagaccagaagagagagagccttcgacgccaacaccatgaccagcgccgagaaggtgctgtgccagttctgcgaccaggaccccgcccaggacgccgtgaagacctgcgtgacctgcgaggtgagctactgcgacgagtgcctgaaggccacccaccccaacaagaagcccttcaccggccacagactgatcgagcccatccccgacagccacatcagaggcctgatgtgcctggagcacgaggacgagaaggtgaacatgtactgcgtgaccgacgaccagctgatctgcgccctgtgcaagctggtgggcagacacagagaccaccaggtggccgccctgagcgagagatacgacaagctgaagcagaacctggagagcaacctgaccaacctgatcaagagaaacaccgagctggagaccctgctggccaagctgatccagacctgccagcacgtggaggtgaacgccagcagacaggaggccaagctgaccgaggagtgcgacctgctgatcgagatcatccagcagagaagacagatcatcggcaccaagatcaaggagggcaaggtgatgagactgagaaagctggcccagcagatcgccaactgcaagcagtgcatcgagagaagcgccagcctgatcagccaggccgagcacagcctgaaggagaacgaccacgccagattcctgcagaccgccaagaacatcaccgagagagtgagcatggccaccgccagcagccaggtgctgatccccgagatcaacctgaacgacaccttcgacaccttcgccctggacttcagcagagagaagaagctgctggagtgcctggactacctgaccgcccccaacccccccaccatcagagaggagctgtgcaccgccagctacgacaccatcaccgtgcactggaccagcgacgacgagttcagcgtggtgagctacgagctgcagtacaccatcttcaccggccaggccaacgtggtgagcctgtgcaacagcgccgacagctggatgatcgtgcccaacatcaagcagaaccactacaccgtgcacggcctgcagagcggcaccaagtacatcttcatggtgaaggccatcaaccaggccggcagcagaagcagcgagcccggcaagctgaagaccaacagccagcccttcaagctggaccccaagagcgcccacagaaagctgaaggtgagccacgacaacctgaccgtggagagagacgagagcagcagcaagaagagccacacccccgagagattcaccagccagggcagctacggcgtggccggcaacgtgttcatcgacagcggcagacactactgggaggtggtgatcagcggcagcacctggtag

SEQ ID NO: 73418 - DNA, 1452 bp, Artificial Sequence
  derived and/or modified sequence
atggagaccctggagagcgagctgacctgccccatctgcctggagctgttcgaggaccccctgctgctgccctgcgcccacagcctgtgcttcaactgcgcccacagaatcctggtgagccactgcgccaccaacgagagcgtggagagcatcaccgccttccagtgccccacctgcagacacgtgatcaccctgagccagagaggcctggacggcctgaagagaaacgtgaccctgcagaacatcatcgacagattccagaaggccagcgtgagcggccccaacagccccagcgagaccagaagagagagagccttcgacgccaacaccatgaccagcgccgagaaggtgctgtgccagttctgcgaccaggaccccgcccaggacgccgtgaagacctgcgtgacctgcgaggtgagctactgcgacgagtgcctgaaggccacccaccccaacaagaagcccttcaccggccacagactgatcgagcccatccccgacagccacatcagaggcctgatgtgcctggagcacgaggacgagaaggtgaacatgtactgcgtgaccgacgaccagctgatctgcgccctgtgcaagctggtgggcagacacagagaccaccaggtggccgccctgagcgagagatacgacaagctgaagcagaacctggagagcaacctgaccaacctgatcaagagaaacaccgagctggagaccctgctggccaagctgatccagacctgccagcacgtggaggtgaacgccagcagacaggaggccaagctgaccgaggagtgcgacctgctgatcgagatcatccagcagagaagacagatcatcggcaccaagatcaaggagggcaaggtgatgagactgagaaagctggcccagcagatcgccaactgcaagcagtgcatcgagagaagcgccagcctgatcagccaggccgagcacagcctgaaggagaacgaccacgccagattcctgcagaccgccaagaacatcaccgagagagtgagcatggccaccgccagcagccaggtgctgatccccgagatcaacctgaacgacaccttcgacaccttcgccctggacttcagcagagagaagaagctgctggagtgcctggactacctgaccgcccccaacccccccaccatcagagaggagctgtgcaccgccagctacgacaccatcaccgtgcactggaccagcgacgacgagttcagcgtggtgagctacgagctgcagtacaccatcttcaccggccaggccaacgtggtgagcctgtgcaacagcgccgacagctggatgatcgtgcccaacatcaagcagaaccactacaccgtgcacggcctgcagagcggcaccaagtacatcttcatggtgaaggccatcaaccaggccggcagcagaagcagcgagcccggcaagctgaagaccaacagctag

SEQ ID NO: 73419 - DNA, 594 bp, Artificial Sequence
  derived and/or modified sequence
atggaaacgctcgagtcagagttgacatgcccgatttgcctggagctctttgaggatccacttctcctgccatgcgcgcactcactgtgttttaactgcgctcatcgcatcctcgtgagtcattgcgcaactaatgaaagcgtcgagagcattacagccttccagtgtccgacctgtcgccatgtcataacactgagccagcggggcctagacggactgaaaagaaatgtgactctacagaacattattgatcgctttcagaaggccagtgtcagcggaccaaacagccctagtgagacacgcagagagcgcgccttcgacgccaacacaatgacctctgctgaaaaggtactgtgtcaattttgtgaccaggatcccgcacaagacgctgtgaaaacatgcgtaacatgcgaggttagctattgcgacgaatgcttaaaggcgactcaccctaataagaagccctttaccgggcacagactgatcgaacccatccctgattctcacatacgtggcctgatgtgcctggaacatgaggacgagaaggtgaacatgtattgcgtgactgatgatcagttgatctgtgcactgtag

SEQ ID NO: 73420 - DNA, 594 bp, Artificial Sequence
  derived and/or modified sequence
atggagaccctggagagcgagctgacctgccccatctgcctggagctgtttgaggaccccctgctgctgccctgtgcccacagcctgtgcttcaactgtgcccaccgcatcctggtgagccactgtgccaccaatgaatctgtggagagcatcacagccttccagtgccccacctgcagacatgtgatcaccctgagccagaggggcctggatggcctgaagagaaatgtgaccctgcagaacatcatcgaccgcttccagaaggcctctgtgtctggccccaacagccccagcgagacccggcgggagcgggcctttgatgccaacaccatgaccagcgctgagaaggtgctgtgccagttctgtgaccaggaccctgcccaggatgctgtgaagacctgtgtgacctgtgaggtgtcctactgtgatgagtgcctgaaggccacccaccccaacaagaagcccttcaccggccacaggctcatcgagcccatcccagacagccacatccggggcctgatgtgcctggagcatgaagatgagaaggtgaacatgtactgtgtgacagatgaccagctgatctgtgccctgtag

SEQ ID NO: 73421 - DNA, 945 bp, Artificial Sequence
  derived and/or modified sequence
gagaactgatttgaaataagagccaggcggtcctcgcttccctgcgaccgacttttcataggctgggggagaaaaggttgagaaacttgacattgtctcgagcagagtgcgtgtagcaacagatcaaagaaaaagaggacgaaaacgtgctctttgctgcccgtagatttcgccgggttgcttttgtcttgcgggctcctgtcgggttcggtgtttccgctctgaagactgcgacgcgggctccgatgcagctcgctccctgccggatgggtcatgggattctaaacatgaggcagatagctgatcagcttccttgggttttgctgatgacacaagagagctttgcctgaagatggaaacactggagtcagaactgacctgccctatttgtctggagctctttgaggaccctcttctactgccctgcgcacacagcctctgcttcaactgcgcccaccgcatcctagtatcacactgtgccaccaacgagtctgtggagtccatcaccgccttccagtgccccacctgccggcatgtcatcaccctcagccagcgaggtctagacgggctcaagcgcaacgtcaccctacagaacatcatcgacaggttccagaaagcatcagtgagcgggcccaactctcccagcgagacccgtcgggagcgggcctttgacgccaacaccatgacctccgccgagaaggtcctctgccagttttgtgaccaggatcctgcccaggacgctgtgaagacctgtgtcacttgtgaagtatcctactgtgacgagtgcctgaaagccactcacccgaataagaagccctttacaggccatcgtctgattgagccaattccggactctcacatccgggggctgatgtgcttggagcatgaggatgagaaggtgaatatgtactgtgtgaccgatgaccagttaatctgtgccttgtg

SEQ ID NO: 73422 - DNA, 594 bp, Artificial Sequence
  derived and/or modified sequence
atggagaccctggagagcgagctgacctgccccatctgcctggagctgttcgaggaccctctactgctgccctgtgcgcactccttgtgttttaattgcgcacatagaatcctcgtgtcacattgtgccacaaacgagtctgtggaaagcattaccgcattccaatgcccaacatgtcgccacgtcataactctgtcccagaggggcctcgatggtctcaaaagaaacgtcaccctgcagaacatcatagaccgttttcagaaagcctcggtaagcggccctaattcccccagcgaaacacggcgagaacgagccttcgatgcgaacacaatgaccagcgctgagaaagtgctatgtcagttctgcgaccaggatccggctcaggatgccgtcaagacctgcgtaacgtgcgaggtctcttattgcgacgagtgtctgaaggcaacccatcctaataaaaaaccctttaccgggcacaggttgatcgagcccatccctgatagccatatccggggtctgatgtgcctggagcacgaagatgagaaggtcaatatgtattgcgtgactgatgaccagcttatttgcgcactgtag

SEQ ID NO: 73423 - DNA, 594 bp, Artificial Sequence
  derived and/or modified sequence
atggagacccttgagtccgagctgacatgcccaatctgtcttgagttgttcgaagatccattgttgctaccttgcgcacatagcttgtgcttcaactgcgcccaccgcatcttggtgtctcactgcgcaacgaatgagagtgtcgagtctatcaccgccttccaatgtccaacatgtcggcacgtaataactctctcacagcggggactcgacggccttaaacgcaatgtaaccttgcagaatatcatcgatagattccagaaagcgtccgtcagcggtcccaattctccctctgagacgaggcgtgaacgggcattcgatgccaatactatgacctcggctgagaaggtcctttgtcagttctgcgatcaggaccccgcacaggacgctgtcaagacatgcgttacctgtgaggtgtcatactgtgatgagtgcctaaaagcaacccaccctaacaagaagccgttcacaggtcatcgcctgatagaacccattcccgactcacacattcggggtttaatgtgtcttgaacacgaggatgaaaaagtgaatatgtattgcgtcactgatgatcagttgatttgcgcactgtag

SEQ ID NO: 73424 - DNA, 594 bp, Artificial Sequence
  derived and/or modified sequence
atggagaccctggagagcgagctgacctgccccatctgcctggagctgttcgaggaccccctgctgctgccctgcgcccacagcctgtgcttcaactgcgcccacagaatcctggtgagccactgcgccaccaacgagagcgtggagagcatcaccgccttccagtgccccacctgcagacacgtgatcaccctgagccagagaggcctggacggcctgaagagaaacgtgaccctgcagaacatcatcgacagattccagaaggccagcgtgagcggccccaacagccccagcgagaccagaagagagagagccttcgacgccaacaccatgaccagcgccgagaaggtgctgtgccagttctgcgaccaggaccccgcccaggacgccgtgaagacctgcgtgacctgcgaggtgagctactgcgacgagtgcctgaaggccacccaccccaacaagaagcccttcaccggccacagactgatcgagcccatccccgacagccacatcagaggcctgatgtgcctggagcacgaggacgagaaggtgaacatgtactgcgtgaccgacgaccagctgatctgcgccctgtag

SEQ ID NO: 73425 - DNA, 399 bp, Artificial Sequence
  derived and/or modified sequence
atggaccaccacatccccatgcacgccctgcccgaggagatccagaagatgctgcccgaggagaaggtgtgcaagtactgcggcgtgagctacctgatcctgcacgagttcaaggccatggaggagaaggtgaaggccatggagaaggagatgaagttctaccagggcagcgtggacagagagaagagactgcaggagaagctgcacagcctgagccaggagctggagcagtacaagatcgacaacaagagcaagaccgagagaatctacgacgtgggcatgcagctgaagagccagcagaacgagttccagaaggtgaagaagcagctgagccacctgcaggacgagctgaagatcaagtacagacagagctacatcttcagactgtgcttctgctag

SEQ ID NO: 73426 - DNA, 399 bp, Artificial Sequence
  derived and/or modified sequence
atggatcatcacatcccgatgcacgccctccccgaagaaatccaaaagatgctcccagaagagaaagtctgtaaatactgcggggtcagttacctgatattgcacgagttcaaagcaatggaggagaaagtgaaagctatggaaaaagagatgaaattctaccaagggtctgtcgatcgcgaaaagaggctccaggaaaagcttcacagtctcagtcaggagttggaacagtacaagattgataacaagtctaagacagagcggatatacgatgtgggcatgcagctgaagagtcagcagaacgagttccagaaagtaaaaaagcaattgtctcatcttcaggacgagctcaagatcaaataccgccagtcttatatttttcgcttgtgtttctgctag

SEQ ID NO: 73427 - DNA, 399 bp, Artificial Sequence
  derived and/or modified sequence
atggaccaccacatccccatgcacgccctgcctgaggagatccagaagatgctgcctgaggagaaggtgtgcaagtactgcggcgtgtcctacctgatcctgcacgagttcaaggccatggaggagaaggtgaaggccatggagaaggagatgaagttctaccagggctctgtggaccgggagaagaggctgcaggagaagctgcacagcctgagccaggagctggagcagtacaagattgacaacaagagcaagacagagcgcatctatgatgtgggcatgcagctgaagagccagcagaatgagttccagaaggtgaagaagcagctgagccacctgcaggatgagctgaagatcaagtaccggcagagctacatcttccggctgtgcttctgctag

SEQ ID NO: 73428 - DNA, 399 bp, Artificial Sequence
  derived and/or modified sequence
atggaccaccacatccccatgcacgccctgcccgaggagatccagaagatgctccctgaggagaaggtatgcaagtactgcggcgtctcatatttgattctgcatgagttcaaggccatggaggaaaaagtgaaggccatggagaaggaaatgaagttctatcaggggagtgtcgacagggagaagcgtctgcaggaaaaactacacagcctttcacaggaactagaacagtataaaatcgacaacaagagcaaaaccgagcgcatctacgacgtggggatgcagctgaaaagtcagcagaacgaatttcagaaggtaaaaaaacagctgagccacctgcaggatgagctcaaaataaagtataggcaaagctatatcttccggctgtgcttctgctag

SEQ ID NO: 73429 - DNA, 399 bp, Artificial Sequence
  derived and/or modified sequence
atggatcatcatatcccaatgcacgcgttacccgaagagatccagaaaatgctgccggaagagaaagtatgcaagtattgcggggtttcttacttgatcctccatgagtttaaggccatggaggaaaaggtcaaagccatggagaaagaaatgaaattttaccaaggcagcgttgacagagaaaagcgtcttcaagagaaactgcactcactctcccaagaactggagcaatacaagatcgataataaatccaagactgaaagaatctatgacgtgggcatgcaattgaagagccagcagaatgaattccagaaggtgaagaagcagctttcacacctgcaggacgaacttaaaatcaaatataggcaatcttacatctttaggctgtgcttctgctag

SEQ ID NO: 73430 - protein, 328 aa, Artificial Sequence
  derived and/or modified sequence
MSVNYAAGLSPYADKGKCGLPEIFDPPEELERKVWELARLVWQSSSVVFHTGAGISTASGIPDFRGPHGVWTMEERGLAPKFDTTFESARPTQTHMALVQLERVGLLRFLVSQNVDGLHVRSGFPRDKLAELHGNMFVEECAKCKTQYVRDTVVGTMGLKATGRLCTVAKARGLRACRNADLSITLGTSLQIRPSGNLPLATKRRGGRLVIVNLQPTKHDRHADLRIHGYVDEVMTRLMKHLGLEIPAWDGPRVLERALPPLPRPPTPKLEPKEESPTRINGSIPAGPKQEPCAQHNGSEPASPKRERPTSPAPHRPPKRVKAKAVPS

SEQ ID NO: 73431 - DNA, 984 bp, Artificial Sequence
  derived and/or modified sequence
atgagcgtgaactacgccgccggcctgagcccctacgccgacaagggcaagtgcggcctgcccgagatcttcgacccccccgaggagctggagcgcaaggtgtgggagctggcccgcctggtgtggcagagcagcagcgtggtgttccacaccggcgccggcatcagcaccgccagcggcatccccgacttccgcggcccccacggcgtgtggaccatggaggagcgcggcctggcccccaagttcgacaccaccttcgagagcgcccgccccacccagacccacatggccctggtgcagctggagcgcgtgggcctgctgcgcttcctggtgagccagaacgtggacggcctgcacgtgcgcagcggcttcccccgcgacaagctggccgagctgcacggcaacatgttcgtggaggagtgcgccaagtgcaagacccagtacgtgcgcgacaccgtggtgggcaccatgggcctgaaggccaccggccgcctgtgcaccgtggccaaggcccgcggcctgcgcgcctgccgcaacgccgacctgagcatcaccctgggcaccagcctgcagatccgccccagcggcaacctgcccctggccaccaagcgccgcggcggccgcctggtgatcgtgaacctgcagcccaccaagcacgaccgccacgccgacctgcgcatccacggctacgtggacgaggtgatgacccgcctgatgaagcacctgggcctggagatccccgcctgggacggcccccgcgtgctggagcgcgccctgccccccctgccccgcccccccacccccaagctggagcccaaggaggagagccccacccgcatcaacggcagcatccccgccggccccaagcaggagccctgcgcccagcacaacggcagcgagcccgccagccccaagcgcgagcgccccaccagccccgccccccaccgcccccccaagcgcgtgaaggccaaggccgtgcccagc

SEQ ID NO: 73432 - DNA, 987 bp, Artificial Sequence
  derived and/or modified sequence
atgagcgtgaactacgccgccggcctgagcccctacgccgacaagggcaagtgcggcctgcccgagatcttcgacccccccgaggagctggagagaaaggtgtgggagctggccagactggtgtggcagagcagcagcgtggtgttccacaccggcgccggcatcagcaccgccagcggcatccccgacttcagaggcccccacggcgtgtggaccatggaggagagaggcctggcccccaagttcgacaccaccttcgagagcgccagacccacccagacccacatggccctggtgcagctggagagagtgggcctgctgagattcctggtgagccagaacgtggacggcctgcacgtgagaagcggcttccccagagacaagctggccgagctgcacggcaacatgttcgtggaggagtgcgccaagtgcaagacccagtacgtgagagacaccgtggtgggcaccatgggcctgaaggccaccggcagactgtgcaccgtggccaaggccagaggcctgagagcctgcagaaacgccgacctgagcatcaccctgggcaccagcctgcagatcagacccagcggcaacctgcccctggccaccaagagaagaggcggcagactggtgatcgtgaacctgcagcccaccaagcacgacagacacgccgacctgagaatccacggctacgtggacgaggtgatgaccagactgatgaagcacctgggcctggagatccccgcctgggacggccccagagtgctggagagagccctgccccccctgcccagaccccccacccccaagctggagcccaaggaggagagccccaccagaatcaacggcagcatccccgccggccccaagcaggagccctgcgcccagcacaacggcagcgagcccgccagccccaagagagagagacccaccagccccgccccccacagaccccccaagagagtgaaggccaaggccgtgcccagctag

SEQ ID NO: 73433 - DNA, 987 bp, Artificial Sequence
  derived and/or modified sequence
atgtcagtgaactatgctgcaggactgagcccttatgcagataagggtaaatgcgggttacctgaaatttttgatccacccgaagaactggaacggaaggtgtgggagcttgcgaggttagtgtggcagtcttcttctgtggtctttcacaccggggctggaatctctactgcctccggaatacctgactttagaggcccccatggcgtctggacaatggaggaaaggggtctggcgcccaagttcgatactactttcgaaagcgctcggcccacgcagacacacatggccctggtgcaattggagcgggttggactgcttagatttctggtttcccaaaatgtggatggtttgcacgtgaggtctggtttccccagggataaactggccgagcttcatggtaatatgtttgtggaggagtgcgccaaatgtaagactcagtacgtgcgagatacagtggtgggcactatgggcctgaaagcaactggacgcttgtgtactgtcgccaaagcccggggccttagggcctgccgcaacgcagaccttagcataacgctggggacatctctgcagataagaccctctggcaacttaccgcttgccacaaaaagaagaggaggaagacttgtgattgttaatctccagcctacaaagcacgaccggcacgccgatctccgcattcatggatacgtcgacgaggtgatgacgagactcatgaagcacctggggttggaaatacccgcctgggatggtccaagggttctcgaaagggccctaccgccattaccacgcccgcccacgccaaagctcgagcccaaagaggagtctcccacgcggattaatggctctattcctgccggacctaagcaggaaccttgtgcacagcacaatggtagcgaacccgcttccccaaagcgcgagagacctacttcccccgccccacatcgcccacccaaaagggttaaggctaaagccgttcccagctag

SEQ ID NO: 73434 - DNA, 987 bp, Artificial Sequence
  derived and/or modified sequence
atgtctgtgaactatgctgctggcctgagcccctatgctgacaagggcaaatgtggcctgcctgagatctttgaccccccagaggagctggagaggaaggtgtgggagctggcccggctggtgtggcagagcagctctgtggtgttccacactggagctggcatcagcacagccagcggcatcccagacttccggggcccccacggcgtgtggaccatggaggagcggggcctggcccccaagtttgacaccacctttgagagcgcccggcccacccagacccacatggccctggtgcagctggagcgggtgggcctgctgcgcttcctggtgtcccagaatgtggatggcctgcacgtgcgcagcggcttcccccgggacaagctggccgagctgcacggcaacatgtttgtggaggagtgtgccaagtgcaagacccagtatgtgcgggacacagtggtgggcaccatgggcctgaaggccaccggccgcctgtgcaccgtggccaaggcccggggcctgcgggcctgcagaaatgctgacctgagcatcaccctgggcaccagcctgcagatccggcccagcggcaacctgcccctggccaccaagaggcggggcggccgcctggtgattgtgaacctgcagcccaccaagcatgacagacatgctgacctgcgcatccacggctacgtggatgaggtgatgacccggctgatgaagcacctgggcctggagatcccagcctgggatggcccccgggtgctggagcgggccctgccccccctgcccaggcctcccacccccaagctggagcccaaggaggagagccccacccgcatcaatggcagcatcccagctggccccaagcaggagccctgtgcccagcacaatggaagtgagcccgccagccccaagcgggagcggcccaccagccctgccccccacaggcctcccaagagggtgaaggccaaggctgtgcccagctag

SEQ ID NO: 73435 - DNA, 987 bp, Artificial Sequence
  derived and/or modified sequence
atgagcgtgaactacgccgccggcctgagcccctacgccgacaagggaaagtgcggccttccagaaatatttgaccctccagaggaattagagaggaaggtctgggagcttgctcggctggtgtggcagtccagctcagttgtgtttcatacaggagcagggatctccaccgctagcgggatcccagatttccgcggaccacacggggtctggaccatggaagagagggggctggcaccgaagttcgacacaacattcgaatctgcaagaccaactcaaacccatatggccctcgtgcagctggaacgggtgggtttgctcaggtttctggtatcccagaatgtcgacggattgcacgttagaagtggatttccaagagataagcttgctgagcttcacggcaatatgttcgttgaggagtgtgctaaatgtaagactcagtacgtaagggacaccgtggtgggtacaatgggactgaaggccaccggaaggctctgcaccgtggcaaaggcccgtggacttagggcttgccggaacgccgacctgagtattacactcggaactagcttacagattcgaccatcagggaacctccctttggcaaccaagaggcgggggggtcgcttggtaatcgtaaacctccagcccactaagcacgacagacatgcggacctcaggatccatggctacgtggatgaagtgatgactcgcctgatgaagcacttgggtctggaaatcccagcatgggacggcccaagggtcctagaaagggctctccctcctctaccaaggccacctacacccaagctagaacctaaagaagagagccctacaagaataaatggaagcatcccggcaggacctaaacaggagccctgcgcacagcacaacggttctgagccagcctccccaaagcgcgaacggccaactagtccggctcctcaccggccccctaagcgggtaaaggctaaggcagttccatcatag

SEQ ID NO: 73436 - DNA, 987 bp, Artificial Sequence
  derived and/or modified sequence
atgagcgtgaactacgccgcaggcctttcaccttacgcggacaaagggaaatgtgggttgcccgagatatttgatccccctgaagagttggaacgcaaagtttgggaattggccagacttgtctggcagagcagctccgtcgtcttccatactggtgcaggcatttcgaccgcctcagggattcccgacttccgcggaccacacggtgtgtggacaatggaagaacgcggactggccccaaagtttgatacaacttttgaatcagctcggcctacgcagacccatatggctctcgtccaattggagcgtgtcggcttgttacgctttctagtgtctcaaaacgtggacggcctgcacgtccgcagtggattccctagagacaagctggctgagctgcatggcaatatgtttgtggaggagtgcgctaagtgtaagacacaatatgtccgtgacaccgtggttgggacaatgggtttgaaggcaactgggcgactgtgtactgtggctaaggcaagaggccttcgagcctgtagaaacgcggacctgagcatcacactcggtacctcactgcagattcgaccttcaggaaatttgcctctggcaactaaaagacgaggagggagactagtgatcgttaatcttcagcccaccaagcatgaccgacatgccgacctgcgcatccacggctacgtggacgaagtcatgacaagactgatgaagcacctcggtcttgagattccggcttgggatgggccacgagtattggagcgcgcacttccaccactgcctcgaccacccacacccaagctggaacccaaagaggagtctccaacgcgcatcaacgggtccattccagctggaccaaagcaggagccctgcgcacagcataacggaagtgaacccgcttctcccaagcgagaacgtccgactagccccgctccccacaggcctccgaaaagggtcaaggccaaggccgtgccctcttag

SEQ ID NO: 73437 - DNA, 987 bp, Artificial Sequence
  derived and/or modified sequence
atgagcgtaaattacgctgctgggttgagcccatacgcagataagggtaaatgcggccttcctgagatttttgatccccctgaggaactcgagcggaaggtgtgggagctggcacgcctagtctggcaaagctccagtgtagtctttcacacaggagcagggattagcacagcatctggaatacccgactttagagggccacacggcgtgtggactatggaggagcgcggcttagcccctaagttcgatacaacctttgaaagcgcccgacccacacaaacacatatggccctggtccagctagagagagtgggattgctgcggtttttggtaagtcagaacgttgatggactccacgtgagatccggatttcctcgagacaaattagccgaattacacggcaacatgttcgttgaagaatgcgcgaagtgcaaaacccagtatgttcgggatactgtagtggggacaatgggcttgaaagctaccggccgcctctgcaccgtggcaaaagcaaggggcttgcgagcttgccggaacgcagacctttcaattacgctcgggaccagtctccagattagaccctccggtaacctaccacttgctactaagagaagggggggtcgcttggttatcgtcaatctccagccgacaaaacacgaccgtcacgctgaccttaggattcacggatacgtagacgaagtaatgacccgtctgatgaaacacctagggcttgagatccctgcttgggatggcccccgcgtcctagaacgggctcttcctccactaccccgtcctccaacccccaagctggagccgaaggaggaaagtcctactaggatcaatggatccattcctgcaggtcccaaacaagagccatgtgcacagcacaatggtagcgagcccgccagtcctaaaagagagcggccaacatctcctgccccacatcgtcccccgaaacgtgtgaaggccaaagccgtaccttcatag

SEQ ID NO: 73438 - DNA, 987 bp, Artificial Sequence
  derived and/or modified sequence
atgtccgtgaactatgccgcgggtctgagtccatacgcagataaggggaaatgcggattgccggaaatatttgatccaccagaggagttggaacggaaagtgtgggaactggcaagactagtctggcagtcatcaagtgtagtgttccacactggagcgggtatctcaacagctagcggcatcccagactttcgaggaccacacggggtttggacaatggaggaaagaggtctggccccaaagttcgacaccacgttcgaaagcgctagacccacacaaacgcatatggctctggtgcagctagagagagtgggattgctgcggtttttggtaagtcagaacgttgatggactccacgtgagatccggatttcctcgagacaaattagccgaattacacggcaacatgttcgttgaagaatgcgcgaagtgcaaaacccagtatgttcgggatactgtagtggggacaatgggcttgaaagctaccggccgcctctgcaccgtggcaaaagcaaggggcttgcgagcttgccggaacgcagacctttcaattacgctcgggaccagtctccagattagaccctccggtaacctaccacttgccacgaagagacgcggcggtcgactggtaatcgttaacctgcagccaacgaagcatgataggcatgccgacctgaggattcatggatatgtcgatgaagtgatgacaagactgatgaaacatctgggtctggagattccagcctgggatggccctagggtgttggagcgcgctttgccgcctctgccaagacctcccacccctaaacttgagcccaaagaggaatcacccaccagaatcaacggaagtatcccagcaggcccgaagcaagagccatgcgcacagcacaacggaagcgagcctgccagcccaaagagagaaagaccgacatcccccgctccccaccgaccccccaaacgcgtcaaagccaaggccgtgcccagttag

SEQ ID NO: 73439 - DNA, 1497 bp, Artificial Sequence
  derived and/or modified sequence
aggatgtcggtgaattacgcggcggggctgtcgccgtacgcggacaagggcaagtgcggcctcccggagatcttcgaccccccggaggagctggagcggaaggtgtgggaactggcgaggctggtctggcagtcttccagtgtggtgttccacacgggtgccggcatcagcactgcctctggcatccccgacttcaggggtccccacggagtctggaccatggaggagcgaggtctggcccccaagttcgacaccacctttgagagcgcgcggcccacgcagacccacatggcgctggtgcagctggagcgcgtgggcctcctccgcttcctggtcagccagaacgtggacgggctccatgtgcgctcaggcttccccagggacaaactggcagagctccacgggaacatgtttgtggaagaatgtgccaagtgtaagacgcagtacgtccgagacacagtcgtgggcaccatgggcctgaaggccacgggccggctctgcaccgtggctaaggcaagggggctgcgagcctgcaggaacgccgacctgtccatcacgctgggtacatcgctgcagatccggcccagcgggaacctgccgctggctaccaagcgccggggaggccgcctggtcatcgtcaacctgcagcccaccaagcacgaccgccatgctgacctccgcatccatggctacgttgacgaggtcatgacccggctcatgaagcacctggggctggagatccccgcctgggacggcccccgtgtgctggagagggcgctgccacccctgccccgcccgcccacccccaagctggagcccaaggaggaatctcccacccggatcaacggctctatccccgccggccccaagcaggagccctgcgcccagcacaacggctcagagcccgccagccccaaacgggagcggcccaccagccctgccccccacagaccccccaaaagggtgaaggccaaggcggtccccagctgaccagggtgcttggggagggtggggctttttgtagaaactgtggattctttttctctcgtggtctcactttgttacttgtttctgtccccgggagcctcagggctctgagagctgtgctccaggccaggggttacacctgccctccgtggtccctccctgggctccaggggcctctggtgcggttccgggaagaagccacaccccagaggtgacaggtgagcccctgccacaccccagcctctgacttgctgtgttgtccagaggtgaggctgggccctccctggtctccagcttaaacaggagtgaactccctctgtccccagggcctcccttctgggccccctacagcccaccctacccctcctccatgggccctgcaggaggggagacccaccttgaagtgggggatcagtagaggcttgcactgcctttggggctggagggagacgtgggtccaccaggcttctggaaaagtcctcaatgcaataaaaacaatttctttcttgc

SEQ ID NO: 73440 - RNA, 987 nt, Artificial Sequence
  derived and/or modified sequence
augagcguaaauuacgcugcuggguugagcccauacgcagauaaggguaaaugcggccuuccugagauuuuugaucccccugaggaacucgagcggaaggugugggagcuggcacgccuagucuggcaaagcuccaguguagucuuucacacaggagcagggauuagcacagcaucuggaauacccgacuuuagagggccacacggcguguggacuauggaggagcgcggcuuagccccuaaguucgauacaaccuuugaaagcgcccgacccacacaaacacauauggcccugguccagcuagagagagugggauugcugcgguuuuugguaagucagaacguugauggacuccacgugagauccggauuuccucgagacaaauuagccgaauuacacggcaacauguucguugaagaaugcgcgaagugcaaaacccaguauguucgggauacuguaguggggacaaugggcuugaaagcuaccggccgccucugcaccguggcaaaagcaaggggcuugcgagcuugccggaacgcagaccuuucaauuacgcucgggaccagucuccagauuagacccuccgguaaccuaccacuugcuacuaagagaagggggggucgcuugguuaucgucaaucuccagccgacaaaacacgaccgucacgcugaccuuaggauucacggauacguagacgaaguaaugacccgucugaugaaacaccuagggcuugagaucccugcuugggauggcccccgcguccuagaacgggcucuuccuccacuaccccguccuccaacccccaagcuggagccgaaggaggaaaguccuacuaggaucaauggauccauuccugcaggucccaaacaagagccaugugcacagcacaaugguagcgagcccgccaguccuaaaagagagcggccaacaucuccugccccacaucgucccccgaaacgugugaaggccaaagccguaccuucauag

SEQ ID NO: 73441 - RNA, 987 nt, Artificial Sequence
  derived and/or modified sequence
auguccgugaacuaugccgcgggucugaguccauacgcagauaaggggaaaugcggauugccggaaauauuugauccaccagaggaguuggaacggaaagugugggaacuggcaagacuagucuggcagucaucaaguguaguguuccacacuggagcggguaucucaacagcuagcggcaucccagacuuucgaggaccacacgggguuuggacaauggaggaaagaggucuggccccaaaguucgacaccacguucgaaagcgcuagacccacacaaacgcauauggcucuggugcagcuagagagagugggauugcugcgguuuuugguaagucagaacguugauggacuccacgugagauccggauuuccucgagacaaauuagccgaauuacacggcaacauguucguugaagaaugcgcgaagugcaaaacccaguauguucgggauacuguaguggggacaaugggcuugaaagcuaccggccgccucugcaccguggcaaaagcaaggggcuugcgagcuugccggaacgcagaccuuucaauuacgcucgggaccagucuccagauuagacccuccgguaaccuaccacuugccacgaagagacgcggcggucgacugguaaucguuaaccugcagccaacgaagcaugauaggcaugccgaccugaggauucauggauaugucgaugaagugaugacaagacugaugaaacaucugggucuggagauuccagccugggauggcccuaggguguuggagcgcgcuuugccgccucugccaagaccucccaccccuaaacuugagcccaaagaggaaucacccaccagaaucaacggaaguaucccagcaggcccgaagcaagagccaugcgcacagcacaacggaagcgagccugccagcccaaagagagaaagaccgacaucccccgcuccccaccgaccccccaaacgcgucaaagccaaggccgugcccaguuag

SEQ ID NO: 73442 - DNA, 393 bp, Artificial Sequence
  derived and/or modified sequence
atggacttcctgagaaacctgttcagccagaccctgagcctgggcagccagaaggagagactgctggacgagctgaccctggagggcgtggccagatacatgcagagcgagagatgcagaagagtgatctgcctggtgggcgccggcatcagcaccagcgccggcatccccgacttcagaagccccagcaccggcctgtacgacaacctggagaagtaccacctgccctaccccgaggccatcttcgagatcagctacttcaagaagcaccccgagcccttcttcgccctggccaaggagctgtaccccggccagttcaagcccaccatctgccactacttcatgagactgctgaaggacaagggcctgctgctgagatgctacacccagtag

SEQ ID NO: 73443 - DNA, 510 bp, Artificial Sequence
  derived and/or modified sequence
atggacttcctgagaaacctgttcagccagaccctgagcctgggcagccagaaggagagactgctggacgagctgaccctggagggcgtggccagatacatgcagagcgagagatgcagaagagtgatctgcctggtgggcgccggcatcagcaccagcgccggcatccccgacttcagaagccccagcaccggcctgtacgacaacctggagaagtaccacctgccctaccccgaggccatcttcgagatcagctacttcaagaagcaccccgagcccttcttcgccctggccaaggagctgtaccccggccagttcaagcccaccatctgccactacttcatgagactgctgaaggacaagggcctgctgctgagatgctacacccagaacatcgacaccctggagagaatcgccggcctggagcaggaggacctggtggaggcccacggcaccttctacaccagccactgcgtgagcgccagctgcagacacgagtaccccctgtag

SEQ ID NO: 73444 - DNA, 237 bp, Artificial Sequence
  derived and/or modified sequence
atggacttcctgagaaacctgttcagccagaccctgagcctgggcagccagaaggagagactgctggacgagctgaccctggagggcgtggccagatacatgcagagcgagagatgcagaagagtgatctgcctggtgggcgccggcatcagcaccagcgccggcatccccgacttcagaagccccagcaccggcctgtacgacaacctggagaagtaccacctgccctacccctag

SEQ ID NO: 73445 - DNA, 222 bp, Artificial Sequence
  derived and/or modified sequence
atggacttcctgagaaacctgttcagccagaccctgagcctgggcagccagaaggagagactgctggacgagctgaccctggagggcgtggccagatacatgcagagcgagagatgcagaagagtgatctgcctggtgggcgccggcatcagcaccagcgccggcatccccgacttcagaagccccagcaccggcctgtacgacaacctggagaagtactag

SEQ ID NO: 73446 - DNA, 393 bp, Artificial Sequence
  derived and/or modified sequence
atggatttccttcgcaatctattcagtcagaccttgagtcttggctcacaaaaagagagactcctggatgaattaaccctggaaggtgtggcccggtatatgcagagcgagaggtgccgaagagtgatctgcttagtcggggcaggcattagcacatccgctgggattccagactttcgaagtccctccaccgggctgtacgataacttggaaaaataccatttgccttacccagaggcaatcttcgagatttcctattttaaaaagcacccagagcctttcttcgcccttgctaaggaactctatcctgggcagtttaagcccacgatttgtcactatttcatgcggctgctgaaggacaaaggtctgctgctcaggtgctacacacagtag

SEQ ID NO: 73447 - DNA, 510 bp, Artificial Sequence
  derived and/or modified sequence
atggactttctgcgaaatttattcagccagactctttcgcttgggtcacagaaggaaagactgctggacgagttgacactggaaggtgtagcccgttatatgcaaagcgagaggtgcaggcgtgtcatatgcctggtcggcgctgggatcagcaccagcgccggcattcctgattttagaagtccctccaccggtctgtacgacaatctggaaaaatatcacttaccttatccagaggcaattttcgagatcagctatttcaagaaacatcctgagccttttttcgccctcgccaaggagctgtacccaggccaattcaagcctaccatctgtcactatttcatgcggctgctcaaggataaaggactactgcttaggtgctatactcaaaatattgatacactggaacgcattgcaggtctggaacaggaggatctggttgaggcgcatggaaccttctatacttcccattgcgtttcagcctcctgccggcacgagtatccgttgtag

SEQ ID NO: 73448 - DNA, 237 bp, Artificial Sequence
  derived and/or modified sequence
atggactttctaagaaatcttttctcacagacactgtccctcggatcgcaaaaagagcgtctgctggacgagttgacgcttgagggcgtggctcggtacatgcagtctgagcgatgtaggcgagtgatttgtctggtgggggccgggatctctacgtcagcaggcattccggacttccgaagcccatctaccggcctctatgacaacctggaaaaatatcatttaccatatccgtag

SEQ ID NO: 73449 - DNA, 222 bp, Artificial Sequence
  derived and/or modified sequence
atggatttcctccggaacctcttcagtcagactctttctctggggtcccagaaggagaggctgcttgacgagcttaccctagaaggtgtagccagatatatgcagagcgagcgatgtaggcgtgttatctgtcttgttggggccggtatatcgacctccgccggtatcccagactttcgctctccgtccactggtctctatgataaccttgagaaatattag

SEQ ID NO: 73450 - DNA, 393 bp, Artificial Sequence
  derived and/or modified sequence
atggacttcctgaggaacctcttcagccagaccctgagcctgggcagccagaaggagcggctgctggatgagctgaccctggagggcgtggcccgctacatgcagagcgagcgctgccggcgggtcatctgcctggtgggcgccggcatcagcaccagcgctggcatcccagacttccgcagccccagcacaggcctgtatgacaacctggagaagtaccacctgccctacccagaggccatctttgagatctcctacttcaagaagcaccctgagcccttctttgccctggccaaggagctgtacccaggccagttcaagcccaccatctgccactacttcatgaggctgctgaaggacaagggcctgctgctgcgctgctacacccagtag

SEQ ID NO: 73451 - DNA, 510 bp, Artificial Sequence
  derived and/or modified sequence
atggacttcctgaggaacctcttcagccagaccctgagcctgggcagccagaaggagcggctgctggatgagctgaccctggagggcgtggcccgctacatgcagagcgagcgctgccggcgggtcatctgcctggtgggcgccggcatcagcaccagcgctggcatcccagacttccgcagccccagcacaggcctgtatgacaacctggagaagtaccacctgccctacccagaggccatctttgagatctcctacttcaagaagcaccctgagcccttctttgccctggccaaggagctgtacccaggccagttcaagcccaccatctgccactacttcatgaggctgctgaaggacaagggcctgctgctgcgctgctacacccagaacatcgacaccctggagagaattgctggcctggagcaggaggacctggtggaggcccacggcaccttctacaccagccactgtgtgtctgccagctgcagacatgagtaccccctgtag

SEQ ID NO: 73452 - DNA, 237 bp, Artificial Sequence
  derived and/or modified sequence
atggacttcctgaggaacctcttcagccagaccctgagcctgggcagccagaaggagcggctgctggatgagctgaccctggagggcgtggcccgctacatgcagagcgagcgctgccggcgggtcatctgcctggtgggcgccggcatcagcaccagcgctggcatcccagacttccgcagccccagcacaggcctgtatgacaacctggagaagtaccacctgccctacccctag

SEQ ID NO: 73453 - DNA, 222 bp, Artificial Sequence
  derived and/or modified sequence
atggacttcctgaggaacctcttcagccagaccctgagcctgggcagccagaaggagcggctgctggatgagctgaccctggagggcgtggcccgctacatgcagagcgagcgctgccggcgggtcatctgcctggtgggcgccggcatcagcaccagcgctggcatcccagacttccgcagccccagcacaggcctgtatgacaacctggagaagtactag

SEQ ID NO: 73454 - DNA, 393 bp, Artificial Sequence
  derived and/or modified sequence
atggacttcctgcggaacctgttcagccagaccctgagcctgggctcccagaaagaacggctactggatgaactgacactggagggggtcgctcgttacatgcagtccgagagatgtaggagggtgatctgtcttgtgggggcaggcatctctacctccgcaggcattcccgactttaggtccccctctaccggtttgtatgacaatctggagaaatatcatctcccttaccctgaggccatattcgaaattagctacttcaagaaacatccagaaccattcttcgctctcgcaaaggaactctatcccggccagtttaagccaaccatatgtcactatttcatgagacttttaaaggataaaggcctactcctgcgctgttacactcagtag

SEQ ID NO: 73455 - DNA, 510 bp, Artificial Sequence
  derived and/or modified sequence
atggacttcctgcggaacctgttcagccagaccctgagcctgggcagccagaaagagcgcctgctcgacgagttgacactggaaggggtggctcgctacatgcagagcgaacgctgtaggcgggtgatctgtttggtaggtgctggcatcagcacaagcgctgggatcccagatttccggtcaccctcaaccggactttacgacaacctcgaaaaataccatctaccctatcctgaagctatattcgagataagctacttcaaaaagcatcccgaacccttctttgccctcgccaaggagctctacccgggtcagtttaaaccgactatttgtcattacttcatgcgacttcttaaggataaagggctgctcttacgctgctacacccagaatatagacacgctggagagaattgcaggattggagcaggaagatctggtggaggcccatggtacattttacacaagtcactgcgtgagcgccagttgccgtcacgaatatcctctgtag

SEQ ID NO: 73456 - DNA, 237 bp, Artificial Sequence
  derived and/or modified sequence
atggacttcctgcggaacctgttcagccagaccctgagcctgggctcacagaaggagcgtttgctggacgaacttactctggagggggtagcccgctacatgcaatccgagcgttgccgcagggtgatctgcctcgtgggggccggaatttctacctccgcagggatacccgacttcaggtctcctagcaccgggctgtacgataacttggagaagtatcatttaccgtatccatag

SEQ ID NO: 73457 - DNA, 222 bp, Artificial Sequence
  derived and/or modified sequence
atggacttcctgcggaacctgttcagccagaccctgagcctgggctctcagaaggaaagactgcttgacgagcttactctggaaggcgtcgccaggtacatgcagagcgagcgatgtcggagagtcatttgcttagtgggagcgggtatatcaacatccgccgggattccggattttaggtcgcccagtacggggttgtacgacaatctcgagaagtattag

SEQ ID NO: 73458 - DNA, 393 bp, Artificial Sequence
  derived and/or modified sequence
atggacttcttgcgtaatctgttctcccagaccctctccctggggagccaaaaggaacgtttgctcgacgagttgactctcgagggagtcgccaggtatatgcagtctgagagatgtcgacgcgtgatatgcctggttggtgcaggaatatctaccagcgctggcataccagacttccgaagccccagcacaggcttgtacgacaatcttgagaagtaccaccttccttaccctgaagctatatttgaaatcagctactttaagaaacatcccgagccattttttgccctcgctaaagagttatatcccggtcagttcaaacccaccatctgccactacttcatgagactgctgaaagacaaaggactcctgttgaggtgctacacacaatag

SEQ ID NO: 73459 - DNA, 510 bp, Artificial Sequence
  derived and/or modified sequence
atggattttttgcggaacttattcagtcagaccctctccctaggatcccaaaaggagcgcctcttagacgagctgaccctggaaggagtcgctcgatatatgcagtctgagaggtgtcggagagtgatatgcctggtaggcgcagggataagcacttccgccggaatacccgatttccggagccctagtacgggcctctacgacaacctggaaaagtaccatctgccataccctgaggccatctttgaaatttcttattttaaaaagcatcctgaacccttctttgcactggcgaaggaactttatccgggacagttcaaacctactatatgccactacttcatgaggctgctcaaggataaaggcttattgctgaggtgttatacgcagaacatagacactcttgagcgtatagccggactggaacaggaggatctagtggaagcccacggaacattctatacatctcactgcgtcagcgccagctgccgacacgagtaccctttgtag

SEQ ID NO: 73460 - DNA, 237 bp, Artificial Sequence
  derived and/or modified sequence
atggactttcttaggaatctattctctcagacactctccttagggagccagaaggagcggctcctggatgaactgactctcgagggggtcgctagatacatgcagtcggagaggtgccggcgagtcatctgcctggtcggcgcaggcatttctacctctgctgggattccggacttccgttcacccagcactggattgtatgataatctggagaagtatcatctgccttacccttag

SEQ ID NO: 73461 - DNA, 222 bp, Artificial Sequence
  derived and/or modified sequence
atggacttcctgagaaatctgttcagccagactctcagtctgggatcccagaaagagcgcttgcttgatgagctcaccctggagggagtggccagatacatgcaatcagaacgatgccgaagggtgatctgtctggtgggggctgggatttctacctccgctggcatccccgattttaggtctcccagtactggactgtacgacaatctcgagaaatactag

SEQ ID NO: 73462 - DNA, 848 bp, Artificial Sequence
  derived and/or modified sequence
aaacaaacaaaaaatgagcctggcatggtggcacgtgcctgtggtcccagctacttgggaggctgaggtgggaggatcccttgagcttgggaggttgaggctgcagcaagctgtgactgcaccagtgcactccagcctgggcaacagagcgagacactgtctcaaaaaagaaaagcaaagcaaagccactcacatgaggtcttgctcctggggacgggcatggccaggactccaaccccggcagcctgtcccagagccctggagctagccccagtgcagtctctccaccaccccgcacttcctcaggccaccttcctgccacagccttttccccaaacctggtatcaccccctctcctccctccctaatcccacctctcgggcctggccactccaccccaccccttccaggactcagattcagactctgagggaggagccgctggtggagaagcagacatggacttcctgcggaacttattctcccagacgctcagcctgggcagccagaaggagcgtctgctggacgagctgaccttggaaggggtggcccggtacatgcagagcgaacgctgtcgcagagtcatctgtttggtgggagctggaatctccacatccgcaggcatccccgactttcgctctccatccaccggcctctatgacaacctagagaagtaccatcttccctacccagaggccatctttgagatcagctatttcaagaaacatccggaacccttcttcgccctcgccaaggaactctatcctgggcagttcaagccaaccatctgtcactacttcatgcgcctgctgaaggacaaggggctactcctgcgctgctacacgcag

SEQ ID NO: 73463 - DNA, 890 bp, Artificial Sequence
  derived and/or modified sequence
acgaaagcgcgtctgcggccgcaatgtctgctgagagttgtagttctgtgccctatcacggccactcccatttctggtgccgtcacgggacagagcagtcggtgacaggacagagcagtcggtgacgggacacagtggttggtgacgggacagagcggtcggtgacagcctcaagggcttcagcaccgcgcccatggcagagccagaccgtaggaggaggaggatcgcttgagcccaggaatttgaggctgcagtgagctatgatcgcactattgcactccaacctgggtgacatgagcgagaccctttctctaaaaagtaaaaaagaaagaaagactcagattcagactctgagggaggagccgctggtggagaagcagacatggacttcctgcggaacttattctcccagacgctcagcctgggcagccagaaggagcgtctgctggacgagctgaccttggaaggggtggcccggtacatgcagagcgaacgctgtcgcagagtcatctgtttggtgggagctggaatctccacatccgcaggcatccccgactttcgctctccatccaccggcctctatgacaacctagagaagtaccatcttccctacccagaggccatctttgagatcagctatttcaagaaacatccggaacccttcttcgccctcgccaaggaactctatcctgggcagttcaagccaaccatctgtcactacttcatgcgcctgctgaaggacaaggggctactcctgcgctgctacacgcagaacatagataccctggagcgaatagccgggctggaacaggaggacttggtggaggcgcacggcaccttctacacatcacactgcgtcagcgccagctgccggcacgaatacccgctaa

SEQ ID NO: 73464 - DNA, 555 bp, Artificial Sequence
  derived and/or modified sequence
atttctggtgccgtcacgggacagagcagtcggtgacaggacagagcagtcggtgacgggacacagtggttggtgacgggacagagcggtcggtgacagcctcaagggcttcagcaccgcgcccatggcagagccagacctctctccaccaccccgcacttcctcaggccaccttcctgccacagccttttccccaaacctggtatcaccccctctcctccctccctaatcccacctctcgggcctggccactccaccccaccccttccaggactcagattcagactctgagggaggagccgctggtggagaagcagacatggacttcctgcggaacttattctcccagacgctcagcctgggcagccagaaggagcgtctgctggacgagctgaccttggaaggggtggcccggtacatgcagagcgaacgctgtcgcagagtcatctgtttggtgggagctggaatctccacatccgcaggcatccccgactttcgctctccatccaccggcctctatgacaacctagagaagtaccatcttccctacccaga

SEQ ID NO: 73465 - DNA, 578 bp, Artificial Sequence
  derived and/or modified sequence
aaagcgcgtctgcggccgcaatgtctgctgagagttgtagttctgtgccctatcacggccactcccatttctggtgccgtcacgggacagagcagtcggtgacaggacagagcagtcggtgacgggacacagtggttggtgacgggacagagcggtcggtgacagcctcaagggcttcagcaccgcgcccatggcagagccagaccgccaccttcctgccacagccttttccccaaacctggtatcaccccctctcctccctccctaatcccacctctcgggcctggccactccaccccaccccttccaggactcagattcagactctgagggaggagccgctggtggagaagcagacatggacttcctgcggaacttattctcccagacgctcagcctgggcagccagaaggagcgtctgctggacgagctgaccttggaaggggtggcccggtacatgcagagcgaacgctgtcgcagagtcatctgtttggtgggagctggaatctccacatccgcaggcatccccgactttcgctctccatccaccggcctctatgacaacctagagaagtacc

SEQ ID NO: 73466 - protein, 629 aa, Artificial Sequence
  derived and/or modified sequence
MIPWPASDRKKSECAFKKKSNEELQDSYLLPISEDKVMEGKGQSPFDPAHKHTAVLVDGMLYSGTMNNFLGSEPILMRTLGSQPVLKTDNFLRWLHHDASFVAAIPSTQVVYFFFEETASEFDFFERLHTSRVARVCKNDVGGEKLLQKKWTTFLKAQLLCTQPGQLPFNVIRHAVLLPADSPTAPHIYAVFTSQWQVGGTRSSAVCAFSLLDIERVFKGKYKELNKETSRWTTYRGPETNPRPGSCSVGPSSDKALTFMKDHFLMDEQVVGTPLLVKSGVEYTRLAVETAQGLDGHSHLVMYLGTTTGSLHKAVVSGDSSAHLVEEIQLFPDPEPVRNLQLAPTQGAVFVGFSGGVWRVPRANCSVYESCVDCVLARDPHCAWDPESRTCCLLSAPNLNSWKQDMERGNPEWACASGPMSRSLRPQSRPQIIKEVLAVPNSILELPCPHLSALASYYWSHGPAAVPEASSTVYNGSLLLIVQDGVGGLYQCWATENGFSYPVISYWVDSQDQTLALDPELAGIPREHVKVPLTRVSGGAALAAQQSYWPHFVTVTVLFALVLSGALIILVASPLRALRARGKVQGCETLRPGEKAPLSREQHLQSPKECRTSASDVDADNNCLGTEVA

SEQ ID NO: 73467 - DNA, 1890 bp, Artificial Sequence
  derived and/or modified sequence
atgataccatggcctgcttctgatcgaaagaagtcagaatgtgccttcaaaaaaaagtcgaacgaggagcttcaggacagctatcttcttccaatcagtgaggacaaagtgatggaaggtaaggggcaatctccgtttgaccccgcccataagcacaccgcagtactcgttgacggaatgctgtattccgggacaatgaacaatttcttgggatctgagcctatactgatgcgaacgctgggcagccagcccgttctcaagaccgacaacttccttaggtggctgcatcacgatgcaagcttcgtggccgcgattccttccacgcaggtggtatattttttcttcgaggaaacagcttccgagtttgactttttcgaacgcttgcatacctcaagagtggcccgggtatgcaagaacgacgtgggaggtgagaagctgctccagaagaaatggacaacatttctcaaggcccaactgctgtgcacacagcctggccagctgcctttcaatgtgatccgccacgcagtgctgttgccagctgattctccgactgccccccatatctatgcggtttttacctcacagtggcaggtgggaggcacccgttcttccgctgtgtgcgcgttctctctcctcgacatcgaaagagtttttaaggggaagtacaaggaattgaacaaagaaacatctcggtggacgacctaccgtggacctgagacgaacccccggcctggatcctgcagtgtggggccttcctcagacaaggccctgacatttatgaaagaccactttctgatggatgagcaggttgtggggacccccctgcttgtgaagtcgggggtcgagtacacaaggctcgctgtagagacggcacagggtctcgacggccacagtcatctggtgatgtacttgggaacaaccactggttcactgcataaggccgtggtgtctggagattctagcgctcatctggtcgaggagatccagttgtttccagatccagaaccagtacgcaatctgcagctcgccccgactcagggcgccgtgtttgtgggattttcgggcggcgtctggagagtgcccagagccaactgttccgtctacgaaagttgtgtggactgtgtgctggcacgcgatccccactgcgcctgggatcctgagagtcggacttgctgtctgctaagtgcacctaaccttaactcctggaagcaggacatggaacgtggcaaccccgaatgggcctgcgccagcgggcccatgtcccggagcctacgcccccagagccgtccacagataatcaaggaagtcctcgccgtgcccaactctatcctggagctgccctgccctcacttaagtgctcttgcaagctactactggtctcacggccctgcagcagtgcctgaagccagttcgacagtgtacaacggaagtttgttactgatcgtccaggatggcgtcggaggattataccagtgttgggccacagaaaatgggttctcttaccctgtaatcagctattgggtcgactcacaggatcagacactagcccttgatcccgagctggcaggcatcccccgggagcacgtgaaagttccactcacacgagtctccggtggggctgccttggccgcgcagcaatcgtattggcctcatttcgtcactgttaccgtcctgtttgctcttgtgctgagtggcgcactaataatccttgtcgctagtcctttgcgtgctcttagagctaggggaaaggtgcaggggtgtgaaaccctgcgtcccggcgagaaagcccccctgagtagagagcagcacttacagtctcccaaagaatgtaggacaagtgcatcagacgtggacgcagataacaattgtttgggcactgaagttgcttag

SEQ ID NO: 73468 - DNA, 1890 bp, Artificial Sequence
  derived and/or modified sequence
atgataccttggcccgccagtgatcgcaagaaatccgaatgcgcttttaaaaaaaagagcaacgaggaacttcaggacagttatctcctgccaatcagcgaggacaaagttatggaggggaagggacaatctcctttcgaccccgcccacaagcacacagccgttctcgttgatggaatgctgtacagcgggaccatgaacaattttcttggcagcgagccaatcctgatgaggacgctgggaagtcagcccgtgcttaaaactgacaacttcctgcgctggctccaccacgatgccagttttgtggccgcaatccccagcacacaggtcgtttatttcttttttgaggaaacggcaagtgagttcgacttttttgagcggctgcacactagccgcgtggccagggtctgcaagaacgacgttgggggtgagaaattactgcagaaaaagtggacaactttccttaaggcacagctcctgtgcacacagcccggtcagttgccctttaatgtgattagacacgccgtactcctaccggcagactcccccaccgctcctcacatttacgctgtgtttacaagtcagtggcaagtcgggggaactagaagttccgccgtgtgtgctttttcactcttggatatcgaaagagttttcaaaggtaagtataaggaactgaacaaagaaacatcaagatggactacttaccgaggtccagagacaaaccctagacctgggtcctgctctgtaggcccttcgtcagacaaggcactgactttcatgaaggatcacttcttaatggatgaacaagtcgtagggacccctctgctcgtgaagtctggggtggagtacaccaggctggcagtggaaaccgctcagggactggatggccattcccacttggtgatgtacttgggcaccaccactggcagcctacataaggctgtagtttccggcgattcaagtgcgcatttagtggaggagatacagttgttccccgatcctgagcctgtgaggaacttacagttagctcctacccaaggagcagtcttcgttggatttagcgggggtgtgtggcgagtgcccagggcgaactgcagtgtctatgagtcatgtgtggactgtgtgctggcacgtgacccccattgcgcttgggatccggagagcagaacttgttgcctcctctccgctcccaatctaaattcctggaaacaagatatggagcgtgggaatccagaatgggcttgcgccagtggtcccatgtcccgcagcttgcggcctcagagtcggccacaaataattaaggaagttctagccgtcccaaactccatacttgagttaccctgtccccatctcagtgcactggcctcttattattggtcccatggcccagcagcagtacctgaggcgtccagcaccgtgtacaacggaagtctccttctgatcgtgcaggacggggttggagggctctaccagtgctgggcaacggagaatgggttttcctaccccgtcatcagttactgggtggatagtcaggatcagaccctcgcactggatcctgagctggccgggatcccccgggagcacgtgaaggtgccattgacacgcgttagcggaggcgccgcactggccgcccagcagtcttattggccgcatttcgtgacagtcaccgtgctgttcgcgctagtcctcagcggcgccctcattatcctagttgcttctccactcagggcattgcgggctaggggcaaggtgcagggttgtgagaccctgagacctggggaaaaggcaccactttcccgcgagcagcacctgcagtctcctaaagagtgtcgaaccagcgcttcagatgtggacgccgataacaattgtctgggcactgaagtggcgtag

SEQ ID NO: 73469 - DNA, 1890 bp, Artificial Sequence
  derived and/or modified sequence
atgatcccctggccagccagtgacaggaagaagtcagaatgtgccttcaagaagaagagcaatgaggagctgcaggacagctacctgctgcccatcagcgaggacaaggtgatggagggcaagggccagagcccctttgatcctgcccacaagcacacagctgtgctggtggatggcatgctgtacagcggcaccatgaacaacttcctgggcagcgagcccatcctgatgaggaccctgggcagccagcctgtgctgaagacagacaacttcctgcgctggctgcaccatgatgccagctttgtggccgccatccccagcacccaggtggtgtacttcttctttgaggagacagccagcgagtttgacttctttgagcggctgcacaccagccgggtggcccgggtgtgcaagaatgatgtgggcggggagaagctgctgcagaagaagtggaccaccttcctgaaggcccagctgctgtgcacccagcccggccagctgcccttcaacgtcatcagacatgctgtgctgctgcctgctgacagccccacagccccccacatctatgctgtgttcaccagccagtggcaggtgggcggcaccaggagcagcgctgtgtgtgccttcagcctgctggacatcgagagggtcttcaagggcaagtacaaggagctgaacaaggagaccagccgctggaccacctaccggggccctgagaccaacccccggcccggcagctgcagcgtgggccccagcagtgacaaggccctgaccttcatgaaggaccacttcctgatggatgagcaggtggtgggcacccccctgctggtgaagtctggagtggagtacacccggctggccgtggagacagcccagggcctggatggccacagccacctggtgatgtacctgggcaccaccaccggcagcctgcacaaggctgtggtgtctggggacagcagcgcccacctggtggaggagatccagctgttcccagaccctgagcctgtgaggaacctgcagctggcccccacccagggcgctgtgtttgtgggcttcagcggcggcgtgtggagggtgccccgggccaactgcagcgtgtatgagagctgtgtggactgtgtgctggcccgggacccccactgtgcctgggaccctgagagcaggacctgctgcctgctgagcgcccccaacctgaacagctggaagcaggacatggagcggggcaaccctgagtgggcctgtgccagcggccccatgagccgcagcctgcggccccagagccggccccagatcatcaaggaggtgctggccgtgcccaacagcatcctggagctgccctgcccccacctgagcgccctggccagctactactggagccacggccctgctgctgtgcctgaggccagcagcacagtgtacaacggcagcctgctgctgattgtgcaggatggagtgggcggcctgtaccagtgctgggccacagaaaatggcttctcctaccctgtgatctcctactgggtggacagccaggaccagaccctggccctggaccctgagctggccggcatcccccgggagcacgtgaaggtgcccctgaccagggtgtctggaggagctgccctggccgcccagcagagctactggccccactttgtgacagtgacagtgctgtttgccctggtgctgagcggggccctgatcatcctggtggccagccccctgcgggccctgcgggcccggggcaaggtgcagggctgtgagaccctgcggcctggagagaaggcccccctgagccgggagcagcacctgcagagccccaaggaatgtaggaccagcgccagtgatgtggatgctgacaacaactgcctgggcacagaggtggcctag

SEQ ID NO: 73470 - DNA, 1890 bp, Artificial Sequence
  derived and/or modified sequence
atgatcccctggcccgccagcgaccggaagaagagcgagtgcgccttcaagaagaagtctaatgaggaactccaggactcatacctcctacccatctcagaggacaaagtcatggaaggcaagggtcagtctccttttgaccctgcacataaacacacagcagtgctggtggatggcatgctctactcaggtacaatgaataacttccttggctccgaaccgatattgatgaggacgcttggctcccaaccggtcttaaagaccgacaatttcctcagatggctacatcatgatgcttcctttgtcgccgccatacccagtacccaagtcgtgtattttttcttcgaggaaaccgccagcgagttcgacttcttcgagcggcttcatactagcagagtggcccgggtctgtaaaaacgacgttgggggtgaaaagttgttgcagaaaaagtggacgacctttttgaaggcccagttgctatgtacccagcccggccagctgcccttcaacgtgatccggcacgccgttctgttgccagctgatagtcccactgcacctcatatctacgcagtttttacctcacagtggcaggtgggggggacccgatctagtgctgtgtgtgctttctcgctgctggacatagaaagagtcttcaaaggtaagtataaggagctcaataaggaaactagcagatggaccacgtatcgcggcccagagaccaaccctcgccccggaagctgtagcgtgggcccaagctccgacaaagcactgacgttcatgaaggatcacttcctgatggacgagcaggtcgtcggcacccctctcctggtgaagagtggggtagagtatactagattagccgtggagaccgcacagggtctggatggccactcccatctcgtcatgtatctcggaactacaaccggcagcctgcataaagctgttgtgagcggcgatagcagcgcccacctggtggaggaaatccagctgtttccagacccagagcccgtccgaaacttgcagctcgccccaacccagggcgccgtcttcgttggcttttcagggggggtgtggagggtgccgcgggccaactgctcagtctatgagagctgcgtggactgcgtcctggccagagatccccattgtgcgtgggatcccgagtcccgcacgtgctgtctgctgtccgcaccaaacctgaatagttggaagcaagatatggaacggggaaaccccgagtgggcttgtgctagcggacccatgagtcgcagtctgcggcctcaatcaaggcctcagattatcaaagaggtcctggcagtccctaattcgatcttggaattgccatgccctcatctaagtgccctagcctcttattactggtcacatgggcccgcagccgttcctgaggcttcctctactgtctataacggctcgctactgctaattgtccaggatggcgtcggcgggctgtaccagtgttgggcgacagaaaacggtttctcttatcctgttattagctattgggtagactcccaagaccagactttagctttggacccagaactcgccggaattcccagagaacacgtgaaagtgcccctgacccgagtcagcgggggagcagccttggccgcccagcagtcatactggccgcacttcgtgaccgtgacagtcctgttcgcattggttctctccggggctctgatcatcctagtggcctctcccctcagagcccttcgcgctcggggaaaagttcaggggtgcgagacgctgagaccgggtgaaaaagcccctctctcacgcgagcaacatttgcagtctcctaaagaatgcagaacatctgcttccgatgtggacgccgataataattgtctggggaccgaggttgcttag

SEQ ID NO: 73471 - DNA, 1890 bp, Artificial Sequence
  derived and/or modified sequence
atgatcccctggcccgccagcgaccggaagaagagcgagtgcgcctttaagaaaaagagcaacgaagagctgcaagattcctacttactgccaattagcgaggacaaagtgatggagggtaaagggcagtcaccgttcgatccagctcataaacataccgccgtcctcgttgacggtatgctctactcaggcactatgaacaatttcttgggcagtgaacccattctgatgcgtacactgggcagtcagccagtactaaagacggataatttcctccgatggttgcaccacgacgcgtccttcgttgctgccatcccatctacgcaagtcgtttactttttcttcgaagaaaccgccagtgaatttgacttctttgaaagactccatacatccagggttgcgcgcgtgtgcaaaaacgacgtcgggggagagaagttattgcagaagaagtggactacgtttttgaaagcccagcttctgtgcacacagcctgggcagctgccctttaacgtcatccgccacgccgtgctactcccagcggactcacccaccgcgcctcatatttatgcggtgtttacctctcaatggcaggttggcgggactagatccagcgccgtctgcgcgtttagtttactcgacatagaaagggtttttaagggaaagtacaaagagctgaataaggagacctctcggtggaccacatatcgtggccccgaaactaatcccagacccggaagctgctccgtaggcccttcaagtgataaggccctaacattcatgaaggaccattttctaatggatgaacaggtcgtagggactcctttgttggtgaagagtggagtcgagtatactcgcctggcggtcgaaacggcacaagggctggatggccacagtcatttagtcatgtatctaggaaccacaacgggttcgctgcacaaagctgtggtgtctggcgattcatccgcccatctggtggaggagatccagctgtttccagatccagaaccagtgcgcaacctgcagcttgctcctacccaaggggccgtctttgtgggtttctctgggggcgtgtggagggtcccacgggctaattgcagcgtttatgagagctgcgttgattgcgtgcttgcgcgggaccctcactgtgcctgggacccagagtcacggacttgttgtctcttgagcgcacccaatctcaattcttggaagcaggatatggaacgcgggaatcctgagtgggcatgtgcatcaggcccaatgtcacggtcgctgcgcccccagtctcgccctcagattatcaaggaagttctcgccgtacccaattccattttagaactcccttgcccacatttatccgctctcgcctcatactattggtcccatgggccagctgccgtgccagaggcttctagtacggtctacaacggttctctgcttctgatcgtgcaggacggtgtggggggactttatcagtgctgggcgactgagaatggcttttcttatcccgtaatctcctactgggtggactcccaagatcaaaccctggcactagatcctgagctcgctggaatcccaagggagcacgtcaaggtacccttgacaagagttagcggcggggccgcacttgccgcccagcaatcctattggccgcacttcgtgaccgtcactgtgttatttgctctagttttgtctggagctctgataattcttgtcgcatcgccgttgcgagcgctgcgtgctaggggcaaagtacagggatgtgagacgcttcgccctggcgagaaagcgcctctttcccgggaacagcatctgcagtccccgaaggagtgccggactagtgcttctgatgtggatgcggataataactgccttggtactgaggtggcctag

SEQ ID NO: 73472 - DNA, 1890 bp, Artificial Sequence
  derived and/or modified sequence
atgattccatggcctgcctcagaccggaagaagtccgaatgcgctttcaagaaaaaaagtaacgaagagcttcaggatagttacttgttgcccattagcgaggataaggtgatggaaggtaaggggcagagtccattcgatccagctcacaagcatacggccgtgttggtggatggcatgctttactcaggaactatgaataacttcttgggctctgagcccatactaatgagaaccttggggagtcagcccgtcttaaaaaccgataattttttgagatggttgcatcacgatgcctcttttgtggcagcgatccccagcacgcaagtggtctatttctttttcgaggagacggcctcagaatttgacttcttcgagcgtctccacacgagccgagtcgctcgggtctgtaaaaacgacgttgggggagagaaactactgcaaaagaaatggaccacattcctaaaagcacaattactgtgcacacagccagggcaacttccatttaacgtcattcgccatgctgtgctcctgcctgctgattctcccaccgctccacacatatatgcagtgttcacatcacagtggcaggtcgggggtacccggagttcagcagtctgcgctttctccctgcttgatatcgagagggtttttaaaggcaagtacaaggaattgaataaggaaacatcccggtggactacctatagagggcctgagacgaacccgcgaccaggcagttgtagcgtcgggccatctagtgacaaagcactgacatttatgaaggaccattttctgatggatgagcaggtggtgggaaccccccttttggtgaaatccggggtggagtacacccggcttgctgttgaaaccgcccaaggcctggatggacattcacatctcgtgatgtatctggggaccacgaccggttcactgcataaagcagtggtatctggggattcgtccgcacatctcgttgaggagatccagctgttccccgatccagaacctgtccggaatctgcagcttgcccctacccaaggggcagtcttcgtcggcttttccggaggcgtgtggcgggttcccagagcgaattgtagtgtatacgagagctgcgtggattgtgtgctggctagagatccccactgtgcttgggatcctgagtcacggacctgctgtctcctttccgcacccaatttgaacagttggaaacaagatatggaacgtggcaacccggagtgggcatgcgccagcggaccaatgtcccgatcgctcagaccccaaagccgtccacagataatcaaagaggttctggctgtccccaatagtatactggaactgccctgccctcacctctccgcacttgctagctactactggagccacggacctgcggctgtgccggaagcctccagcacggtgtacaatggatctcttttgttaatcgtgcaagatggtgtcggagggctttaccaatgttgggctacggaaaacgggttttcataccccgtgatctcttactgggtggactcgcaggaccaaactctagccctggaccctgaactcgccggaatcccaagagagcacgtgaaggtccccctgacccgagtctccggcggtgctgctctggccgctcagcagagctattggccccactttgtcactgtcacagtcctgttcgcgttagtgctgtcaggcgcacttattatcctggtggcatccccactgcgagctctccgagccagagggaaagtgcagggatgcgagacactgagacccggagaaaaggcacccctgtcccgggaacagcacttgcagagccctaaagagtgccggacaagtgcttccgacgttgacgcagataacaactgtctcggcactgaagtagcatag

SEQ ID NO: 73473 - DNA, 1890 bp, Artificial Sequence
  derived and/or modified sequence
atgattccttggcccgcttctgacaggaagaagagtgaatgcgcctttaaaaaaaagagcaacgaggaactgcaagatagttacctgctgccaatttctgaggacaaggtcatggaaggcaaggggcagtcgcctttcgatcctgcacacaagcatacagccgttctggtagatggaatgttgtactcgggtactatgaataactttttgggttcagagcccatcctaatgagaacattgggttctcagcctgtgctcaagactgataatttcctgcggtggctccaccatgatgcctccttcgtagctgcaatcccaagtacacaggtggtgtattttttcttcgaggaaactgcttcagagtttgactttttcgagagactccatacctcacgcgttgcgagagtgtgcaagaatgacgtgggcggagagaagcttctgcagaagaaatggacaacattcctcaaagcccagcttctgtgtacccagccgggtcaactcccatttaacgtgattcgccacgccgttctgctgccggctgactcccccaccgccccacacatatacgccgtgttcacctcccagtggcaagttggaggcaccagaagcagtgctgtctgtgctttctctctgctcgacattgaacgagtgttcaaaggcaagtacaaggagttgaataaggagacttcgcgctggactacctataggggcccagagactaacccacgtccaggttcttgcagtgttggacccagcagcgataaggcattgaccttcatgaaggatcacttcttgatggatgaacaagttgtagggactcccctgctggtgaaaagtggcgtggagtacacaagattggctgtcgaaactgctcagggattggatggccactcgcacctcgtgatgtacttgggcacgaccactggatccctgcataaggctgtggtaagtggggattctagcgcccacctggtcgaggaaatccagttattcccagaccccgaaccagtgaggaatctgcagctcgcacccacccagggcgctgtcttcgttggattctcaggtggggtgtggcgggtaccaagagctaattgttccgtgtatgagtcatgtgttgactgtgtgctggccagggaccctcattgcgcctgggaccccgagagtcgcacgtgttgtctgttatcggcgccaaaccttaatagctggaagcaggacatggagcgtggaaaccctgaatgggcctgcgcctcaggcccaatgtcacgaagcctccggcctcagagccgccctcaaattattaaggaagtattagcggtccctaactctatcctggagctgccgtgtccccacctgagtgcgcttgctagttattactggtcacatggtcctgccgcagtgcctgaggcttcaagcactgtatataatggttctttacttctcattgtccaggacggagtaggcggactctatcagtgctgggctaccgaaaacggcttctcctatccagtgatctcctattgggtggacagccaagatcaaacgttagccttagacccagagctggccggtatccccagagagcatgtcaaagtccccctgacccgggtatctgggggagcagccctcgccgctcagcagtcctactggccccatttcgtcaccgttacagtgctattcgccctcgtcctttcaggagcgcttatcatcttagtggcttcccctttgcgggcattgcgggctcgcggtaaagtccagggctgcgagactctgcgccctggtgagaaggcccctctgagccgggaacaacatctgcagtcgcccaaggagtgcaggaccagtgcctcagacgtagacgcagacaacaattgtttgggaaccgaagtcgcctag

SEQ ID NO: 73474 - DNA, 1890 bp, Artificial Sequence
  derived and/or modified sequence
atgatcccctggcccgccagcgacagaaagaagagcgagtgcgccttcaagaagaagagcaacgaggagctgcaggacagctacctgctgcccatcagcgaggacaaggtgatggagggcaagggccagagccccttcgaccccgcccacaagcacaccgccgtgctggtggacggcatgctgtacagcggcaccatgaacaacttcctgggcagcgagcccatcctgatgagaaccctgggcagccagcccgtgctgaagaccgacaacttcctgagatggctgcaccacgacgccagcttcgtggccgccatccccagcacccaggtggtgtacttcttcttcgaggagaccgccagcgagttcgacttcttcgagagactgcacaccagcagagtggccagagtgtgcaagaacgacgtgggcggcgagaagctgctgcagaagaagtggaccaccttcctgaaggcccagctgctgtgcacccagcccggccagctgcccttcaacgtgatcagacacgccgtgctgctgcccgccgacagccccaccgccccccacatctacgccgtgttcaccagccagtggcaggtgggcggcaccagaagcagcgccgtgtgcgccttcagcctgctggacatcgagagagtgttcaagggcaagtacaaggagctgaacaaggagaccagcagatggaccacctacagaggccccgagaccaaccccagacccggcagctgcagcgtgggccccagcagcgacaaggccctgaccttcatgaaggaccacttcctgatggacgagcaggtggtgggcacccccctgctggtgaagagcggcgtggagtacaccagactggccgtggagaccgcccagggcctggacggccacagccacctggtgatgtacctgggcaccaccaccggcagcctgcacaaggccgtggtgagcggcgacagcagcgcccacctggtggaggagatccagctgttccccgaccccgagcccgtgagaaacctgcagctggcccccacccagggcgccgtgttcgtgggcttcagcggcggcgtgtggagagtgcccagagccaactgcagcgtgtacgagagctgcgtggactgcgtgctggccagagacccccactgcgcctgggaccccgagagcagaacctgctgcctgctgagcgcccccaacctgaacagctggaagcaggacatggagagaggcaaccccgagtgggcctgcgccagcggccccatgagcagaagcctgagaccccagagcagaccccagatcatcaaggaggtgctggccgtgcccaacagcatcctggagctgccctgcccccacctgagcgccctggccagctactactggagccacggccccgccgccgtgcccgaggccagcagcaccgtgtacaacggcagcctgctgctgatcgtgcaggacggcgtgggcggcctgtaccagtgctgggccaccgagaacggcttcagctaccccgtgatcagctactgggtggacagccaggaccagaccctggccctggaccccgagctggccggcatccccagagagcacgtgaaggtgcccctgaccagagtgagcggcggcgccgccctggccgcccagcagagctactggccccacttcgtgaccgtgaccgtgctgttcgccctggtgctgagcggcgccctgatcatcctggtggccagccccctgagagccctgagagccagaggcaaggtgcagggctgcgagaccctgagacccggcgagaaggcccccctgagcagagagcagcacctgcagagccccaaggagtgcagaaccagcgccagcgacgtggacgccgacaacaactgcctgggcaccgaggtggcctag

SEQ ID NO: 73475 - protein, 238 aa, Artificial Sequence
  derived and/or modified sequence
MYAPGGAGLPGGRRRRSPGGSALPKQPERSLASALPGALSITALCTALAEPAWLHIHGGTCSRQELGVSDVLGYVHPDLLKDFCMNPQTVLLLRVIAAFCFLGILCSLSAFLLDVFGPKHPALKITRRYAFAHILTVLQCATVIGFSYWASELILAQQQQHKKYHGSQVYVTFAVSFYLVAGAGGASILATAANLLRHYPTEEEEQALELLSEMEENEPYPAEYEVINQFQPPPAYTP

SEQ ID NO: 73476 - DNA, 717 bp, Artificial Sequence
  derived and/or modified sequence
atgtacgcccccggcggcgccggcctgcccggcggcagaagaagaagaagccccggcggcagcgccctgcccaagcagcccgagagaagcctggccagcgccctgcccggcgccctgagcatcaccgccctgtgcaccgccctggccgagcccgcctggctgcacatccacggcggcacctgcagcagacaggagctgggcgtgagcgacgtgctgggctacgtgcaccccgacctgctgaaggacttctgcatgaacccccagaccgtgctgctgctgagagtgatcgccgccttctgcttcctgggcatcctgtgcagcctgagcgccttcctgctggacgtgttcggccccaagcaccccgccctgaagatcaccagaagatacgccttcgcccacatcctgaccgtgctgcagtgcgccaccgtgatcggcttcagctactgggccagcgagctgatcctggcccagcagcagcagcacaagaagtaccacggcagccaggtgtacgtgaccttcgccgtgagcttctacctggtggccggcgccggcggcgccagcatcctggccaccgccgccaacctgctgagacactaccccaccgaggaggaggagcaggccctggagctgctgagcgagatggaggagaacgagccctaccccgccgagtacgaggtgatcaaccagttccagcccccccccgcctacaccccctag

SEQ ID NO: 73477 - DNA, 717 bp, Artificial Sequence
  derived and/or modified sequence
atgtacgcccctggaggcgcagggttgcccggagggagacgccggcgatcacccggcggatccgccctgccaaagcagcccgaaaggtccctggcctcagcactacctggcgctctgtcaatcaccgcactgtgtacagctttggcggaaccggcctggctgcatatccatgggggtacttgctcgagacaggagttgggtgtgagcgacgtgctgggttatgtgcatcctgacctgctgaaagacttctgcatgaacccgcaaaccgtcctgctcctgcgagtgatcgcagccttctgtttcctgggaattttgtgcagcctgtccgcattcctgctggatgtcttcggtcccaaacacccagccctcaagattacccgtaggtacgccttcgcacacatcttaactgtcctgcagtgcgcaaccgttattggcttctcttattgggcaagcgaacttatcttagctcaacagcaacaacataagaaataccatgggtctcaggtctatgttacgtttgccgtgtcattctatctggtggctggcgctgggggagcctctatattggccactgctgcgaatctgttaagacactacccaacagaagaagaagagcaggcgctggagcttttgagtgagatggaggaaaacgaaccttatccggccgagtacgaggtgatcaaccaatttcagccaccgccagcttatacaccatag

SEQ ID NO: 73478 - DNA, 717 bp, Artificial Sequence
  derived and/or modified sequence
atgtatgcccctggaggtgccggtctgccaggcggtcgacggcgacgaagtcctgggggctcggcactccccaagcaaccggagaggtccctggccagcgccctcccgggggcactcagtatcacagcactgtgtaccgcactagcggaaccagcctggctacatatccatggcggtacatgttctaggcaggaactgggagttagtgatgttctgggctacgtccatccagacttgctgaaagacttctgcatgaaccctcaaaccgtactccttctgcgggtaatcgctgccttttgctttcttggcatactgtgtagcctgagtgcctttctgttggacgtttttggacctaagcatccggcactcaagatcacacgtcgttatgcctttgctcacattttgactgtcctgcagtgcgcaacagtcataggcttttcatattgggcttctgagctgatcctcgctcagcagcagcaacataaaaagtatcacggaagccaagtgtatgtcacatttgctgtgtccttctatcttgtggccggggctggtggagcctctatcctcgcaactgccgccaatctgctgcggcattaccccaccgaggaggaagaacaagccctcgagttactgagcgaaatggaggagaatgaaccctatccagcagaatatgaggtcattaaccagttccagccgccacccgcctacaccccttag

SEQ ID NO: 73479 - DNA, 717 bp, Artificial Sequence
  derived and/or modified sequence
atgtatgcccctgggggcgccggcctgcccggcggcagaagaagaagaagccctgggggcagcgccctgcccaagcagcctgagaggagcctggccagcgccctgcccggggccctgagcatcacagccctgtgcacagccctggccgagcccgcctggctgcacatccatggaggcacctgcagccggcaggagctgggcgtgtctgatgtgctgggctacgtgcacccagacctgctgaaggacttctgcatgaacccccagacagtgctgctgctgcgggtgattgctgccttctgcttcctgggcatcctgtgcagcctgagcgccttcctgctggatgtgtttggccccaagcacccagccctgaagatcaccaggagatatgcctttgcccacatcctgactgtgctgcagtgtgccaccgtcatcggcttctcctactgggccagcgagctgatcctggcccagcagcagcagcacaagaagtaccacggcagccaggtgtatgtgacctttgctgtgtccttctacctggtggccggggccggcggggccagcatcctggccacagctgccaacctgctgcggcactaccccacagaggaggaggagcaggccctggagctgctgtctgagatggaggagaatgagccctacccagcagaatatgaggtgatcaaccagttccagcccccaccagcctacaccccctag

SEQ ID NO: 73480 - DNA, 717 bp, Artificial Sequence
  derived and/or modified sequence
atgtacgcccccggcggcgccggcctgcccggcggccggcggcggagatcaccgggaggcagtgcactacccaagcagccggaaaggagtttggcaagtgctctcccaggggctctgtcaatcactgccctctgtaccgcactggctgagcccgcatggctacacatccacggcggcacatgttccaggcaggaattgggggtctctgacgttttggggtatgtgcaccccgacctgctcaaagacttctgcatgaacccccaaactgtccttctgctgagagtgattgccgctttttgtttcctcggcatcttgtgttcactctccgcatttctgctggatgtctttggcccaaaacacccagctctgaaaattacgcggaggtatgcattcgctcacatcctcacagtgctgcagtgcgcaaccgtgataggatttagctattgggcttccgagctgattctggcccagcagcagcagcacaaaaagtatcacggttcacaggtgtacgttacgttcgccgtgtcgttctatctcgtggccggtgcgggtggcgctagtatactggccacagctgcgaacctgctgcgacactatccaaccgaagaggaggagcaggccctggaactgctgagcgaaatggaggaaaatgagccctatccagcagagtatgaagtgattaaccagtttcaaccaccgcctgcgtacaccccctag

SEQ ID NO: 73481 - DNA, 717 bp, Artificial Sequence
  derived and/or modified sequence
atgtacgcccccggcggcgccggcctgcccggcggccggcggcggcgcagtcctggcggatccgcacttcctaagcaacctgagaggagcctcgcatccgcactgcctggagctctctctatcaccgccctctgcactgctctggccgagcccgcatggctacatattcacggtggaacctgctctcgtcaggagctgggagtgtccgatgtacttggttatgtgcatccagatctgcttaaagacttttgtatgaaccctcaaaccgtattgctcctgcgggtgattgctgcattctgctttcttgggattctgtgttccttgtctgcctttttactggatgtgttcggaccgaaacatcccgcacttaaaatcacacgcaggtacgcatttgcccacatcctgaccgtgctgcagtgtgccactgttataggttttagctactgggcaagcgagctgattcttgctcagcaacagcaacataaaaagtatcatggcagccaagtgtatgtcacattcgccgtttccttctacctggtggcgggggcggggggtgcttctatactcgccaccgccgccaacctcctgaggcactatccgactgaggaagaagaacaagcactcgaactgctcagtgagatggaagaaaacgagccataccctgcagaatatgaagttataaatcaatttcaacccccgccagcatacaccccatag

SEQ ID NO: 73482 - DNA, 717 bp, Artificial Sequence
  derived and/or modified sequence
atgtacgcgccagggggtgcagggctacccggagggagaaggcgcaggtctcctgggggatccgcactgcctaagcagcccgagagatctctcgcctccgccctgcctggcgcactgtccattactgccctctgtaccgctctggctgaacctgcttggctgcatattcatgggggaacttgctccagacaggaactgggagtcagcgatgtgttgggatacgtgcatcccgacctgctgaaggacttctgtatgaacccgcaaactgtgttgcttttgcgggtgatcgcagccttctgctttctgggcatcctttgttcgctctccgcttttttgttagacgttttcggtccgaagcacccagcgcttaagatcacacgcagatatgcgttcgcgcacattctgacagtactgcagtgcgcgacagtgatcggtttttcttattgggcctccgaactaattctggctcaacagcagcagcataaaaagtatcatgggagccaggtctatgtaacattcgcagtgtccttctacctcgttgccggtgccggtggagcatcaattctggccactgcagctaacctgctgcggcattatccgacagaagaagaggaacaggcactggaactcctgagcgagatggaagagaacgagccataccccgcagagtatgaggttattaaccagtttcagccccctcccgcatacacaccatag

SEQ ID NO: 73483 - DNA, 717 bp, Artificial Sequence
  derived and/or modified sequence
atgtacgcgccaggcggagctggcctgccaggaggcaggaggaggcggtcacctggaggaagcgccctcccaaagcagcctgagagatcactggcatctgctctgccaggcgctctgtcaattaccgctctgtgcactgctctggcagagccggcttggctgcacatccatgggggaacttgctctaggcaggagctgggcgtgtcagacgtgctgggttatgtgcaccctgatctgctgaaagacttctgcatgaaccctcagaccgttcttctcctgcgcgtgattgctgctttctgttttctggggatcctctgctctctttctgcctttctcctcgacgtgtttggtccaaaacatcctgccctgaagataacacgcaggtatgctttcgctcacatcttgacggtcttacagtgcgccacagttataggattttcctattgggcctctgaactcattttagctcagcagcagcagcacaaaaaataccacggttcgcaagtctacgtgacatttgctgtgagcttctacttggtcgccggtgcaggtggtgcatccattctggcaaccgcagcaaacctgttgcggcattaccccacagaggaggaagaacaggcactggaactgctctcagaaatggaggagaatgagccctacccagctgagtatgaggtgataaaccaatttcagcccccaccagcctacactccgtag

SEQ ID NO: 73484 - DNA, 4208 bp, Artificial Sequence
  derived and/or modified sequence
agtgcatcggccccgggtctgtccgggcgttgcgggattggggcctgggaacgctcggcccccggcagccgagaagcccgtgactgggctgagcagcaccatcccagccctggggcctgctgactgcccagtcccggcttcacctgcagcgaacccggagcgttgctatcctccaccggactgtcaggctctgcgcgccccgcggaggtcggcggcgaccagcagcgactgcggagcgacggcgggcggccccgggcatgtacgcccccggaggcgcagggctgcccggcgggcgccggcggaggagcccgggaggcagcgctctgcccaagcagccggagcgtagcctggcctcggccctgcctggcgccctgtctatcacggcgctgtgcactgccctcgccgagcccgcctggttgcacatccacggaggcacctgttcgcgccaggagctgggggtctccgacgtgttgggctatgtgcacccggacctgctgaaagatttctgcatgaatccccagacagtgctgctcctgcgggtcatcgccgccttctgtttcctgggcatcctgtgtagtctctccgctttccttctggatgtctttgggccgaagcatcctgctctgaagatcactcgtcgctatgccttcgcccatatcctaacggttctgcagtgtgccaccgtcattggcttttcttattgggcttctgaactcatcttggcccagcagcagcagcataagaagtaccatggatcccaggtctatgtcaccttcgccgttagcttctacctggtggcaggagctggtggagcctcaatcctggccacggcagccaacctcctgcgccactaccccacagaggaagaggagcaggcgctggagctgctctcagagatggaagagaacgagccctacccggcggaatatgaggtcatcaaccagttccagccaccccctgcttacacaccctaatgccagccctgggctctcttcctcggcagcccctccctcaactctgcagctcctctcgcacccagaggagctcctttccccagcaggcctcactggtaggatcctgaccatcttctccaaaccttccccaggagagactctgcctttagggtcatccaagtatccctgctctcagaaccggaggtccactggttttctataatgtactctttccctcctgccacatcctgcccccttcacattcacgagtcattaccagccagggaaggtcatccaagtttcctccagcatgggcgatatctttgggaccgagactttccttggagagctgctgagagcggacagtcccaaaaacaagtgtcaaagggcccaagggaaaggggactgtgccctggaggctcacttcacagggatcagtgtttgctccacagctgtagctctgggctgacgccccccagaccccttccttctcggagtgacccgcccccaggccacctgctccggggagttctgtgcactttactctttggacttctcctcacgtgtgccctggttttatggggagagggaatcgctgttgggaaggcagagcagttgcaaccctctctgcccttgcttcatgtggctggagcccaggcaaggagagcaggagccagcgtgagactgaggccccctggtgcctatcaaggaccagagtgaaggggactacatctcccagcccttcaccttttaaatatgagtggttttaaaaggaaaaaaatgaaaccaggcaacagcaacaatattctgtttttaaaatagggacaagactgttgtcactttttagacatgtatcccattccttttggctctgcaatatttggggctgtagctccttccaagcccatggtagtccctccccgagtctctcccagtagaatgcagcctcccttccctggccccttccctctcagtgacggtgactccctggggccttctcgtggaacccagaggggctgaggactgtggcctggctggcgggccagcgtggtgctcctcaggactgcagcactgagatggaacctggcctcagtttaggaacaggggccacaacagggcaggaacccaccaccctccacataggaatacaaccagtggggccacatcatgtgaggcatcagacccacactgtcagcccagcaggccgggctgtgtccttcagacccagtgctgccctagactctgactcgggactccagcttgccacgtgccctctcccctcttgaatgtactctggtcttgcagtgtgctgctgggactttcttgctcagccatcactctggtcaccttgtttgctctgggtctggctgaattttctgccctgagatctgggcataaagtggatgaaacttgaaagaccttcagtgtagatccagatggccaacctgtccttgttaagttacttgcttcttgggaatcagtgtcccctgctgagctgaaaaggaaatggattccaatctcttccaacctttaaggtgatagatagtttgagcaagactggagaatggacaacactatgaagctgtggctagaaagggactgtcatgtcccatcctttggccagattgactggggatgtccggacagatgcctgcatgggtggtgagggccacatctgcacacgagccagtggctgcttgcagttcactgctgtgatgccagagtgtgttcaaaggtgactctcctgctcttctggactcttctctcaggcaagaaaggctgcaggctgcctgctatgtgatgcctgagcacaaagccaaggaactgaactaagtctttctgttaagtcctgagtttgtcattggcaggtttacttgtggccagctctctctgcccttgggtgtctgagcaggcagaccagaagaccaggcactggacctgcatgccaaagggactggtcatctcctgaggacctgtaaatgaccctgtggactgttccgcacgatccggaacccactttttattcactccccatgtctttggccttcctcttctttctctttccctctgccatcctgacactgatagtttgtcatataaattccccgggttgtgtttttttttctagaaaaaaattaaaagggaaaacaaaaccaaaaaaaccagaaaccacgaataagaatggaaatgacaatggctgcctgtcatttttctgtcacgattttcctgatttggtttgttccctttgtctcagagaagcaggagatgttgatgaggctgtatttttttttctttttcttgtttttgagacaagagtctcgctctgtcacccgggctggagtgtaacgtggcatgatctcagctcactgcaacctctgcctcctgggttcaagcgattatcctgcctcagcctcctgagtagctgggattacaggcatgcgccactatgcccagataatttttttgtatttttagtagagacagggtttcaccatgttggccaggctggtctggaactcctaacctcaggttatccacccaccttggcctcccaaagtgctgggattataggcatgaaccaccgtgcctggccaaagatgtaatttaaaatagttagaagggacttggcatgggccagctccgtgcatggcattttcacccccagagcttcctaatcctgttttcacacaggaagtttctaggtctttctagaacagctagaaatagtagctgactcccgcccaaggcccaaccttcaaaccctgagctcttcaggctgcatcctctggtgagctatagaggagaacgtggctcctaaactctagccatcctgtgggaggaaatagacttctttgggctgtggcttgcagaacaaactacactttttttccctctattgtttaaattttatttaataatttgtgtgtttttctgtctttattttctgtatttcacgtgttccttcactccctagaaactgcactttctttgaaaccataggtaatgaatcttactaggagaggcatggggatagagacagttctgggagtgtgacctgtaagcctcctgtagggcagtgccaggccttgattgcccacgttctctccgttccttcttccttcatacatttgatcacacagcctacacccagccccgagtgtgcatcacggtaaaagagctgagggctctcttcagggagcagcccatttaggtctcttttgttgttgttagggagaatacacatctttcttggaa

SEQ ID NO: 73485 - DNA, 3099 bp, Artificial Sequence
  derived and/or modified sequence
agtgcatcggccccgggtctgtccgggcgttgcgggattggggcctgggaacgctcggcccccggcagccgagaagcccgtgactgggctgagcagcaccatcccagccctggggcctgctgactgcgaacccggagcgttgctatcctccaccggactgtcaggctctgcgcgccccgcggaggtcggcggcgaccagcagcgactgcggagcgacggcgggcggccccgggcatgtacgcccccggaggcgcagggctgcccggcgggcgccggcggaggagcccgggaggcagcgctctgcccaagcagccggagcgtagcctggcctcggccctgcctggcgccctgtctatcacggcgctgtgcactgccctcgccgagcccgcctggttgcacatccacggaggcacctgttcgcgccaggagctgggggtctccgacgtgttgggctatgtgcacccggacctgctgaaagatttctgcatgaatccccagacagtgctgctcctgcgggtcatcgccgccttctgtttcctgggcatcctgtgtagtctctccgctttccttctggatgtctttgggccgaagcatcctgctctgaagatcactcgtcgctatgccttcgcccatatcctaacggttctgcagtgtgccaccgtcattggcttttcttattgggcttctgaactcatcttggcccagcagcagcagcataagaagtaccatggatcccaggtctatgtcaccttcgccgttagcttctacctggtggcaggagctggtggagcctcaatcctggccacggcagccaacctcctgcgccactaccccacagaggaagaggagcaggcgctggagctgctctcagagatggaagagaacgagccctacccggcggaatatgaggtcatcaaccagttccagccaccccctgcttacacaccctaatgccagccctgggctctcttcctcggcagcccctccctcaactctgcagctcctctcgcacccagaggagctcctttccccagcaggcctcactggtaggatcctgaccatcttctccaaaccttccccaggagagactctgcctttagggtcatccaagtatccctgctctcagaaccggaggtccactggttttctataatgtactctttccctcctgccacatcctgcccccttcacattcacgagtcattaccagccagggaaggtcatccaagtttcctccagcatgggcgatatctttgggaccgagactttccttggagagctgctgagagcggacagtcccaaaaacaagtgtcaaagggcccaagggaaaggggactgtgccctggaggctcacttcacagggatcagtgtttgctccacagctgtagctctgggctgacgccccccagaccccttccttctcggagtgacccgcccccaggccacctgctccggggagttctgtgcactttactctttggacttctcctcacgtgtgccctggttttatggggagagggaatcgctgttgggaaggcagagcagttgcaaccctctctgcccttgcttcatgtggctggagcccaggcaaggagagcaggagccagcgtgagactgaggccccctggtgcctatcaaggaccagagtgaaggggactacatctcccagcccttcaccttttaaatatgagtggttttaaaaggaaaaaaatgaaaccaggcaacagcaacaatattctgtttttaaaatagggacaagactgttgtcactttttagacatgtatcccattccttttggctctgcaatatttggggctgtagctccttccaagcccatggtagtccctccccgagtctctcccagtagaatgcagcctcccttccctggccccttccctctcagtgacggtgactccctggggccttctcgtggaacccagaggggctgaggactgtggcctggctggcgggccagcgtggtgctcctcaggactgcagcactgagatggaacctggcctcagtttaggaacaggggccacaacagggcaggaacccaccaccctccacataggaatacaaccagtggggccacatcatgtgaggcatcagacccacactgtcagcccagcaggccgggctgtgtccttcagacccagtgctgccctagactctgactcgggactccagcttgccacgtgccctctcccctcttgaatgtactctggtcttgcagtgtgctgctgggactttcttgctcagccatcactctggtcaccttgtttgctctgggtctggctgaattttctgccctgagatctgggcataaagtggatgaaacttgaaagaccttcagtgtagatccagatggccaacctgtccttgttaagttacttgcttcttgggaatcagtgtcccctgctgagctgaaaaggaaatggattccaatctcttccaacctttaaggtgatagatagtttgagcaagactggagaatggacaacactatgaagctgtggctagaaagggactgtcatgtcccatcctttggccagattgactggggatgtccggacagatgcctgcatgggtggtgagggccacatctgcacacgagccagtggctgcttgcagttcactgctgtgatgccagagtgtgttcaaaggtgactctcctgctcttctggactcttctctcaggcaagaaaggctgcaggctgcctgctatgtgatgcctgagcacaaagccaaggaactgaactaagtctttctgttaagtcctgagtttgtcattggcaggtttacttgtggccagctctctctgcccttgggtgtctgagcaggcagaccagaagaccaggcactggacctgcatgccaaagggactggtcatctcctgaggacctgtaaatgaccctgtggactgttccgcacgatccggaacccactttttattcactccccatgtctttggccttcctcttctttctctttccctctgccatcctgacactgatagtttgtcatataaattccccgggttgtgtttttttttctagaaaaaaattaaaagggaaaacaaaaccaaaaaaaccagaaa

SEQ ID NO: 73486 - protein, 350 aa, Artificial Sequence
  derived and/or modified sequence
METNSSLPTNISGGTPAVSAGYLFLDIITYLVFAVTFVLGVLGNGLVIWVAGFRMTHTVTTISYLNLAVADFCFTSTLPFFMVRKAMGGHWPFGWFLCKFVFTIVDINLFGSVFLIALIALDRCVCVLHPVWTQNHRTVSLAKKVIIGPWVMALLLTLPVIIRVTTVPGKTGTVACTFNFSPWTNDPKERINVAVAMLTVRGIIRFIIGFSAPMSIVAVSYGLIATKIHKQGLIKSSRPLRVLSFVAAAFFLCWSPYQVVALIATVRIRELLQGMYKEIGIAVDVTSALAFFNSCLNPMLYVFMGQDFRERLIHALPASLERALTEDSTQTSDTATNSTLPSAEVELQAK

SEQ ID NO: 73487 - DNA, 1316 bp, Artificial Sequence
  derived and/or modified sequence
aatcattagagcctgagtcactctccccaggagacccagacctagaactacccagagcaagaccacagctggtgaacagtccaggagcagacaagatggagacaaattcctctctccccacgaacatctctggagggacacctgctgtatctgctggctatctcttcctggatatcatcacttatctggtatttgcagtcacctttgtcctcggggtcctgggcaacgggcttgtgatctgggtggctggattccggatgacacacacagtcaccaccatcagttacctgaacctggccgtggctgacttctgtttcacctccactttgccattcttcatggtcaggaaggccatgggaggacattggcctttcggctggttcctgtgcaaattcgtctttaccatagtggacatcaacttgttcggaagtgtcttcctgatcgccctcattgctctggaccgctgtgtttgcgtcctgcatccagtctggacccagaaccaccgcaccgtgagcctggccaagaaggtgatcattgggccctgggtgatggctctgctcctcacattgccagttatcattcgtgtgactacagtacctggtaaaacggggacagtagcctgcacttttaacttttcgccctggaccaacgaccctaaagagaggataaatgtggccgttgccatgttgacggtgagaggcatcatccggttcatcattggcttcagcgcacccatgtccatcgttgctgtcagttatgggcttattgccaccaagatccacaagcaaggcttgattaagtccagtcgtcccttacgggtcctctcctttgtcgcagcagccttttttctctgctggtccccatatcaggtggtggcccttatagccacagtcagaatccgtgagttattgcaaggcatgtacaaagaaattggtattgcagtggatgtgacaagtgccctggccttcttcaacagctgcctcaaccccatgctctatgtcttcatgggccaggacttccgggagaggctgatccacgcccttcccgccagtctggagagggccctgaccgaggactcaacccaaaccagtgacacagctaccaattctactttaccttctgcagaggtggagttacaggcaaagtgaggagggagctgggggacactttcgagctcccagctccagcttcgtctcaccttgagttaggctgagccacaggcatttcctgcttattttaggattacccactcatcagaaaaaaaaaaaaaagcctttgtgtcccctgatttggggagaataaacagatatgagttt

SEQ ID NO: 73488 - DNA, 1965 bp, Artificial Sequence
  derived and/or modified sequence
attagagcctgagtcactctccccaggagacccagacctagaactacccagagcaagaccacagctggtgaacagtccagcctgtctccagttggactagccacaattcaagtgcttgaaaaccacatgtggagcagacaagatggagacaaattcctctctccccacgaacatctctggagggacacctgctgtatctgctggctatctcttcctggatatcatcacttatctggtatttgcagtcacctttgtcctcggggtcctgggcaacgggcttgtgatctgggtggctggattccggatgacacacacagtcaccaccatcagttacctgaacctggccgtggctgacttctgtttcacctccactttgccattcttcatggtcaggaaggccatgggaggacattggcctttcggctggttcctgtgcaaattcgtctttaccatagtggacatcaacttgttcggaagtgtcttcctgatcgccctcattgctctggaccgctgtgtttgcgtcctgcatccagtctggacccagaaccaccgcaccgtgagcctggccaagaaggtgatcattgggccctgggtgatggctctgctcctcacattgccagttatcattcgtgtgactacagtacctggtaaaacggggacagtagcctgcacttttaacttttcgccctggaccaacgaccctaaagagaggataaatgtggccgttgccatgttgacggtgagaggcatcatccggttcatcattggcttcagcgcacccatgtccatcgttgctgtcagttatgggcttattgccaccaagatccacaagcaaggcttgattaagtccagtcgtcccttacgggtcctctcctttgtcgcagcagccttttttctctgctggtccccatatcaggtggtggcccttatagccacagtcagaatccgtgagttattgcaaggcatgtacaaagaaattggtattgcagtggatgtgacaagtgccctggccttcttcaacagctgcctcaaccccatgctctatgtcttcatgggccaggacttccgggagaggctgatccacgcccttcccgccagtctggagagggccctgaccgaggactcaacccaaaccagtgacacagctaccaattctactttaccttctgcagaggtggagttacaggcaaagtgaggagggagctgggggacactttcgagctcccagctccagcttcgtctcaccttgagttaggctgagccacaggcatttcctgcttattttaggattacccactcatcagaaaaaaaaaaaaaagcctttgtgtcccctgatttggggagaataaacagatatgagtttattattgacttcttttttgattttggacctcagccttgggtggtcagggtgggaaatgataggaagaagctgtcatctgcatcctagtttgcctgaaatgaacccaaataatacccattattattagtcctgaattatgagtagtgaatgatacccatcattctggcatcatgatgagtagtgtccacttccattctgaaaagtgccctgctgtgaaaaataaattatatagtcatcctaggtaaatgaaggaggagggagaagtgtgaaagagtatggcttaaatcagacaagatatacaagaagatactttatatagggcaggagcggtggctcatgcctgtaatcccagcactttgggaggccgaggcaggcggatcaccaggggtcaggaattcgagaacagcctggccaacatggtgaaaccctgtctctactaaaaatacaaaaattagctgggcgtagtggcaggctcccgtaatcccagctactcaggagaccgaggcaggagaatcgcttgaacctggaaggcggaggttgtagtgagccaagaaaacgccactacactccagcctgggtgacagagagagactccggctcag

SEQ ID NO: 73489 - DNA, 1053 bp, Artificial Sequence
  derived and/or modified sequence
atggagactaattcatcactgcctacgaatatcagcgggggtactcctgccgtctctgctggctaccttttcctggatattatcacttatttggtgtttgccgttacttttgtcctcggcgtgctaggcaacggtctggtgatttgggtggccggcttcaggatgactcatacagtcactacaataagctatctgaacctggctgtggcagacttttgttttacttctaccttgccttttttcatggtaaggaaggcaatgggggggcactggccctttggctggtttctgtgcaagtttgtgtttacaattgttgatatcaacttgttcggcagcgtcttcttaattgcactgattgcactggatagatgtgtgtgcgtacttcatccagtctggacccagaaccacaggactgtctctttggccaagaaggtgatcattgggccttgggttatggcactgctgctcacccttccggtgatcattcgggtgacgacagttcccgggaaaaccgggactgtggcctgtacgtttaatttcagcccctggactaacgatcctaaggaacgaataaatgtggccgttgcaatgttgaccgttcggggaatcatcagatttataatagggttttccgcccctatgtctatcgtcgccgtcagttatgggctcattgctaccaaaattcacaagcaagggctgattaagagttccagaccactcagagtgttgtccttcgtggcggccgcatttttcctgtgttggtcaccataccaggtcgtggctcttattgctaccgttaggattcgagagctgcttcagggcatgtacaaagaaattgggatcgcagtcgacgtgacctcagccctggcatttttcaatagttgccttaatcccatgttatacgtgtttatgggccaggactttcgggaacgcctcatacacgccctgcctgcttctttagaacgtgcactgactgaggatagcactcagactagcgataccgccacaaattctacgcttccaagcgctgaggtggagctgcaggccaagtag

SEQ ID NO: 73490 - DNA, 1053 bp, Artificial Sequence
  derived and/or modified sequence
atggagaccaattcaagcctccctaccaacatatcgggagggaccccagctgtatctgccgggtacctgttccttgatattattacatacctcgtgttcgctgtgacttttgtgcttggcgtgctcggtaacgggctggtgatatgggtcgcgggcttccggatgacgcatactgtaacaaccatctcttacctgaatctcgctgttgcagacttttgcttcacttccacacttcctttttttatggtgcggaaggcaatgggcggccactggcccttcggctggtttttatgcaagtttgttttcacaattgtcgatatcaacctcttcggcagcgtgttcctgatagccttgatcgcactggaccgttgtgtgtgcgtgctgcaccccgtctggacgcagaatcaccggaccgtgagccttgctaaaaaagtgattattggtccctgggtgatggcgctgctcctcacactcccagttataatccgcgtgacgactgtacccggcaagaccggtaccgtcgcctgcacttttaatttctccccatggactaacgacccgaaagagagaattaacgttgccgtggccatgctaaccgtgagaggaattatcagattcattatcggcttcagcgccccaatgtcaatcgtggcagtctcctatggattgatcgcaactaagattcacaaacagggactgatcaaatcatctcggcccctgagagtgctgtcttttgttgcagcagcgttttttctgtgctggagtccataccaggtggttgccctcatcgcaacagtgcgcatcagggagcttttgcagggaatgtacaaggagattggcatcgcagtggatgttacgtcggctctggccttctttaactcatgccttaatcccatgctctacgtatttatgggccaggatttcagggagagactaatccacgcacttcccgcttcactggagagagcgctaacagaggactcgacacagacttctgacaccgcaaccaattctaccttaccaagcgctgaggtcgagctgcaggctaaatag

SEQ ID NO: 73491 - DNA, 1053 bp, Artificial Sequence
  derived and/or modified sequence
atggagaccaacagcagcctgcccaccaacatcagcggcggcaccccagctgtgtctgctggctacctgttcctggacatcatcacctacctggtgtttgctgtgacctttgtgctgggcgtgctgggcaatggcctggtgatctgggtggccggcttcaggatgacccacacagtgaccaccatctcctacctgaacctggccgtggccgacttctgcttcaccagcaccctgcccttcttcatggtgaggaaggccatgggcggccactggcccttcggctggttcctgtgcaagtttgtgttcaccatcgtggacatcaacctgtttggcagcgtcttcctgattgccctgattgccctggacagatgtgtgtgtgtgctgcaccctgtgtggacccagaaccacaggacagtgtccctggccaagaaggtgatcatcggcccctgggtgatggccctgctgctgaccctgcctgtgatcatccgggtgaccaccgtgcctgggaagacaggaacagtggcctgcaccttcaacttcagcccctggaccaatgaccccaaggagcgcatcaacgtggccgtggccatgctgactgtgcggggcatcatccgcttcatcatcggcttcagcgcccccatgagcatcgtggccgtgtcctatggcctcatcgccaccaagatccacaagcagggcctcatcaagagcagccggcccctgcgggtgctgagctttgtggccgccgccttcttcctgtgctggagcccctaccaggtggtggccctgattgccaccgtgcgcatccgggagctgctgcagggcatgtacaaggagattggaattgctgtggatgtgaccagcgccctggccttcttcaacagctgcctgaaccccatgctgtatgtgttcatgggccaggacttccgggagcggctcatccacgccctgcctgccagcctggagcgggccctgacagaggacagcacccagaccagtgacacagccaccaacagcaccctgcccagcgctgaggtggagctgcaggccaagtag

SEQ ID NO: 73492 - DNA, 1053 bp, Artificial Sequence
  derived and/or modified sequence
atggagaccaacagcagcctgcccaccaacatcagcggcggcacccctgccgtgagtgcgggctacttgtttctcgacattattacctatctcgtatttgccgtcacattcgtgcttggggttttggggaacggtttggttatatgggtcgctgggtttagaatgactcacaccgttactaccatctcttatctcaatctggcagttgctgatttctgctttacatcaaccctgccgtttttcatggtgcgcaaggctatgggcggccactggccttttggctggtttctgtgtaagttcgtctttacaatcgttgatataaatcttttcggttccgtgtttctaatcgctctaatagcattggacagatgcgtgtgcgtgctccatcctgtgtggacacagaaccacagaaccgtgtcactggccaaaaaggtgatcatcgggccttgggtaatggctctgctcctcaccctgcccgtcattatcagggtcacaacagtgcccgggaagacgggcacagtggcgtgcacgtttaattttagcccgtggacaaatgaccccaaggagcggattaatgtcgccgtagccatgctgacagtgaggggtatcattaggttcatcatcgggttttccgcccccatgagcatcgttgccgtgagctacgggctgatagccacaaaaatacacaaacagggcctgataaagtcgagtcggccacttcgtgttctctctttcgtcgccgcagcgttcttcctgtgctggtccccgtaccaggtcgtggctctgattgccactgttcgcattagggagctgctgcaaggcatgtacaaggaaattgggattgccgtcgacgtgacctcggccctagccttctttaacagttgtttaaaccctatgttgtacgtatttatgggccaggacttccgcgagcgtttgatccacgctctcccagcctccctggaacgggccctcactgaagactctacacaaacctcagatacagccacaaactccacactaccgagcgctgaagtggagttgcaggcaaagtag

SEQ ID NO: 73493 - DNA, 1053 bp, Artificial Sequence
  derived and/or modified sequence
atggagaccaacagcagcctgcccaccaacatcagcggcggcacccccgctgtttctgctggatacctgtttttggacattatcacctacctggtcttcgctgtgacattcgtgctgggggtgcttgggaatggactggtcatttgggttgcaggctttaggatgactcataccgttactaccatatcctacctcaacctagccgtcgccgatttctgcttcacttctactctgcctttttttatggtccgcaaggccatggggggacactggcctttcgggtggttcttgtgtaaatttgtttttacgatagtggatatcaacctgtttggttcagtgttcttgatagcactgatcgctctagatcggtgcgtgtgcgtgctgcaccccgtctggacacaaaatcaccgcacagtcagcttggcaaaaaaagtcatcatcgggccttgggtgatggctctcttactgactttacctgtgataattcgagttaccaccgtccccggaaaaactggcaccgtggcctgcacatttaacttcagcccctggaccaacgatccgaaggaacggatcaatgtagctgtcgctatgctaaccgtgagaggcatcatccgatttattatcggcttttctgccccaatgtcgatcgtggctgtatcctacggcttgattgcaaccaaaatacacaagcagggcctaatcaaaagcagcagaccactacgggttctgtctttcgtcgccgctgcatttttcctttgttggtccccgtatcaggtggtcgcactgattgctaccgtccgaattcgcgagttgctccaaggcatgtacaaggagatcggcattgctgtggatgtgacgtctgctctcgccttcttcaactcttgcctcaatcccatgctgtacgtgttcatgggccaggacttccgcgagaggttaatccatgcactgcctgcgtcacttgaacgggctctgacggaagactccacacagacatccgataccgccactaattcgacccttccatccgccgaggtcgagctgcaggctaagtag

SEQ ID NO: 73494 - DNA, 1053 bp, Artificial Sequence
  derived and/or modified sequence
atggaaaccaactcaagcttacccaccaacattagtggcggtacgcccgcagtttcagccggttatttgttcttagacatcatcacctatctggtgttcgccgtcacgttcgtgctaggtgtcctgggaaacggtttagtgatctgggttgccggattccgtatgacacatacagtgacaacgatttcctacttaaacctggcagttgccgacttctgcttcacctctaccctgcctttttttatggtgagaaaggcaatggggggacactggccatttggctggttcctgtgtaaattcgtgtttaccatcgtggatataaacttgttcggtagcgtatttcttatagctcttatcgccctcgacaggtgcgtctgtgtcctgcatccggtgtggactcaaaatcacaggacagtgagcttagccaaaaaagtgataatcggcccttgggtgatggccttacttttaacgctccctgtgattatacgtgttacgacagtgcctggaaaaacaggtacggtcgcttgtacattcaatttttccccatggactaatgatcctaaggaaaggatcaacgttgcagtggccatgctgacagtgcggggtatcattcgttttattatcggattttccgcacccatgtctattgttgccgtctcttacgggctcatagcaacaaaaatacataaacagggtttaattaaatccagtcgaccattgagggttttaagctttgtagcggctgcatttttcttatgttggagcccttatcaggttgtagccttaatcgccacagtcagaattagagagctgctccagggcatgtataaggagatcggtatcgccgtggatgtgaccagcgctctagctttttttaattcctgtcttaaccccatgctttatgtgtttatggggcaggactttcgcgagcgactgatccacgccctccctgctagtctggagcgggcattgacagaagactccacccaaacgtctgatactgctaccaacagcacccttccttcagccgaagtggagctgcaagccaagtag

SEQ ID NO: 73495 - DNA, 1053 bp, Artificial Sequence
  derived and/or modified sequence
atggagaccaactcctcattgcctactaacatctctgggggtacacccgcagtttctgctggatacctgtttctggacatcataacctatctcgtgtttgccgttacattcgtgctgggcgtgttaggcaacggacttgtgatttgggtggcaggttttaggatgacccatacagtcactacgatttcctatcttaacctggccgtcgccgacttctgttttacctcaaccctgcccttcttcatggtgcggaaggctatgggaggacactggccctttgggtggtttttatgcaaattcgtcttcactattgtagatatcaacttatttggctccgtgtttttgatcgcattaattgcactggataggtgcgtgtgtgtccttcacccagtatggacacagaaccaccggacggtgtctcttgccaagaaggttattattggcccttgggtgatggctctgctgttgactctcccagtgatcatcagggttaccaccgtccccggtaaaacgggaaccgtggcttgtacttttaatttctccccctggacaaatgacccgaaggagcgcattaatgtggccgtggccatgctcacagtgagaggcatcatcaggttcattatcggattcagcgcacccatgtccatcgtggctgtatcatacgggctgattgctacaaaaattcacaagcagggacttatcaagagctccagacctctccgcgttctgtcatttgtggcagccgcattctttttgtgctggagtccctatcaggtggtcgccctaatcgccacagtcagaatcagggagctcctgcagggaatgtataaggagatcggtattgccgtggatgtcacttcagctcttgccttcttcaactcatgccttaaccccatgctctacgtcttcatggggcaggacttccgggagaggctcatccacgccctacccgcaagcttggaacgggcattgactgaagattctacacagacaagtgacactgccacaaattcgacacttccctccgcagaggtcgaactgcaggctaagtag

SEQ ID NO: 73496 - DNA, 1053 bp, Artificial Sequence
  derived and/or modified sequence
atggagaccaacagcagcctgcccaccaacatcagcggcggcacccccgccgtgagcgccggctacctgttcctggacatcatcacctacctggtgttcgccgtgaccttcgtgctgggcgtgctgggcaacggcctggtgatctgggtggccggcttcagaatgacccacaccgtgaccaccatcagctacctgaacctggccgtggccgacttctgcttcaccagcaccctgcccttcttcatggtgagaaaggccatgggcggccactggcccttcggctggttcctgtgcaagttcgtgttcaccatcgtggacatcaacctgttcggcagcgtgttcctgatcgccctgatcgccctggacagatgcgtgtgcgtgctgcaccccgtgtggacccagaaccacagaaccgtgagcctggccaagaaggtgatcatcggcccctgggtgatggccctgctgctgaccctgcccgtgatcatcagagtgaccaccgtgcccggcaagaccggcaccgtggcctgcaccttcaacttcagcccctggaccaacgaccccaaggagagaatcaacgtggccgtggccatgctgaccgtgagaggcatcatcagattcatcatcggcttcagcgcccccatgagcatcgtggccgtgagctacggcctgatcgccaccaagatccacaagcagggcctgatcaagagcagcagacccctgagagtgctgagcttcgtggccgccgccttcttcctgtgctggagcccctaccaggtggtggccctgatcgccaccgtgagaatcagagagctgctgcagggcatgtacaaggagatcggcatcgccgtggacgtgaccagcgccctggccttcttcaacagctgcctgaaccccatgctgtacgtgttcatgggccaggacttcagagagagactgatccacgccctgcccgccagcctggagagagccctgaccgaggacagcacccagaccagcgacaccgccaccaacagcaccctgcccagcgccgaggtggagctgcaggccaagtag

SEQ ID NO: 73497 - protein, 471 aa, Artificial Sequence
  derived and/or modified sequence
MPSETHAMLATLARVAALRRTCLFSGRGGGRGLWTGRPQSDMNNIKPLEGVKILDLTRVLAGPFATMNLGDLGAEVIKVERPGAGDDTRTWGPPFVGTESTYYLSVNRNKKSIAVNIKDPKGVKIIKELAAVCDVFVENYVPGKLSAMGLGYEDIDEIAPHIIYCSITGYGQTGPISQRAGYDAVASAVSGLMHITGPENGDPVRPGVAMTDLATGLYAYGAIMAGLIQKYKTGKGLFIDCNLLSSQVACLSHIAANYLIGQKEAKRWGTAHGSIVPYQAFKTKDGYIVVGAGNNQQFATVCKILDLPELIDNSKYKTNHLRVHNRKELIKILSERFEEELTSKWLYLFEGSGVPYGPINNMKNVFAEPQNAVSGFQSLLHSLAHGPFLHLQGSARVLHNGLVMEMEHPTVGKISVPGPAVRYSKFKMSEARPPPLLGQHTTHILKEVLRYDDRAIGELLSAGVVDQHETH

SEQ ID NO: 73498 - DNA, 1416 bp, Artificial Sequence
  derived and/or modified sequence
atgcctagcgaaacccacgcgatgctcgcgacactagcccgcgttgcagccctccgccgtacctgcttgttctccggaagagggggaggaagggggctgtggactggcaggccgcaaagcgatatgaataacatcaaacccctggagggggttaaaatactggatttgacccgagtcctggccggaccttttgcaacaatgaacctcggagacctgggggccgaagtgattaaagtggagagaccaggggcaggggatgatacaagaacgtggggacccccttttgtcggaacggaatccacttactatctcagtgtgaaccgaaataaaaaaagtatcgctgtgaacatcaaagatcccaaaggcgttaagattattaaggaacttgctgctgtgtgcgacgtgtttgtcgaaaattatgtgcccgggaagctgtctgccatggggctcgggtacgaggatatcgacgagatcgcccctcacattatctattgttctattacgggctacggtcagaccgggcccatatcacagcgggcaggctacgatgctgtggctagcgccgtgtctggcctaatgcatattactgggcccgaaaatggcgatcccgtacgccccggggttgcgatgactgatctagctacaggcctgtacgcgtatggtgctatcatggccgggctgatccagaaatataaaacaggtaaggggctgttcatcgactgtaacctcttgagttcacaggttgcctgcctgtctcacatcgcagcaaattatctcataggacagaaggaggcgaagaggtggggtactgcacacggatctatagtcccctaccaggctttcaagaccaaggatggttatattgttgtcggcgccgggaacaatcagcagttcgccactgtgtgcaaaattctggatctcccagagctgatagataattctaagtacaagactaatcatctccgggtgcacaaccggaaggagctcatcaagatcctatcagagcgttttgaagaagaactgacgagcaaatggctctatctttttgagggaagcggagtcccttatgggccaattaacaatatgaagaacgtgttcgcagaacctcaaaatgccgtttctggattccagtctttgctccattcattggcccacggaccgtttttacatttgcagggtagtgctcgggtgcttcacaatggacttgtgatggagatggagcaccctacagtcgggaaaatatccgtgcccggacccgcagtccggtactccaaattcaaaatgagcgaagcccggccccctccacttctgggccagcacacaactcacatcctgaaagaggtactgaggtacgacgaccgggctatcggagagctactatctgctggggtggtggatcagcacgagactcactag

SEQ ID NO: 73499 - DNA, 1416 bp, Artificial Sequence
  derived and/or modified sequence
atgcccagcgagacccacgccatgctggccaccctggcccgggtggccgccctgcggaggacctgcctcttcagcggccggggcggcggccggggcctgtggacaggccggccccagagcgacatgaacaacatcaagcccctggagggcgtgaagatcctggacctgaccagggtgctggccggcccctttgccaccatgaacctgggggacctgggcgctgaggtgatcaaggtggagaggcctggagctggagatgacaccaggacctggggccccccatttgtgggcacagagagcacctactacctgtctgtgaacagaaacaagaagagcattgctgtgaacatcaaggaccccaagggcgtgaagatcatcaaggagctggccgctgtgtgtgatgtgtttgtggagaactacgtgcctgggaagctgagcgccatgggcctgggctatgaagatattgatgagatcgccccccacatcatctactgcagcatcaccggctacggccagacaggccccatcagccagagagctggctatgatgctgtggccagcgctgtgtctggcctgatgcacatcaccggcccagaaaatggagaccctgtgcggcctggggtggccatgacagacctggccaccggcctgtatgcctacggggccatcatggccggcctcatccagaagtacaagacaggcaagggcctcttcatcgactgcaacctgctgagcagccaggtggcctgcctgagccacatcgccgccaactacctgattggccagaaggaggccaagcgctggggcacagcccacggcagcatcgtgccctaccaggccttcaagaccaaggatggctacatcgtggtgggcgccggcaacaaccagcagtttgccaccgtgtgcaagatcctggacctgcctgagctgattgacaacagcaagtacaagaccaaccacctgcgggtgcacaacaggaaggagctgatcaagatcctgtctgaaagatttgaggaggagctgaccagcaagtggctgtacctgtttgagggcagcggcgtgccctacggccccatcaacaacatgaagaatgtgtttgctgagccccagaatgctgtgtctggcttccagagcctgctgcacagcctggcccacggccccttcctgcacctgcagggcagcgcccgggtgctgcacaacggcctggtgatggagatggagcaccccaccgtgggcaagatctctgtgcccggccctgctgtgcgctacagcaagttcaagatgtctgaggcccggcccccacccctgctgggccagcacaccacccacatcctgaaggaggtgctgcgctatgatgaccgggccatcggggagctgctgtctgctggggtggtggaccagcacgagacccactag

SEQ ID NO: 73500 - DNA, 1416 bp, Artificial Sequence
  derived and/or modified sequence
atgcccagcgagacccacgccatgctggccaccctggcccgggtggccgcgcttcgccgcacatgcctgttctctgggcgcggtgggggaagaggactctggacggggcggcctcagagcgatatgaataatatcaagccactagagggcgtaaagattcttgatttgacaagagtgctggctggtcccttcgctacaatgaatttaggtgacctgggtgcggaagtcattaaagtggagcgccccggcgccggggatgacactagaacgtggggccctccgtttgtaggcaccgaatctacctattaccttagcgtgaatcggaataaaaagtcaatcgctgtcaatattaaggatccaaagggtgtcaaaatcattaaggaactggccgcagtttgcgacgtttttgtggaaaactacgtgcctggaaaattatctgcgatgggactggggtatgaggacattgacgaaatcgcacctcacataatctactgttccatcacaggatacgggcagactgggccaatttctcagagggcgggatacgatgccgtcgcatccgctgtttcggggttgatgcatatcaccggtcccgaaaacggggatcctgttcggcccggagttgcgatgacggacctcgcgacagggctgtatgcttatggcgcaattatggctggtctgatacaaaagtataagacgggcaagggcctttttattgattgtaacctgctgtcctcacaggtggcgtgcttatctcacatagccgcaaattacctcataggacagaaggaagccaaaaggtgggggaccgcccacggatctatcgtgccatatcaagcgttcaaaaccaaggatggatacatcgtcgtgggagccgggaacaaccagcaattcgctaccgtgtgtaagatcttggacctgcctgagctgatcgacaattcgaaatataagacaaaccaccttagggttcataaccgcaaagagctgattaagatcttgtcagaacggtttgaggaagagttaacctcgaaatggctgtacctgtttgagggttccggtgtgccatacgggccgatcaacaatatgaaaaacgtcttcgccgaaccccagaacgcggtgtccggttttcagtcactcctacactctctggcccacggcccatttctgcacctgcagggttcagcccgtgtgctccataacggccttgttatggaaatggaacacccaacagtgggcaagatttccgtgccaggccccgcggtgcggtatagcaagtttaagatgtcggaggccagaccaccaccgctgctgggacagcacacaacacatatcttaaaagaggtcctccgctacgacgacagagctattggagagttactgagcgccggagtggtggaccagcacgaaacccactag

SEQ ID NO: 73501 - DNA, 1416 bp, Artificial Sequence
  derived and/or modified sequence
atgccttcagagacccatgcaatgctcgctacgctagccagggttgctgccctcagacggacctgccttttctctggtcgtggaggtggacgagggttgtggactggaagacctcagtctgacatgaataatatcaaaccactggaaggcgtaaaaattctcgatctgacgagggtgcttgctggcccatttgccaccatgaacttaggggacctgggagccgaagtgataaaagtggagcggccaggcgctggggacgatactcgtacgtggggccctcctttcgtgggaaccgagagcacttattacctgagtgtaaatagaaacaaaaagtccattgccgtgaatatcaaggatccaaagggagtgaagataattaaggagctggcagcagtgtgtgacgtcttcgtggagaattatgtgccagggaaactttctgctatgggcctgggttatgaagatatagacgagattgctccccacataatctactgctccatcaccggctacggacagactgggcctatcagccagagagctggatacgatgctgtggcctcggcagtatctgggttaatgcacatcaccggcccagagaacggcgacccagtccgaccaggtgtggcaatgaccgatctggccacaggactgtatgcttatggtgccatcatggcagggctgatccagaaatataaaacgggtaaaggcctgttcatcgattgcaatctgttgagtagccaggtagcctgtctgtcccatattgccgctaactatctgatcgggcagaaagaggccaaacgatggggtaccgcccacggatcaatcgtcccctatcaagcattcaagaccaaagatggctacatcgtagtgggcgcaggcaataaccagcagtttgcaaccgtgtgtaaaattctggacctgccagagttgatcgataactcaaagtacaagacgaatcacctaagagtgcacaaccgtaaggaactgatcaagattctttctgagcgtttcgaagaagaactgaccagcaagtggctgtatctcttcgaggggtccggggttccctatggccctattaacaacatgaagaatgtttttgccgaaccgcaaaatgctgtgtcaggctttcagtccctcctgcatagcctggctcacggccctttcctgcacctgcagggatctgccagagtactccacaacggacttgttatggaaatggaacatccaaccgttggaaagataagtgtgcccggaccggctgtccggtattcaaagtttaagatgagtgaggcccgtccacctcccctactgggccaacataccacacacatcctgaaagaagtgctgcggtatgacgacagagccatcggcgagctcctgtcagcaggagttgtggatcaacacgagacacactag

SEQ ID NO: 73502 - DNA, 1719 bp, Artificial Sequence
  derived and/or modified sequence
agttcgccgcttgcaccgggaccgatgccatctgagacgcacgcgatgctggcgacgctggcgagggtggcagctctgcgcagaacctgcctcttctccggccggggcggcgggagggggctgtggactggccgcccgcagtcagatatgaacaatataaagccattggaaggggtaaaaattctggatctaacaagagtcctggcgggaccttttgctactatgaatttaggagatcttggagcagaagttataaaagtggagagaccaggagctggtgatgatacacgaacttgggggccaccttttgttgggacagaaagtacatattatctcagtgttaaccgaaataaaaaaagtattgctgttaatatcaaggatccaaaaggggtgaaaatcatcaaagagcttgcagctgtttgtgatgtgtttgtggaaaactatgtccctggcaaactgtctgcaatgggcctgggatatgaagatatagacgagattgctcctcacatcatctattgttccatcacagggtatggtcagacaggtccaatttctcagcgagctggttatgatgctgttgcctcggctgtttctggtctgatgcacatcacagggcctgagaatggagatccagttcgcccaggagtagctatgactgatcttgccactggcctgtatgcatatggagctattatggctggattgatacaaaaatacaaaactgggaaaggactgttcattgattgtaacctactgtcatcccaggtggcgtgtttgtctcacatagctgcaaattatcttattggtcaaaaggaagcaaaacgttggggtacagctcatggcagtatcgttccttaccaggcttttaaaaccaaggatggctatattgtagttggagcaggaaataaccagcagtttgccaccgtctgcaagatcttggatttgcctgagttgattgataattccaagtataaaactaaccaccttcgggtacacaatagaaaagagcttattaaaatattatctgaacggtttgaagaagaactgaccagcaagtggttatatctttttgaaggcagtggagtcccgtatggcccaatcaacaacatgaagaatgtatttgcagaacctcagaacgctgtctctggcttccaaagcctgctgcattccttggcccatggccccttccttcatcttcaaggatcagcaagggtattacacaatggcctcgttatggagatggagcatccaactgtggggaagatttccgtcccaggcccagctgtgagatacagtaagttcaagatgtcagaggccaggccgcccccgctgctcgggcagcacacaacgcacatcctgaaggaggtcctgagatacgatgacagggccatcggggagctgctcagcgctggagtggtggaccaacatgaaactcactgacaaaggaaaagggctcttcctcataacctcgatccgaatacactggcaaaggcaacactttgcttggacccttctccccagttctgataccactaaaaagaagatttagagtaactccagatttcttacatggcatctccagaatggctctggtattaatgaatctagtgccttttaaatgtatcccacgttttgttccctaccatcttttttttcagatgatgatttcattatggatttgtgggatttttaaaaataaagttttaatttttttcctgg

SEQ ID NO: 73503 - DNA, 1416 bp, Artificial Sequence
  derived and/or modified sequence
atgcccagcgagacccacgccatgctggccaccctggccagagtggccgccctgagaagaacctgcctgttcagcggcagaggcggcggcagaggcctgtggaccggcagaccccagagcgacatgaacaacatcaagcccctggagggcgtgaagatcctggacctgaccagagtgctggccggccccttcgccaccatgaacctgggcgacctgggcgccgaggtgatcaaggtggagagacccggcgccggcgacgacaccagaacctggggcccccccttcgtgggcaccgagagcacctactacctgagcgtgaacagaaacaagaagagcatcgccgtgaacatcaaggaccccaagggcgtgaagatcatcaaggagctggccgccgtgtgcgacgtgttcgtggagaactacgtgcccggcaagctgagcgccatgggcctgggctacgaggacatcgacgagatcgccccccacatcatctactgcagcatcaccggctacggccagaccggccccatcagccagagagccggctacgacgccgtggccagcgccgtgagcggcctgatgcacatcaccggccccgagaacggcgaccccgtgagacccggcgtggccatgaccgacctggccaccggcctgtacgcctacggcgccatcatggccggcctgatccagaagtacaagaccggcaagggcctgttcatcgactgcaacctgctgagcagccaggtggcctgcctgagccacatcgccgccaactacctgatcggccagaaggaggccaagagatggggcaccgcccacggcagcatcgtgccctaccaggccttcaagaccaaggacggctacatcgtggtgggcgccggcaacaaccagcagttcgccaccgtgtgcaagatcctggacctgcccgagctgatcgacaacagcaagtacaagaccaaccacctgagagtgcacaacagaaaggagctgatcaagatcctgagcgagagattcgaggaggagctgaccagcaagtggctgtacctgttcgagggcagcggcgtgccctacggccccatcaacaacatgaagaacgtgttcgccgagccccagaacgccgtgagcggcttccagagcctgctgcacagcctggcccacggccccttcctgcacctgcagggcagcgccagagtgctgcacaacggcctggtgatggagatggagcaccccaccgtgggcaagatcagcgtgcccggccccgccgtgagatacagcaagttcaagatgagcgaggccagacccccccccctgctgggccagcacaccacccacatcctgaaggaggtgctgagatacgacgacagagccatcggcgagctgctgagcgccggcgtggtggaccagcacgagacccactag

SEQ ID NO: 73504 - protein, 397 aa, Artificial Sequence
  derived and/or modified sequence
MPSETHAMLATLARVAALRRTCLFSGRGGGRGLWTGRPQSDMNNIKPLEGVKILDLTRVLAGPFATMNLGDLGAEVIKVERPGAGDDTRTWGPPFVGTESTYYLSVNRNKKSIAVNIKDPKGVKIIKELAAVCDVFVENYVPGKLSAMGLGYEDIDEIAPHIIYCSITGYGQTGPISQRAGYDAVASAVSGLMHITGPEVACLSHIAANYLIGQKEAKRWGTAHGSIVPYQAFKTKDGYIVVGAGNNQQFATVCKILDLPELIDNSKYKTNHLRVHNRKELIKILSERFEEELTSKWLYLFEGSGVPYGPINNMKNVFAEPQVLHNGLVMEMEHPTVGKISVPGPAVRYSKFKMSEARPPPLLGQHTTHILKEVLRYDDRAIGELLSAGVVDQHETH

SEQ ID NO: 73505 - DNA, 1194 bp, Artificial Sequence
  derived and/or modified sequence
atgccctcagaaactcacgccatgctggccactctggcccgcgtggctgcactcagacgaacctgtctgttcagcgggcgcggaggaggacgggggctctggacaggcagaccacaatctgatatgaacaacattaagcctcttgaaggtgtgaagattctcgatctgactagggtgctggccgggcccttcgctactatgaacctgggcgatctgggtgccgaggtaatcaaggtcgagagaccgggagcaggggacgataccagaacatggggacccccatttgtgggcacggaaagtacctattatctatcagtgaaccgaaacaagaaatctattgcagtgaatatcaaagatccgaaaggggtgaagatcatcaaagaactcgccgctgtgtgtgatgtctttgtggagaactacgttcccgggaagctgtcggcaatggggctcggctatgaggatatcgacgagattgctccccatatcatctactgctccattaccggatacggccagaccggccccatatcacagagggccggttacgatgctgtagcttccgcagtgagtgggttgatgcatattacaggacctgaggtggcatgcctcagccacatcgccgctaattatctgatcgggcagaaggaggcgaagagatggggaacagcgcatggcagcattgtgccttaccaagccttcaaaactaaagacggatatatagttgtgggggctggaaataaccagcagttcgctaccgtctgtaaaatactggacttaccagaactgatcgataacagcaagtataagaccaaccatttaagggtccacaatcggaaagagttaattaagatccttagtgaaagattcgaagaggaattgacgagcaaatggttgtatcttttcgaagggagcggggtgccgtatgggcctataaacaatatgaaaaacgtgttcgcagaacctcaagtgctccacaacggcctcgtaatggagatggagcatccgacagttggcaaaatcagcgtccctggacccgctgtgagatattctaagtttaagatgtcggaggccaggcctccacccctattgggacagcataccacgcatatcctcaaggaagttctgagatatgatgatagggcgatcggggagctgctctcagctggagttgtggatcagcatgaaacgcattag

SEQ ID NO: 73506 - DNA, 1194 bp, Artificial Sequence
  derived and/or modified sequence
atgcccagcgagacccacgccatgctggccaccctggcccgggtggccgccctgcggaggacctgcctcttcagcggccggggcggcggccggggcctgtggacaggccggccccagagcgacatgaacaacatcaagcccctggagggcgtgaagatcctggacctgaccagggtgctggccggcccctttgccaccatgaacctgggggacctgggcgctgaggtgatcaaggtggagaggcctggagctggagatgacaccaggacctggggccccccatttgtgggcacagagagcacctactacctgtctgtgaacagaaacaagaagagcattgctgtgaacatcaaggaccccaagggcgtgaagatcatcaaggagctggccgctgtgtgtgatgtgtttgtggagaactacgtgcctgggaagctgagcgccatgggcctgggctatgaagatattgatgagatcgccccccacatcatctactgcagcatcaccggctacggccagacaggccccatcagccagagagctggctatgatgctgtggccagcgctgtgtctggcctgatgcacatcaccggccctgaggtggcctgcctgagccacatcgccgccaactacctgattggccagaaggaggccaagcgctggggcacagcccacggcagcatcgtgccctaccaggccttcaagaccaaggatggctacatcgtggtgggcgccggcaacaaccagcagtttgccaccgtgtgcaagatcctggacctgcctgagctgattgacaacagcaagtacaagaccaaccacctgcgggtgcacaacaggaaggagctgatcaagatcctgtctgaaagatttgaggaggagctgaccagcaagtggctgtacctgtttgagggcagcggcgtgccctacggccccatcaacaacatgaagaatgtgtttgctgagccccaggtgctgcacaacggcctggtgatggagatggagcaccccaccgtgggcaagatctctgtgcccggccctgctgtgcgctacagcaagttcaagatgtctgaggcccggcccccacccctgctgggccagcacaccacccacatcctgaaggaggtgctgcgctatgatgaccgggccatcggggagctgctgtctgctggggtggtggaccagcacgagacccactag

SEQ ID NO: 73507 - DNA, 1194 bp, Artificial Sequence
  derived and/or modified sequence
atgcccagcgagacccacgccatgctggccaccctggcccgggtggctgctttacgacgaacgtgcctatttagcgggagaggaggtgggcgggggctgtggacgggaaggccccagagtgatatgaacaatattaaaccactggaaggggttaaaatccttgatctaacgcgggttctagccggtccttttgccaccatgaacttgggagatctgggtgccgaggtaataaaggtcgaacggccgggcgccggggacgacacccgaacctggggcccaccatttgtaggcacagagagcacatattacctctccgtcaatcggaataaaaagtctattgctgtcaatatcaaggacccaaagggcgtgaaaatcatcaaggagctcgccgctgtctgtgatgtgtttgtagagaattacgttcccggtaagctgtccgccatgggattagggtatgaggacattgacgagatcgctccacacataatctactgtagcatcacagggtatggccagacaggtccgatttcacagcgcgctggctatgacgccgtggccagcgcagtgagtgggctgatgcacattaccggacccgaagtcgcttgcctctcacatatcgcggcgaattatctgatcggccaaaaggaggccaagcgctggggcacagctcacggatccatcgtaccatatcaggccttcaagacaaaggatgggtacattgtggtgggggcaggaaataaccagcagtttgctacagtttgtaagatccttgatttgcccgagttgatagataacagtaaatacaagaccaaccacctccgcgttcataatcggaaggagctgatcaagatcctgtctgagcggtttgaagaagagctgacatcaaagtggctctacctatttgagggtagcggagtgccctatggcccgatcaataacatgaagaacgtgttcgccgagccgcaggtactccataacggccttgtgatggagatggagcatcccactgtcggcaagatctccgtgcctggccccgcggtccgttattccaagtttaagatgagtgaagcccgaccacctcccctacttggtcaacacaccacccacattttgaaggaagtgttacgctacgacgatcgggccatcggtgagttgttatcagcaggggtggtggaccagcacgagactcactag

SEQ ID NO: 73508 - DNA, 1194 bp, Artificial Sequence
  derived and/or modified sequence
atgcctagcgaaactcatgcgatgctggccaccctggccagagtggctgctctcaggagaacctgtctgttctctgggagaggcggaggaagaggactgtggactggccgaccccagtctgacatgaacaatattaagccattggagggtgtcaaaatcctggatctaaccagagtgcttgcgggaccattcgccaccatgaacctaggggatttaggcgctgaggtgatcaaggtggaaagaccaggggcaggcgatgacacccgcacttgggggcctcctttcgtgggaaccgagagcacttactatttatcagtgaatcgaaacaagaaatccattgcagtaaatattaaggatcccaaaggagtgaaaattatcaaggagctagctgccgtttgtgatgtatttgtggagaattatgtccctgggaagctttctgcgatgggacttggatacgaagacattgatgagatcgcccctcacatcatctactgcagcatcactgggtacgggcaaaccggcccaatcagccaacgcgctggctacgacgccgtcgcctcagcggtctcaggcctcatgcatatcacaggacccgaggtcgcttgtctgagccacatagccgctaactacttgataggccagaaggaggcaaaaagatggggaaccgctcatggcagcatcgttccatatcaggcattcaagactaaggatgggtacatcgtggtgggcgcagggaataaccaacaattcgccactgtatgcaagattttggacctacccgagctcatagacaacagtaagtataaaactaaccatttacgtgttcataataggaaggaactcatcaaaatccttagcgagcgttttgaggaggagttaacctcgaaatggctgtacttgtttgaaggcagtggtgtaccctatggtcctatcaataacatgaagaatgtgtttgccgagccacaggtccttcacaacggcctcgttatggagatggagcatcctaccgtcgggaaaatctccgtgcctgggcctgctgtgagatacagcaagttcaaaatgagcgaagctcggccaccacccctcttgggccaacacactacccacattctgaaagaggtgctgcgatatgatgaccgcgcaatcggcgaactgctatccgctggcgtcgtggatcaacacgaaacccattag

SEQ ID NO: 73509 - DNA, 1369 bp, Artificial Sequence
  derived and/or modified sequence
gttcgccgcttgcaccgggaccgatgccatctgagacgcacgcgatgctggcgacgctggcgagggtggcagctctgcgcagaacctgcctcttctccggccggggcggcgggagggggctgtggactggccgcccgcagtcagatatgaacaatataaagccattggaaggggtaaaaattctggatctaacaagagtcctggcgggaccttttgctactatgaatttaggagatcttggagcagaagttataaaagtggagagaccaggagctggtgatgatacacgaacttgggggccaccttttgttgggacagaaagtacatattatctcagtgttaaccgaaataaaaaaagtattgctgttaatatcaaggatccaaaaggggtgaaaatcatcaaagagcttgcagctgtttgtgatgtgtttgtggaaaactatgtccctggcaaactgtctgcaatgggcctgggatatgaagatatagacgagattgctcctcacatcatctattgttccatcacagggtatggtcagacaggtccaatttctcagcgagctggttatgatgctgttgcctcggctgtttctggtctgatgcacatcacagggcctgaggtggcgtgtttgtctcacatagctgcaaattatcttattggtcaaaaggaagcaaaacgttggggtacagctcatggcagtatcgttccttaccaggcttttaaaaccaaggatggctatattgtagttggagcaggaaataaccagcagtttgccaccgtctgcaagatcttggatttgcctgagttgattgataattccaagtataaaactaaccaccttcgggtacacaatagaaaagagcttattaaaatattatctgaacggtttgaagaagaactgaccagcaagtggttatatctttttgaaggcagtggagtcccgtatggcccaatcaacaacatgaagaatgtatttgcagaacctcaggtattacacaatggcctcgttatggagatggagcatccaactgtggggaagatttccgtcccaggcccagctgtgagatacagtaagttcaagatgtcagaggccaggccgcccccgctgctcgggcagcacacaacgcacatcctgaaggaggtcctgagatacgatgacagggccatcggggagctgctcagcgctggagtggtggaccaacatgaaactcactgacaaaggaaaagggctcttcctcataacctcgatccgaatacactggcaaaggcaacactttgcttggacccttctccccagttctgataccactaaaaagaagatttagagtaactccagatttcttacatggcatctccagaatggctctg

SEQ ID NO: 73510 - DNA, 1194 bp, Artificial Sequence
  derived and/or modified sequence
atgcccagcgagacccacgccatgctggccaccctggccagagtggccgccctgagaagaacctgcctgttcagcggcagaggcggcggcagaggcctgtggaccggcagaccccagagcgacatgaacaacatcaagcccctggagggcgtgaagatcctggacctgaccagagtgctggccggccccttcgccaccatgaacctgggcgacctgggcgccgaggtgatcaaggtggagagacccggcgccggcgacgacaccagaacctggggcccccccttcgtgggcaccgagagcacctactacctgagcgtgaacagaaacaagaagagcatcgccgtgaacatcaaggaccccaagggcgtgaagatcatcaaggagctggccgccgtgtgcgacgtgttcgtggagaactacgtgcccggcaagctgagcgccatgggcctgggctacgaggacatcgacgagatcgccccccacatcatctactgcagcatcaccggctacggccagaccggccccatcagccagagagccggctacgacgccgtggccagcgccgtgagcggcctgatgcacatcaccggccccgaggtggcctgcctgagccacatcgccgccaactacctgatcggccagaaggaggccaagagatggggcaccgcccacggcagcatcgtgccctaccaggccttcaagaccaaggacggctacatcgtggtgggcgccggcaacaaccagcagttcgccaccgtgtgcaagatcctggacctgcccgagctgatcgacaacagcaagtacaagaccaaccacctgagagtgcacaacagaaaggagctgatcaagatcctgagcgagagattcgaggaggagctgaccagcaagtggctgtacctgttcgagggcagcggcgtgccctacggccccatcaacaacatgaagaacgtgttcgccgagccccaggtgctgcacaacggcctggtgatggagatggagcaccccaccgtgggcaagatcagcgtgcccggccccgccgtgagatacagcaagttcaagatgagcgaggccagacccccccccctgctgggccagcacaccacccacatcctgaaggaggtgctgagatacgacgacagagccatcggcgagctgctgagcgccggcgtggtggaccagcacgagacccactag

SEQ ID NO: 73511 - protein, 445 aa, Artificial Sequence
  derived and/or modified sequence
MPSETHAMLATLARVAALRRTCLFSGRGGGRGLWTGRPQSDMNNIKPLEGVKILDLTRVLAGPFATMNLGDLGAEVIKVERPGAGDDTRTWGPPFVGTESTYYLSVNRNKKSIAVNIKDPKGVKIIKELAAVCDVFVENYVPGKLSAMGLGYEDIDEIAPHIIYCSITGYGQTGPISQRAGYDAVASAVSGLMHITGPENGDPVRPGVAMTDLATGLYAYGAIMAGLIQKYKTGKGLFIDCNLLSSQVACLSHIAANYLIGQKEAKRWGTAHGSIVPYQAFKTKDGYIVVGAGNNQQFATVCKILDLPELIDNSKYKTNHLRVHNRKELIKILSERFEEELTSKWLYLFEGSGVPYGPINNMKNVFAEPQVLHNGLVMEMEHPTVGKISVPGPAVRYSKFKMSEARPPPLLGQHTTHILKEVLRYDDRAIGELLSAGVVDQHETH

SEQ ID NO: 73512 - DNA, 1338 bp, Artificial Sequence
  derived and/or modified sequence
atgcctagcgaaacgcatgccatgctcgctactctcgcccgggttgccgctttacggcggacgtgtcttttctctggcagaggtggagggcgggggctctggaccggaaggcctcagagcgacatgaacaacataaagccgctcgaaggcgtcaagatattggacctaactagggttctggccgggccttttgctactatgaatcttggcgacctgggagccgaagtcatcaaggttgaacgtcctggggctggcgatgatacgcgaacttggggaccaccttttgttggcaccgaatcaacatactatttatccgtgaatagaaacaaaaaaagtatcgcagtgaacatcaaggaccctaaaggcgtgaaaataataaaagagctggctgccgtgtgcgacgtgtttgttgagaattacgtcccaggcaagctcagcgctatgggcctgggttacgaagatatcgacgaaatagctccacacataatctactgctctatcactggatacggccaaacgggtcccatcagccagagagcggggtacgacgctgtggcgtcagccgtatccggtctgatgcatatcacaggccccgaaaacggtgacccagtccgccctggagtggctatgacggatctggccacaggcttgtacgcctacggcgctataatggctggattaatccagaagtacaagaccggcaaggggctctttatcgattgcaacctcctttcctcacaggtggcctgcctgtctcatattgctgcaaattacctgatcggacagaaggaggccaagcgatgggggacagcacacggctccatagttccctatcaagcgttcaagaccaaggacggatacatcgtggtgggcgccggtaacaaccagcagtttgcaaccgtgtgtaagatcctcgacctcccagagctgattgacaattctaaatacaaaacaaaccatttaagggtgcataacagaaaagagctcattaaaatattaagtgagagattcgaggaggaactgacttccaaatggctgtatctgttcgagggaagtggcgtgccgtacggtcctatcaacaatatgaaaaatgtgttcgcagaacctcaggtcttgcataatggtctcgtgatggagatggaacacccaactgtcggcaaaatttcagtgcccggaccagccgtccggtactcaaaatttaagatgtcagaagcacgcccacctcctttgctgggacagcatacaacacacatcctaaaagaggtgctccggtatgacgatcgcgcgattggtgagctcctttccgcgggcgtagtcgatcagcacgagacacactag

SEQ ID NO: 73513 - DNA, 1338 bp, Artificial Sequence
  derived and/or modified sequence
atgcccagcgagacccacgccatgctggccaccctggcccgggtggccgccctgcggaggacctgcctcttcagcggccggggcggcggccggggcctgtggacaggccggccccagagcgacatgaacaacatcaagcccctggagggcgtgaagatcctggacctgaccagggtgctggccggcccctttgccaccatgaacctgggggacctgggcgctgaggtgatcaaggtggagaggcctggagctggagatgacaccaggacctggggccccccatttgtgggcacagagagcacctactacctgtctgtgaacagaaacaagaagagcattgctgtgaacatcaaggaccccaagggcgtgaagatcatcaaggagctggccgctgtgtgtgatgtgtttgtggagaactacgtgcctgggaagctgagcgccatgggcctgggctatgaagatattgatgagatcgccccccacatcatctactgcagcatcaccggctacggccagacaggccccatcagccagagagctggctatgatgctgtggccagcgctgtgtctggcctgatgcacatcaccggcccagaaaatggagaccctgtgcggcctggggtggccatgacagacctggccaccggcctgtatgcctacggggccatcatggccggcctcatccagaagtacaagacaggcaagggcctcttcatcgactgcaacctgctgagcagccaggtggcctgcctgagccacatcgccgccaactacctgattggccagaaggaggccaagcgctggggcacagcccacggcagcatcgtgccctaccaggccttcaagaccaaggatggctacatcgtggtgggcgccggcaacaaccagcagtttgccaccgtgtgcaagatcctggacctgcctgagctgattgacaacagcaagtacaagaccaaccacctgcgggtgcacaacaggaaggagctgatcaagatcctgtctgaaagatttgaggaggagctgaccagcaagtggctgtacctgtttgagggcagcggcgtgccctacggccccatcaacaacatgaagaatgtgtttgctgagccccaggtgctgcacaacggcctggtgatggagatggagcaccccaccgtgggcaagatctctgtgcccggccctgctgtgcgctacagcaagttcaagatgtctgaggcccggcccccacccctgctgggccagcacaccacccacatcctgaaggaggtgctgcgctatgatgaccgggccatcggggagctgctgtctgctggggtggtggaccagcacgagacccactag

SEQ ID NO: 73514 - DNA, 1338 bp, Artificial Sequence
  derived and/or modified sequence
atgcccagcgagacccacgccatgctggccaccctggcccgggtggctgccctgaggcgcacttgtctgttttccggcagaggcggtggaagaggcctgtggacaggtaggcctcagagtgatatgaataatattaagcctcttgagggcgtgaagatccttgatctaacgcgcgtgttagccggtcctttcgccacaatgaatctgggagatctgggtgctgaggtcatcaaagtggagcgaccaggcgcaggggatgatactcgaacctggggaccaccatttgtaggcaccgaaagcacatactatctgagcgtcaaccgaaataagaagtccattgccgtgaacattaaggatcccaagggcgtgaaaattattaaagagctggccgcggtttgcgacgtgttcgtcgagaactatgtaccaggcaagctgtcagcaatgggacttggatatgaggacatagacgagatagctccccacataatttactgtagtattactgggtatgggcagactggtccaatatcacagagagccggatacgatgctgtcgcctccgccgtgtctggcctcatgcatatcaccggccctgagaacggggatcccgtgcggcccggcgtcgctatgactgatctggcgaccggcctgtacgcatacggggccattatggctggcctcatccaaaaatacaagacgggcaagggactgtttatcgattgtaacctcctgtcctcacaagtggcttgtctgtctcacatcgcagctaactatctcatcggacagaaagaggcgaagcgttggggcacagcccatggtagtattgtgccctaccaggctttcaagaccaaggacggctacattgtggtgggtgccggaaataaccaacagtttgccacagtgtgtaagattttagaccttcccgagttgatagacaacagcaagtataagacaaaccaccttagagtacataatcgcaaagaactgatcaaaatactgagtgaaaggtttgaggaagagttaacctcaaaatggctatatctttttgagggctctggcgtgccctacggacctatcaacaacatgaaaaacgtcttcgcagagccccaggttctgcacaatggcttggtaatggagatggaacaccctactgtgggtaagatttcggtgcccggacccgccgtgcgttactcaaaattcaagatgagtgaggctcgccccccgcccttgctcgggcaacatacgactcatatcctcaaagaggtactcagatacgatgacagggccatcggcgaattgctgagcgcaggggtagtggaccagcacgaaacgcactag

SEQ ID NO: 73515 - DNA, 1338 bp, Artificial Sequence
  derived and/or modified sequence
atgccaagcgagacccacgccatgctggctacgctggcccgagtcgccgctttgcgtagaacatgtcttttcagcggtcgtggcggtggccgaggcctgtggactgggaggccacagtctgacatgaacaatataaagccactggaaggtgtgaagatactggatttgactcgagttctcgccggtccgtttgctaccatgaatctaggcgacctgggagccgaagtgataaaggttgagcgtcctggtgctggtgatgacacacgcacgtggggacccccttttgtgggaaccgagagtacatactacctcagcgtgaaccgaaacaagaaaagcatcgctgtcaatattaaggatccaaaaggagtcaagatcattaaagagctggccgctgtctgtgacgtctttgttgagaattacgtgcccggaaaactcagtgccatgggtctcggctacgaagatatagacgagatcgccccacacattatttattgtagtatcaccggttacggccaaacaggccctatcagccagcgggcaggctatgatgccgtggctagtgctgtgagcggactcatgcacattaccggtcccgagaatggcgacccggtccgccctggagtcgccatgacagaccttgccactggactctatgcatacggcgctataatggcagggctgatacaaaaatacaagaccggtaagggactttttatcgactgtaatctgctgagtagccaagttgcgtgcttgtctcatattgcagcaaactatttaatcggacagaaggaagctaagaggtggggaaccgcccacggaagcatcgtgccttaccaggcctttaagacgaaggacgggtatatagtggtgggggctggtaacaaccagcagttcgctaccgtctgtaaaatcctcgaccttcctgagttgatcgacaactccaagtataagaccaaccatttaagagtgcacaatcgaaaggagctgatcaagatcttgtccgagaggtttgaagaggagctcacgtctaagtggttgtatctgttcgaggggtctggggtgccatacgggcctataaataatatgaagaacgtttttgcagaaccccaagtcctacataacggccttgttatggagatggagcacccaacggtcggcaagatttcggtgccagggcctgccgtgaggtacagcaaattcaaaatgagcgaggcccgtccccctccactgttgggccagcacaccactcatattctcaaggaagtgctacgctatgatgatcgagctattggtgaattgctgtcagcaggggtggttgaccagcacgaaacacattag

SEQ ID NO: 73516 - DNA, 1645 bp, Artificial Sequence
  derived and/or modified sequence
gttcgccgcttgcaccgggaccgatgccatctgagacgcacgcgatgctggcgacgctggcgagggtggcagctctgcgcagaacctgcctcttctccggccggggcggcgggagggggctgtggactggccgcccgcagtcagatatgaacaatataaagccattggaaggggtaaaaattctggatctaacaagagtcctggcgggaccttttgctactatgaatttaggagatcttggagcagaagttataaaagtggagagaccaggagctggtgatgatacacgaacttgggggccaccttttgttgggacagaaagtacatattatctcagtgttaaccgaaataaaaaaagtattgctgttaatatcaaggatccaaaaggggtgaaaatcatcaaagagcttgcagctgtttgtgatgtgtttgtggaaaactatgtccctggcaaactgtctgcaatgggcctgggatatgaagatatagacgagattgctcctcacatcatctattgttccatcacagggtatggtcagacaggtccaatttctcagcgagctggttatgatgctgttgcctcggctgtttctggtctgatgcacatcacagggcctgagaatggagatccagttcgcccaggagtagctatgactgatcttgccactggcctgtatgcatatggagctattatggctggattgatacaaaaatacaaaactgggaaaggactgttcattgattgtaacctactgtcatcccaggtggcgtgtttgtctcacatagctgcaaattatcttattggtcaaaaggaagcaaaacgttggggtacagctcatggcagtatcgttccttaccaggcttttaaaaccaaggatggctatattgtagttggagcaggaaataaccagcagtttgccaccgtctgcaagatcttggatttgcctgagttgattgataattccaagtataaaactaaccaccttcgggtacacaatagaaaagagcttattaaaatattatctgaacggtttgaagaagaactgaccagcaagtggttatatctttttgaaggcagtggagtcccgtatggcccaatcaacaacatgaagaatgtatttgcagaacctcaggtattacacaatggcctcgttatggagatggagcatccaactgtggggaagatttccgtcccaggcccagctgtgagatacagtaagttcaagatgtcagaggccaggccgcccccgctgctcgggcagcacacaacgcacatcctgaaggaggtcctgagatacgatgacagggccatcggggagctgctcagcgctggagtggtggaccaacatgaaactcactgacaaaggaaaagggctcttcctcataacctcgatccgaatacactggcaaaggcaacactttgcttggacccttctccccagttctgataccactaaaaagaagatttagagtaactccagatttcttacatggcatctccagaatggctctggtattaatgaatctagtgccttttaaatgtatcccacgttttgttccctaccatcttttttttcagatgatgatttcattatggatttgtgggatttttaaaaataaagttttaatttttttcctggaaaaa

SEQ ID NO: 73517 - DNA, 1338 bp, Artificial Sequence
  derived and/or modified sequence
atgcccagcgagacccacgccatgctggccaccctggccagagtggccgccctgagaagaacctgcctgttcagcggcagaggcggcggcagaggcctgtggaccggcagaccccagagcgacatgaacaacatcaagcccctggagggcgtgaagatcctggacctgaccagagtgctggccggccccttcgccaccatgaacctgggcgacctgggcgccgaggtgatcaaggtggagagacccggcgccggcgacgacaccagaacctggggcccccccttcgtgggcaccgagagcacctactacctgagcgtgaacagaaacaagaagagcatcgccgtgaacatcaaggaccccaagggcgtgaagatcatcaaggagctggccgccgtgtgcgacgtgttcgtggagaactacgtgcccggcaagctgagcgccatgggcctgggctacgaggacatcgacgagatcgccccccacatcatctactgcagcatcaccggctacggccagaccggccccatcagccagagagccggctacgacgccgtggccagcgccgtgagcggcctgatgcacatcaccggccccgagaacggcgaccccgtgagacccggcgtggccatgaccgacctggccaccggcctgtacgcctacggcgccatcatggccggcctgatccagaagtacaagaccggcaagggcctgttcatcgactgcaacctgctgagcagccaggtggcctgcctgagccacatcgccgccaactacctgatcggccagaaggaggccaagagatggggcaccgcccacggcagcatcgtgccctaccaggccttcaagaccaaggacggctacatcgtggtgggcgccggcaacaaccagcagttcgccaccgtgtgcaagatcctggacctgcccgagctgatcgacaacagcaagtacaagaccaaccacctgagagtgcacaacagaaaggagctgatcaagatcctgagcgagagattcgaggaggagctgaccagcaagtggctgtacctgttcgagggcagcggcgtgccctacggccccatcaacaacatgaagaacgtgttcgccgagccccaggtgctgcacaacggcctggtgatggagatggagcaccccaccgtgggcaagatcagcgtgcccggccccgccgtgagatacagcaagttcaagatgagcgaggccagacccccccccctgctgggccagcacaccacccacatcctgaaggaggtgctgagatacgacgacagagccatcggcgagctgctgagcgccggcgtggtggaccagcacgagacccactag

SEQ ID NO: 73518 - protein, 480 aa, Artificial Sequence
  derived and/or modified sequence
MNRTKGDEEEYWNSSKFKAFTFDDEDDELSQLKESKRAVNSLRDFVDDDDDDDLERVSWSGEPVGSISWSIRETAGNSGSTHEGREQLKSRNSFSSYAQLPKPTSTYSLSSFFRALSDTPAKSYAPELGRPKGEYRDYSNDWSPSDTVRRLRKGKVCSLERFRSLQDKLQLLEEAVSMHDGNVITAVLIFLKRTLSKEILFRELEVRQVALRHLIHFLKEIGDQKLLLDLFRFLDRTEELALSHYREHLNIQDPDKRKEFLKTCVGLPFSAEDSAHIQDHYTLLERQIIIEANDRHLESAGQTEIFRKHPRKASILNMPLVTTLFYSCFYHYTEAEGTFSSPVNLKKTFKIPDKQYVLTALAARAKLRAWNDVDALFTTKNWLGYTKKRAPIGFHRVVEILHKNNAPVQILQEYVNLVEDVDTKLNLATKFKCHDVVIDTYRDLKDRQQLLAYRSKVDKGSAEEEKIDALLSSSQIRWKN

SEQ ID NO: 73519 - protein, 493 aa, Artificial Sequence
  derived and/or modified sequence
MNRTKGDEEEYWNSSKFKAFTFDDEDDELSQLKESKRAVNSLRDFVDDDDDDDLERVSWSGEPVGSISWSIRETAGNSGSTHEGREQLKSRNSFSSYAQLPKPTSTYSLSSFFRGRTRPGSFQSLSDALSDTPAKSYAPELGRPKGEYRDYSNDWSPSDTVRRLRKGKVCSLERFRSLQDKLQLLEEAVSMHDGNVITAVLIFLKRTLSKEILFRELEVRQVALRHLIHFLKEIGDQKLLLDLFRFLDRTEELALSHYREHLNIQDPDKRKEFLKTCVGLPFSAEDSAHIQDHYTLLERQIIIEANDRHLESAGQTEIFRKHPRKASILNMPLVTTLFYSCFYHYTEAEGTFSSPVNLKKTFKIPDKQYVLTALAARAKLRAWNDVDALFTTKNWLGYTKKRAPIGFHRVVEILHKNNAPVQILQEYVNLVEDVDTKLNLATKFKCHDVVIDTYRDLKDRQQLLAYRSKVDKGSAEEEKIDALLSSSQIRWKN

SEQ ID NO: 73520 - protein, 519 aa, Artificial Sequence
  derived and/or modified sequence
MTTGLILFFQSGRPLGAGVRLGLGLRMNRTKGDEEEYWNSSKFKAFTFDDEDDELSQLKESKRAVNSLRDFVDDDDDDDLERVSWSGEPVGSISWSIRETAGNSGSTHEGREQLKSRNSFSSYAQLPKPTSTYSLSSFFRGRTRPGSFQSLSDALSDTPAKSYAPELGRPKGEYRDYSNDWSPSDTVRRLRKGKVCSLERFRSLQDKLQLLEEAVSMHDGNVITAVLIFLKRTLSKEILFRELEVRQVALRHLIHFLKEIGDQKLLLDLFRFLDRTEELALSHYREHLNIQDPDKRKEFLKTCVGLPFSAEDSAHIQDHYTLLERQIIIEANDRHLESAGQTEIFRKHPRKASILNMPLVTTLFYSCFYHYTEAEGTFSSPVNLKKTFKIPDKQYVLTALAARAKLRAWNDVDALFTTKNWLGYTKKRAPIGFHRVVEILHKNNAPVQILQEYVNLVEDVDTKLNLATKFKCHDVVIDTYRDLKDRQQLLAYRSKVDKGSAEEEKIDALLSSSQIRWKN

SEQ ID NO: 73521 - protein, 45 aa, Artificial Sequence
  derived and/or modified sequence
MNRTKGDEEEYWNSSKFKAFTFDDEDDELSQLKESKRAVNSLRDF

SEQ ID NO: 73522 - DNA, 1443 bp, Artificial Sequence
  derived and/or modified sequence
atgaatcggacaaagggcgacgaggaggagtattggaactcatcaaagtttaaggcgtttacatttgatgacgaagatgacgagctttcccaattgaaagaatctaagcgagccgttaactccctgcgcgattttgttgatgatgacgacgacgacgacctggagagggtctcctggagcggggagcctgttggcagcataagctggagcatacgagagacagctggaaatagcgggtccacccacgagggcagggagcagctcaagagcaggaactcgttctcctcctacgcccagctgcccaagccaacttccacttatagcctgtcttcattctttcgcgccctgtcagacacaccagctaagagttacgcacctgagctcggccgaccaaaaggagagtatcgagattactcaaatgactggtctcccagtgatactgtgagaagactgaggaaaggcaaggtatgtagcctagaacggttcaggagcctgcaagataagttgcaactcttggaggaggccgtgtcaatgcacgacggaaacgtaatcaccgcagtccttatcttcctgaagaggacactaagcaaagagatcctgtttcgagagctggaggtccgacaggtggcgctgcgtcacctgattcacttcctgaaagagattggggatcagaagctgttgttggacctgtttagatttctggaccgtacagaagaactcgcattgagccattaccgtgagcatctaaacatccaggatccagataagaggaaggaatttctgaagacatgtgtgggattgcctttttcagccgaggattccgcccatatccaggatcactatacattactagagcgccagattattatcgaggctaacgaccggcacttggagtccgctggccagactgagatcttcaggaagcacccgcgcaaagcatcaattctaaatatgccattggttacgactctgttctactcttgcttctatcattatactgaagctgaaggcaccttctccagccctgtaaatctaaaaaagacctttaaaatcccagacaagcagtatgtgctgacagcccttgccgcacgggctaagctgagagcttggaatgatgtcgatgctttgttcacgaccaagaactggctgggttacaccaagaaacgtgctccgatcgggttccatcgagtagttgagatcctgcacaagaacaacgctcccgtgcaaatcctgcaagagtatgtgaacttagttgaggatgtggatactaaattgaatctcgctaccaaattcaaatgtcatgatgtcgtcatagacacttaccgtgatttgaaggatcggcaacagctgctggcttatcgctccaaggtggataaggggagcgctgaagaggaaaaaatcgatgctctcctgtcttcttcacagatccgatggaagaattag

SEQ ID NO: 73523 - DNA, 1482 bp, Artificial Sequence
  derived and/or modified sequence
atgaatcggaccaagggggacgaggaagagtattggaattcgtctaagtttaaggcattcacatttgacgacgaggacgacgagttgagccaattaaaggagtccaagcgagcagttaactcattacgcgacttcgtcgacgacgatgacgatgacgatcttgagcgggtctcctggagcggcgaacccgtcgggtcgatatcctggtcgatccgcgaaacggccggcaatagcggatcaacacatgaggggcgcgagcagcttaaatcccgaaactccttctctagttacgcccagcttcctaagccgactagcacatattctctgtctagcttctttcggggcagaaccagacccggcagcttccagagcctgtccgatgcactgagtgatacccctgctaaatcctacgccccggaattgggacgccctaaaggcgaataccgtgattactccaacgactggtcaccctcagatacagtgcgccggctgcgcaaaggaaaggtttgctcactggaacgttttagatcactccaggacaaattgcagctgctggaggaggcagtctcaatgcatgatggaaacgtaatcactgcggtgctcatctttctgaagcggacactgagcaaagagatcctcttcagggaactcgaagtcaggcaggtagcacttaggcatttgattcactttcttaaggaaatcggcgaccagaaactcctgctggacctctttcgcttcctagaccgtacagaagagctggccctgtctcattacagagaacacctgaatattcaagaccccgacaaaagaaaggaattcctgaaaacatgtgtcggcctgccattcagcgctgaggattccgcacatatccaggatcactacacactgttggaacgccagattataattgaagccaacgaccgccacctggagtcagccggccagacagagatcttccggaagcatccacgcaaggcctccattttaaacatgccccttgtgaccacactcttctattcatgcttttatcactacacagaagctgagggaacctttagtagtcccgtgaacctgaagaaaacttttaagattcctgacaagcagtatgtgttgacagctcttgctgctcgcgctaaactgagagcctggaatgatgttgacgccctcttcaccaccaagaactggctcggttatactaagaagcgggcccctatcggattccatcgcgtggtagagatcctgcacaagaacaatgcccccgtgcaaattctccaggagtacgtgaacctcgtggaagatgtcgacaccaagctcaatcttgcaaccaaatttaaatgtcatgatgtggtgatagacacataccgagacttgaaagaccggcagcaattactagcttatagatcgaaagttgataagggtagtgccgaggaggaaaagattgatgccctgttgtcttcatctcagatacgctggaaaaactag

SEQ ID NO: 73524 - DNA, 1482 bp, Artificial Sequence
  derived and/or modified sequence
atgaatcgtactaaaggggacgaggaggaatattggaattcttccaaattcaaagctttcaccttcgacgacgaggatgacgaattgtcacagcttaaggagagcaaaagggccgtcaatagtttgcgcgactttgttgatgacgacgacgacgacgatttggagcgggtaagctggtcgggagagccagtgggctcgatctcttggtccataagagagactgcgggaaacagcggttctacccatgagggccgagagcagctcaaaagccgcaattccttctcctcatacgcacagttaccaaagcctacctctacctattcactaagtagcttcttccgtggcaggacacgtcccgggtcattccagagtctcagcgacgctctctctgatacccctgccaagtcgtacgcaccggagctcgggcggcccaagggtgaataccgcgactacagcaacgattggtctcccagcgatacggtgaggaggttgcggaagggcaaggtgtgcagcctagaaaggtttcgaagcctacaggataaacttcagctgctagaagaggcagtgtcaatgcacgatggtaatgttatcactgccgtcctaatcttcctcaagagaactctctcgaaggaaattttgttcagagaactggaggtgaggcaggtcgcactgagacacttgatacattttctgaaggagattggagatcaaaaactattgctggatctgtttagattccttgatcgaactgaagagcttgcattgtcccactaccgggagcacttaaatattcaggatcccgacaagagaaaggaattcttgaagacctgtgtgggattgccctttagcgccgaggacagcgctcatatccaggaccactacactctccttgaacgccagataataatcgaggctaatgaccggcatttagagagcgcggggcagactgagatcttcagaaaacatccacgcaaagccagcattttgaatatgccactggtaacaacacttttttattcttgtttctaccactacaccgaagccgaaggcactttcagcagccctgtaaacttaaaaaagacctttaagataccagataaacagtatgtgctaaccgccctggccgcaagagccaagctgcgcgcctggaatgatgtcgacgcactttttactacgaagaactggctaggctatactaagaaacgagcgcctattggctttcacagagttgttgaaatcctgcacaagaataacgcgcctgtgcaaattctacaggagtatgtgaacctggtagaggacgtggatactaaactgaatctcgctaccaaatttaaatgtcacgacgtcgtcattgatacctatagagacctgaaagacagacagcagttgctggcgtacagaagcaaagtcgacaaaggatctgctgaagaggaaaagatagatgctctcctaagttcctcccagataagatggaagaactag

SEQ ID NO: 73525 - DNA, 1560 bp, Artificial Sequence
  derived and/or modified sequence
atgaccactggacttatcttattttttcagagcgggaggcctttgggtgccggcgttcggcttgggctggggttaagaatgaacagaacaaagggcgatgaggaagaatactggaactcctccaagtttaaggcttttacgtttgatgacgaagacgatgagttaagccaactgaaggagtccaaacgggcggtgaacagtctgagggactttgtggatgacgatgatgacgacgacctcgagcgggtcagctggagtggggaaccggttgggtctatttcttggtctatcagagaaacagccggcaatagcggctcaactcacgaaggccgggaacagctcaagtctagaaattccttttcgtcgtacgcacagctgccgaagcctactagcacctatagtctttcatccttcttcagggggcgcacacgacccggctctttccaatctctctccgatgctctctctgacacaccggccaaatcctatgcccccgaactcggcaggcctaagggcgaatatcgggattattcaaacgactggtccccttcagacacagtgaggagactgcgaaagggcaaagtttgttctcttgaacgctttcgcagccttcaagataagctgcaactcttggaggaggcagtgtccatgcacgatgggaatgttattaccgcagtgctcatctttctgaagaggactttgagcaaagagatcctgtttagagaactggaggttcgccaggttgccctgagacatctcatccacttcctgaaagagattggagatcagaagttactgctagacctcttcaggtttctggaccgaaccgaagagctggcactctcccattaccgtgagcatctaaacatccaagacccagacaagcgaaaagagttcctcaaaacatgtgtcggactgccattcagcgccgaggactctgcccacattcaggaccactacaccttacttgagcgccagattattatagaggccaatgaccggcacctggagtctgccggccagacagagatatttaggaagcacccgcgcaaggcgagtatactcaatatgccgctggtgactaccctcttctactcatgtttttaccattacacagaggctgagggcactttctcttcccctgtgaatctcaagaaaacatttaagattcccgacaaacagtacgtgttgaccgcactggcagcacgcgctaagctgcgcgcttggaatgacgtcgatgctttgttcaccacaaagaactggttgggatatacaaagaaacgggcaccaataggcttccatcgagtcgttgaaattctgcacaagaacaacgccccagtccaaattcttcaggaatacgtaaacctcgtggaggatgttgacacaaagctgaatcttgcaaccaaattcaaatgccatgacgtggtgatcgacacataccgggatcttaaagaccgccagcagcttctggcctatcgaagcaaagtggacaagggcagtgcagaagaggagaaaatagacgcactactatcaagctctcaaatccgctggaaaaactag

SEQ ID NO: 73526 - DNA, 1482 bp, Artificial Sequence
  derived and/or modified sequence
atgaaccgcaccaaaggtgatgaagaagagtactggaacagcagtaaatttaaggccttcacatttgatgacgaggacgacgaactctcgcaactgaaagaatctaagcgcgcagtgaacagtctcagagattttgttgacgatgatgatgacgacgatctggagcgggtttcctggtccggcgagcccgttggctcaatttcttggtccatccgcgagactgccggtaacagcggatccacgcacgaggggagggagcaacttaagagtcggaattctttttcatcatacgcccagctaccgaaacccacgagcacatattccctgagctccttcttccgcggacgcacgagaccaggatcattccaatccctctccgatgctttgagtgacaccccagcaaaaagctatgccccagaactcggcaggcccaaaggggagtaccgagattattctaacgactggagcccaagcgatactgtacgccgattgcggaaagggaaggtctgctcgcttgagagatttcgtagcctacaggataaactacaactgcttgaagaggccgtcagcatgcacgacggcaacgtcataaccgctgttcttatattcctgaagcggaccctctcgaaagagatcctgttcagggagctggaggtgaggcaggtggcactccgacatttgattcacttcttaaaggagatcggagatcaaaagttgttgctcgatttatttcggtttctggacaggacagaagagctggccctgagtcactaccgtgaacacctgaacattcaggaccccgataagagaaaggagtttctaaagacctgcgtcggactgcctttctccgccgaggattcagcccatattcaggatcattacaccctactcgagcgccagattatcattgaagcgaatgaccgtcacctggagtcagccggccagaccgagatctttaggaagcaccctcggaaagcatcaatattgaatatgccactggttaccaccctgttttacagctgtttctaccattacaccgaggctgagggcacattttcgagccccgtgaacttgaaaaagacctttaagattccagacaagcagtacgttttaaccgcccttgctgcccgggccaaactgagggcttggaacgatgttgatgcccttttcaccacgaaaaactggttaggatacactaaaaagagagccccaattggtttccaccgggtggtggaaatcctacacaaaaataacgcaccagtgcaaatacttcaggaatatgtgaatcttgtcgaggacgtcgacactaaactgaacctggccaccaaatttaagtgccatgacgtcgtaatcgacacctatcgcgacctgaaagacagacaacagcttcttgcatatagatccaaagtcgataagggatcagccgaggaggagaagatcgacgctctcctatcgagctcccaaatacgatggaaaaattag

SEQ ID NO: 73527 - DNA, 1443 bp, Artificial Sequence
  derived and/or modified sequence
atgaacagaaccaagggagatgaggaggagtactggaacagcagcaagttcaaggccttcacctttgatgatgaagatgatgagctgagccagctgaaggagagcaagagagctgtgaacagcctgcgggactttgtggatgatgatgatgatgatgacctggagcgggtgtcctggagcggggagcctgtgggcagcatctcctggagcatccgggagacagctggcaacagcggcagcacccatgagggccgggagcagctgaagagcagaaattccttcagcagctatgcccagctgcccaagcccaccagcacctacagcctgagcagcttcttccgggccctgagtgacaccccagccaagagctatgcccctgagctgggccggcccaagggggagtacagagactacagcaatgactggagccccagcgacacagtgcggcggctgaggaagggcaaggtgtgcagcctggagcgcttccgcagcctgcaggacaagctgcagctgctggaggaggccgtgtccatgcatgatggaaatgtcatcacagctgtgctgatcttcctgaagaggaccctgagcaaggagatcctcttccgggagctggaggtgcggcaggtggccctgcggcacctgatccacttcctgaaggagattggagaccagaagctgctgctggacctcttccgcttcctggacagaacagaggagctggccctgagccactaccgggagcacctgaacatccaggaccctgacaagaggaaggagttcctgaagacctgtgtgggcctgcccttctctgctgaggacagcgcccacatccaggaccactacaccctgctggagcggcagatcatcatcgaggccaatgacagacacctggagagcgctggccagacagagatcttcaggaagcaccccaggaaggccagcatcctgaacatgcccctggtgaccaccctcttctacagctgcttctaccactacacagaagctgagggcaccttcagcagccctgtgaacctgaagaagaccttcaagatcccagacaagcagtatgtgctgacagccctggccgcccgggccaagctgcgggcctggaatgatgtggatgccctcttcaccaccaagaactggctgggctacaccaagaagagggcccccatcggcttccaccgggtggtggagatcctgcacaagaacaatgcccctgtgcagatcctgcaggagtatgtgaacctggtggaggatgtggacaccaagctgaacctggccaccaagttcaagtgccatgatgtggtgattgacacctacagagacctgaaggaccggcagcagctgctggcctaccgcagcaaggtggacaagggcagcgctgaggaggagaagattgatgccctgctgagcagcagccagatccgctggaagaactag

SEQ ID NO: 73528 - DNA, 1482 bp, Artificial Sequence
  derived and/or modified sequence
atgaacagaaccaagggagatgaggaggagtactggaacagcagcaagttcaaggccttcacctttgatgatgaagatgatgagctgagccagctgaaggagagcaagagagctgtgaacagcctgcgggactttgtggatgatgatgatgatgatgacctggagcgggtgtcctggagcggggagcctgtgggcagcatctcctggagcatccgggagacagctggcaacagcggcagcacccatgagggccgggagcagctgaagagcagaaattccttcagcagctatgcccagctgcccaagcccaccagcacctacagcctgagcagcttcttccggggccgcaccaggcctggcagcttccagagcctgagtgatgccctgagtgacaccccagccaagagctatgcccctgagctgggccggcccaagggggagtacagagactacagcaatgactggagccccagcgacacagtgcggcggctgaggaagggcaaggtgtgcagcctggagcgcttccgcagcctgcaggacaagctgcagctgctggaggaggccgtgtccatgcatgatggaaatgtcatcacagctgtgctgatcttcctgaagaggaccctgagcaaggagatcctcttccgggagctggaggtgcggcaggtggccctgcggcacctgatccacttcctgaaggagatcggggaccagaagctgctgctggacctcttccgcttcctggacagaacagaggagctggccctgagccactaccgggagcacctgaacatccaggaccctgacaagaggaaggagttcctgaagacctgtgtgggcctgcccttcagcgcagaagattctgcccacatccaggaccactacaccctgctggagcggcagatcatcatcgaggccaatgacagacacctggagagcgctggccagacagagatcttcaggaagcaccccaggaaggccagcatcctgaacatgcccctggtgaccaccctcttctacagctgcttctaccactacacagaggccgagggcaccttcagcagccctgtgaacctgaagaagaccttcaagatcccagacaagcagtatgtgctgacagccctggccgcccgggccaagctgcgggcctggaatgatgtggatgccctcttcaccaccaagaactggctgggctacaccaagaagagggcccccatcggcttccaccgggtggtggagatcctgcacaagaacaatgcccctgtgcagatcctgcaggagtatgtgaacctggtggaggatgtggacaccaagctgaacctggccaccaagttcaagtgccatgatgtggtgattgacacctacagagacctgaaggaccggcagcagctgctggcctaccgcagcaaggtggacaagggcagcgctgaggaggagaagattgatgccctgctgagcagcagccagatccgctggaagaactag

SEQ ID NO: 73529 - DNA, 1560 bp, Artificial Sequence
  derived and/or modified sequence
atgaccaccggcctcatcctcttcttccagagcggccggcccctgggcgccggcgtgcggctgggcctgggcctgaggatgaacagaaccaagggagatgaggaggagtactggaacagcagcaagttcaaggccttcacctttgatgatgaagatgatgagctgagccagctgaaggagagcaagagagctgtgaacagcctgcgggactttgtggatgatgatgatgatgatgacctggagcgggtgtcctggagcggggagcctgtgggcagcatctcctggagcatccgggagacagctggcaacagcggcagcacccatgagggccgggagcagctgaagagcagaaattccttcagcagctatgcccagctgcccaagcccaccagcacctacagcctgagcagcttcttccggggccgcaccaggcctggcagcttccagagcctgagtgatgccctgagtgacaccccagccaagagctatgcccctgagctgggccggcccaagggggagtacagagactacagcaatgactggagccccagcgacacagtgcggcggctgaggaagggcaaggtgtgcagcctggagcgcttccgcagcctgcaggacaagctgcagctgctggaggaggccgtgtccatgcatgatggaaatgtcatcacagctgtgctgatcttcctgaagaggaccctgagcaaggagatcctcttccgggagctggaggtgcggcaggtggccctgcggcacctgatccacttcctgaaggagatcggggaccagaagctgctgctggacctcttccgcttcctggacagaacagaggagctggccctgagccactaccgggagcacctgaacatccaggaccctgacaagaggaaggagttcctgaagacctgtgtgggcctgcccttcagcgcagaagattctgcccacatccaggaccactacaccctgctggagcggcagatcatcatcgaggccaatgacagacacctggagagcgctggccagacagagatcttcaggaagcaccccaggaaggccagcatcctgaacatgcccctggtgaccaccctcttctacagctgcttctaccactacacagaggccgagggcaccttcagcagccctgtgaacctgaagaagaccttcaagatcccagacaagcagtatgtgctgacagccctggccgcccgggccaagctgcgggcctggaatgatgtggatgccctcttcaccaccaagaactggctgggctacaccaagaagagggcccccatcggcttccaccgggtggtggagatcctgcacaagaacaatgcccctgtgcagatcctgcaggagtatgtgaacctggtggaggatgtggacaccaagctgaacctggccaccaagttcaagtgccatgatgtggtgattgacacctacagagacctgaaggaccggcagcagctgctggcctaccgcagcaaggtggacaagggcagcgctgaggaggagaagattgatgccctgctgagcagcagccagatccgctggaagaactag

SEQ ID NO: 73530 - DNA, 1443 bp, Artificial Sequence
  derived and/or modified sequence
atgaaccggaccaagggcgacgaggaggagtactggaacagcagcaagtttaaggcttttaccttcgacgacgaagatgatgagttgtcgcagctgaaggagtccaagcgagctgttaattccctgagagacttcgtcgacgacgacgatgacgatgacttggagagagtttcctggtcaggtgaacctgtgggctctatctcctggagcatcagggagacagccggcaactcgggatcaacccacgaaggcagagagcagcttaagtcaagaaatagtttctcatcctatgcacagctcccgaagccaacaagtacgtattctctatcatcttttttccgggctctcagcgacactcctgcaaagagctacgctccagagctgggtaggcctaagggcgaatatcgggactatagtaacgactggtcaccaagtgatactgtgaggcgcctccggaaaggcaaagtgtgttccctggagcgatttaggtctcttcaggacaaactgcagttactggaggaagccgtgtctatgcacgatggtaacgtgatcactgccgtcttgattttcctgaagcgtacactgtccaaggagatcctgtttagggaactggaagttaggcaggttgctctacggcatcttattcattttctaaaagaaattggcgatcaaaaactcctgcttgatcttttccgctttttggacagaacggaggaactagccctgagccattatagggagcacttgaacattcaggatccagataagagaaaagaatttctcaagacctgtgtcggactccctttctcagctgaagattccgcccacattcaggatcattatacactgctcgaaagacagatcatcatcgaggcaaatgatagacacctggaatcagccggccagaccgagatctttagaaagcacccccgcaaagccagcattcttaatatgccacttgtcaccacgctgttttattcttgtttctaccactacacggaggctgagggtaccttctccagcccagtaaacctcaagaagaccttcaagattccggataaacaatatgtgctgacggcccttgctgctcgcgccaagctcagggcctggaacgacgtagatgccttgttcaccacaaaaaattggctcggctacacaaagaagcgagctccaattgggttccatcgcgtggtagagattctccacaagaataatgctcctgtccaaattcttcaggagtatgtgaacctcgtggaagatgttgacacaaaacttaatctggctacaaagtttaaatgccacgatgtagtcatagatacttaccgagatttgaaggacaggcaacagttgctagcctacaggtctaaggtggataaggggagcgccgaggaggaaaaaatagacgccttgctgtccagctctcagatacgttggaagaactag

SEQ ID NO: 73531 - DNA, 1482 bp, Artificial Sequence
  derived and/or modified sequence
atgaaccggaccaagggcgacgaggaggagtactggaacagcagcaagtttaaggctttcactttcgatgatgaggacgacgaattatcgcagctgaaggagtctaagagagctgttaactccctccgggacttcgtcgacgacgatgacgatgacgatttggaaagagtgtcctggtcgggtgagcccgtgggctcaattagctggtccattagagaaaccgccggaaacagcggttctacccacgagggtagggaacagctaaaaagcagaaattcttttagcagctatgcccagctgccaaagccaacttctacatactccctgtcctcctttttcagggggcggacccggccggggtcattccagtctctgtctgatgccctgtcagatacacctgccaagtcatatgctcccgaattggggagacccaaaggagaatatagggattattctaatgactggtccccttcagataccgtgcgccggctgcgcaaaggcaaagtatgttccctcgagaggttcagatccttacaggataagctgcagctgctggaggaagctgtaagcatgcatgatggcaatgtgatcaccgccgttcttatcttcctgaagcgcacactctccaaagagatcctgtttagagagctggaagtgcgccaagtggctctccgccacctgattcatttcctgaaggagatcggagaccaaaagctcttacttgacctttttcgatttctggacaggacagaggagctggctctctcccactaccgcgagcacctgaatatccaggacccagataagcggaaagaatttctaaagacatgtgtgggactccccttttcggccgaggatagtgcccatatccaggaccattatacactgttagagcggcagatcatcattgaggctaatgaccgtcaccttgaatcggccggacagactgaaatttttcggaagcaccctcgcaaggcatcgatcctgaatatgccactagtcaccacactgttctattcctgcttctatcactacaccgaagccgaaggcactttttcttcccctgtcaatctgaagaaaacttttaaaatccccgacaagcagtatgtgctgaccgccctagccgcccgtgccaaattgagagcttggaacgatgtggatgcactctttacaactaaaaactggctgggatacacaaagaagagagcacccattggcttccaccgcgtggtggagatccttcacaagaacaacgcgccagtacagattctacaggaatacgtcaacttagtggaagatgtcgacacaaagctaaatctcgccacaaaatttaaatgccacgatgtggtcatcgacacatatagggatctgaaagacaggcagcagctgctggcttaccggagcaaggtggacaaggggagcgccgaagaagagaaaatcgacgcgctgctgtcctcatcacagataaggtggaagaattag

SEQ ID NO: 73532 - DNA, 1482 bp, Artificial Sequence
  derived and/or modified sequence
atgaaccggaccaagggcgacgaggaggagtactggaacagcagcaaattcaaggctttcacattcgacgatgaggacgacgaactgagccagttgaaagagtccaagagagcagttaattccctgagggatttcgtcgacgatgatgatgacgacgatctggaaagagtctcttggtcaggagagcctgtaggtagcatcagttggtctatccgggagaccgccggcaattctggttccactcacgagggacgggagcaattgaaaagccgaaactccttttcctcctatgcacagttaccaaagcctacctctacatattctctctcatccttcttccgcggccgcacacggcccggatctttccagagcttgtccgatgcgttatcagatacccctgctaagagctatgcgccagagctgggtcgccctaaaggcgaatacagagattactcaaatgactggtcaccaagtgataccgtaagaaggcttagaaagggtaaggtctgttcattggagcggtttcgctcactgcaagataaactgcagctcctggaagaggccgtgtccatgcatgatggcaacgtcatcaccgccgtgctgatttttttaaagcgcacgctctcgaaagagatcctatttagagaactggaagtaagacaggtggctttgcgtcacctgatccacttcctcaaggagatcggcgatcagaaattgctgctagacctctttaggtttcttgataggacggaggaactcgccctctcccattacagagagcacctcaacatccaagaccccgataagcgaaaggagtttctgaaaacatgcgtggggctgcctttctccgccgaggattccgcgcatatccaagaccattacaccctcttggagcgacagattatcatcgaggcaaatgatcggcacctggagtccgcaggacagacagagattttccgaaaacaccctcgcaaagctagcatacttaacatgcctctggtaactacgctcttctacagttgtttctaccactacaccgaggccgaaggaacgttttcctcacctgttaaccttaagaagacctttaagatacccgacaagcagtacgtgctgactgccctcgcggccagggctaagttgagagcatggaacgatgttgacgccctttttacgaccaagaactggctcgggtacacaaagaagcgtgcaccaatcggttttcaccgcgtagtggagattctacacaagaataatgcgcccgttcagatcctccaagagtacgtaaatctcgtcgaagatgtagacacgaaacttaatctcgccaccaagtttaagtgccacgacgttgtgattgacacttaccgggatctgaaagatcgccagcaattactggcctatcggtccaaggtagataaaggctcagctgaagaggaaaagatagatgccctcctgagttctagccaaatcagatggaagaactag

SEQ ID NO: 73533 - DNA, 1560 bp, Artificial Sequence
  derived and/or modified sequence
atgaccaccggcctgatcctgttcttccagagcggccggcccctgggagccggcgtgcgcctaggactcgggcttcgaatgaataggaccaagggggatgaagaggaatactggaacagcagtaaattcaaagcattcacctttgacgatgaagacgatgaattgtcccagctgaaggagtctaagcgggcagttaatagtctacgcgactttgttgacgatgacgacgatgacgacttggagagagtttcttggtctggcgagcccgtcggtagtatatcatggtcaattcgtgagacagccggcaactcaggctcgacgcacgaggggagagagcagctgaaaagccgtaatagcttttcttcgtacgcccagttgcctaaaccaacttccacatactctttgagcagcttcttccgagggcgcacaaggcccggctccttccagagcctgagcgatgccttatccgataccccagccaagtcctatgcccccgagctagggcgccccaaaggagaataccgcgactatagtaacgattggtcgccaagcgacacagtgcgaagactccgaaaaggtaaagtctgttctctcgaaaggtttaggtctctccaagacaagctgcaattgttggaggaagctgtatccatgcatgacgggaacgttatcaccgccgtgctcatatttctgaaacgcacattgtcaaaggagattctctttcgtgagctggaggtgagacaggtggcgctgcgccacctgatccattttctgaaggaaatcggcgatcaaaagctcctgttagacctgttccgattcctggacaggacagaggagcttgctctctctcactatagagaacatctgaatattcaagaccctgataaacgcaaggaattcttaaaaacatgtgtcggactaccgtttagtgccgaggatagcgcccacatccaggaccattatacccttctcgaacggcaaataattatcgaagccaatgatagacatctggaatcagcaggccagactgagatatttcgcaagcacccccgcaaagctagcattctgaatatgccgttagtcaccactctcttttattcttgcttttatcactatacagaggcagagggtactttttcttctccagtgaacctcaagaagaccttcaagatacctgataagcagtatgtgctgacggcactggcagctagagcaaagttgagagcttggaacgacgtggatgccctctttacaacgaaaaattggctgggctatacgaagaagcgggcaccgatcggtttccacagagtggtcgagatcttgcataagaataatgctccagtacagatccttcaggaatacgtgaaccttgtcgaagatgttgatacgaaactgaacttggcaacaaaattcaaatgccacgatgtggttattgatacatatcgcgacctgaaagaccggcagcagttgctcgcctatcgctcaaaggtcgataaggggtcagccgaggaagagaaaattgatgccctgctgagcagcagtcagatcaggtggaagaattag

SEQ ID NO: 73534 - DNA, 1482 bp, Artificial Sequence
  derived and/or modified sequence
atgaaccggaccaagggcgacgaggaggagtactggaacagcagcaagttcaaggcgttcaccttcgacgatgaggatgatgagctcagccagctcaaggagtccaaaagagccgtcaattcccttcgcgactttgtcgacgatgatgacgacgacgatctggaaagggtgtcctggagtggagagcccgtgggctcgatctcttggagcatacgcgagacagctggcaactcaggatcgacacatgaagggagggaacagctgaagtctcgcaattccttttcatcctacgctcagctgcccaaacccacttccacatacagtttgagctccttcttccggggacggactaggcctggatccttccagtcactttctgatgcattgagtgacactccagccaagagttatgcacctgagctcggtcgaccaaaaggggagtatagggactattcaaacgactggagtccgtctgatactgtgcgtcggctcagaaaggggaaggtttgttccttggagagatttcggagcttgcaggacaagctgcaactcctcgaggaggccgtgtccatgcacgatgggaacgtcatcactgccgttcttatattcctgaagcggaccctctcaaaggaaattctgtttcgggaacttgaggtaaggcaggtggccctaagacacctgatacactttttgaaggagattggcgatcagaaactccttctggatctgttcaggtttctcgacagaacggaagaactcgccctgtcacattacagagaacatctcaacattcaggaccccgacaagcggaaggagtttctgaagacatgtgtaggactgcctttcagcgccgaggacagcgcgcacatccaagaccattacactttgctcgaacgccagataatcatcgaagctaacgaccgtcacctggagagcgctggccagactgagatctttaggaaacacccccgcaaagccagcattctcaatatgcccctggtgaccactctgttctacagctgcttttaccactacacagaggccgaagggactttttcttcaccagttaatctgaagaagactttcaaaattcccgataaacaatatgtcctgaccgcactggcggctcgcgccaagctgcgagcctggaatgacgttgacgccctttttaccacaaaaaattggttggggtacaccaagaaacgcgcacccatcggcttccaccgcgtcgtggagatcctacacaaaaacaatgcgcctgtgcaaattctacaggagtacgtgaaccttgtagaggacgttgacaccaagctgaatctagctaccaagttcaagtgtcatgacgtcgttatcgacacgtatagggatctaaaggaccgacagcagttactagcttacaggtcgaaggttgacaaaggaagtgcggaagaagagaagatcgatgccctgctctcctcttctcaaatccgatggaagaactag

SEQ ID NO: 73535 - DNA, 1443 bp, Artificial Sequence
  derived and/or modified sequence
atgaaccggaccaagggagatgaagaagaatactggaactcatccaagtttaaggccttcacctttgacgatgaggacgacgagctgtcacagttaaaagagtccaagcgggctgttaattcactcagagactttgtggatgacgatgacgacgacgacttggaaagggtgagttggagcggggagccagtgggtagcatctcctggtccatacgggagacggcaggaaacagcggtagcactcatgaggggagggagcagctgaagtctagaaactctttttcatcctatgcccagttgccaaagcctacgtcaacctattccctgtcttcctttttccgggcactatccgatacccctgctaaaagttacgctccagaactcgggagacctaaaggcgagtatcgagattactcaaacgactggagtccaagcgacactgttcgcaggctacgcaagggaaaggtgtgctccctggaaagatttagaagcctgcaggacaaactgcagctcctggaggaggcggttagtatgcacgacgggaatgtgattaccgccgtgttaatattcctaaaaaggacactttctaaggaaatcttgttccgtgaactggaagtgaggcaagtggccctcaggcacctgatccatttccttaaagaaatcggggaccagaagcttctgctggacctattccgatttctggatcggacagaagagctagccctctctcattatcgggagcacctgaacatccaggatcccgacaagcgcaaagagtttctcaagacctgcgtaggtctaccgttctccgcagaagatagcgcccacatccaggaccattatactctgttggaacgccagataatcatagaggctaatgatcggcatctggaatccgcaggtcagaccgaaatcttccggaagcaccccaggaaggccagcatcttgaacatgccgctggtgactaccctgttttacagctgtttttaccattatactgaggctgaggggacattctctagtccggttaacctcaagaaaaccttcaagattccagataagcaatatgtactcaccgctctagcagccagggcaaagctgcgggcatggaacgacgtggatgccctgttcacaacgaaaaattggttgggctatacaaagaagcgggctccgatcggttttcaccgcgtagtcgagatcctgcacaagaacaacgctcccgtccagattctgcaggaatacgtgaaccttgttgaagacgtggataccaagctcaatcttgctacgaagttcaaatgccatgatgtcgtgatcgatacctaccgggacttaaaggatcgtcagcagctgctggcttaccggtcaaaagttgataagggcagtgcggaagaggagaaaatcgacgcgcttctaagctcttcccagatccgctggaagaactag

SEQ ID NO: 73536 - DNA, 1482 bp, Artificial Sequence
  derived and/or modified sequence
atgaataggaccaagggagacgaggaggagtactggaactcaagcaagtttaaggcattcacttttgacgacgaagacgatgagctgagccagttaaaagagtcaaaaagggcagtgaacagcctgcgggactttgtggatgatgacgacgacgacgacctggagagagtatcttggtctggtgagcctgtcggctctatatcttggtctattcgagaaacggcaggaaacagcggatccacacatgagggacgcgaacagctcaaatcccgtaattccttcagcagctatgcccagcttccgaagcccactagcacctattccctgagttcattctttcgcggacgaacacgtcctggttccttccagagcctgtccgatgccttgagtgatactcctgcaaagtcctacgctccggaactaggaaggccgaagggagaataccgcgattactcaaatgactggagcccgtctgataccgtcagaagactgagaaagggcaaagtatgttctctggagagatttcggtctctccaggacaaactgcagctgcttgaggaggccgtgtccatgcatgacgggaacgttattaccgcggtcttaatcttccttaagcgaactctcagtaaagagatcctgtttcgtgagcttgaggttcggcaggtggctttgagacacttgatccactttcttaaggagattggcgaccagaaattgttgctggacttatttaggttcctggaccggacggaggagcttgccctgagccactatcgcgagcatctgaatattcaggatcccgacaaacgcaaagagttcctgaaaacttgcgttgggcttcccttcagcgctgaagattctgcacacatccaggaccattacacattgctcgaaaggcaaatcattattgaggctaatgacaggcatctcgagagcgccggtcagactgagatttttagaaagcacccaagaaaggccagcattttgaacatgcctttggtgaccacgctcttttatagctgcttttaccactatactgaggcagagggcaccttcagttcacctgtgaaccttaagaaaaccttcaagatccctgacaagcagtatgtactgaccgcgctggccgcacgcgctaaactgcgggcttggaatgacgtggatgctctattcacgaccaagaattggctgggttacacaaagaaacgcgcaccaatcgggtttcatcgggttgtcgagatcttgcacaagaacaatgcccctgtgcagatcttgcaggagtacgttaatctcgtggaggacgtagacactaaacttaacttggcaaccaagttcaaatgtcacgatgtggttatcgatacttacagagaccttaaggatagacagcagttactcgcttaccgctcaaaggttgacaaaggctctgccgaggaagaaaagattgatgcacttctttcttctagtcagatcaggtggaagaactag

SEQ ID NO: 73537 - DNA, 1482 bp, Artificial Sequence
  derived and/or modified sequence
atgaatcgcacaaagggtgacgaagaagaatactggaactcctctaagttcaaagcgttcaccttcgacgacgaagacgacgagctcagtcaacttaaggagagcaaaagagcggtcaactcgctaagagatttcgttgacgacgacgatgacgacgacttagagagggtgagttggagtggggagcccgtgggttctatctcatggtctatccgcgagaccgccggaaatagcggttccacccatgaggggagagagcagctgaagagcagaaacagttttagctcttatgctcagctgcccaaacccacttccacttatagcctctcatcttttttccggggacgaactaggcctggaagcttccagtcactgtcagatgcactttccgatacccctgctaaatcttacgccccagagttgggaagacccaaaggtgagtacagagactacagtaacgattggagcccttccgacacagtccggcgactgagaaaaggaaaagtgtgctcacttgaacgtttcaggtccctccaggataagcttcagctgttagaggaggctgtgtcaatgcacgacggcaacgttataactgccgttctgatcttcctgaaacgtacactgtctaaagaaatcctttttagggagttggaggttcgtcaggtcgcgcttagacacctgatccatttcctcaaggaaatcggcgaccagaaattgttactggacctgtttaggtttcttgaccgtactgaagagctcgccctcagccactaccgcgaacacctcaacatccaggaccccgataaacggaaagaattccttaagacctgtgtcggtctgcctttcagcgcggaggactccgctcacatccaggaccactataccctgttggagaggcagatcattatcgaggccaacgatagacatctggagtccgcagggcagacggaaatcttcagaaaacatcctcgcaaggcttccatcctgaatatgccgctggtgaccacccttttctattcttgcttttaccactacactgaggccgaaggcaccttctcttcacctgtcaatctcaagaagaccttcaaaatccccgacaaacagtacgtgctcacggctttggcggctcgcgctaagttaagagcatggaatgatgtagatgcactgtttactaccaagaactggttaggttatacaaagaagagggcgccaatcggttttcacagagttgtggaaatcctgcacaaaaacaacgcccctgttcagatcctccaggaatacgttaacctggtggaggacgtcgatactaagttgaatttggccacaaaatttaaatgtcacgacgtagtgattgacacttatagagacctgaaagaccgtcaacagctcctggcctatagaagcaaagtggataagggttctgccgaggaggaaaagatcgatgccttgctgtctagctcccagatccgatggaagaactag

SEQ ID NO: 73538 - DNA, 1560 bp, Artificial Sequence
  derived and/or modified sequence
atgactacggggcttatactattcttccaatccgggagaccactcggagctggggttagactgggactcggcctgaggatgaatagaacaaaaggagacgaagaggagtactggaacagtagcaaatttaaagcttttacctttgatgatgaggacgacgagctatcccaactgaaagagtctaaacgggcagttaacagcctgcgcgactttgtcgacgacgacgatgacgatgatcttgagagggtgtcttggtccggcgagcccgttggctccataagttggtccatcagggagactgccggtaactctggttctacgcacgagggtagagagcagctgaaatcaaggaatagcttttctagttatgcacagttaccaaaaccgacttcaacatacagtttatcgtcgttcttccggggtagaacacggccagggagtttccaatccctgagcgacgccctgagcgacacacccgctaagtcttacgcgccagaattgggtaggcccaaaggagaatatagagactattctaacgactggagccctagcgacacagtccgaagacttaggaagggcaaggtgtgttccctggagcggttcaggtctttacaggataagctgcaactcctggaggaagcggtctctatgcacgatggcaacgtcatcactgccgtcctcatcttcctcaaacgaactctgtccaaagagatcctatttagggagctagaagtgcgccaggtcgccctcagacacctgatccactttctgaaggagatcggggatcagaaacttttattggaccttttccggtttttggacagaactgaggaattggccctgtcccactatcgcgagcaccttaacatccaggatccggacaaaaggaaagaatttctgaaaacatgcgtgggactcccattctcggcagaagactctgcgcacattcaggaccactacaccctgttggaacggcagattatcatagaggcaaatgaccgccacttagaatcggcaggtcagaccgagatattccggaagcacccacggaaagcctccatcctgaatatgcccttagtgacaacacttttctacagttgcttctaccactacactgaggccgaagggaccttcagcagccccgtaaatctgaagaaaacttttaaaattccggacaaacagtacgttttaaccgcattggcagctcgagcaaaactaagggcctggaatgatgttgatgccctttttactacgaagaactggttgggctataccaaaaagagagccccaatagggtttcacagggtggtggagatcctccataagaataacgctcccgtacagatactgcaagaatacgtgaacctcgttgaggacgtcgacaccaaactgaacctcgcaactaaatttaaatgtcacgacgtcgtgatcgatacttaccgcgacctaaaagaccggcagcagctacttgcctatcgcagtaaagttgataaggggtctgctgaagaagagaagattgatgccctgctttcctcctcccagataaggtggaagaactag

SEQ ID NO: 73539 - DNA, 1482 bp, Artificial Sequence
  derived and/or modified sequence
atgaaccgcacaaaaggcgatgaggaggagtactggaacagtagcaagttcaaagccttcaccttcgatgacgaggatgatgagctgtcacagttaaaggagtcgaagcgcgcagtcaatagcttacgggactttgtggatgatgacgacgatgacgacctggagcgcgtttcttggagtggagagcccgtgggatcaatctcttggtctatcagagaaaccgccggaaactctggtagcacacacgaagggagggagcagttaaagtctcgcaacagcttcagcagctatgcccaactgccaaaaccaactagcacttactcacttagtagcttttttcggggtcggacacggcctgggtcttttcagagtttgtccgatgctttgagcgatactcctgcgaagagttacgcgccagagcttgggcgaccaaaaggcgagtatcgggactactcaaatgattggtctcccagcgacacagtaaggagactcaggaagggcaaggtctgcagccttgagcgctttcgctccctacaagacaagctgcagctgctcgaggaggcagtaagcatgcatgacggcaatgtgataactgccgttctgattttcctgaagagaaccctgtccaaggagatccttttccgggagctcgaggtgagacaggtggctttacggcacctgattcatttccttaaggaaatcggcgatcagaaactacttttggacctgttccgatttctcgacagaaccgaggagctggccctctcacactaccgagaacacctcaacatccaggacccggacaagcgcaaagagttccttaaaacctgcgtcggccttccttttagtgctgaggactccgcacatatccaagatcattacactctgctcgaacggcagataattatagaagccaacgatagacatctcgaatcagcaggacaaacggagatattcaggaagcaccccaggaaagctagtatccttaatatgcctctggtgactactctcttctacagctgcttctatcattacaccgaagcggaagggaccttttcttctcctgtcaaccttaaaaagaccttcaagatcccagataaacagtatgttctcacagcgctagcagcccgtgccaagttgcgggcttggaatgacgttgatgcactgttcacaaccaagaactggctcggctataccaagaagagggcccctataggctttcaccgcgtcgtggagatcctacacaagaacaatgctcccgtccagattctgcaagaatatgtcaatctggttgaagatgtggacacaaagttgaaccttgctaccaagttcaagtgccacgatgtcgtgattgatacgtacagagacctgaaagaccgacagcaactgctggcatacaggtccaaagtggacaagggctcagctgaggaggaaaagatcgatgccctgctcagtagctcacaaatacgatggaaaaactag

SEQ ID NO: 73540 - DNA, 2722 bp, Artificial Sequence
  derived and/or modified sequence
agaagggctggtccagcggcggcggaggctggcgctgtcctgagagggagggctctgtgcggaagagtcagggcgacccttgggcgctggagtacgcttgggactggggctgcgagtgagcaccagcgattggttcggaagcggacatttggttcagaacgagcatttaactctgccagggatccgctgggctctgacgactgcggtagatccatggcttcctggacgttcacccgtagagtcatcctagcttaactcttgttccctggtctcagttcacaagcctcacctgtatcttcctggctcggaagataattgaaaccaagtctgacttctcaatgaatcggacaaagggtgatgaggaggagtattggaacagctccaagttcaaggcttttacctttgacgatgaagacgatgagctttcacagttaaaggagtccaagcgggcggtgaacagcctccgagacttcgtggatgatgatgacgatgatgacctggagcgagtcagctggagtggggaacctgtgggaagtatctcatggtccatcagagagactgctggtaatagcggctcaacccacgaggggcgtgaacagctaaagagccgaaacagcttctcctcctatgcacaactacccaagcctacttctacctactccctgagcagcttttttagagctctgtcagacacacctgccaaaagctatgctccagagctggggagacccaaaggggagtatagggattacagcaatgactggagccccagtgatacagtgcgacgtctccggaagggcaaggtttgctcactagagagattccgctccttacaggacaaactacaactcctagaagaggcagtaagcatgcatgatggaaacgtcattactgcagttctgattttcctgaagaggacactgagcaaagagatcctcttccgagagctggaggtgcgacaggttgccctgagacatcttattcacttccttaaggaaataggggatcaaaagttgcttttagacctcttcaggttcctagatagaacagaagagcttgcgctatctcattatcgagagcatttgaacattcaggaccctgacaaacgaaaagaatttcttaaaacctgtgttggtttgccattttcagcagaagattccgcacacatacaggaccattacacgctcctggaacgtcagatcattattgaggcaaatgatcgccatctagaatcagcaggacagactgagatcttccgaaagcacccccgcaaagcctccatcctcaacatgccactagtgacaacacttttctactcctgcttctatcactacacagaggctgaggggacattcagcagtcccgtcaacctgaagaagacatttaagatcccagataaacagtatgtgctgacagccctggctgctcgtgccaagcttcgagcctggaatgatgtagatgccctattcaccacaaagaactggctgggctataccaagaagagagcacccattggcttccatcgggttgtcgaaattttgcacaagaacaatgcccctgtgcagatattacaggagtatgtcaatctggtggaagatgtggacacgaagttgaacttagccactaagttcaagtgccatgatgtcgtcattgatacctaccgggacctgaaggatcgtcaacagttgctagcatacaggagtaaggtagataaaggatcagcagaggaggagaagattgatgctcttctcagcagctcgcaaattcgatggaagaattaagtggcattgactaccttgaagcctgcctcatttcctcctctcctgcctgtgaaagcagagagagctcttctttgggagagctgcggcatcacatcgcttgggcccattacccatgggcagtgccagctactcttgacacagataacttcagactgatcttctgtccaaggaacatcatctgaggatcgagatctaaagctttgagtcatgagaatgattctctccacctggtgctcatatgaaggtgggagtgatttctagattgggcccctactgggtaagatctcacttggtctgagaaaagtgactgctccagaaaggaagaggtatgggagtcatagggtggctactgcattccactcagctaattatgatccaggacttggcgctggacattggcagttctgctctgaatgaagtcagaacagaaccaaaatggcctcaggaaggaatgccagtgtttcccaagacctcctggagatgcactcacaccagactgcacagacccctccacattatgccacacatggcctagacgttgtgtttcctcagccattttccctctgctgccccagtttactctgtccaaaaccctaaggttcttctctcacttgaacacagacgaccttgcttgggtgatgagacatcccctttatctcttcctctactgctggccaagacccgtcactttataagaagctcagatgcagcagtgctggagagctctctctttatgcaaaaatctcatttcaccaggagctttcagaagtttcacctgggctaaattcagcagcatttctgttaggatatttagatggaggttttattttcacacttggattcttgctctgtaccaatatttgcctccttttctgtgactgaactgggtttttctgacatgcctagactcctaataaaggtatttcttccttggtgccttc

SEQ ID NO: 73541 - DNA, 2761 bp, Artificial Sequence
  derived and/or modified sequence
agaagggctggtccagcggcggcggaggctggcgctgtcctgagagggagggctctgtgcggaagagtcagggcgacccttgggcgctggagtacgcttgggactggggctgcgagtgagcaccagcgattggttcggaagcggacatttggttcagaacgagcatttaactctgccagggatccgctgggctctgacgactgcggtagatccatggcttcctggacgttcacccgtagagtcatcctagcttaactcttgttccctggtctcagttcacaagcctcacctgtatcttcctggctcggaagataattgaaaccaagtctgacttctcaatgaatcggacaaagggtgatgaggaggagtattggaacagctccaagttcaaggcttttacctttgacgatgaagacgatgagctttcacagttaaaggagtccaagcgggcggtgaacagcctccgagacttcgtggatgatgatgacgatgatgacctggagcgagtcagctggagtggggaacctgtgggaagtatctcatggtccatcagagagactgctggtaatagcggctcaacccacgaggggcgtgaacagctaaagagccgaaacagcttctcctcctatgcacaactacccaagcctacttctacctactccctgagcagcttttttagaggtagaactagacctggaagtttccagtccctttctgatgctctgtcagacacacctgccaaaagctatgctccagagctggggagacccaaaggggagtatagggattacagcaatgactggagccccagtgatacagtgcgacgtctccggaagggcaaggtttgctcactagagagattccgctccttacaggacaaactacaactcctagaagaggcagtaagcatgcatgatggaaacgtcattactgcagttctgattttcctgaagaggacactgagcaaagagatcctcttccgagagctggaggtgcgacaggttgccctgagacatcttattcacttccttaaggaaataggggatcaaaagttgcttttagacctcttcaggttcctagatagaacagaagagcttgcgctatctcattatcgagagcatttgaacattcaggaccctgacaaacgaaaagaatttcttaaaacctgtgttggtttgccattttcagcagaagattccgcacacatacaggaccattacacgctcctggaacgtcagatcattattgaggcaaatgatcgccatctagaatcagcaggacagactgagatcttccgaaagcacccccgcaaagcctccatcctcaacatgccactagtgacaacacttttctactcctgcttctatcactacacagaggctgaggggacattcagcagtcccgtcaacctgaagaagacatttaagatcccagataaacagtatgtgctgacagccctggctgctcgtgccaagcttcgagcctggaatgatgtagatgccctattcaccacaaagaactggctgggctataccaagaagagagcacccattggcttccatcgggttgtcgaaattttgcacaagaacaatgcccctgtgcagatattacaggagtatgtcaatctggtggaagatgtggacacgaagttgaacttagccactaagttcaagtgccatgatgtcgtcattgatacctaccgggacctgaaggatcgtcaacagttgctagcatacaggagtaaggtagataaaggatcagcagaggaggagaagattgatgctcttctcagcagctcgcaaattcgatggaagaattaagtggcattgactaccttgaagcctgcctcatttcctcctctcctgcctgtgaaagcagagagagctcttctttgggagagctgcggcatcacatcgcttgggcccattacccatgggcagtgccagctactcttgacacagataacttcagactgatcttctgtccaaggaacatcatctgaggatcgagatctaaagctttgagtcatgagaatgattctctccacctggtgctcatatgaaggtgggagtgatttctagattgggcccctactgggtaagatctcacttggtctgagaaaagtgactgctccagaaaggaagaggtatgggagtcatagggtggctactgcattccactcagctaattatgatccaggacttggcgctggacattggcagttctgctctgaatgaagtcagaacagaaccaaaatggcctcaggaaggaatgccagtgtttcccaagacctcctggagatgcactcacaccagactgcacagacccctccacattatgccacacatggcctagacgttgtgtttcctcagccattttccctctgctgccccagtttactctgtccaaaaccctaaggttcttctctcacttgaacacagacgaccttgcttgggtgatgagacatcccctttatctcttcctctactgctggccaagacccgtcactttataagaagctcagatgcagcagtgctggagagctctctctttatgcaaaaatctcatttcaccaggagctttcagaagtttcacctgggctaaattcagcagcatttctgttaggatatttagatggaggttttattttcacacttggattcttgctctgtaccaatatttgcctccttttctgtgactgaactgggtttttctgacatgcctagactcctaataaaggtatttcttccttggtgccttc

SEQ ID NO: 73542 - DNA, 2934 bp, Artificial Sequence
  derived and/or modified sequence
gattattcccttccgcccccttctctaagctgcacagcctgaatagaagggctggtccagcggcggcggaggctggcgctgtcctgagagggagggctctgtgcggaagaggtgagggtgtcccaagccccttgggtcgcgtatctggctggatccagcctctccgcatcttgatcttttcccctcttctaggaggcatccctacaccctatgactacaggcctgattctcttctttcagtcagggcgacccttgggcgctggagtacgcttgggactggggctgcgagtgagcaccagcgattggttcggaagcggacatttggttcagaacgagcatttaactctgccagggatccgctgggctctgacgactgcggtagatccatggcttcctggacgttcacccgtagagtcatcctagcttaactcttgttccctggtctcagttcacaagcctcacctgtatcttcctggctcggaagataattgaaaccaagtctgacttctcaatgaatcggacaaagggtgatgaggaggagtattggaacagctccaagttcaaggcttttacctttgacgatgaagacgatgagctttcacagttaaaggagtccaagcgggcggtgaacagcctccgagacttcgtggatgatgatgacgatgatgacctggagcgagtcagctggagtggggaacctgtgggaagtatctcatggtccatcagagagactgctggtaatagcggctcaacccacgaggggcgtgaacagctaaagagccgaaacagcttctcctcctatgcacaactacccaagcctacttctacctactccctgagcagcttttttagaggtagaactagacctggaagtttccagtccctttctgatgctctgtcagacacacctgccaaaagctatgctccagagctggggagacccaaaggggagtatagggattacagcaatgactggagccccagtgatacagtgcgacgtctccggaagggcaaggtttgctcactagagagattccgctccttacaggacaaactacaactcctagaagaggcagtaagcatgcatgatggaaacgtcattactgcagttctgattttcctgaagaggacactgagcaaagagatcctcttccgagagctggaggtgcgacaggttgccctgagacatcttattcacttccttaaggaaataggggatcaaaagttgcttttagacctcttcaggttcctagatagaacagaagagcttgcgctatctcattatcgagagcatttgaacattcaggaccctgacaaacgaaaagaatttcttaaaacctgtgttggtttgccattttcagcagaagattccgcacacatacaggaccattacacgctcctggaacgtcagatcattattgaggcaaatgatcgccatctagaatcagcaggacagactgagatcttccgaaagcacccccgcaaagcctccatcctcaacatgccactagtgacaacacttttctactcctgcttctatcactacacagaggctgaggggacattcagcagtcccgtcaacctgaagaagacatttaagatcccagataaacagtatgtgctgacagccctggctgctcgtgccaagcttcgagcctggaatgatgtagatgccctattcaccacaaagaactggctgggctataccaagaagagagcacccattggcttccatcgggttgtcgaaattttgcacaagaacaatgcccctgtgcagatattacaggagtatgtcaatctggtggaagatgtggacacgaagttgaacttagccactaagttcaagtgccatgatgtcgtcattgatacctaccgggacctgaaggatcgtcaacagttgctagcatacaggagtaaggtagataaaggatcagcagaggaggagaagattgatgctcttctcagcagctcgcaaattcgatggaagaattaagtggcattgactaccttgaagcctgcctcatttcctcctctcctgcctgtgaaagcagagagagctcttctttgggagagctgcggcatcacatcgcttgggcccattacccatgggcagtgccagctactcttgacacagataacttcagactgatcttctgtccaaggaacatcatctgaggatcgagatctaaagctttgagtcatgagaatgattctctccacctggtgctcatatgaaggtgggagtgatttctagattgggcccctactgggtaagatctcacttggtctgagaaaagtgactgctccagaaaggaagaggtatgggagtcatagggtggctactgcattccactcagctaattatgatccaggacttggcgctggacattggcagttctgctctgaatgaagtcagaacagaaccaaaatggcctcaggaaggaatgccagtgtttcccaagacctcctggagatgcactcacaccagactgcacagacccctccacattatgccacacatggcctagacgttgtgtttcctcagccattttccctctgctgccccagtttactctgtccaaaaccctaaggttcttctctcacttgaacacagacgaccttgcttgggtgatgagacatcccctttatctcttcctctactgctggccaagacccgtcactttataagaagctcagatgcagcagtgctggagagctctctctttatgcaaaaatctcatttcaccaggagctttcagaagtttcacctgggctaaattcagcagcatttctgttaggatatttagatggaggttttattttcacacttggattcttgctctgtaccaatatttgcctccttttctgtgactgaactgggtttttctgacatgcctagactcctaataaaggtatttcttccttggtgccttc

SEQ ID NO: 73543 - DNA, 1832 bp, Artificial Sequence
  derived and/or modified sequence
gaatagaagggctggtccagcggcggcggaggctggcgctgtcctgagagggagggctctgtgcggaagaggtgagggtgtcccaagccccttgggtcgcgtatctggctggatccagcctctccgcatcttgatcttttcccctcttctaggaggcatccctacaccctatgactacaggcctgattctcttctttcagtcagggcgacccttgggcgctggagtacgcttgggactggggctgcgaatgaatcggacaaagggtgatgaggaggagtattggaacagctccaagttcaaggcttttacctttgacgatgaagacgatgagctttcacagttaaaggagtccaagcgggcggtgaacagcctccgagacttcgtggatgatgatgacgatgatgacctggagcgagtcagctggagtggggaacctgtgggaagtatctcatggtccatcagagagactgctggtaatagcggctcaacccacgaggggcgtgaacagctaaagagccgaaacagcttctcctcctatgcacaactacccaagcctacttctacctactccctgagcagcttttttagaggtagaactagacctggaagtttccagtccctttctgatgctctgtcagacacacctgccaaaagctatgctccagagctggggagacccaaaggggagtatagggattacagcaatgactggagccccagtgatacagtgcgacgtctccggaagggcaaggtttgctcactagagagattccgctccttacaggacaaactacaactcctagaagaggcagtaagcatgcatgatggaaacgtcattactgcagttctgattttcctgaagaggacactgagcaaagagatcctcttccgagagctggaggtgcgacaggttgccctgagacatcttattcacttccttaaggaaataggggatcaaaagttgcttttagacctcttcaggttcctagatagaacagaagagcttgcgctatctcattatcgagagcatttgaacattcaggaccctgacaaacgaaaagaatttcttaaaacctgtgttggtttgccattttcagcagaagattccgcacacatacaggaccattacacgctcctggaacgtcagatcattattgaggcaaatgatcgccatctagaatcagcaggacagactgagatcttccgaaagcacccccgcaaagcctccatcctcaacatgccactagtgacaacacttttctactcctgcttctatcactacacagaggctgaggggacattcagcagtcccgtcaacctgaagaagacatttaagatcccagataaacagtatgtgctgacagccctggctgctcgtgccaagcttcgagcctggaatgatgtagatgccctattcaccacaaagaactggctgggctataccaagaagagagcacccattggcttccatcgggttgtcgaaattttgcacaagaacaatgcccctgtgcagatattacaggagtatgtcaatctggtggaagatgtggacacgaagttgaacttagccactaagttcaagtgccatgatgtcgtcattgatacctaccgggacctgaaggatcgtcaacagttgctagcatacaggagtaaggtagataaaggatcagcagaggaggagaagattgatgctcttctcagcagctcgcaaattcgatggaagaattaagtggcattgactaccttgaagcctgcctcatttcctcctctcctgcctgtgaaagcagagagagctcttctttgggagagctgcggcatcacatcgcttggg

SEQ ID NO: 73544 - DNA, 2562 bp, Artificial Sequence
  derived and/or modified sequence
gcggtctcgttattcgtgttttctctccgccctacgattattcccttccgcccccttctctaagctgcacagcctgaatagaagggctggtccagcggcggcggaggctggcgctgtcctgagagggagggctctgtgcggaagagatgaatcggacaaagggtgatgaggaggagtattggaacagctccaagttcaaggcttttacctttgacgatgaagacgatgagctttcacagttaaaggagtccaagcgggcggtgaacagcctccgagacttcgtggatgatgatgacgatgatgacctggagcgagtcagctggagtggggaacctgtgggaagtatctcatggtccatcagagagactgctggtaatagcggctcaacccacgaggggcgtgaacagctaaagagccgaaacagcttctcctcctatgcacaactacccaagcctacttctacctactccctgagcagcttttttagaggtagaactagacctggaagtttccagtccctttctgatgctctgtcagacacacctgccaaaagctatgctccagagctggggagacccaaaggggagtatagggattacagcaatgactggagccccagtgatacagtgcgacgtctccggaagggcaaggtttgctcactagagagattccgctccttacaggacaaactacaactcctagaagaggcagtaagcatgcatgatggaaacgtcattactgcagttctgattttcctgaagaggacactgagcaaagagatcctcttccgagagctggaggtgcgacaggttgccctgagacatcttattcacttccttaaggaaataggggatcaaaagttgcttttagacctcttcaggttcctagatagaacagaagagcttgcgctatctcattatcgagagcatttgaacattcaggaccctgacaaacgaaaagaatttcttaaaacctgtgttggtttgccattttcagcagaagattccgcacacatacaggaccattacacgctcctggaacgtcagatcattattgaggcaaatgatcgccatctagaatcagcaggacagactgagatcttccgaaagcacccccgcaaagcctccatcctcaacatgccactagtgacaacacttttctactcctgcttctatcactacacagaggctgaggggacattcagcagtcccgtcaacctgaagaagacatttaagatcccagataaacagtatgtgctgacagccctggctgctcgtgccaagcttcgagcctggaatgatgtagatgccctattcaccacaaagaactggctgggctataccaagaagagagcacccattggcttccatcgggttgtcgaaattttgcacaagaacaatgcccctgtgcagatattacaggagtatgtcaatctggtggaagatgtggacacgaagttgaacttagccactaagttcaagtgccatgatgtcgtcattgatacctaccgggacctgaaggatcgtcaacagttgctagcatacaggagtaaggtagataaaggatcagcagaggaggagaagattgatgctcttctcagcagctcgcaaattcgatggaagaattaagtggcattgactaccttgaagcctgcctcatttcctcctctcctgcctgtgaaagcagagagagctcttctttgggagagctgcggcatcacatcgcttgggcccattacccatgggcagtgccagctactcttgacacagataacttcagactgatcttctgtccaaggaacatcatctgaggatcgagatctaaagctttgagtcatgagaatgattctctccacctggtgctcatatgaaggtgggagtgatttctagattgggcccctactgggtaagatctcacttggtctgagaaaagtgactgctccagaaaggaagaggtatgggagtcatagggtggctactgcattccactcagctaattatgatccaggacttggcgctggacattggcagttctgctctgaatgaagtcagaacagaaccaaaatggcctcaggaaggaatgccagtgtttcccaagacctcctggagatgcactcacaccagactgcacagacccctccacattatgccacacatggcctagacgttgtgtttcctcagccattttccctctgctgccccagtttactctgtccaaaaccctaaggttcttctctcacttgaacacagacgaccttgcttgggtgatgagacatcccctttatctcttcctctactgctggccaagacccgtcactttataagaagctcagatgcagcagtgctggagagctctctctttatgcaaaaatctcatttcaccaggagctttcagaagtttcacctgggctaaattcagcagcatttctgttaggatatttagatggaggttttattttcacacttggattcttgctctgtaccaatatttgcctccttttctgtgactgaactgggtttttctgacatgcctagactcctaataaaggtatttcttccttgg

SEQ ID NO: 73545 - DNA, 1443 bp, Artificial Sequence
  derived and/or modified sequence
atgaacagaaccaagggcgacgaggaggagtactggaacagcagcaagttcaaggccttcaccttcgacgacgaggacgacgagctgagccagctgaaggagagcaagagagccgtgaacagcctgagagacttcgtggacgacgacgacgacgacgacctggagagagtgagctggagcggcgagcccgtgggcagcatcagctggagcatcagagagaccgccggcaacagcggcagcacccacgagggcagagagcagctgaagagcagaaacagcttcagcagctacgcccagctgcccaagcccaccagcacctacagcctgagcagcttcttcagagccctgagcgacacccccgccaagagctacgcccccgagctgggcagacccaagggcgagtacagagactacagcaacgactggagccccagcgacaccgtgagaagactgagaaagggcaaggtgtgcagcctggagagattcagaagcctgcaggacaagctgcagctgctggaggaggccgtgagcatgcacgacggcaacgtgatcaccgccgtgctgatcttcctgaagagaaccctgagcaaggagatcctgttcagagagctggaggtgagacaggtggccctgagacacctgatccacttcctgaaggagatcggcgaccagaagctgctgctggacctgttcagattcctggacagaaccgaggagctggccctgagccactacagagagcacctgaacatccaggaccccgacaagagaaaggagttcctgaagacctgcgtgggcctgcccttcagcgccgaggacagcgcccacatccaggaccactacaccctgctggagagacagatcatcatcgaggccaacgacagacacctggagagcgccggccagaccgagatcttcagaaagcaccccagaaaggccagcatcctgaacatgcccctggtgaccaccctgttctacagctgcttctaccactacaccgaggccgagggcaccttcagcagccccgtgaacctgaagaagaccttcaagatccccgacaagcagtacgtgctgaccgccctggccgccagagccaagctgagagcctggaacgacgtggacgccctgttcaccaccaagaactggctgggctacaccaagaagagagcccccatcggcttccacagagtggtggagatcctgcacaagaacaacgcccccgtgcagatcctgcaggagtacgtgaacctggtggaggacgtggacaccaagctgaacctggccaccaagttcaagtgccacgacgtggtgatcgacacctacagagacctgaaggacagacagcagctgctggcctacagaagcaaggtggacaagggcagcgccgaggaggagaagatcgacgccctgctgagcagcagccagatcagatggaagaactag

SEQ ID NO: 73546 - DNA, 1482 bp, Artificial Sequence
  derived and/or modified sequence
atgaacagaaccaagggcgacgaggaggagtactggaacagcagcaagttcaaggccttcaccttcgacgacgaggacgacgagctgagccagctgaaggagagcaagagagccgtgaacagcctgagagacttcgtggacgacgacgacgacgacgacctggagagagtgagctggagcggcgagcccgtgggcagcatcagctggagcatcagagagaccgccggcaacagcggcagcacccacgagggcagagagcagctgaagagcagaaacagcttcagcagctacgcccagctgcccaagcccaccagcacctacagcctgagcagcttcttcagaggcagaaccagacccggcagcttccagagcctgagcgacgccctgagcgacacccccgccaagagctacgcccccgagctgggcagacccaagggcgagtacagagactacagcaacgactggagccccagcgacaccgtgagaagactgagaaagggcaaggtgtgcagcctggagagattcagaagcctgcaggacaagctgcagctgctggaggaggccgtgagcatgcacgacggcaacgtgatcaccgccgtgctgatcttcctgaagagaaccctgagcaaggagatcctgttcagagagctggaggtgagacaggtggccctgagacacctgatccacttcctgaaggagatcggcgaccagaagctgctgctggacctgttcagattcctggacagaaccgaggagctggccctgagccactacagagagcacctgaacatccaggaccccgacaagagaaaggagttcctgaagacctgcgtgggcctgcccttcagcgccgaggacagcgcccacatccaggaccactacaccctgctggagagacagatcatcatcgaggccaacgacagacacctggagagcgccggccagaccgagatcttcagaaagcaccccagaaaggccagcatcctgaacatgcccctggtgaccaccctgttctacagctgcttctaccactacaccgaggccgagggcaccttcagcagccccgtgaacctgaagaagaccttcaagatccccgacaagcagtacgtgctgaccgccctggccgccagagccaagctgagagcctggaacgacgtggacgccctgttcaccaccaagaactggctgggctacaccaagaagagagcccccatcggcttccacagagtggtggagatcctgcacaagaacaacgcccccgtgcagatcctgcaggagtacgtgaacctggtggaggacgtggacaccaagctgaacctggccaccaagttcaagtgccacgacgtggtgatcgacacctacagagacctgaaggacagacagcagctgctggcctacagaagcaaggtggacaagggcagcgccgaggaggagaagatcgacgccctgctgagcagcagccagatcagatggaagaactag

SEQ ID NO: 73547 - DNA, 1560 bp, Artificial Sequence
  derived and/or modified sequence
atgaccaccggcctgatcctgttcttccagagcggcagacccctgggcgccggcgtgagactgggcctgggcctgagaatgaacagaaccaagggcgacgaggaggagtactggaacagcagcaagttcaaggccttcaccttcgacgacgaggacgacgagctgagccagctgaaggagagcaagagagccgtgaacagcctgagagacttcgtggacgacgacgacgacgacgacctggagagagtgagctggagcggcgagcccgtgggcagcatcagctggagcatcagagagaccgccggcaacagcggcagcacccacgagggcagagagcagctgaagagcagaaacagcttcagcagctacgcccagctgcccaagcccaccagcacctacagcctgagcagcttcttcagaggcagaaccagacccggcagcttccagagcctgagcgacgccctgagcgacacccccgccaagagctacgcccccgagctgggcagacccaagggcgagtacagagactacagcaacgactggagccccagcgacaccgtgagaagactgagaaagggcaaggtgtgcagcctggagagattcagaagcctgcaggacaagctgcagctgctggaggaggccgtgagcatgcacgacggcaacgtgatcaccgccgtgctgatcttcctgaagagaaccctgagcaaggagatcctgttcagagagctggaggtgagacaggtggccctgagacacctgatccacttcctgaaggagatcggcgaccagaagctgctgctggacctgttcagattcctggacagaaccgaggagctggccctgagccactacagagagcacctgaacatccaggaccccgacaagagaaaggagttcctgaagacctgcgtgggcctgcccttcagcgccgaggacagcgcccacatccaggaccactacaccctgctggagagacagatcatcatcgaggccaacgacagacacctggagagcgccggccagaccgagatcttcagaaagcaccccagaaaggccagcatcctgaacatgcccctggtgaccaccctgttctacagctgcttctaccactacaccgaggccgagggcaccttcagcagccccgtgaacctgaagaagaccttcaagatccccgacaagcagtacgtgctgaccgccctggccgccagagccaagctgagagcctggaacgacgtggacgccctgttcaccaccaagaactggctgggctacaccaagaagagagcccccatcggcttccacagagtggtggagatcctgcacaagaacaacgcccccgtgcagatcctgcaggagtacgtgaacctggtggaggacgtggacaccaagctgaacctggccaccaagttcaagtgccacgacgtggtgatcgacacctacagagacctgaaggacagacagcagctgctggcctacagaagcaaggtggacaagggcagcgccgaggaggagaagatcgacgccctgctgagcagcagccagatcagatggaagaactag

SEQ ID NO: 73548 - protein, 444 aa, Artificial Sequence
  derived and/or modified sequence
MNRTKGDEEEYWNSSKFKAFTFDDEDDELSQLKESKRAVNSLRDFVDDDDDDDLERVSWSGEPVGSRTRPGSFQSLSDALSDTPAKSYAPELGRPKGEYRDYSNDWSPSDTVRRLRKGKVCSLERFRSLQDKLQLLEEAVSMHDGNVITAVLIFLKRTLSKEILFRELEVRQVALRHLIHFLKEIGDQKLLLDLFRFLDRTEELALSHYREHLNIQDPDKRKEFLKTCVGLPFSAEDSAHIQDHYTLLERQIIIEANDRHLESAGQTEIFRKHPRKASILNMPLVTTLFYSCFYHYTEAEGTFSSPVNLKKTFKIPDKQYVLTALAARAKLRAWNDVDALFTTKNWLGYTKKRAPIGFHRVVEILHKNNAPVQILQEYVNLVEDVDTKLNLATKFKCHDVVIDTYRDLKDRQQLLAYRSKVDKGSAEEEKIDALLSSSQIRWKN

SEQ ID NO: 73549 - DNA, 1335 bp, Artificial Sequence
  derived and/or modified sequence
atgaaccggaccaagggagatgaagaggaatactggaactcctctaaatttaaggcctttacgtttgacgacgaggacgatgagctaagccagttaaaagagtccaaaagagcagtgaacagtcttagggacttcgtggacgacgatgacgacgatgatctcgaacgtgtgagttggagcggagagcccgtcgggtctcggactagaccaggaagctttcagtcactgagtgacgcactgagtgatacgccggcgaaaagctacgcccccgaactcggcagacccaaaggggagtatagagactattccaatgactggtctccttccgatacagtgagacggctgcggaagggtaaggtgtgtagcttggaacgcttccggtccctgcaggacaaattacagctgctggaagaggccgtcagtatgcacgacggcaacgtcataacagcagtgctgatcttcctgaagaggactctctccaaggagattctgtttcgtgagctggaagtccgtcaggtcgctctgcgtcacctcattcatttcctgaaagaaattggcgatcaaaagctcttacttgacctgttcagattcctggacaggacagaggagttggccttaagccactatcgggagcatctcaatattcaggaccccgacaaacgtaaggaatttttaaagacttgcgtgggtctgcccttctctgctgaggactccgcacatattcaagaccattacaccttactggaaagacagatcatcatcgaggccaacgacaggcacctcgaaagtgccggtcagacagagatcttcaggaaacatcctcgtaaggcctccattctcaatatgccactggtcacaaccctgttctacagctgtttttatcattatacggaggccgaggggaccttcagcagtcctgtgaatctcaaaaagaccttcaaaattccagacaagcagtacgtgcttacagccctggcagcgagagctaagctgagggcttggaatgacgtcgacgcactgtttacgaccaaaaattggcttgggtacactaagaagagggctcctatcggatttcatcgtgtcgtggagatcctgcataaaaacaatgctcctgttcagatcctacaagaatacgtcaatctcgtcgaagatgtcgacacaaaacttaatttagctacgaaattcaagtgtcacgatgtggtgattgacacctacagggacttaaaggataggcagcagctgctggcgtacaggagcaaagtggacaaagggtccgccgaggaggagaagattgacgcacttctatcgagctcccaaattagatggaaaaactag

SEQ ID NO: 73550 - DNA, 138 bp, Artificial Sequence
  derived and/or modified sequence
atgaaccgcaccaagggggacgaagaagagtattggaactcttctaaattcaaagctttcacatttgacgacgaggacgatgaactttcgcagctgaaagagagtaagagggccgtcaactcactgcgtgatttttag

SEQ ID NO: 73551 - DNA, 1335 bp, Artificial Sequence
  derived and/or modified sequence
atgaacagaaccaagggagatgaggaggagtactggaacagcagcaagttcaaggccttcacctttgatgatgaagatgatgagctgagccagctgaaggagagcaagagagctgtgaacagcctgcgggactttgtggatgatgatgatgatgatgacctggagcgggtgtcctggagcggggagcctgtgggcagcaggacccggcccggcagcttccagagcctgagtgatgccctgagtgacaccccagccaagagctatgcccctgagctgggccggcccaagggggagtacagagactacagcaatgactggagccccagcgacacagtgcggcggctgaggaagggcaaggtgtgcagcctggagcgcttccgcagcctgcaggacaagctgcagctgctggaggaggccgtgtccatgcatgatggaaatgtcatcacagctgtgctgatcttcctgaagaggaccctgagcaaggagatcctcttccgggagctggaggtgcggcaggtggccctgcggcacctgatccacttcctgaaggagattggagaccagaagctgctgctggacctcttccgcttcctggacagaacagaggagctggccctgagccactaccgggagcacctgaacatccaggaccctgacaagaggaaggagttcctgaagacctgtgtgggcctgcccttctctgctgaggacagcgcccacatccaggaccactacaccctgctggagcggcagatcatcatcgaggccaatgacagacacctggagagcgctggccagacagagatcttcaggaagcaccccaggaaggccagcatcctgaacatgcccctggtgaccaccctcttctacagctgcttctaccactacacagaagctgagggcaccttcagcagccctgtgaacctgaagaagaccttcaagatcccagacaagcagtatgtgctgacagccctggccgcccgggccaagctgcgggcctggaatgatgtggatgccctcttcaccaccaagaactggctgggctacaccaagaagagggcccccatcggcttccaccgggtggtggagatcctgcacaagaacaatgcccctgtgcagatcctgcaggagtatgtgaacctggtggaggatgtggacaccaagctgaacctggccaccaagttcaagtgccatgatgtggtgattgacacctacagagacctgaaggaccggcagcagctgctggcctaccgcagcaaggtggacaagggcagcgctgaggaggagaagattgatgccctgctgagcagcagccagatccgctggaagaactag

SEQ ID NO: 73552 - DNA, 138 bp, Artificial Sequence
  derived and/or modified sequence
atgaacagaaccaagggagatgaggaggagtactggaacagcagcaagttcaaggccttcacctttgatgatgaagatgatgagctgagccagctgaaggagagcaagagagctgtgaacagcctgcgggacttctag

SEQ ID NO: 73553 - DNA, 1335 bp, Artificial Sequence
  derived and/or modified sequence
atgaaccggaccaagggcgacgaggaggagtactggaacagcagcaagtttaaggcctttactttcgatgatgaagacgacgagttatcacagctgaaagaatcaaagagggctgttaacagcctgcgagacttcgtggatgatgatgatgacgatgacctggagcgggtctcttggtcaggggagcctgttggttcacggactcgcccaggcagttttcagtccctaagcgacgctctgagcgacacccctgctaagtcctacgcgcctgagctggggcgccccaagggggagtaccgcgattacagcaatgattggagtcctagcgacaccgtgcggcgcttgcggaaaggcaaggtatgctcactcgagcggtttaggagcttgcaggataagttgcagttgttagaagaggccgtgtctatgcatgatggcaacgtgatcacagccgtcttgatatttttgaagcggacattatccaaggagatcttattcagagaactcgaggtgcggcaggtcgcactgcgccatctcattcattttttaaaggaaataggagatcaaaagctgctgttggaccttttcaggtttctggacaggacagaggaacttgcactaagccactacagggaacatctgaatatccaggatcccgataaaaggaaggaatttctcaagacttgtgtgggtttgccgttctccgctgaagactccgctcatattcaggatcattacactcttttggagcgacagataattattgaagccaatgacaggcacttggagagtgccggtcagactgaaatcttcagaaagcacccaagaaaagcttccatattgaacatgccgctcgtaactactctgttttattcctgcttttatcactatactgaggctgagggaactttttcctcccctgtgaacctcaaaaagaccttcaagattccagacaaacagtacgttctgactgccctagccgctagggcaaaattgcgagcatggaacgacgttgatgccctgttcaccaccaagaattggctcggatatacaaaaaagagagcccctattggctttcatagagttgtcgaaatactacacaagaataacgctccagtgcagatccttcaggaatatgtgaacctggtagaggacgtggacacgaaactgaatctggctactaaatttaaatgtcatgatgttgtgattgacacatacagggacctcaaggatcggcaacagctgctggcttatagaagtaaggtggataaaggctctgctgaagaggagaaaattgacgcactgctgagcagctcacagatccgctggaaaaactag

SEQ ID NO: 73554 - DNA, 138 bp, Artificial Sequence
  derived and/or modified sequence
atgaaccggaccaagggcgacgaggaggagtactggaacagcagcaagttcaaggcatttacgttcgatgatgaggatgatgaactttctcagctcaaggaatcaaagcgggccgtgaactctctgagggacttttag

SEQ ID NO: 73555 - DNA, 1335 bp, Artificial Sequence
  derived and/or modified sequence
atgaacaggaccaagggggatgaagaggagtactggaacagcagcaagtttaaagcgttcacgtttgacgatgaagatgatgaattatcccagctcaaggagtcgaagagggctgtgaactccctccgcgatttcgtggatgacgacgatgacgatgatcttgaacgcgtgtcttggagtggagaacccgttggctccaggactcgcccaggcagctttcaatcactgagtgacgccctgtccgatacgcctgcaaaaagctatgccccagaactgggacgtccgaaaggcgaatacagagattactcgaatgactggtcgccttctgatactgtgcggaggttacgaaagggaaaagtctgtagcctagagcgatttagatctcttcaggacaaattgcagttgctggaggaagctgtgagtatgcatgacggcaacgtgataaccgctgtcctcattttcctcaagaggaccttgagtaaggaaatcctatttagagagctggaagtgagacaggtggctctcagacacctgatccatttcctcaaagaaattggggatcagaagctgttattggatctcttcagatttctggaccggacagaagagctcgccctgtcgcattatagggaacatctaaatatccaggatccagacaagaggaaggagttcctgaagacgtgcgttgggttacctttcagcgctgaggactccgcccatatccaggaccattacaccctgctcgagcgccagatcattattgaggccaacgaccgtcacttggaatctgctgggcaaaccgaaatttttagaaagcatcccaggaaggcttcaatactaaacatgcccctggtgaccaccctcttctattcctgtttctaccactacacagaggctgaagggactttcagtagccccgttaatttgaagaaaacattcaaaattccagataagcaatacgtgctcacagctcttgctgccagagccaagctccgtgcttggaacgacgtggatgccctgtttacaactaagaactggttgggatataccaaaaaaagggccccaatcggattccaccgtgtggtggagatcttgcacaaaaataatgccccagtgcagatcctgcaggaatatgtgaacctagtggaggacgtggataccaaattaaatttggctactaaattcaaatgccatgacgttgtaatcgatacctatagagacctgaaggatcggcaacaattactcgcctacagatctaaggttgacaagggtagcgctgaggaggagaagatcgatgccctcctatcgtcctcacagattcgctggaagaattag

SEQ ID NO: 73556 - DNA, 138 bp, Artificial Sequence
  derived and/or modified sequence
atgaacagaaccaagggcgacgaggaggaatactggaatagttccaaatttaaggcctttacatttgatgatgaggacgatgagctgtctcagctgaaggagagcaagcgagccgtcaacagtctgagggacttttag

SEQ ID NO: 73557 - DNA, 1623 bp, Artificial Sequence
  derived and/or modified sequence
cttctctaagctgcacagcctgaatagaagggctggtccagcggcggcggaggctggcgctgtcctgagagggagggctctgtgcggaagagatgaatcggacaaagggtgatgaggaggagtattggaacagctccaagttcaaggcttttacctttgacgatgaagacgatgagctttcacagttaaaggagtccaagcgggcggtgaacagcctccgagacttcgtggatgatgatgacgatgatgacctggagcgagtcagctggagtggggaacctgtgggaagtagaactagacctggaagtttccagtccctttctgatgctctgtcagacacacctgccaaaagctatgctccagagctggggagacccaaaggggagtatagggattacagcaatgactggagccccagtgatacagtgcgacgtctccggaagggcaaggtttgctcactagagagattccgctccttacaggacaaactacaactcctagaagaggcagtaagcatgcatgatggaaacgtcattactgcagttctgattttcctgaagaggacactgagcaaagagatcctcttccgagagctggaggtgcgacaggttgccctgagacatcttattcacttccttaaggaaataggggatcaaaagttgcttttagacctcttcaggttcctagatagaacagaagagcttgcgctatctcattatcgagagcatttgaacattcaggaccctgacaaacgaaaagaatttcttaaaacctgtgttggtttgccattttcagcagaagattccgcacacatacaggaccattacacgctcctggaacgtcagatcattattgaggcaaatgatcgccatctagaatcagcaggacagactgagatcttccgaaagcacccccgcaaagcctccatcctcaacatgccactagtgacaacacttttctactcctgcttctatcactacacagaggctgaggggacattcagcagtcccgtcaacctgaagaagacatttaagatcccagataaacagtatgtgctgacagccctggctgctcgtgccaagcttcgagcctggaatgatgtagatgccctattcaccacaaagaactggctgggctataccaagaagagagcacccattggcttccatcgggttgtcgaaattttgcacaagaacaatgcccctgtgcagatattacaggagtatgtcaatctggtggaagatgtggacacgaagttgaacttagccactaagttcaagtgccatgatgtcgtcattgatacctaccgggacctgaaggatcgtcaacagttgctagcatacaggagtaaggtagataaaggatcagcagaggaggagaagattgatgctcttctcagcagctcgcaaattcgatggaagaattaagtggcattgactaccttgaagcctgcctcatttcctcctctcctgcctgtgaaagcagagagagctcttctttgggagagctgcggcatcacatcgcttgggcccattacccatgggcagtgccagctactcttgacacagataacttcagactgatcttctgtccaaggaacatcatctgaggatcgagatctaa

SEQ ID NO: 73558 - DNA, 533 bp, Artificial Sequence
  derived and/or modified sequence
acagcctgaatagaagggctggtccagcggcggcggaggctggcgctgtcctgagagggagggctctgtgcggaagaggaggcatccctacaccctatgactacaggcctgattctcttctttcagtcagggcgacccttgggcgctggagtacgcttgggactggggctgcgagtgagcaccagcgattggttcggaagcggacatttggttcagaacgagcatttaactctgccagggatccgctgggctctgacgactgcggtagatccatggcttcctggacgttcacccgtagagtcatcctagcttaactcttgttccctggtctcagttcacaagcctcacctgtatcttcctggctcggaagataattgaaaccaagtctgacttctcaatgaatcggacaaagggtgatgaggaggagtattggaacagctccaagttcaaggcttttacctttgacgatgaagacgatgagctttcacagttaaaggagtccaagcgggcggtgaacagcctccgagacttcg

SEQ ID NO: 73559 - DNA, 1335 bp, Artificial Sequence
  derived and/or modified sequence
atgaacagaaccaagggcgacgaggaggagtactggaacagcagcaagttcaaggccttcaccttcgacgacgaggacgacgagctgagccagctgaaggagagcaagagagccgtgaacagcctgagagacttcgtggacgacgacgacgacgacgacctggagagagtgagctggagcggcgagcccgtgggcagcagaaccagacccggcagcttccagagcctgagcgacgccctgagcgacacccccgccaagagctacgcccccgagctgggcagacccaagggcgagtacagagactacagcaacgactggagccccagcgacaccgtgagaagactgagaaagggcaaggtgtgcagcctggagagattcagaagcctgcaggacaagctgcagctgctggaggaggccgtgagcatgcacgacggcaacgtgatcaccgccgtgctgatcttcctgaagagaaccctgagcaaggagatcctgttcagagagctggaggtgagacaggtggccctgagacacctgatccacttcctgaaggagatcggcgaccagaagctgctgctggacctgttcagattcctggacagaaccgaggagctggccctgagccactacagagagcacctgaacatccaggaccccgacaagagaaaggagttcctgaagacctgcgtgggcctgcccttcagcgccgaggacagcgcccacatccaggaccactacaccctgctggagagacagatcatcatcgaggccaacgacagacacctggagagcgccggccagaccgagatcttcagaaagcaccccagaaaggccagcatcctgaacatgcccctggtgaccaccctgttctacagctgcttctaccactacaccgaggccgagggcaccttcagcagccccgtgaacctgaagaagaccttcaagatccccgacaagcagtacgtgctgaccgccctggccgccagagccaagctgagagcctggaacgacgtggacgccctgttcaccaccaagaactggctgggctacaccaagaagagagcccccatcggcttccacagagtggtggagatcctgcacaagaacaacgcccccgtgcagatcctgcaggagtacgtgaacctggtggaggacgtggacaccaagctgaacctggccaccaagttcaagtgccacgacgtggtgatcgacacctacagagacctgaaggacagacagcagctgctggcctacagaagcaaggtggacaagggcagcgccgaggaggagaagatcgacgccctgctgagcagcagccagatcagatggaagaactag

SEQ ID NO: 73560 - DNA, 138 bp, Artificial Sequence
  derived and/or modified sequence
atgaacagaaccaagggcgacgaggaggagtactggaacagcagcaagttcaaggccttcaccttcgacgacgaggacgacgagctgagccagctgaaggagagcaagagagccgtgaacagcctgagagacttctag

SEQ ID NO: 73561 - DNA, 492 bp, Artificial Sequence
  derived and/or modified sequence
atgtgcactgtgggaggcaatgtaagtgaggatgcatgttacggagaacccctagaatttcccgagaataccaagaaccgcgctacgctggggtcatcctcgcccacagctggccacacaccgcagcgcaaggaaatcaggatatcgaagatgtaccttcacattccaatccactgttcaacaacttacaatgggcgtgacttggagagcaccagtgtcccaatcaacaggaggaccgataagaaaaacgtggtgagaagacactccgggtattgtagtgcacgcgaggagcggaaccctgtgatttcagccgcatggatgtcccttgaggaactcggcaaatctgctcgctgtagaaaaacaaataccccagggagccacaccagtgtcggcgcaaagaaagccgaattaaaagctgttgtcatggactgttggttacccgagtccggcgaaggcgtgcgcgttcgagcgcgaagggagaacaaactgtag

SEQ ID NO: 73562 - DNA, 2096 bp, Artificial Sequence
  derived and/or modified sequence
acttggacctgatgcaaggaaacaacctccagccaccttcccccaggcctttagagtgctggtctttgcacagagaagcaccacagaggacagaagcctccaggactcacccttccccatttctggccctaccaggcagccacagaacagccaaccaggcgcaggtggttcctggtctcgtgcaccaccctcaagagaacacacagagacttagaattagagcaggactcagcccattccccagggctcgcctagctgccatcggatccacacatggacacaggtgggtcccgggtatttgcctccctcgctgcctctgccctgccagctgtgccctccacgcttgcccgccccactgcaataatgcagaagcacacagctggctgaggctgggaggcccccttcagagccgtagtgtggagcaccaacaacatgcatgtggctggggctgggtgacgcatgccacctatggtgagcgtggcaccagtcaggctgcagagaggcagaggatagcccacaccagggctctcagtgtggggaactgcccacgctctcatttccagtgtgaattctcttctatctctaagtggagtgaaggaacaggaacattttccccaaggcccagagctgttaaatcaggggttggaggtcagccctcgccacacattagaatcacctggagaagctgtactacactgacatccaagccctgctccagagcaattacaccagaatgtgtggtgggttggagtagaagaagcaggcattggtattctgatatgaggacgggtgagtgccaaggtctcagccccataacaaggtgaggtcctacaggcctcagaatgtggtagcacgtgggaaattgtcctctcttctcaggaggggccagtgttcacacaggcaggggatggagagtgggcctgatctgagaaggcggaacccaaaactcctgaaggggacagtgtgacagaaggttctacttaagggccactgccactgtccttatcccaggggcacctagtgttctcctaaaggagacttctcaatataaccaggtggaacggtagaaagaatccagatttgatttgattttacccctcaaaagccctgaagaatctagattgtagaggcaggcagagccacatacgagtcttgggtctgccacttactagccatgtgatgtgcagaggagacctgttctcagagcctcagtttcctcacctaggaaatagggtgatgatatctactgtatagggcaggtgttgtaggagtaaataagctgagctacagaaatctcccagccaactgcctggtccacccagggacagaaaaccactcctctgctcacaccccttcactcactcctccctctgcctcagggctccacaaagccctgggtcctctgaagcctagaagggccaggccaggccctgggctccaggagctcaggaggggctgttacctcatcctcttgccgtgtgtgactaaggacgcttgatacttctgcacgcactcctcctggaacacctgcaggagtcttttggctaaatgactgaaattcaccctagaacgacagagaaccaaggtgcagatgagctgccagaaccactatgcacaagcccaccatccctcagtctccgtcagtctccgtcaccaccttgtcgtaagtgcccaagccctgcgtccacagcagggctatgtctctgggaaaggaggaaggacggtcacacacttggattgtgaaggttgcagtggccagcaaagcccacatcaacagggagacgtgggagacacacagggggtcctcagggaacacacatgtgctcaagcttagtcctcaggaaagggaagggaaagtgaggcagccgtggaaagaaggtgtgtgagtgcgtgtgtgtgtgagacaaaaaggggtcggggtgcttgtagaactgggggagtgagttcccagataaccattaaatcagggagggcctcctggacgtgagtgtgtccgggaaacatgggagacagaggagcggggggaggcagggaaggttcaggcagagggcagaagcaggaagtggtaagtggtgcatcagtgaggacaactagag

SEQ ID NO: 73563 - DNA, 1896 bp, Artificial Sequence
  derived and/or modified sequence
atggagtactgttcaagcgggagccttctcagcgtgctcgaaagcccggagaatgccttcggcttgccggaggacgaattcctggttgtgttgcgctgtgtggtggccggcatgaatcacctgagagaaaatggaattgtgcatagggacatcaagcctggaaacatcatgagactggtcggagaagagggccagtctatctacaagctgaccgacttcggagccgcccgcgagctggacgatgatgaaaagtttgtttcagtgtatggcacggaggaatacctgcacccagacatgtacgaaagggcagttcttcgcaaaccgcagcagaaggccttcggagtgacagtcgacctatggtcaattggcgtgactctgtaccacgcagccactggcagtcttcctttcatccccttcgggggtccaagaaggaacaaggagattatgtacagaataactactgagaaaccagcaggagctatagccggagcacaacggcgtgagaacggaccgcttgaatggtcctacacattacctatcacttgtcagcttagcctcgggctgcagagccaattggtccccattttggctaacatcttggaagtggagcaggccaaatgctggggttttgaccaattcttcgctgagacctctgatatcctccagagagtcgtggtccatgtcttctctctctctcaagcagtgcttcaccatatatatatccacgctcacaatactattgcgattttccaggaagctgtgcacaaacagactagtgttgccccacggcatcaggagtatctcttcgaaggccatctttgtgtgttagaaccaagtgtgagtgctcagcacatcgcgcataccaccgctagctcacccttaaccctgtttagcaccgccataccaaaaggacttgcatttcgcgaccccgccctcgacgtgcctaagtttgtgccgaaggtggacctccaggcagactataacaccgctaaaggtgtgctgggagccggataccaagctctcaggctcgcaagggcgttactcgatggacaggaactcatgtttcgagggctacattgggtgatggaggtattgcaggcaacatgtcggaggacattggaagtggcacggacatccctcctctatctaagctcttctcttgggactgagcgttttagcagcgtcgccggcacaccagaaattcaggagttgaaagccgctgctgagctgcgcagccgtctgagaactctggccgaagtactgtcccggtgctcacagaacattaccgagactcaggagagcctctcgtcactcaatcgcgagctggtcaaatcccgtgaccaggtgcatgaggataggagtatccagcagatacagtgctgcctggacaagatgaattttatctacaaacagttcaagaagtccagaatgagacccggcctggggtataacgaggaacagattcataaactggataaggtgaacttttcccaccttgccaaacgactgctgcaggtctttcaggaggagtgtgtgcagaagtaccaggccagcttagtcactcacggaaagaggatgcgggtcgtccacgagacgcggaatcatctgagattggtcggatgttccgtggccgcttgcaacaccgaagcccagggcgttcaggaaagtctgagtaagctactggaggaactgtcccatcagttactgcaggaccgggccaaaggtgcgcaggctagccctccaccaattgccccatatcctagccctacaaggaaagacttactactgcacatgcaggaactctgcgaaggcatgaagttgctggcatccgatttactggacaataacaggatcattgaaaggctgaatcgtgtgcccgctccgcctgacgtgtag

SEQ ID NO: 73564 - DNA, 1896 bp, Artificial Sequence
  derived and/or modified sequence
atggagtactgcagcagcggcagcctgctgtctgtgctggagagcccagaaaatgccttcggcctgcctgaagatgagttcctggtggtgctgcgctgtgtggtggccggcatgaaccacctgagagaaaatggcatcgtgcaccgggacatcaagccaggcaacatcatgaggctggtgggggaggagggccagagcatctacaagctgacagactttggagctgcccgggagctggatgatgatgagaagtttgtgtctgtgtatggaacagaggagtacctgcacccagacatgtatgaaagagctgtgctgaggaagccccagcagaaggcctttggagtgacagtggacctgtggagcattggagtgaccctgtaccacgccgccaccggcagcctgcccttcatcccctttggaggccccaggaggaacaaggagatcatgtaccgcatcaccacagagaagccagctggggccatcgccggggcccagaggcgggagaatggccccctggagtggagctacaccctgcccatcacctgccagctgagcctgggcctgcagagccagctggtgcccatcctggccaacatcctggaggtggagcaggccaagtgctggggctttgaccagttctttgctgagaccagtgacatcctgcagagggtggtggtgcacgtgttcagcctgagccaggccgtgctgcaccacatctacatccacgcccacaacaccatcgccatcttccaggaggccgtgcacaagcagacctctgtggcccccaggcaccaggagtacctgtttgagggccacctgtgtgtgctggagcccagcgtgtctgcccagcacatcgcccacaccacagccagcagccccctgaccctcttcagcacagccatccccaagggcctggccttccgggaccctgccctggatgtgcccaagtttgtgcccaaggtggacctgcaggccgactacaacacagccaagggcgtgctgggcgccggctaccaggccctgcggctggcccgggccctgctggatggccaggagctgatgttccggggcctgcactgggtgatggaggtgctgcaggccacctgcaggaggaccctggaggtggcccggaccagcctgctgtacctgagcagcagcctgggcacagagcgcttcagctctgtggccggcaccccagagatccaggagctgaaggctgctgctgagctgcggagccggctgcggaccctggccgaggtgctgagccgctgcagccagaacatcacagagacccaggagagcctgagcagcctgaaccgggagctggtgaagagccgggaccaggtgcatgaagatagaagcatccagcagatccagtgctgcctggacaagatgaacttcatctacaagcagttcaagaagagcaggatgaggcctggcctgggctacaatgaggagcagatccacaagctggacaaggtgaacttcagccacctggccaagaggctgctgcaggtgttccaggaggagtgtgtgcagaagtaccaggccagcctggtgacccacggcaagaggatgagggtggtgcatgagaccaggaaccacctgcggctggtgggctgcagcgtggccgcctgcaacacagaggcccagggcgtgcaggagagcctgagcaagctgctggaggagctgagccaccagctgctgcaggaccgggccaagggggcccaggccagccccccacccatcgccccctaccccagccccaccaggaaggacctgctgctgcacatgcaggagctgtgtgagggcatgaagctgctggccagtgacctgctggacaacaaccgcatcatcgagcggctgaacagagtgcctgcccccccagatgtgtag

SEQ ID NO: 73565 - DNA, 1896 bp, Artificial Sequence
  derived and/or modified sequence
atggagtactgcagcagcggcagcctgctgagcgtgctggagagcccagagaatgccttcggactgcccgaagacgagttccttgtcgtactgaggtgcgtcgttgcgggtatgaatcatttacgagaaaatggaatcgtgcaccgcgatataaagccagggaacatcatgcgcctcgtaggggaagagggccaaagcatctataagctgacagacttcggtgcagcccgggaactggatgatgacgaaaagtttgtttccgtgtatggcacagaagaatacctacaccccgacatgtatgagagagcagtcctacggaagcctcagcaaaaagccttcggggtcactgtcgacctttggtcgatcggagtgaccctttatcacgcggctaccggttccttacccttcatcccatttgggggaccacgcagaaacaaagagatcatgtacaggattacaaccgagaaaccagctggggctattgcaggagcccaaagacgtgagaacggtccactggaatggtcttatactctgcctatcacctgccaacttagcctcggcctccagtcccaacttgtgcccatcttggccaacatcctcgaagtggagcaggctaaatgttggggtttcgaccaattctttgctgaaactagcgatattttgcagagagtcgtggtgcatgttttttccttgtcccaggccgttctccatcatatttacatccatgctcataatacgattgccatcttccaggaagccgtccacaagcaaacttcagtagcccccaggcatcaggaatatctgtttgaaggccacctgtgcgtgctggaacctagtgtgtcagcacagcacatcgctcacacaacggcaagtagcccattaacactcttttccacagctatacccaaggggctggcattccgggaccccgctctggacgtgcctaaatttgttccaaaagtggatctgcaggccgactacaatactgccaaaggggttctgggtgcaggatatcaagccctgcgcttagctagagctttgctggatgggcaagaactaatgtttcgaggcttgcattgggtcatggaggtgctgcaggccacttgccgccgcaccctggaggtcgctagaaccagtcttctgtatctcagctcctctctaggaaccgaacgattttccagcgtggccggcacccccgagattcaagagctcaaggccgccgccgaacttcgaagtcgactgaggacactggctgaagttctcagtcggtgttcccaaaacattactgagacacaggagtccttaagcagcctcaaccgggaactggtcaagagtcgcgaccaggtacatgaggataggagcatccagcagattcaatgttgtctggacaaaatgaactttatttataagcagtttaagaaaagcaggatgaggccaggactgggttataacgaagaacagattcacaagcttgataaagtcaacttttctcacctcgccaaacggctcctgcaagtgttccaggaggagtgcgtccagaagtaccaagcctccctggtgacacacggtaaacgcatgagagtggtacacgagacgcgcaaccatctgcgcctcgtgggctgcagtgttgcagcatgtaacaccgaggcccagggggtgcaggagtcactctcaaagctactggaggaactctctcaccagctgctgcaggacagagcaaagggcgcccaggcttcgcccccccctatcgctccatatcccagccccacccgcaaggatctgctgctgcacatgcaagagttgtgcgagggaatgaagctactagcttctgatttgctcgacaataataggattattgagagattgaatcgagtgccggccccacctgacgtgtag

SEQ ID NO: 73566 - DNA, 1896 bp, Artificial Sequence
  derived and/or modified sequence
atggagtactgtagtagtggatcccttctgtcagtactggaatcccctgagaacgccttcgggctcccagaagatgaattcctggtagtgttaagatgtgtggtagccggaatgaatcatctgcgcgaaaacggtattgtgcacagggacatcaaaccaggaaacataatgagattagttggagaagaagggcaatctatctataagctgacagacttcggagctgcccgtgagctcgatgatgatgagaaattcgtgtctgtctatggaaccgaagagtacttgcatccggacatgtacgagagagctgttctgcgaaagccacagcaaaaggctttcggggtcactgtggatctatggtcaatcggggtgacactttatcacgccgctacggggagcctaccctttatcccgtttggcggacctcgcagaaataaggaaattatgtaccggattacaacagaaaaaccagcaggcgcaattgccggagcacaacgcagagaaaacggacccctagagtggagttacacgttacctattacctgtcagttatccctgggactacaaagccaactggttcctattctggcgaacattctggaggttgaacaagccaagtgttggggattcgaccaattcttcgcagaaacatctgatattctgcagagagtcgtggtccacgttttcagtctttctcaggctgtactccatcatatctatattcacgctcacaataccattgccatatttcaagaggcagtgcacaaacagacatctgtggctcctcgccaccaggagtacctgttcgaaggccacctgtgtgtgctcgaaccttccgtttccgcccaacacatagcacacacaaccgcatctagtcccctgactttgttttccaccgcaattccaaaaggtctagcctttagagaccctgccttggatgtccccaaatttgtgcccaaagttgatctccaggctgattacaacaccgctaaaggcgttctcggcgctggttatcaggctctgcggctcgctagggccttattggacggccaggaactaatgtttagaggcctgcattgggttatggaggtgttgcaagccacatgccggcgtactttagaggtggccaggacctctctactgtatctgagctctagcctggggacggagagatttagctctgtcgctggcactccagagattcaggagctaaaggccgctgcagagttgcggagcaggctgcgcacccttgccgaagtgctgtcaagatgctctcagaacattaccgaaacccaggagagcctctctagccttaacagggagctggtgaagtctcgtgatcaagtgcacgaggatcgcagcatccagcagatccagtgttgccttgacaagatgaatttcatctacaaacagttcaagaaaagtagaatgcgcccagggctcggctataacgaggagcagatccacaaactggacaaagttaatttcagccacctcgcgaaacggttgcttcaggtgtttcaagaagaatgtgtccagaaatatcaggctagcctggttactcatggaaagcgtatgcgcgtcgtccacgagaccaggaaccatctccgattagtcggatgcagcgtcgctgcttgtaacactgaggctcaaggggtacaggagagcttgtcaaagttgttggaagaactgagccatcaattgttacaggaccgcgcaaaaggtgcgcaggcgtccccgccacccattgccccatacccctctcccactcgcaaggatctgctgctgcacatgcaagagttgtgtgaggggatgaaattgttggcgtccgacctcttagacaataaccgcattattgaaaggctgaatagggtacccgcacccccagatgtctag

SEQ ID NO: 73567 - DNA, 1896 bp, Artificial Sequence
  derived and/or modified sequence
atggagtactgcagcagcggcagcctgctgagcgtgctggagagccccgagaacgccttcggcctgcccgaggacgagttcctggtggtgctgagatgcgtggtggccggcatgaaccacctgagagagaacggcatcgtgcacagagacatcaagcccggcaacatcatgagactggtgggcgaggagggccagagcatctacaagctgaccgacttcggcgccgccagagagctggacgacgacgagaagttcgtgagcgtgtacggcaccgaggagtacctgcaccccgacatgtacgagagagccgtgctgagaaagccccagcagaaggccttcggcgtgaccgtggacctgtggagcatcggcgtgaccctgtaccacgccgccaccggcagcctgcccttcatccccttcggcggccccagaagaaacaaggagatcatgtacagaatcaccaccgagaagcccgccggcgccatcgccggcgcccagagaagagagaacggccccctggagtggagctacaccctgcccatcacctgccagctgagcctgggcctgcagagccagctggtgcccatcctggccaacatcctggaggtggagcaggccaagtgctggggcttcgaccagttcttcgccgagaccagcgacatcctgcagagagtggtggtgcacgtgttcagcctgagccaggccgtgctgcaccacatctacatccacgcccacaacaccatcgccatcttccaggaggccgtgcacaagcagaccagcgtggcccccagacaccaggagtacctgttcgagggccacctgtgcgtgctggagcccagcgtgagcgcccagcacatcgcccacaccaccgccagcagccccctgaccctgttcagcaccgccatccccaagggcctggccttcagagaccccgccctggacgtgcccaagttcgtgcccaaggtggacctgcaggccgactacaacaccgccaagggcgtgctgggcgccggctaccaggccctgagactggccagagccctgctggacggccaggagctgatgttcagaggcctgcactgggtgatggaggtgctgcaggccacctgcagaagaaccctggaggtggccagaaccagcctgctgtacctgagcagcagcctgggcaccgagagattcagcagcgtggccggcacccccgagatccaggagctgaaggccgccgccgagctgagaagcagactgagaaccctggccgaggtgctgagcagatgcagccagaacatcaccgagacccaggagagcctgagcagcctgaacagagagctggtgaagagcagagaccaggtgcacgaggacagaagcatccagcagatccagtgctgcctggacaagatgaacttcatctacaagcagttcaagaagagcagaatgagacccggcctgggctacaacgaggagcagatccacaagctggacaaggtgaacttcagccacctggccaagagactgctgcaggtgttccaggaggagtgcgtgcagaagtaccaggccagcctggtgacccacggcaagagaatgagagtggtgcacgagaccagaaaccacctgagactggtgggctgcagcgtggccgcctgcaacaccgaggcccagggcgtgcaggagagcctgagcaagctgctggaggagctgagccaccagctgctgcaggacagagccaagggcgcccaggccagccccccccccatcgccccctaccccagccccaccagaaaggacctgctgctgcacatgcaggagctgtgcgagggcatgaagctgctggccagcgacctgctggacaacaacagaatcatcgagagactgaacagagtgcccgccccccccgacgtgtag

SEQ ID NO: 73568 - protein, 566 aa, Artificial Sequence
  derived and/or modified sequence
MDIQLDPARDDLPLMANTSHILVKHYVLDLDVDFESQVIEGTIVLFLEDGNRFKKQNSSIEEACQSESNKACKFGMPEPCHIPVTNARTFSSEMEYNDFAICSKGEKDTSDKDGNHDNQEHASGISSSKYCCDTGNHGSEDFLLVLDCCDLSVLKVEEVDVAAVPGLEKFTRSPELTVVSEEFRNQIVRELVTLPANRWREQLDYYARCSQAPGCGELLFDTDTWSLQIRKTGAQTATDFPHAIRIWYKTKPEGRSVTWTSDQSGRPCVYTVGSPINNRALFPCQEPPVAMSTWQATVRAAASFVVLMSGENSAKPTQLWEECSSWYYYVTMPMPASTFTIAVGCWTEMKMETWSSNDLATERPFSPSEANFRHVGVCSHMEYPCRFQNASATTQEIIPHRVFAPVCLTGACQETLLRLIPPCLSAAHSVLGAHPFSRLDVLIVPANFPSLGMASPHIMFLSQSILTGGNHLCGTRLCHEIAHAWFGLAIGARDWTEEWLSEGFATHLEDVFWATAQQLAPYEAREQQELRACLRWRRLQDEMQCSPEEMQVLRFPHVGGCSGSFS

SEQ ID NO: 73569 - protein, 186 aa, Artificial Sequence
  derived and/or modified sequence
MEYPCRFQNASATTQEIIPHRVFAPVCLTGACQETLLRLIPPCLSAAHSVLGAHPFSRLDVLIVPANFPSLGMASPHIMFLSQSILTGGNHLCGTRLCHEIAHAWFGLAIGARDWTEEWLSEGFATHLEDVFWATAQQLAPYEAREQQELRACLRWRRLQDEMQCSPEEMQVLRFPHVGGCSGSFS

SEQ ID NO: 73570 - DNA, 1701 bp, Artificial Sequence
  derived and/or modified sequence
atggacatacagctggaccctgccagggatgatctgcccttgatggctaacacatcacatatcctggtaaagcattatgtgctggacctcgacgttgactttgaaagtcaggtgattgaaggaacgatcgtcctcttcctcgaagatggaaatcggttcaaaaaacaaaatagctccatcgaagaggcctgccagtccgaaagcaataaagcatgcaaattcggcatgcccgaaccgtgccacattcctgtgaccaatgctaggactttcagcagtgaaatggaatacaacgacttcgccatttgctctaagggtgaaaaggacacgagcgacaaggatggcaatcatgacaatcaggaacacgcaagtggaatatctagttcaaagtattgctgcgatacaggtaaccatggcagtgaagacttcttgctcgtactcgactgctgtgacttatcagtgctgaaggtagaggaagtggacgtcgccgcagtgcccgggttggagaagttcactcgctcacccgagttgacagtcgtttctgaagagttcaggaatcagatcgtgcgggaattggtcaccctccccgctaataggtggcgggaacaattggattattatgcaagatgcagtcaagctcccgggtgcggagagctacttttcgacacagatacctggagtctgcagatcagaaaaaccggtgctcaaaccgcgactgattttccgcacgcaatcaggatctggtataagaccaaacctgagggccgctctgttacctggaccagcgaccaatccggcagaccctgcgtttacacagtggggtccccaatcaacaatcgggccctattcccctgccaggaaccacccgtagctatgtctacttggcaggcgaccgtgagagcagctgcaagcttcgtagtgttaatgagcggcgagaattctgctaagcccacacaactttgggaggaatgcagctcatggtattattacgtgactatgccaatgccggcgagtaccttcactatcgctgttgggtgctggacagaaatgaagatggagacgtggtcatccaacgatctcgcaacagaacgccctttcagtccatcagaggcaaacttccgccatgtgggtgtctgttctcacatggagtacccttgcaggttccaaaacgccagcgccaccactcaggaaattattcctcatagggtattcgcccctgtctgcttaacaggggcctgccaagagacgttgcttcggcttattcccccctgcctttctgcggcacacagcgtgctgggcgcacatcctttttcccgcctggatgtactgatagtgcctgcaaacttcccctctctgggaatggcatctccccatatcatgttcttatcccagtccatcctgactggaggcaatcatctctgcggaacccggctgtgccatgaaattgcacacgcctggttcgggcttgccataggggccagagactggacggaggaatggctctcagagggtttcgccacccacttggaggatgtcttttgggccaccgcgcagcagctcgctccatacgaagcccgagagcaacaagagctgcgcgcgtgccttaggtggcgacgtctccaggatgaaatgcagtgttctccagaggaaatgcaggtcttgcgcttccctcatgtaggcggctgcagcggttcatttagctag

SEQ ID NO: 73571 - DNA, 1701 bp, Artificial Sequence
  derived and/or modified sequence
atggacatccagctggaccctgccagagatgacctgcccctgatggccaacaccagccacatcctggtgaagcactacgtgctggacctggatgtggactttgagagccaggtgattgagggcaccatcgtgctcttcctggaggatggcaaccgcttcaagaagcagaacagcagcattgaggaggcctgccagagcgagagcaacaaggcctgcaagtttggcatgcctgagccctgccacatccctgtgaccaatgcccggaccttcagcagcgagatggagtacaatgactttgccatctgcagcaagggggagaaggacaccagtgacaaggatggcaaccacgacaaccaggagcacgccagcggcatcagcagcagcaagtactgctgtgacaccggcaaccacggcagcgaggacttcctgctggtgctggactgctgtgacctgtctgtgctgaaggtggaggaggtggatgtggccgctgtgcccggcctggagaagttcaccaggagccctgagctgactgtggtgtctgaggagttcaggaaccagatcgtgcgggagctggtgaccctgcctgccaaccgctggagggagcagctggactactatgcccgctgcagccaggcccctggctgtggggagctgctgtttgacacagacacctggagcctgcagatcaggaagacaggagcccagacagccacagacttcccccacgccatccgcatctggtacaagaccaagccagagggccgctctgtgacctggaccagtgaccagagcggccggccctgtgtgtacacagtgggcagccccatcaacaacagagccctcttcccctgccaggagccccctgtggccatgagcacctggcaggccaccgtgcgggctgctgccagctttgtggtgctgatgtctggagaaaattctgccaagcccacccagctgtgggaggagtgcagctcctggtactactacgtgaccatgcccatgcctgccagcaccttcaccatcgctgtgggctgctggacagagatgaagatggagacctggagcagcaatgacctggccacagagcggcccttcagccccagcgaggccaacttccgccacgtgggcgtgtgcagccacatggagtacccctgccgcttccagaatgccagcgccaccacccaggagatcatcccccaccgggtgtttgcccctgtgtgcctgactggagcctgccaggagaccctgctgcggctcatccccccctgcctgtctgctgcccacagcgtgctgggcgcccaccccttcagccggctggatgtgctgattgtgcctgccaacttccccagcctgggcatggccagcccccacatcatgttcctgagccagagcatcctgactggaggcaaccacctgtgtggcacccggctgtgccatgaaattgcccacgcctggtttggcctggccatcggggcccgggactggacagaggagtggctgtctgagggctttgccacccacctggaggatgtgttctgggccacagcccagcagctggccccctatgaggcccgggagcagcaggagctgcgggcctgcctgcgctggaggcggctgcaggatgagatgcagtgcagccctgaggagatgcaggtgctgcgcttcccccacgtgggcggctgcagcggcagcttctcctag

SEQ ID NO: 73572 - DNA, 1701 bp, Artificial Sequence
  derived and/or modified sequence
atggacatccagctggaccccgcccgggacgacctgcccctgatggctaacacatcccacatcttggtgaaacactatgtactggatctcgacgtggacttcgaatcacaggttattgaaggcacgatcgtgctatttctggaggacggcaacaggttcaagaagcagaacagttcgattgaggaggcttgccagagcgaaagcaacaaagcatgcaagttcgggatgcccgaaccatgccatatcccagttactaacgccaggacttttagctctgaaatggagtacaatgactttgcaatttgcagtaagggcgagaaggacacctccgataaagatggcaatcacgacaatcaggaacacgcctccgggatatcgagctctaagtactgctgcgacacaggcaaccatggcagcgaagattttcttctggtgttggactgttgcgatcttagtgtgttaaaggtggaagaggtagacgtggctgccgtcccagggcttgagaaatttactcgatcacccgagttgacagtggtgtccgaggagtttagaaaccagatcgttagagaactggtcaccctgcctgcaaacaggtggcgagagcagttggactattacgcacgctgtagccaggctcctgggtgtggagaactgctgtttgataccgacacttggtccctgcagatcaggaaaacgggcgcccagacagcaactgacttcccgcatgccatacggatatggtacaagaccaaaccagagggccgctccgttacttggacatcagatcaatctggccgcccttgtgtgtataccgtagggtctcctataaacaatcgcgccctttttccttgtcaggaacctcctgtcgcaatgagtacttggcaggctacggtgcgggccgcagcgagcttcgtggtcctgatgtcaggggagaattctgcgaagcccacacagctgtgggaagaatgctcaagttggtattactacgtgacaatgccaatgccagcttcaacctttactattgcagtgggatgttggaccgaaatgaaaatggaaacttggagcagcaacgatctggctacagagcgccctttctccccaagtgaagcaaatttccgccatgttggcgtttgcagccacatggagtacccctgcaggttccagaatgcaagcgccactacccaggaaattatcccacatagggtcttcgccccagtgtgcctcaccggcgcctgtcaggagacacttcttaggttgatccctccgtgtctgtccgcggcccacagcgtgctgggagctcaccccttttcacgactggatgtccttatcgtgccagcgaacttcccgtccctcggtatggcatcaccacacatcatgttcctcagccagagcatcctcaccggaggaaatcatctgtgtggaaccagactctgtcatgaaatcgcccacgcatggtttggcttggccattggagctagggattggacagaggaatggctgtcagaggggttcgctactcatctcgaggacgtgttttgggccacagctcagcagctggctccatacgaagcccgagagcagcaggagcttagagcgtgcttacggtggaggagactgcaggatgaaatgcagtgttcgcctgaagagatgcaagttctgagatttccacacgtgggaggctgcagtggctcttttagctag

SEQ ID NO: 73573 - DNA, 1701 bp, Artificial Sequence
  derived and/or modified sequence
atggacatccagctggatcctgcccgtgacgacttgccactcatggcaaatacgtcgcacatccttgtcaagcactacgtgctcgatctggacgttgatttcgaatcacaagtaatagagggtacaatcgtgctgtttctggaggatgggaataggtttaagaagcaaaattcctccattgaagaggcctgtcaaagcgagagtaacaaggcgtgcaagttcggcatgccagagccttgtcacatccccgtcaccaacgcacggacgttcagctctgagatggagtataacgattttgcaatttgctctaaaggagaaaaggataccagcgataaagatggcaaccatgacaaccaagaacacgccagcggcatttcaagcagtaaatattgctgtgacactgggaatcacggttctgaggattttctcctagttctggactgctgcgatttgtcagtgcttaaggtcgaagaagtggacgtggctgccgtgcccggtctagagaaattcacacgatcacccgaattaaccgtggtatccgaggagtttcggaaccaaattgtccgcgagttagtgaccctcccagccaaccggtggcgcgagcaactcgactactatgcgcgttgtagccaggcaccagggtgcggggagttgttgtttgatacagatacctggagtcttcaaataaggaaaaccggcgctcaaacagctacagacttcccccacgctatccggatctggtacaaaacgaaacctgaaggtaggtccgtcacatggacttctgaccagtctggccgaccttgcgtctatacagtgggctcacccattaataaccgggctctgttcccatgccaagagccgcctgtggctatgtcaacatggcaggccaccgtgcgagcagccgcatcctttgtagtcctgatgtccggagagaactcagcgaagccgacccagttatgggaggaatgcagctcatggtactattacgtgactatgccaatgcctgcctccacttttactattgcagtgggttgctggactgagatgaaaatggagacgtggtccagtaacgacctggccacagaacgtcccttttccccttccgaagccaattttcgccacgtgggagtttgttcacatatggagtatccttgtcggttccaaaatgcatctgccacgacccaagaaattatcccacacagggtatttgcacccgtgtgcctgactggcgcttgccaggaaaccctgctgcgactgattccgccttgcttgtccgcagctcacagtgtgctaggggctcatccctttagccgccttgatgttttgatagtacctgccaatttccccagcctgggcatggcctctcctcatattatgttcctgtcgcaaagcattctgactggagggaaccatctgtgcgggacacgtctgtgccacgagattgcccatgcatggttcggcttagctataggtgctcgcgattggaccgaagaatggctgtctgaaggttttgccacacacctcgaagacgttttttgggcaactgcacaacaactggcgccttacgaagcacgcgaacagcaggagctgcgggcatgtttacggtggaggagactgcaagacgagatgcagtgctctcccgaagagatgcaggtgctccgcttccctcacgtgggcggttgttcaggatcgttctcatag

SEQ ID NO: 73574 - DNA, 1966 bp, Artificial Sequence
  derived and/or modified sequence
agtaaccccgagtctgcggaagtggtgacccgtgggacgcggctgagacaggagactgaaaggaaccataatttgtgacatcagttgttttctttgataagcagctatttatgattctggaagattaaggcagataggaaaccccatctgagattttaataaatccctcaaacaataaaccacatcatggacatacagctggaccctgccagagatgacctgcctctcatggccaacaccagccacatacttgtgaagcactatgtactggatttggatgtggattttgaaagtcaagtcattgaggggaccatagtgcttttcctcgaggatggaaacagattcaagaaacagaatagctctattgaggaagcctgccaatcagaatcaaacaaagcctgcaaatttgggatgcctgaaccctgccatattcccgtgacaaatgcaaggaccttctcatctgaaatggaatataatgattttgcaatctgtagtaaaggtgaaaaagatacttctgataaagatggtaaccatgacaaccaggaacatgcttctgggatttctagctcaaagtactgctgtgacacagggaatcatgggagtgaggattttttgctagtgttggactgctgtgatttatctgtgttaaaagtcgaggaggtggatgttgctgctgtgccaggtctggaaaaatttacaaggtctcctgagctcacggttgtttctgaggagttcaggaatcagattgtacgtgaacttgtgactttgcctgcaaatcgttggagggagcagttagactattacgctcgctgcagccaggctcctggctgtggggaactcctctttgacactgacacttggagcttgcagataaggaagacaggggctcagacagctactgactttcctcatgctatcaggatatggtacaaaactaaacctgaagggcgatcggttacatggacctcagaccagagtggcaggccatgtgtttatactgtgggatctcccataaacaacagggccctttttccatgccaggagccacccgttgccatgtcaacatggcaggctacagttcgagcagctgcatcttttgttgttttaatgagtggggaaaattctgccaaaccaacgcagctttgggaagagtgctcaagctggtattactatgtaactatgccaatgccagcctccaccttcacaattgcagtgggatgctggacagaaatgaagatggagacatggtcatcaaatgatttggcaacagagagacccttctcaccttctgaggccaacttcaggcatgttggtgtttgcagtcacatggaatacccctgccgcttccagaatgcttctgccaccacccaggagatcattcctcatcgggtctttgcccctgtgtgcctcacgggtgcctgccaagagacccttctgcggctgatccctccttgcctctcagcagcacattctgttctgggagcacacccgttctctcggctggatgttctcatcgtccctgccaactttccaagtctggggatggccagcccacacatcatgttcctctctcagagcatcttgacaggagggaaccatctctgtgggacccgcctctgccatgaaattgcccatgcctggtttggcctagccatcggggcccgagactggacggaggagtggctgagtgaaggcttcgccactcacttggaggatgtgttttgggccacagcacagcagctggccccctatgaggcccgggagcagcaggagctgagggcttgtctgcgctggcgtcgcctccaggacgagatgcaatgctcccccgaggagatgcaggtgttaaggtttccacatgttggcggatgcagtggaagcttctcttgagatctttgccacactgttcaacatgtttgaccactctgtcctaaaaacgctttcttcttaaagcactttctcctcctgg

SEQ ID NO: 73575 - DNA, 1701 bp, Artificial Sequence
  derived and/or modified sequence
atggacatccagctggaccccgccagagacgacctgcccctgatggccaacaccagccacatcctggtgaagcactacgtgctggacctggacgtggacttcgagagccaggtgatcgagggcaccatcgtgctgttcctggaggacggcaacagattcaagaagcagaacagcagcatcgaggaggcctgccagagcgagagcaacaaggcctgcaagttcggcatgcccgagccctgccacatccccgtgaccaacgccagaaccttcagcagcgagatggagtacaacgacttcgccatctgcagcaagggcgagaaggacaccagcgacaaggacggcaaccacgacaaccaggagcacgccagcggcatcagcagcagcaagtactgctgcgacaccggcaaccacggcagcgaggacttcctgctggtgctggactgctgcgacctgagcgtgctgaaggtggaggaggtggacgtggccgccgtgcccggcctggagaagttcaccagaagccccgagctgaccgtggtgagcgaggagttcagaaaccagatcgtgagagagctggtgaccctgcccgccaacagatggagagagcagctggactactacgccagatgcagccaggcccccggctgcggcgagctgctgttcgacaccgacacctggagcctgcagatcagaaagaccggcgcccagaccgccaccgacttcccccacgccatcagaatctggtacaagaccaagcccgagggcagaagcgtgacctggaccagcgaccagagcggcagaccctgcgtgtacaccgtgggcagccccatcaacaacagagccctgttcccctgccaggagccccccgtggccatgagcacctggcaggccaccgtgagagccgccgccagcttcgtggtgctgatgagcggcgagaacagcgccaagcccacccagctgtgggaggagtgcagcagctggtactactacgtgaccatgcccatgcccgccagcaccttcaccatcgccgtgggctgctggaccgagatgaagatggagacctggagcagcaacgacctggccaccgagagacccttcagccccagcgaggccaacttcagacacgtgggcgtgtgcagccacatggagtacccctgcagattccagaacgccagcgccaccacccaggagatcatcccccacagagtgttcgcccccgtgtgcctgaccggcgcctgccaggagaccctgctgagactgatccccccctgcctgagcgccgcccacagcgtgctgggcgcccaccccttcagcagactggacgtgctgatcgtgcccgccaacttccccagcctgggcatggccagcccccacatcatgttcctgagccagagcatcctgaccggcggcaaccacctgtgcggcaccagactgtgccacgagatcgcccacgcctggttcggcctggccatcggcgccagagactggaccgaggagtggctgagcgagggcttcgccacccacctggaggacgtgttctgggccaccgcccagcagctggccccctacgaggccagagagcagcaggagctgagagcctgcctgagatggagaagactgcaggacgagatgcagtgcagccccgaggagatgcaggtgctgagattcccccacgtgggcggctgcagcggcagcttcagctag

SEQ ID NO: 73576 - DNA, 561 bp, Artificial Sequence
  derived and/or modified sequence
atggagtacccctgcagattccagaacgccagcgccaccacccaggagatcatcccccacagagtgttcgcccccgtgtgcctgaccggcgcctgccaggagaccctgctgagactgatccccccctgcctgagcgccgcccacagcgtgctgggcgcccaccccttcagcagactggacgtgctgatcgtgcccgccaacttccccagcctgggcatggccagcccccacatcatgttcctgagccagagcatcctgaccggcggcaaccacctgtgcggcaccagactgtgccacgagatcgcccacgcctggttcggcctggccatcggcgccagagactggaccgaggagtggctgagcgagggcttcgccacccacctggaggacgtgttctgggccaccgcccagcagctggccccctacgaggccagagagcagcaggagctgagagcctgcctgagatggagaagactgcaggacgagatgcagtgcagccccgaggagatgcaggtgctgagattcccccacgtgggcggctgcagcggcagcttcagctag

SEQ ID NO: 73577 - DNA, 942 bp, Artificial Sequence
  derived and/or modified sequence
agcttttgatgggctgtgtaaagaacatttagattactattcagtaaaatggtttgtgttctttcgaggagtttgagcctgtaactttcatttggttcatggttctccctcagtccaagtcttttattctaggcatgttggtgtttgcagtcacatggaatacccctgccgcttccagaatgcttctgccaccacccaggagatcattcctcatcgggtctttgcccctgtgtgcctcacgggtgcctgccaagagacccttctgcggctgatccctccttgcctctcagcagcacattctgttctgggagcacacccgttctctcggctggatgttctcatcgtccctgccaactttccaagtctggggatggccagcccacacatcatgttcctctctcagagcatcttgacaggagggaaccatctctgtgggacccgcctctgccatgaaattgcccatgcctggtttggcctagccatcggggcccgagactggacggaggagtggctgagtgaaggcttcgccactcacttggaggatgtgttttgggccacagcacagcagctggccccctatgaggcccgggagcagcaggagctgagggcttgtctgcgctggcgtcgcctccaggacgagatgcaatgctcccccgaggagatgcaggtgttaaggtttccacatgttggcggatgcagtggaagcttctcttgagatctttgccacactgttcaacatgtttgaccactctgtcctaaaaacgctttcttcttaaagcactttctcctcctggcttctgtgtgtcttactctccttgagttccctctgcctctgtggccagtccttcctcacctctcttgctggcaggttaacagtctccacttcaatagcccaaggctcagaaagactgagtaatgcgtctaacctcctctagctgataa

SEQ ID NO: 73578 - DNA, 561 bp, Artificial Sequence
  derived and/or modified sequence
atggagtatccttgcaggtttcagaacgcctctgctacaacccaagagataattccacatagagttttcgcccccgtctgcctgactggggcctgtcaggaaactctgttaagactgatacctccctgcttaagcgccgcgcactcagtgctgggcgcgcacccattctcacgactggatgtcctgattgtccccgcaaattttccatctttgggaatggctagcccccatataatgtttctcagccagtcaatcctgacaggcggcaaccacctatgcggtacgcgcctctgccacgaaatcgcccacgcgtggttcggcctcgccattggcgcacgcgactggactgaagaatggctttccgaggggttcgccacccacctggaagacgttttttgggccacagcccagcagctggcgccttatgaagccagagagcaacaggaactcagggcttgcctacggtggagacgcctgcaggatgagatgcagtgctcccctgaggagatgcaggttttgcgattcccacatgttgggggctgttccggctccttttcctag

SEQ ID NO: 73579 - DNA, 561 bp, Artificial Sequence
  derived and/or modified sequence
atggagtacccctgccgcttccagaatgccagcgccaccacccaggagatcatcccccaccgggtgtttgcccctgtgtgcctgactggagcctgccaggagaccctgctgcggctcatccccccctgcctgtctgctgcccacagcgtgctgggcgcccaccccttcagccggctggatgtgctgattgtgcctgccaacttccccagcctgggcatggccagcccccacatcatgttcctgagccagagcatcctgactggaggcaaccacctgtgtggcacccggctgtgccatgaaattgcccacgcctggtttggcctggccatcggggcccgggactggacagaggagtggctgtctgagggctttgccacccacctggaggatgtgttctgggccacagcccagcagctggccccctatgaggcccgggagcagcaggagctgcgggcctgcctgcgctggaggcggctgcaggatgagatgcagtgcagccctgaggagatgcaggtgctgcgcttcccccacgtgggcggctgcagcggcagcttctcctag

SEQ ID NO: 73580 - DNA, 561 bp, Artificial Sequence
  derived and/or modified sequence
atggagtacccctgccggttccagaacgccagcgccaccacccaggagataatcccccatcgggtattcgcccctgtctgtctgaccggggcttgccaagagacgttgctgcggttgatcccgccttgtctcagcgcggctcatagcgttctgggagcccaccccttctcgagactggatgtgttgatcgttccagccaacttcccaagcctcggcatggcatcccctcatattatgttcctttcacaatcaatactgaccggcggcaaccatttatgcggcacgcgcctctgtcacgagatagcccacgcctggttcggtttggccatcggggcacgtgattggacagaagagtggctttctgaggggttcgcaacccatctggaagacgtgttctgggctaccgcccagcagttggctccgtacgaagcacgcgaacaacaggagctacgagcatgcctgcgctggcgccggcttcaggacgaaatgcaatgctctcccgaagagatgcaggtcctaaggtttcctcatgtgggggggtgctcaggttcattctcatag

SEQ ID NO: 73581 - DNA, 561 bp, Artificial Sequence
  derived and/or modified sequence
atggaatacccttgtagattccagaacgctagtgcaaccactcaggagattataccccaccgagtgtttgctccggtgtgccttacaggtgcctgccaggaaacactgctgaggttaattccaccctgcctttctgccgctcactccgtgttgggggcacaccctttttcgcgcctggacgttttgattgtacctgcgaacttcccttccctgggtatggcctccccacatatcatgtttctttcacagtctattctgactggcggtaaccatctttgcgggacaaggctctgccatgagatcgcccacgcctggttcggcttggccatcggtgctcgagactggaccgaagagtggctgtctgaagggttcgcgacgcaccttgaggacgtgttctgggccacagcccagcagttagccccatatgaggccagagaacagcaggaattgcgagcgtgcctcagatggcgcaggcttcaggacgagatgcagtgttccccagaggaaatgcaggtgctgcggtttcctcacgttggcggttgcagtgggtccttcagctag

SEQ ID NO: 73582 - protein, 243 aa, Artificial Sequence
  derived and/or modified sequence
MKEYVLLLFLALCSAKPFFSPSHIALKNMMLKDMEDTDDDDDDDDDDDDDDEDNSLFPTREPRSHFFPFDLFPMCPFGCQCYSRVVHCSDLGLTSVPTNIPFDTRMLDLQNNKIKEIKENDFKGLTSLYGLILNNNKLTKIHPKAFLTTKKLRRLYLSHNQLSEIPLNLPKSLAELRIHENKVKKIQKDTFKGMNALHVLEMSANPLDNNGIEPGAFEGVTVFHIRIAEAKLTSVPKVNLPQF

SEQ ID NO: 73583 - protein, 243 aa, Artificial Sequence
  derived and/or modified sequence
MKEYVLLLFLALCSAKPFFSPSHIALKNMMLKDMEDTDDDDDDDDDDDDDDEDNSLFPTREPRSHFFPFDLFPMCPFGCQCYSRVVHCSDLGLTSVPTNIPFDTRMLDLQNNKIKEIKENDFKGLTSLYGLILNNNKLTKIHPKAFLTTKKLRRLYLSHNQLSEIPLNLPKSLAELRIHENKVKKIQKDTFKGMNALHVLEMSANPLDNNGIEPGAFEGVTVFHIRIAEAKLTSVPKDNLPSF

SEQ ID NO: 73584 - DNA, 732 bp, Artificial Sequence
  derived and/or modified sequence
atgaaagagtatgtgctcctactgtttcttgccctgtgctccgccaagcccttcttcagtccatctcacatcgccctgaaaaatatgatgctgaaggacatggaggataccgacgacgatgacgatgacgacgacgacgacgacgacgatgatgaagataattcacttttcccgactagagaaccccgctcccatttttttccttttgacctctttcctatgtgtccttttgggtgccaatgttattctcgggtggtacactgctcagatctgggattgacctcagttcctacaaacatcccgttcgacacgcggatgctggatctgcagaataataaaataaaggaaattaaggagaatgacttcaaagggctcacatccctttatggactcatcttgaacaataacaagcttaccaagatccaccctaaggcttttctaaccacaaagaagctgagaagactttatctcagccataaccagctttctgagatacctctgaatctacctaagtcactggcagagctgaggatccacgaaaacaaagttaaaaagatacagaaagacacattcaaaggcatgaacgctctgcatgtcctggagatgtccgctaacccactggataataacggcattgagcccggtgcattcgaaggagtcacagtatttcatatccggatcgcagaggcaaaactcactagcgttcctaaggtgaatctgccccagttctag

SEQ ID NO: 73585 - DNA, 243 bp, Artificial Sequence
  derived and/or modified sequence
atgatgctgaaggacatggaggacaccgacgatgatgatgatgacgacgatgacgatgatgatgacgacgaggacaatagtttgtttcccaccagagaaccacgcagccacttctttcctttcgacctgtttcccatgtgcccatttggatgtcagtgctattcccgggttgtccattgctcagatctaggcctgactagtgtgcctacgaacatacctctaatcctggaatgccttatctag

SEQ ID NO: 73586 - DNA, 732 bp, Artificial Sequence
  derived and/or modified sequence
atgaaggagtatgtccttctgctgttcttagctttgtgctctgctaaaccttttttctcccctagccacatcgccctgaaaaacatgatgttgaaagacatggaagatacagacgacgatgacgatgatgacgacgacgacgacgacgatgatgaggataactccctgttccccaccagggagccgaggtctcatttctttccctttgaccttttccccatgtgcccattcggttgccagtgttacagccgggttgtgcactgtagcgatctaggactcacttctgtccccactaatataccatttgatactcggatgctggatctacagaacaataagataaaggagatcaaagaaaatgatttcaaaggcctgaccagtctgtatggacttatcctcaacaataacaaactgacaaaaatccacccaaaggcgtttttaacgacaaaaaaactgcgcagactctacctcagccacaaccagctaagcgaaatccccctgaatcttccaaaaagtttagctgaactgcgaattcatgaaaacaaggtcaagaagattcagaaggacactttcaaaggtatgaacgcattgcacgttcttgaaatgtcagcaaaccctttggacaacaacggaatcgaacccggggcttttgaaggggtaacagtcttccatatccgaatcgcagaggcgaaactcacttctgtcccaaaggacaatttgcctagcttttag

SEQ ID NO: 73587 - DNA, 732 bp, Artificial Sequence
  derived and/or modified sequence
atgaaggagtatgtgctgctgctcttcctggccctgtgcagcgccaagcccttcttcagccccagccacatcgccctgaagaacatgatgctgaaggacatggaggacacagatgatgatgatgatgatgatgatgatgatgatgatgatgatgaggacaacagcctcttccccacccgggagcccaggagccacttcttcccctttgacctcttccccatgtgccccttcggctgccagtgctacagccgggtggtgcactgcagcgacctgggcctgacctctgtgcccaccaacatcccctttgacaccaggatgctggacctgcagaacaacaagatcaaggagatcaaggaaaatgacttcaagggcctgaccagcctgtatggcctcatcctgaacaacaacaagctgaccaagatccaccccaaggccttcctgaccaccaagaagctgcggcggctgtacctgagccacaaccagctgtctgagatccccctgaacctgcccaagagcctggccgagctgcgcatccacgagaacaaggtgaagaagatccagaaggacaccttcaagggcatgaatgccctgcacgtgctggagatgtctgccaaccccctggacaacaacggcatcgagcccggggcctttgaaggagtgacagtgttccacatcagaattgctgaggccaagctgacctctgtgcccaaggtgaacctgccccagttctag

SEQ ID NO: 73588 - DNA, 243 bp, Artificial Sequence
  derived and/or modified sequence
atgatgctgaaggacatggaggacacagatgatgatgatgatgatgatgatgatgatgatgatgatgatgaggacaacagcctcttccccacccgggagcccaggagccacttcttcccctttgacctcttccccatgtgccccttcggctgccagtgctacagccgggtggtgcactgcagcgacctgggcctgacctctgtgcccaccaacatccccctcatcctggagtgcctgatctag

SEQ ID NO: 73589 - DNA, 732 bp, Artificial Sequence
  derived and/or modified sequence
atgaaggagtatgtgctgctgctcttcctggccctgtgcagcgccaagcccttcttcagccccagccacatcgccctgaagaacatgatgctgaaggacatggaggacacagatgatgatgatgatgatgatgatgatgatgatgatgatgatgaggacaacagcctcttccccacccgggagcccaggagccacttcttcccctttgacctcttccccatgtgccccttcggctgccagtgctacagccgggtggtgcactgcagcgacctgggcctgacctctgtgcccaccaacatcccctttgacaccaggatgctggacctgcagaacaacaagatcaaggagatcaaggaaaatgacttcaagggcctgaccagcctgtatggcctcatcctgaacaacaacaagctgaccaagatccaccccaaggccttcctgaccaccaagaagctgcggcggctgtacctgagccacaaccagctgtctgagatccccctgaacctgcccaagagcctggccgagctgcgcatccacgagaacaaggtgaagaagatccagaaggacaccttcaagggcatgaatgccctgcacgtgctggagatgtctgccaaccccctggacaacaacggcatcgagcccggggcctttgaaggagtgacagtgttccacatcagaattgctgaggccaagctgacctctgtgcccaaggacaacctgcccagcttctag

SEQ ID NO: 73590 - DNA, 732 bp, Artificial Sequence
  derived and/or modified sequence
atgaaggagtacgtgctgctgctgttcctggccctgtgcagcgccaagccatttttttcccctagccacattgcactcaaaaatatgatgctaaaagacatggaagataccgacgatgatgacgacgatgatgacgacgacgacgatgatgatgaggataattccctgttccccacccgggagccaagatcacatttcttccccttcgacctgtttccaatgtgtccattcggctgccagtgctattctcgtgtagttcattgttctgacctggggctgacctctgtccctactaatataccctttgacaccaggatgttggaccttcaaaataacaagatcaaggagatcaaggagaatgactttaagggtttgacttccctatacggcctgattctaaacaataataagctgactaagattcatccaaaggcttttctcacgacaaagaaacttagaaggttgtatctttctcacaaccaactcagtgagatccccctgaaccttcctaaaagcctggccgagctgcgaatccatgaaaataaagtcaagaagattcaaaaagatacattcaagggaatgaatgcactccatgtactcgaaatgtcagctaatcccctggacaataacggcatcgaaccaggtgccttcgaaggggtcacggtcttccacatccgtatagccgaggctaaattgacttccgtgccgaaggtgaaccttccgcagttttag

SEQ ID NO: 73591 - DNA, 243 bp, Artificial Sequence
  derived and/or modified sequence
atgatgctgaaggacatggaggacaccgacgacgacgacgacgacgacgacgacgacgacgacgatgacgaggataatagcctatttcccacgcgcgagccccgtagccatttcttccctttcgatttatttcctatgtgcccatttggctgtcagtgttatagcagagtggtgcattgctccgacctggggctgacatcagttcccaccaacatccctctgatcctcgagtgcctcatttag

SEQ ID NO: 73592 - DNA, 732 bp, Artificial Sequence
  derived and/or modified sequence
atgaaggagtacgtgctgctgctgttcctggccctgtgcagcgccaagccatttttcagcccatcccacatcgctctcaagaacatgatgctcaaagatatggaggatactgacgacgatgacgatgatgacgacgatgacgacgacgatgacgaagataattctctctttcctacacgcgaaccaaggtcacacttttttcctttcgatctgttcccgatgtgtcctttcggctgtcagtgttacagccgagtcgtccactgttcagaccttggcctgacatccgtccccaccaacattccattcgacacccgcatgttggatctgcagaacaataagatcaaagagatcaaagaaaatgattttaaaggactgacctcgttgtacgggctgattctgaataataacaagctgaccaaaatccatcccaaagccttccttaccaccaagaagctgagaaggctgtatttaagccataatcagctgtcagagatcccgttgaacttgcctaaaagcttggcagaacttcgtatccacgagaacaaggtaaaaaagattcagaaagatacgttcaaagggatgaatgctttgcacgtcctggagatgagcgcaaacccattagacaacaatgggattgaaccaggggcattcgaaggtgtgacggtatttcacatccggattgctgaggctaagttgactagcgtacccaaggacaacctccctagcttctag

SEQ ID NO: 73593 - DNA, 732 bp, Artificial Sequence
  derived and/or modified sequence
atgaaggaatatgtgctcctgctgttcctggcgctgtgctctgccaaacctttctttagcccaagccacatcgctctaaaaaacatgatgctgaaggatatggaagacaccgacgatgatgacgacgatgacgacgatgatgatgacgatgacgaggacaactctctgttcccaacacgggagccacgtagtcatttttttccatttgatctgtttcctatgtgtccttttggttgtcagtgttatagtcgtgtggtccactgctcagacctaggacttacatcggtgcccacaaatatcccgttcgatacccgtatgctcgatctgcagaataataaaattaaggagattaaggaaaacgatttcaagggcctgactagcttgtacggactcattctgaataataataaactgacaaagatacatccgaaagccttcctgaccacaaagaagctacgtcggttgtacctgagccacaaccagctgagcgagatacctctgaaccttcccaagtccttagccgaactcaggatccacgagaacaaagtgaaaaagatccagaaagacactttcaaaggcatgaacgcgctccatgtgcttgagatgagtgccaaccctctggataataacgggattgagcctggggcatttgagggtgtgacggtgttccacataagaatcgccgaggcaaaactgaccagcgtcccaaaagttaacctccctcagttctag

SEQ ID NO: 73594 - DNA, 243 bp, Artificial Sequence
  derived and/or modified sequence
atgatgctgaaggatatggaagacaccgatgatgacgacgacgatgatgatgatgacgacgacgacgacgaagataactcgctgtttcctacacgcgagccgaggtcacacttctttccttttgacctgttcccaatgtgtccatttggatgtcagtgttatagccgcgttgtgcattgctccgatctcggcctaacttcagtccctacaaatatcccattaatcctggagtgcttgatctag

SEQ ID NO: 73595 - DNA, 732 bp, Artificial Sequence
  derived and/or modified sequence
atgaaagaatacgtgttgctgcttttcttagctttgtgttctgccaagcctttcttctcgccctcccatatcgcactgaagaatatgatgttaaaggacatggaagacacagacgacgacgacgacgatgatgacgatgacgatgacgatgatgaagataattcattgttccccactagggaaccaaggtcacacttcttcccttttgacttgttccccatgtgtccgtttggatgtcagtgctactcacgcgtggtgcattgttctgacctggggttgacatctgtgccaaccaatattccttttgatactcggatgcttgatctgcagaataataaaataaaggagattaaagagaatgactttaagggcctgacttccttgtatgggctgattcttaataataataagctcacgaagattcaccctaaggctttccttacgaccaaaaagctcagaagattgtacctgtcccataaccagctctccgagatcccactaaaccttcccaagagtctggccgagctgcgcatacatgagaacaaagtaaagaaaatccagaaagacacattcaaaggcatgaacgcgctgcacgttcttgagatgtccgccaatcctctggataacaacggaattgagccaggcgcttttgaaggtgtcacggtcttccacatacgcatcgcagaagccaagcttacatccgtgcccaaggacaatctgcctagcttttag

SEQ ID NO: 73596 - DNA, 973 bp, Artificial Sequence
  derived and/or modified sequence
agtactaacatggactaatctgtgggagcagtttattccagtatcacccagggtgcagccacaccaggactgtgttgaagggtgttttttttcttttaaatgtaatacctcctcatcttttcttcttacacagtgtctgagaacatttacattatagataagtagtacatggtggataacttctacttttaggaggactactctcttctgacagtcctagactggtcttctacactaagacaccatgaaggagtatgtgctcctattattcctggctttgtgctctgccaaacccttctttagcccttcacacatcgcactgaagaatatgatgctgaaggatatggaagacacagatgatgatgatgatgatgatgatgatgatgatgatgatgatgaggacaactctctttttccaacaagagagccaagaagccatttttttccatttgatctgtttccaatgtgtccatttggatgtcagtgctattcacgagttgtacattgctcagatttaggtttgacctcagtcccaaccaacattccatttgatactcgaatgcttgatcttcaaaacaataaaattaaggaaatcaaagaaaatgattttaaaggactcacttcactttatggtctgatcctgaacaacaacaagctaacgaagattcacccaaaagcctttctaaccacaaagaagttgcgaaggctgtatctgtcccacaatcaactaagtgaaataccacttaatcttcccaaatcattagcagaactcagaattcatgaaaataaagttaagaaaatacaaaaggacacattcaaaggaatgaatgctttacacgttttggaaatgagtgcaaaccctcttgataataatgggatagagccaggggcatttgaaggggtgacggtgttccatatcagaattgcagaagcaaaactgacctcagttcctaaagtaaatctgccacaattt

SEQ ID NO: 73597 - DNA, 568 bp, Artificial Sequence
  derived and/or modified sequence
agtactaacatggactaatctgtgggagcagtttattccagtatcacccagggtgcagccacaccaggactgtgttgaagggtgttttttttcttttaaatgtaatacctcctcatcttttcttcttacacagtgtctgagaacatttacattatagataagtagtacatggtggataacttctacttttaggaggactactctcttctgacagtcctagactggtcttctacactaagacaccatgaaggagtatgtgctcctattattcctggctttgtgctctgccaaacccttctttagcccttcacacatcgcactgaagaatatgatgctgaaggatatggaagacacagatgatgatgatgatgatgatgatgatgatgatgatgatgatgaggacaactctctttttccaacaagagagccaagaagccatttttttccatttgatctgtttccaatgtgtccatttggatgtcagtgctattcacgagttgtacattgctcagatttaggtttgacctcagtcccaaccaacattccattgatactcgaatgcttgatc

SEQ ID NO: 73598 - DNA, 2237 bp, Artificial Sequence
  derived and/or modified sequence
agtactaacatggactaatctgtgggagcagtttattccagtatcacccagggtgcagccacaccaggactgtgttgaagggtgttttttttcttttaaatgtaatacctcctcatcttttcttcttacacagtgtctgagaacatttacattatagataagtagtacatggtggataacttctacttttaggaggactactctcttctgacagtcctagactggtcttctacactaagacaccatgaaggagtatgtgctcctattattcctggctttgtgctctgccaaacccttctttagcccttcacacatcgcactgaagaatatgatgctgaaggatatggaagacacagatgatgatgatgatgatgatgatgatgatgatgatgatgatgaggacaactctctttttccaacaagagagccaagaagccatttttttccatttgatctgtttccaatgtgtccatttggatgtcagtgctattcacgagttgtacattgctcagatttaggtttgacctcagtcccaaccaacattccatttgatactcgaatgcttgatcttcaaaacaataaaattaaggaaatcaaagaaaatgattttaaaggactcacttcactttatggtctgatcctgaacaacaacaagctaacgaagattcacccaaaagcctttctaaccacaaagaagttgcgaaggctgtatctgtcccacaatcaactaagtgaaataccacttaatcttcccaaatcattagcagaactcagaattcatgaaaataaagttaagaaaatacaaaaggacacattcaaaggaatgaatgctttacacgttttggaaatgagtgcaaaccctcttgataataatgggatagagccaggggcatttgaaggggtgacggtgttccatatcagaattgcagaagcaaaactgacctcagttcctaaagataatcttccttcattctaattcaattgcaagagtgggagtaaatgacttctgtccaacagtgccaaagatgaagaaatctttatacagtgcaataagtttattcaacaacccggtgaaatactgggaaatgcaacctgcaacatttcgttgtgttttgagcagaatgagcgttcagcttgggaactttggaatgtaataattagtaattggtaatgtccatttaatataagattcaaaaatccctacatttggaatacttgaactctattaataatggtagtattatatatacaagcaaatatctattctcaagtggtaagtccactgacttattttatgacaagaaatttcaacggaattttgccaaactattgatacataagggttgagagaaacaagcatctattgcagtttctttttgcgtacaaatgatcttacataaatctcatgcttgaccattcctttcttcataacaaaaaagtaagatattcggtatttaacactttgttatcaagcatattttaaaaagaactgtactgtaaatggaatgcttgacttagcaaaatttgtgctctttcatttgctgttagaaaaacagaattaacaaagacagtaatgtgaagagtgcattacactattcttattctttagtaacttgggtagtactgtaatatttttaatcatcttaaagtatgatttgatataatcttattgaaattaccttatcatgtcttagagcccgtctttatgtttaaaactaatttcttaaaataaagccttcagtaaatgttcattaccaacttgataaatgctactcataagagctggtttggggctatagcatatgcttttttttttttaattattacctgatttaaaaatctctgtaaaaacgtgtagtgtttcataaaatctgtaactcgcattttaatgatccgctattataagcttttaatagcatgaaaattgttaggctatataacattgccacttcaactctaaggaatatttttgagatatccctttggaagaccttgcttggaagagcctggacactaacaattctacaccaaattgtctcttcaaatacgtatggactggataactctgagaaacacatctagtataactgaataagcagagcatcaaattaaacagacagaaaccgaaagctctatataaatgctcagagttctttatgtatttcttattggcattcaacatatgtaaaatcagaaaacagggaaattttcattaaaaatattggtttgaaataaaa

SEQ ID NO: 73599 - DNA, 732 bp, Artificial Sequence
  derived and/or modified sequence
atgaaggagtacgtgctgctgctgttcctggccctgtgcagcgccaagcccttcttcagccccagccacatcgccctgaagaacatgatgctgaaggacatggaggacaccgacgacgacgacgacgacgacgacgacgacgacgacgacgacgaggacaacagcctgttccccaccagagagcccagaagccacttcttccccttcgacctgttccccatgtgccccttcggctgccagtgctacagcagagtggtgcactgcagcgacctgggcctgaccagcgtgcccaccaacatccccttcgacaccagaatgctggacctgcagaacaacaagatcaaggagatcaaggagaacgacttcaagggcctgaccagcctgtacggcctgatcctgaacaacaacaagctgaccaagatccaccccaaggccttcctgaccaccaagaagctgagaagactgtacctgagccacaaccagctgagcgagatccccctgaacctgcccaagagcctggccgagctgagaatccacgagaacaaggtgaagaagatccagaaggacaccttcaagggcatgaacgccctgcacgtgctggagatgagcgccaaccccctggacaacaacggcatcgagcccggcgccttcgagggcgtgaccgtgttccacatcagaatcgccgaggccaagctgaccagcgtgcccaaggtgaacctgccccagttctag

SEQ ID NO: 73600 - DNA, 243 bp, Artificial Sequence
  derived and/or modified sequence
atgatgctgaaggacatggaggacaccgacgacgacgacgacgacgacgacgacgacgacgacgacgacgaggacaacagcctgttccccaccagagagcccagaagccacttcttccccttcgacctgttccccatgtgccccttcggctgccagtgctacagcagagtggtgcactgcagcgacctgggcctgaccagcgtgcccaccaacatccccctgatcctggagtgcctgatctag

SEQ ID NO: 73601 - DNA, 732 bp, Artificial Sequence
  derived and/or modified sequence
atgaaggagtacgtgctgctgctgttcctggccctgtgcagcgccaagcccttcttcagccccagccacatcgccctgaagaacatgatgctgaaggacatggaggacaccgacgacgacgacgacgacgacgacgacgacgacgacgacgacgaggacaacagcctgttccccaccagagagcccagaagccacttcttccccttcgacctgttccccatgtgccccttcggctgccagtgctacagcagagtggtgcactgcagcgacctgggcctgaccagcgtgcccaccaacatccccttcgacaccagaatgctggacctgcagaacaacaagatcaaggagatcaaggagaacgacttcaagggcctgaccagcctgtacggcctgatcctgaacaacaacaagctgaccaagatccaccccaaggccttcctgaccaccaagaagctgagaagactgtacctgagccacaaccagctgagcgagatccccctgaacctgcccaagagcctggccgagctgagaatccacgagaacaaggtgaagaagatccagaaggacaccttcaagggcatgaacgccctgcacgtgctggagatgagcgccaaccccctggacaacaacggcatcgagcccggcgccttcgagggcgtgaccgtgttccacatcagaatcgccgaggccaagctgaccagcgtgcccaaggacaacctgcccagcttctag

SEQ ID NO: 73602 - protein, 306 aa, Artificial Sequence
  derived and/or modified sequence
MDFWLWPLYFLPVSGALRILPEVKVEGELGGSVTIKCPLPEMHVRIYLCREMAGSGTCGTVVSTTNFIKAEYKGRVTLKQYPRKNLFLVEVTQLTESDSGVYACGAGMNTDRGKTQKVTLNVHSEYEPSWEEQPMPETPKWFHLPYLFQMPAYASSSKFVTRVTTPAQRGKVPPVHHSSPTTQITHRPRVSRASSVAGDKPRTFLPSTTASKISALEGLLKPQTPSYNHHTRLHRQSPLQAGPPTGREDARPGELPEAPRVAATALPKQHLQRLPAARSWSGRCRHRGGPRSRPRSAVAPRPAAGV

SEQ ID NO: 73603 - DNA, 1055 bp, Artificial Sequence
  derived and/or modified sequence
tctagaagggacaatggacttctggctttggccactttacttcctgccagtatcgggggccctgaggatcctcccagaagtaaaggtagagggggagctgggcggatcagttaccatcaagtgcccacttcctgaaatgcatgtgaggatatatctgtgccgggagatggctggatctggaacatgtggtaccgtggtatccaccaccaacttcatcaaggcagaatacaagggccgagttactctgaagcaatacccacgcaagaatctgttcctagtggaggtaacacagctgacagaaagtgacagcggagtctatgcctgcggagcgggcatgaacacagaccggggaaagacccagaaagtcaccctgaatgtccacagtgaatacgagccatcatgggaagagcagccaatgcctgagactccaaaatggtttcatctgccctatttgttccagatgcctgcatatgccagttcttccaaattcgtaaccagagttaccacaccagctcaaaggggcaaggtccctccagttcaccactcctcccccaccacccaaatcacccaccgccctcgagtgtccagagcatcttcagtagcaggtgacaagccccgaaccttcctgccatccactacagcctcaaaaatctcagctctggaggggctgctcaagccccagacgcccagctacaaccaccacaccaggctgcacaggcagagccctctccaggcgggcccgccgactggccgtgaggatgcgcgccctggagagctcccagaggccccgcgggtcgccgcgaccgcgctcccaaaacaacatctacagcgcctgcccgcggcgcgctcgtggagcggacgctgcaggcacaggggaggcccccgttcccggccccggagcgccgttgccccccgccccgctgcaggtgtctgaatctccctggctccatgccccatctctgaagaccagctgtgaatacgtgagcctctaccaccagcctgccgccatgatggaggacagtgattcagatgactacatcaatgttcctgcctga

SEQ ID NO: 73604 - DNA, 594 bp, Artificial Sequence
  derived and/or modified sequence
acaaccactgtggagcccgggtctgtcaggcacatccccccagaaacagtttccagattgtgaagggttcctgagtaagcagcgtgtctccatccccctctctaggggctcttggatggaccttgcactctagaagggacaatggacttctggctttggccactttacttcctgccagtatcgggggccctgaggatcctcccagaagtaaaggtagagggggagctgggcggatcagttaccatcaagtgcccacttcctgaaatgcatgtgaggatatatctgtgccgggagatggctggatctggaacatgtggtaccgtggtatccaccaccaacttcatcaaggcagaatacaagggccgagttactctgaagcaatacccacgcaagaatctgttcctagtggaggtaacacagctgacagaaagtgacagcggagtctatgcctgcggagcgggcatgaacacagaccggggaaagacccagaaagtcaccctgaatgtccacagtgaatacgagccatcatgggaagagcagccaatgcctgagactccaaaatggtttcatctgccctatttgttccagatgcct

SEQ ID NO: 73605 - DNA, 580 bp, Artificial Sequence
  derived and/or modified sequence
agagaacatgtgacaaatctgctgtgtgggggcgagcagggagtggctgacacaaccactgtggagcccgggtctgtcaggcacatccccccagaaacagtgggctcttggatggaccttgcactctagaagggacaatggacttctggctttggccactttacttcctgccagtatcgggggccctgaggatcctcccagaagtaaaggtagagggggagctgggcggatcagttaccatcaagtgcccacttcctgaaatgcatgtgaggatatatctgtgccgggagatggctggatctggaacatgtggtaccgtggtatccaccaccaacttcatcaaggcagaatacaagggccgagttactctgaagcaatacccacgcaagaatctgttcctagtggaggtaacacagctgacagaaagtgacagcggagtctatgcctgcggagcgggcatgaacacagaccggggaaagacccagaaagtcaccctgaatgtccacagtgaatacgagccatcatgggaagagcagccaatgcctgagactccaaaatggtttcatctgccctatttgtt

SEQ ID NO: 73606 - DNA, 567 bp, Artificial Sequence
  derived and/or modified sequence
tttcctcatcgtcaagctttgttcctcgtgggggctagaaatctctttccagttccagattgtgaagggttcctgagtaagcagcgtgtctccatccccctctctaggggctcttggatggaccttgcactctagaagggacaatggacttctggctttggccactttacttcctgccagagatggagtcttgctgtgttgcccaggatggtcttgaacttgtggccttaagtgatcctcctggctcagcttcacaaagcgctgggattacagtatcgggggccctgaggatcctcccagaagtaaaggtagagggggagctgggcggatcagttaccatcaagtgcccacttcctgaaatgcatgtgaggatatatctgtgccgggagatggctggatctggaacatgtggtaccgtggtatccaccaccaacttcatcaaggcagaatacaagggccgagttactctgaagcaatacccacgcaagaatctgttcctagtggaggtaacacagctgacagaaagtgacagcggagtctatgcctgcggagcgggcatgaacacag

SEQ ID NO: 73607 - DNA, 921 bp, Artificial Sequence
  derived and/or modified sequence
atggacttttggttgtggcctttgtacttccttccggtgtcaggggccttgcgcatactgcctgaggtaaaagttgaaggcgagctcgggggaagtgtgaccattaaatgccctttgccggagatgcacgtacgtatatatttgtgccgagagatggccggaagcggaacatgtggcacagtggtgtccactaccaattttatcaaggctgaatacaaaggtagggtgacgctgaagcagtacccacggaagaatctgttcctggtggaggtgacccagctgacagagtccgattctggcgtctatgcctgcggagcaggaatgaacaccgacagaggcaaaacccagaaggttacacttaacgtccacagcgaatatgaaccaagttgggaagaacaaccaatgcctgaaactccaaaatggtttcatcttccctatctgtttcagatgcccgcctacgcttcgtcctccaaattcgtgaccagagtgacaacgcccgcacagaggggcaaagtcccccctgtccatcattcttcgccaacaacgcagattacacaccggccgcgggtctccagagctagttccgtggccggcgacaagcctcggacctttttgcctagtaccactgcaagcaaaatcagtgcgttagagggcctgttgaagcctcaaacgcccagctataaccatcacacccgcctgcatagacagtctcctttacaggccggaccgcccactgggcgcgaggatgcacgccctggtgaattgccagaagccccaagagttgccgcgactgcactccccaagcagcacctacagaggctgcccgccgcacggagctggagcggccgctgccgtcaccgcggcggccctaggtctcgtcctagatccgctgtggcccctagaccagccgcgggagtctag

SEQ ID NO: 73608 - DNA, 456 bp, Artificial Sequence
  derived and/or modified sequence
atggacttctggctgtggccgctgtatttcctcccggtgtcgggagcactacgaatccttcctgaagtgaaggtggagggtgagctgggaggatcagtaactatcaagtgcccattgcctgaaatgcatgtacgtatttacctgtgtcgggaaatggccgggagtggcacttgtggaactgtggtaagcactaccaacttcatcaaggcggaatataagggcagggtgacactgaagcagtacccacgcaaaaatctgtttcttgtggaggtcacgcaactcaccgagtccgattctggggtctacgcctgtggcgccggaatgaacacagatcgcggcaagactcagaaagtgacgttgaatgtgcactcggagtacgagccatcttgggaagaacagcctatgcccgaaactccaaaatggttccatctaccctatcttttccagatgccttag

SEQ ID NO: 73609 - DNA, 444 bp, Artificial Sequence
  derived and/or modified sequence
atggacttctggctctggccattgtacttccttcctgtgtccggcgcacttagaatactgcctgaggtcaaggtggagggcgaattaggtgggagtgtgacgattaaatgccccttaccagagatgcatgtgcgaatatatttatgcagggaaatggccggtagtggaacctgtggcacggtcgtgagcacaactaacttcattaaagctgaatacaaggggcgggttacattgaagcagtatccacgaaagaatctttttttggtagaggtaacacagctgacagaatcagactctggagtgtacgcttgcggtgcaggcatgaataccgatagagggaagacacagaaagtcactctgaatgttcatagcgagtacgagccctcttgggaagagcagccgatgccagaaacccccaagtggtttcatttaccgtacctgtag

SEQ ID NO: 73610 - DNA, 426 bp, Artificial Sequence
  derived and/or modified sequence
atggatttctggctgtggccattgtatttcctaccggagatggagagctgttgtgtggcacaagatggattggaactggtcgctttatccgatccccctgggtccgcgtctcagtcagctggtatcacggtttcaggtgccctcagaattctgccagaagttaaggtcgaaggcgagctgggtggaagtgtgactattaagtgtcccctgccggaaatgcacgttcgcatctacttgtgccgcgagatggctggctccggcacttgcggtactgtcgtgagtaccaccaattttatcaaggctgaatataaggggagggtgacactgaagcagtatccaagaaagaatttgtttctggtggaggtgacccaactgactgaatctgactccggtgtgtacgcttgtggcgcgggcatgaatacctag

SEQ ID NO: 73611 - DNA, 921 bp, Artificial Sequence
  derived and/or modified sequence
atggacttctggctgtggcccctgtacttcctgcctgtgtctggggccctgcgcatcctgcctgaggtgaaggtggagggggagctgggcggctctgtgaccatcaagtgccccctgcctgagatgcacgtgcgcatctacctgtgccgggagatggccggcagcggcacctgtggcaccgtggtgtccaccaccaacttcatcaaggccgagtacaagggccgggtgaccctgaagcagtaccccaggaagaacctcttcctggtggaggtgacccagctgacagaaagtgacagcggcgtgtatgcctgtggggccggcatgaacacagaccggggcaagacccagaaggtgaccctgaatgtgcacagtgaatatgagcccagctgggaggagcagcccatgcctgagacccccaagtggttccacctgccctacctgttccagatgcctgcctatgccagcagcagcaagtttgtgaccagggtgaccaccccagcccagaggggcaaggtgccccctgtgcaccacagcagccccaccacccagatcacccaccggccccgggtgtcccgggccagctctgtggccggggacaagcccaggaccttcctgcccagcaccacagccagcaagatcagcgccctggagggcctgctgaagccccagacccccagctacaaccaccacacccggctgcaccggcagagccccctgcaggccggccccccaacaggccgggaggatgcccggcctggagagctgcctgaggccccccgggtggccgccacagccctgcccaagcagcacctgcagaggctgcctgctgcccgctcctggagcggccgctgccgccaccggggcggccccaggagccggcccaggtctgctgtggcccccaggcctgctgctggggtgtag

SEQ ID NO: 73612 - DNA, 456 bp, Artificial Sequence
  derived and/or modified sequence
atggacttctggctgtggcccctgtacttcctgcctgtgtctggggccctgcgcatcctgcctgaggtgaaggtggagggggagctgggcggctctgtgaccatcaagtgccccctgcctgagatgcacgtgcgcatctacctgtgccgggagatggccggcagcggcacctgtggcaccgtggtgtccaccaccaacttcatcaaggccgagtacaagggccgggtgaccctgaagcagtaccccaggaagaacctcttcctggtggaggtgacccagctgacagaaagtgacagcggcgtgtatgcctgtggggccggcatgaacacagaccggggcaagacccagaaggtgaccctgaatgtgcacagtgaatatgagcccagctgggaggagcagcccatgcctgagacccccaagtggttccacctgccctacctgttccagatgccctag

SEQ ID NO: 73613 - DNA, 444 bp, Artificial Sequence
  derived and/or modified sequence
atggacttctggctgtggcccctgtacttcctgcctgtgtctggggccctgcgcatcctgcctgaggtgaaggtggagggggagctgggcggctctgtgaccatcaagtgccccctgcctgagatgcacgtgcgcatctacctgtgccgggagatggccggcagcggcacctgtggcaccgtggtgtccaccaccaacttcatcaaggccgagtacaagggccgggtgaccctgaagcagtaccccaggaagaacctcttcctggtggaggtgacccagctgacagaaagtgacagcggcgtgtatgcctgtggggccggcatgaacacagaccggggcaagacccagaaggtgaccctgaatgtgcacagtgaatatgagcccagctgggaggagcagcccatgcctgagacccccaagtggttccacctgccctacctgtag

SEQ ID NO: 73614 - DNA, 426 bp, Artificial Sequence
  derived and/or modified sequence
atggacttctggctgtggcccctgtacttcctgcctgagatggagagctgctgcgtggcccaggacggcctggagctggtggccctgagtgaccccccaggcagcgccagccagagcgctggcatcaccgtgtctggggccctgcgcatcctgcctgaggtgaaggtggagggggagctgggcggctctgtgaccatcaagtgccccctgcctgagatgcacgtgcgcatctacctgtgccgggagatggccggcagcggcacctgtggcaccgtggtgtccaccaccaacttcatcaaggccgagtacaagggccgggtgaccctgaagcagtaccccaggaagaacctcttcctggtggaggtgacccagctgacagaaagtgacagcggcgtgtatgcctgtggggccggcatgaacacctag

SEQ ID NO: 73615 - DNA, 921 bp, Artificial Sequence
  derived and/or modified sequence
atggacttctggctgtggcccctgtacttcctgcccgtgagcggcgcgctgagaattctgcctgaggtgaaggtcgagggtgagcttggaggtagcgttactatcaagtgtcctctgccagaaatgcatgtgcgcatctatttgtgtagggaaatggccggcagcggtacttgtgggacagtcgtgagcaccacaaactttattaaagcggagtacaagggccgggtaaccctgaaacagtaccctagaaagaacctcttcctggttgaggtcacccaactgacagaatccgactccggagtctatgcctgcggcgccggcatgaatactgatcgcggaaagacccagaaggttaccttaaacgtgcactccgaatatgagcccagctgggaagagcagcccatgccggagacaccaaaatggttccacctgccctacctgtttcagatgccagcctacgcgtcttccagcaagttcgtaactagagttacaacccccgcccagaggggcaaggtgccgccagtgcatcactccagcccaaccacccagataacgcatcgcccacgggtgagcagagcgtcaagcgttgctggagacaagcctagaacctttctgccaagcactaccgcctccaagattagcgccctggaaggtctgcttaagcctcagacaccctcctataaccatcacaccaggttgcatcggcagagtcctctccaggctggacctcccactggccgcgaggacgcacgccccggcgaacttcccgaggccccccgcgtggcagctaccgcccttcccaaacagcatttacagcggctaccggccgctcggagctggtcaggaaggtgccgccaccgggggggccccagaagtcgaccaaggagcgccgttgcaccacgcccggccgcaggcgtgtag

SEQ ID NO: 73616 - DNA, 456 bp, Artificial Sequence
  derived and/or modified sequence
atggacttctggctgtggcccctgtacttcctgcccgtgagcggcgctttgaggattttgccagaggtaaaggtggaaggggagttaggcggctctgtcactatcaagtgccctctgccggagatgcacgttaggatttatctttgtagagaaatggcgggctctgggacctgcggtactgtggtgagcacgaccaattttatcaaagccgagtataaaggtcgggttaccctgaagcaatatcctagaaaaaatctctttctggtggaagtcactcagctgactgagtcggattccggcgtatatgcttgcggagctggaatgaacactgacagagggaaaactcagaaggtgacgctaaatgtgcattctgagtacgaacccagctgggaagaacagccaatgcctgaaacccctaagtggttccatcttccatacctgtttcagatgccttag

SEQ ID NO: 73617 - DNA, 444 bp, Artificial Sequence
  derived and/or modified sequence
atggacttctggctgtggcccctgtacttcctgcccgtgagcggcgcactgcgcatactgcctgaggtgaaagtcgaaggtgagctgggggggagcgtgacaatcaaatgtccccttcctgaaatgcatgttaggatatatctgtgtcgggagatggccggtagcggcacttgcggaaccgtcgtaagtacaaccaactttattaaagccgagtacaaaggaagagtgacccttaagcagtatccaagaaaaaatctgttcctagtggaagtgactcagcttacagagagtgattctggagtttatgcttgcggcgctgggatgaataccgacaggggcaagacccagaaggtcacactaaatgtgcactccgaatatgagcccagttgggaagagcagcctatgcctgagaccccaaaatggtttcatctgccgtatctttag

SEQ ID NO: 73618 - DNA, 426 bp, Artificial Sequence
  derived and/or modified sequence
atggacttctggctgtggcccctgtacttcctgcccgagatggagagctgttgtgtcgcgcaggacgggctcgaactggtggcactgagcgaccccccagggtcggcttctcagagcgccggaatcacagtgtctggtgccctgaggatcttgccagaagtaaaagtggaaggggaattaggaggatccgtgactattaaatgtcccctgcctgagatgcacgtgcggatatacctctgccgtgagatggcgggcagcgggacctgcggtaccgtcgtgagcaccaccaacttcatcaaagccgagtataaggggcgcgtgacgctgaagcagtatccacggaagaaccttttcctagtggaagtgacgcagctcactgagagcgacagcggagtatacgcatgtggcgcaggaatgaatacttag

SEQ ID NO: 73619 - DNA, 921 bp, Artificial Sequence
  derived and/or modified sequence
atggatttttggctgtggcccctttattttctgcccgtgtctggtgctctcaggatcctccccgaggttaaggtcgaaggagagctagggggaagtgttaccatcaagtgcccactgcccgagatgcacgtacggatctatctttgtagagaaatggccggttcgggcacctgtgggaccgtcgtgagcactaccaactttatcaaggccgagtacaagggtagagtcaccctgaagcaatatcctaggaaaaacctctttcttgtggaggtgacacaactgacggagtctgactctggtgtgtatgcatgcggagcaggtatgaatacagataggggtaagactcagaaagtcaccctgaacgtgcactctgaatatgagccatcttgggaagaacaaccaatgccagagacaccaaagtggttccatttaccatatttgtttcagatgcccgcttacgccagcagcagcaagttcgtgaccagggtgaccaccccagctcaaaggggaaaagtgcccccagtccatcactcgagccctactactcagattacgcatcgccctagggtcagcagagcaagttcagtagccggagacaaacctcgaacattcctcccaagcacaactgcaagcaaaatctcagccctcgaaggccttttaaagccccagaccccatcctacaatcaccatacacggttacaccggcagtctccacttcaggccggaccccctaccggcagagaagatgctaggcctggcgaactacccgaggctccaagagtcgccgctaccgcacttccgaaacagcatcttcagagactccctgcggcacggagttggtccggtcgttgtcggcacaggggcggtccccgaagcaggcccaggagcgcagttgctccgagacccgcagcaggtgtttag

SEQ ID NO: 73620 - DNA, 456 bp, Artificial Sequence
  derived and/or modified sequence
atggacttctggctgtggcctctgtacttcctgcccgtgagcggtgcactgagaatccttcctgaggtcaaagttgagggcgagctcgggggatccgtaacaattaagtgcccgctcccagagatgcacgttcggatatacctgtgtcgggagatggccggttcaggaacatgcggaacagttgtgtcaaccactaattttattaaggcagagtacaagggaagggtaaccctgaagcaatacccacgaaagaatctgttcctggtggaagtgactcagctgactgaatctgattctggagtttacgcctgtggtgcaggaatgaatacagacagaggaaagacgcagaaggtgacccttaacgtgcactcagagtacgagccttcttgggaagaacagcctatgcctgagacaccgaagtggttccatctcccatacctgttccaaatgccctag

SEQ ID NO: 73621 - DNA, 444 bp, Artificial Sequence
  derived and/or modified sequence
atggacttctggctgtggccattgtattttcttccggtgagcggagccctgagaatcctaccagaggttaaggtagagggagaactaggaggctcagtgacaatcaaatgcccattgccggaaatgcacgtgcgaatatacctgtgccgagagatggcaggttcagggacctgcggcactgtggtgagcacaactaatttcataaaggctgagtacaagggcagagtaaccctgaagcagtacccgaggaagaatttgttcctggtagaggtgactcagctgacggagtctgattcaggagtgtacgcttgcggagccggaatgaatacggaccgtggcaagacgcagaaggtgacactgaatgtgcacagtgagtacgagccgtcctgggaggagcagcccatgcccgagacaccaaaatggttccacctgccctacttgtag

SEQ ID NO: 73622 - DNA, 426 bp, Artificial Sequence
  derived and/or modified sequence
atggacttttggctgtggcccttatatttcctgccggaaatggaaagttgttgtgtggcccaagacggcctggagctggttgccctctctgacccacctggcagcgccagccagtccgcagggatcactgtgagtggcgctctgcgaatacttcctgaggtgaaggttgaaggggaactgggcggatccgtgaccatcaagtgccccctcccagagatgcacgtaaggatttacttatgtagggagatggctgggtctggaacttgtgggaccgttgtgtccaccaccaactttatcaaagccgaatataaaggccgagtgacacttaaacagtatcctaggaaaaatctgtttctggtagaggttacacaactgacggagagtgattcaggagtttatgcctgtggagcgggtatgaatacatag

SEQ ID NO: 73623 - DNA, 921 bp, Artificial Sequence
  derived and/or modified sequence
atggacttctggctgtggcccctgtacttcctgcccgtgagcggcgccctgagaatcctgcccgaggtgaaggtggagggcgagctgggcggcagcgtgaccatcaagtgccccctgcccgagatgcacgtgagaatctacctgtgcagagagatggccggcagcggcacctgcggcaccgtggtgagcaccaccaacttcatcaaggccgagtacaagggcagagtgaccctgaagcagtaccccagaaagaacctgttcctggtggaggtgacccagctgaccgagagcgacagcggcgtgtacgcctgcggcgccggcatgaacaccgacagaggcaagacccagaaggtgaccctgaacgtgcacagcgagtacgagcccagctgggaggagcagcccatgcccgagacccccaagtggttccacctgccctacctgttccagatgcccgcctacgccagcagcagcaagttcgtgaccagagtgaccacccccgcccagagaggcaaggtgccccccgtgcaccacagcagccccaccacccagatcacccacagacccagagtgagcagagccagcagcgtggccggcgacaagcccagaaccttcctgcccagcaccaccgccagcaagatcagcgccctggagggcctgctgaagccccagacccccagctacaaccaccacaccagactgcacagacagagccccctgcaggccggcccccccaccggcagagaggacgccagacccggcgagctgcccgaggcccccagagtggccgccaccgccctgcccaagcagcacctgcagagactgcccgccgccagaagctggagcggcagatgcagacacagaggcggccccagaagcagacccagaagcgccgtggcccccagacccgccgccggcgtgtag

SEQ ID NO: 73624 - DNA, 456 bp, Artificial Sequence
  derived and/or modified sequence
atggacttctggctgtggcccctgtacttcctgcccgtgagcggcgccctgagaatcctgcccgaggtgaaggtggagggcgagctgggcggcagcgtgaccatcaagtgccccctgcccgagatgcacgtgagaatctacctgtgcagagagatggccggcagcggcacctgcggcaccgtggtgagcaccaccaacttcatcaaggccgagtacaagggcagagtgaccctgaagcagtaccccagaaagaacctgttcctggtggaggtgacccagctgaccgagagcgacagcggcgtgtacgcctgcggcgccggcatgaacaccgacagaggcaagacccagaaggtgaccctgaacgtgcacagcgagtacgagcccagctgggaggagcagcccatgcccgagacccccaagtggttccacctgccctacctgttccagatgccctag

SEQ ID NO: 73625 - DNA, 444 bp, Artificial Sequence
  derived and/or modified sequence
atggacttctggctgtggcccctgtacttcctgcccgtgagcggcgccctgagaatcctgcccgaggtgaaggtggagggcgagctgggcggcagcgtgaccatcaagtgccccctgcccgagatgcacgtgagaatctacctgtgcagagagatggccggcagcggcacctgcggcaccgtggtgagcaccaccaacttcatcaaggccgagtacaagggcagagtgaccctgaagcagtaccccagaaagaacctgttcctggtggaggtgacccagctgaccgagagcgacagcggcgtgtacgcctgcggcgccggcatgaacaccgacagaggcaagacccagaaggtgaccctgaacgtgcacagcgagtacgagcccagctgggaggagcagcccatgcccgagacccccaagtggttccacctgccctacctgtag

SEQ ID NO: 73626 - DNA, 426 bp, Artificial Sequence
  derived and/or modified sequence
atggacttctggctgtggcccctgtacttcctgcccgagatggagagctgctgcgtggcccaggacggcctggagctggtggccctgagcgacccccccggcagcgccagccagagcgccggcatcaccgtgagcggcgccctgagaatcctgcccgaggtgaaggtggagggcgagctgggcggcagcgtgaccatcaagtgccccctgcccgagatgcacgtgagaatctacctgtgcagagagatggccggcagcggcacctgcggcaccgtggtgagcaccaccaacttcatcaaggccgagtacaagggcagagtgaccctgaagcagtaccccagaaagaacctgttcctggtggaggtgacccagctgaccgagagcgacagcggcgtgtacgcctgcggcgccggcatgaacacctag

SEQ ID NO: 73627 - protein, 232 aa, Artificial Sequence
  derived and/or modified sequence
MAALAAAAKKVWSARRLLVLLFTPLALLPVVFALPPKEGRCLFVILLMAVYWCTEALPLSVTALLPIVLFPFMGILPSNKVCPQYFLDTNFLFLSGLIMASAIEEWNLHRRIALKILMLVGVQPARLILGMMVTTSFLSMWLSNTASTAMMLPIANAILKSLFGQKEVRKDPSQESEENTGIEPNTFLSEERLKLQAPLVIRLGQITESGQWNMSGNDVCNFRVLSFLPGGM

SEQ ID NO: 73628 - protein, 338 aa, Artificial Sequence
  derived and/or modified sequence
MAALAAAAKKVWSARRLLVLLFTPLALLPVVFALPPKEGRCLFVILLMAVYWCTEALPLSVTALLPIVLFPFMGILPSNKVCPQYFLDTNFLFLSGLIMASAIEEWNLHRRIALKILMLVGVQPARLILGMMVTTSFLSMWLSNTASTAMMLPIANAILKSLFGQKEVRKDPSQESEENTAKTTLGRQRFHWICRLTPGRRMNIVGTSGRASSSPSPTQPVLGAQPHSRAQPLTSSCLASSRGWLWISFLYGGLSFRGWRKNKSEIRTNAEDRARAVIREEYQNLGPIKFAEQAVFILFCMFAILLFTRDPKFIPGWASLFNPGCKMGIISISTIQKM

SEQ ID NO: 73629 - protein, 552 aa, Artificial Sequence
  derived and/or modified sequence
MAALAAAAKKVWSARRLLVLLFTPLALLPVVFALPPKEGRCLFVILLMAVYWCTEALPLSVTALLPIVLFPFMGILPSNKVCPQYFLDTNFLFLSGLIMASAIEEWNLHRRIALKILMLVGVQPARLILGMMVTTSFLSMWLSNTASTAMMLPIANAILKSLFGQKEVRKDPSQESEENTAKTTLGRQRFHWICRLTPGRRMNIVGTSGRASSSPSPTQPVLGAQPHSRAQPLTSSCLASSRGWLWISFLYGGLSFRGWRKNKSEIRTNAEDRARAVIREEYQNLGPIKFAEQAVFILFCMFAILLFTRDPKFIPGWASLFNPGFLSDAVTGVAIVTILFFFPSQRPSLKWWFDFKAPNTETEPLLTWKKAQETVPWNIILLLGGGFAMAKGCEESGLSVWIGGQLHPLENVPPALAVLLITVVIAFFTEFASNTATIIIFLPVLAELAIRLRVHPLYLMIPGTVGCSFAFMLPVSTPPNSIAFASGHLLVKDMVRTGLLMNLMGVLLLSLAMNTWAQTIFQLGTFPDWADMYSVNVTALPPTLANDTFRTL

SEQ ID NO: 73630 - DNA, 699 bp, Artificial Sequence
  derived and/or modified sequence
atggctgctcttgcggcggcggctaagaaggtgtggtctgcgagaaggctgctggtgctactctttactcccctcgctctgttaccagtcgttttcgctttgccccccaaggagggaaggtgcctcttcgtgatcctgctcatggctgtttactggtgcaccgaggccctccccctgtctgtgaccgccttgcttccaattgttctgttcccgtttatgggcattctgccttccaataaagtgtgcccgcagtacttcttggatactaactttttgtttctatccggcctgatcatggcatctgccattgaggagtggaatctccacaggcggattgcccttaagattttgatgctggtgggcgtacaacctgcaaggctcatcttgggcatgatggtgactacttctttcctgtcaatgtggcttagcaacacagccagtacagcgatgatgctgccaattgccaacgccattttaaaatctctattcgggcagaaggaggtcagaaaggatccaagtcaggagagtgaagaaaataccggaatcgaacctaacacctttctgtcagaggagcgcctcaagctgcaggcgcctctggtaattcgactgggccagatcactgagtccggccagtggaatatgagcggcaacgatgtttgcaatttccgtgtgttaagttttctgcccgggggcatgtag

SEQ ID NO: 73631 - DNA, 1017 bp, Artificial Sequence
  derived and/or modified sequence
atggccgcgctggcggcagccgccaagaaggtctggagtgcaaggcggcttctcgtcctgctttttacacccctcgcactgctgcccgtcgtgttcgccctgcctccgaaagaagggcgctgcctgttcgtgatactacttatggccgtgtactggtgcactgaggctttgccgcttagcgtcactgcattgctacccatcgtgttatttcccttcatgggcattctgcccagtaataaagtgtgcccccagtattttttagatactaacttcttgtttctgagcggtcttattatggcttctgccatcgaggaatggaaccttcaccggcggatcgccctcaaaattctaatgctagtgggggtgcagccagctcgattaattctggggatgatggtgactacctcatttctctcaatgtggctgtccaacaccgcttctaccgctatgatgctaccaatcgcaaatgccattcttaagtcgcttttcgggcaaaaagaagtgcgcaaggacccctcacaggagagcgaagagaataccgccaagacaacactcggaagacaacggtttcactggatatgcagactgacgccgggcaggcgcatgaatatcgtggggacctccggtcgtgctagttcttctccttctccaacacagcccgttcttggggcccagcctcacagccgggcccagcctttgacttcatcctgtcttgctagttctagagggtggctgtggatttctttcctgtatgggggacttagcttccgtgggtggcggaaaaacaagtctgagataaggaccaacgctgaggaccgggcccgcgctgtgatcagggaagagtaccagaacctgggcccaataaaatttgccgaacaagccgtattcatcctgttttgcatgtttgctatcttgctgttcacgcgggatcccaagttcataccaggttgggcctcattgttcaatcctggatgtaaaatggggatcattagtatttccactattcagaaaatgtag

SEQ ID NO: 73632 - DNA, 1659 bp, Artificial Sequence
  derived and/or modified sequence
atggctgcccttgccgcggcagcgaaaaaagtctggtcagcccgtcgactgctggtgctactgttcacacctctagccctgctgcctgtcgtttttgctctcccccctaaagaaggaaggtgcctgtttgtgattctcttgatggccgtatactggtgcaccgaagcactccccctgagcgtcaccgccttgttgcccatcgttctctttccttttatgggcattctcccttcaaacaaggtgtgcccacagtatttccttgacaccaattttctgttcctgagtgggttgattatggccagcgcaatcgaggagtggaatcttcatcgtaggatcgccttgaaaatcctgatgctcgtgggagttcagcctgcccggttaattctcggtatgatggtcaccactagctttctctctatgtggctctccaacactgcatcaaccgccatgatgctgcccatcgcaaacgccatcctgaagagcttatttggccagaaagaagttcggaaagacccctctcaagaatcggaggagaatactgctaagacaaccctcggccgacagagattccattggatatgcaggttaactcccggtcgccgaatgaacatagtcggaacttcgggtagagcatcttcatctccgtccccaacccagccagtgctaggtgcccaacctcactctagagcccagccgttaacctcctcttgcctggcatcatcccgtggttggctctggatcagctttttatacggaggactatccttcagggggtggcgtaagaataagtccgaaatacgcacaaatgccgaggatagagcccgtgccgttatacgggaagaataccaaaacttgggccccatcaagttcgccgaacaagccgtttttattctgttctgtatgtttgcaattttattgtttacacgagaccccaagttcatcccaggatgggccagtctgttcaatccgggctttctctccgacgccgtgaccggcgtcgctattgtgaccattctgtttttcttccctagccaacgcccaagcctcaaatggtggttcgactttaaagccccgaacactgagaccgaaccattgttaacttggaagaaagcacaggaaacagttccatggaacatcattctgctgctgggcgggggcttcgctatggccaagggatgcgaggaaagcgggctttctgtatggatcggcggacagttgcacccgttggagaacgtgcccccagcgctggccgtgctgcttatcacagtagtcattgccttcttcaccgaattcgctagcaatacagccacgatcataatcttcttgcctgtgctggcggagctcgctataaggttaagagttcatcccctgtacctgatgattcctggcacggtgggctgttcctttgcatttatgctaccagtcagcacacctccgaacagcatcgcttttgcaagcgggcacctcttggtgaaagacatggtgagaacagggctcctgatgaacctcatgggggtgctactcttgagcctggccatgaacacctgggctcagaccatctttcagttaggaactttccctgattgggccgacatgtattcagttaatgtgactgctctaccacccacactggccaacgacacatttcgaactctgtag

SEQ ID NO: 73633 - DNA, 699 bp, Artificial Sequence
  derived and/or modified sequence
atggccgccctggccgctgctgccaagaaggtgtggagcgcccggcggctgctggtgctgctcttcacccccctggccctgctgcctgtggtgtttgccctgccccccaaggagggccgctgcctgtttgtgatcctgctgatggctgtgtactggtgcacagaggccctgcccctgtctgtgacagccctgctgcccatcgtgctcttccccttcatgggcatcctgcccagcaacaaggtgtgcccccagtacttcctggacaccaacttcctgttcctgagcggcctcatcatggccagcgccatcgaggagtggaacctgcaccggcgcatcgccctgaagatcctgatgctggtgggcgtgcagcctgcccggctcatcctgggcatgatggtgaccaccagcttcctgtccatgtggctgagcaacacagccagcacagccatgatgctgcccatcgccaatgccatcctgaagagcctgtttggccagaaggaggtgaggaaggaccccagccaggagagcgaggagaacacaggcatcgagcccaacaccttcctgtctgaggagcggctgaagctgcaggcccccctggtgatccggctgggccagatcacagaaagtggccagtggaacatgtctggaaatgatgtgtgcaacttccgggtgctgtccttcctgcccggcggcatgtag

SEQ ID NO: 73634 - DNA, 1017 bp, Artificial Sequence
  derived and/or modified sequence
atggccgccctggccgctgctgccaagaaggtgtggagcgcccggcggctgctggtgctgctcttcacccccctggccctgctgcctgtggtgtttgccctgccccccaaggagggccgctgcctgtttgtgatcctgctgatggctgtgtactggtgcacagaggccctgcccctgtctgtgacagccctgctgcccatcgtgctcttccccttcatgggcatcctgcccagcaacaaggtgtgcccccagtacttcctggacaccaacttcctgttcctgagcggcctcatcatggccagcgccatcgaggagtggaacctgcaccggcgcatcgccctgaagatcctgatgctggtgggcgtgcagcctgcccggctcatcctgggcatgatggtgaccaccagcttcctgtccatgtggctgagcaacacagccagcacagccatgatgctgcccatcgccaatgccatcctgaagagcctgtttggccagaaggaggtgaggaaggaccccagccaggagagcgaggagaacacagccaagaccaccctgggccggcagcgcttccactggatctgccgcctgaccccaggccgcaggatgaacatcgtgggcaccagcggccgggccagcagcagccccagccccacccagcctgtgctgggcgcccagccccacagccgggcccagcccctgaccagcagctgcctggccagcagccggggctggctgtggatctccttcctgtatggaggcctgtccttccggggctggaggaagaacaagtctgagatccgcaccaatgcagaagatcgggcccgggccgtcatccgggaggagtaccagaacctgggccccatcaagtttgctgagcaggccgtgttcatcctcttctgcatgtttgccatcctgctcttcacccgggaccccaagttcatccctggctgggccagcctcttcaaccctggctgcaagatgggcatcatcagcatcagcaccatccagaagatgtag

SEQ ID NO: 73635 - DNA, 1659 bp, Artificial Sequence
  derived and/or modified sequence
atggccgccctggccgctgctgccaagaaggtgtggagcgcccggcggctgctggtgctgctcttcacccccctggccctgctgcctgtggtgtttgccctgccccccaaggagggccgctgcctgtttgtgatcctgctgatggctgtgtactggtgcacagaggccctgcccctgtctgtgacagccctgctgcccatcgtgctcttccccttcatgggcatcctgcccagcaacaaggtgtgcccccagtacttcctggacaccaacttcctgttcctgagcggcctcatcatggccagcgccatcgaggagtggaacctgcaccggcgcatcgccctgaagatcctgatgctggtgggcgtgcagcctgcccggctcatcctgggcatgatggtgaccaccagcttcctgtccatgtggctgagcaacacagccagcacagccatgatgctgcccatcgccaatgccatcctgaagagcctgtttggccagaaggaggtgaggaaggaccccagccaggagagcgaggagaacacagccaagaccaccctgggccggcagcgcttccactggatctgccgcctgaccccaggccgcaggatgaacatcgtgggcaccagcggccgggccagcagcagccccagccccacccagcctgtgctgggcgcccagccccacagccgggcccagcccctgaccagcagctgcctggccagcagccggggctggctgtggatctccttcctgtatggaggcctgtccttccggggctggaggaagaacaagtctgagatccgcaccaatgcagaagatcgggcccgggccgtcatccgggaggagtaccagaacctgggccccatcaagtttgctgagcaggccgtgttcatcctcttctgcatgtttgccatcctgctcttcacccgggaccccaagttcatccctggctgggccagcctcttcaaccctggcttcctgagtgatgctgtgactggagtggccatcgtgaccatcctcttcttcttccccagccagaggcccagcctgaagtggtggtttgacttcaaggcccccaacacagaaacagagcccctgctgacctggaagaaggcccaggagaccgtgccctggaacatcatcctgctgctgggcggcggctttgccatggccaagggctgtgaggagagcggcctgtctgtgtggattggaggccagctgcaccccctggagaatgtgcccccagccctggccgtgctgctgatcaccgtggtgattgccttcttcacagaatttgccagcaacacagccaccatcatcatcttcctgcctgtgctggccgagctggccatccggctgcgggtgcaccccctgtacctgatgatccctggcaccgtgggctgcagctttgccttcatgctgcctgtgtccaccccacccaacagcatcgcctttgccagcggccacctgctggtgaaggacatggtgaggacaggcctgctgatgaacctgatgggcgtgctgctgctgagcctggccatgaacacctgggcccagaccatcttccagctgggcaccttcccagactgggccgacatgtacagcgtgaatgtgacagccctgccccccaccctggccaatgacaccttccgcaccctgtag

SEQ ID NO: 73636 - DNA, 699 bp, Artificial Sequence
  derived and/or modified sequence
atggccgccctggccgccgccgccaagaaggtgtggagcgcccggaggttactggtcctcctgttcactcctctggccctgttgccagtggtgttcgccctcccccccaaagaaggaagatgcctgtttgtcattctgctgatggcagtgtactggtgtactgaagcgctgccactgtcagtgactgccctgctgcccatcgtactatttccattcatgggcatcttaccgagcaacaaggtgtgcccccagtacttcttggacacaaacttcttattcctaagtgggctgataatggcttcagccatcgaggagtggaacctgcataggaggatagcactcaagattctcatgcttgtaggagtacagccggcccggctgattctaggcatgatggttacgacctctttcctgtctatgtggctcagcaatacagcatcgaccgctatgatgttgcccatcgctaatgctatcctcaagtctctgtttggccagaaggaagtccgtaaggatcctagccaggagagcgaggaaaacacaggcattgaaccaaacaccttcctttctgaggagcgcctaaagctgcaggctcccctggtcattcgcttgggacagatcaccgaaagtgggcagtggaacatgtccggcaacgatgtctgtaattttagagtgctgtccttccttccaggggggatgtag

SEQ ID NO: 73637 - DNA, 1017 bp, Artificial Sequence
  derived and/or modified sequence
atggccgccctggccgccgccgccaagaaggtgtggagcgcccggcgcctgttagtgctcctattcaccccattggcactgctccctgttgtgtttgccttgcccccaaaagaaggccgctgcctgtttgtcattctgctgatggccgtttactggtgcaccgaggcgctccctttatccgtcacggctcttttacccatcgtgttatttccattcatgggcattttgccatcaaacaaagtttgccctcagtatttcctggacacaaatttcctcttcttaagcgggctcataatggcttcagcaatcgaagagtggaatctgcaccggcgcatcgcgctcaagatcctcatgctggtcggggtacagcctgctagacttatactgggcatgatggttaccacgtcatttttatccatgtggcttagcaataccgcttccactgccatgatgttgcctatagcgaatgccattttgaagagcctgttcggtcagaaagaggtgaggaaggaccccagtcaggagtccgaggaaaataccgcgaaaactacactgggacgtcagcgatttcactggatttgccgactcactcccgggaggagaatgaatatcgtcggaacttccgggagagcaagtagctctccctctccaacacagcctgtgttgggggcacagccccatagccgcgctcagccattgacgagttcgtgtcttgcgtcatctcgggggtggctctggatctcatttttgtatgggggattgagtttccgaggttggaggaagaataaatccgagataaggacaaatgctgaggatcgagcaagggccgtgatccgggaggagtaccaaaatctggggcctataaaattcgccgaacaagccgttttcattttgttttgcatgtttgctattctcctttttactcgggaccctaagtttattccgggttgggcatccttgtttaatccaggttgcaagatggggattattagcatttctacaattcaaaaaatgtag

SEQ ID NO: 73638 - DNA, 1659 bp, Artificial Sequence
  derived and/or modified sequence
atggccgccctggccgccgccgccaagaaggtgtggagcgcccggcggctcctcgtcctgctgtttaccccattggctctcctgcctgtggtattcgctctgccccctaaagagggaaggtgcctgttcgtaattctcctgatggcggtgtactggtgtacggaggcccttccactcagtgtcacagccctgttgcctatcgttctgttcccctttatggggatcctgccgagtaacaaggtttgcccacagtatttcctcgatacgaattttctgtttctctccgggctgatcatggcatctgccatagaggagtggaacctgcatcggagaattgcactgaagatcctcatgctggtcggagtgcagcccgccagactgatactggggatgatggtgacaacttcctttctgtctatgtggctctctaatactgcctcaaccgctatgatgctgcctattgctaatgcaatcctgaagagccttttcggacaaaaagaggtccgcaaagatccgtcacaagaatctgaggaaaacactgccaaaactacactagggaggcagcggtttcattggatttgtagactgactcccggaaggaggatgaacatcgtcggcaccagcggaagagctagctctagtcccagcccaactcagcctgtgctgggggctcagcctcactccagagcccagccactcacctcatcttgtttggcgagtagtaggggatggctgtggatttcgtttctctacgggggcctgtccttccgtggttggaggaagaacaaaagtgaaattcgtacgaacgctgaggaccgcgcgcgggccgttatcagggaggagtatcaaaacctgggtcctatcaagtttgctgaacaggctgtattcattcttttctgtatgttcgccatcctgcttttcacacgggatcccaagtttattccaggatgggcctcactctttaaccccggcttcctgtccgacgccgtcacaggggtagctattgtgactatattgttctttttccccagtcagaggcctagccttaagtggtggtttgattttaaggctccaaacactgaaaccgagcctctgctgacatggaagaaggcccaagaaaccgtcccctggaatatcatccttcttctggggggcggatttgctatggcaaaaggctgcgaggagtccggattatccgtttggatagggggtcaattgcatcccctcgagaatgtgccacccgcactggcggtcctcctgatcacggtggtaatagcatttttcactgaatttgcctccaatactgctaccattatcatatttttacccgtcctggccgagctggctatcaggctgagagtgcacccactgtacctcatgatccctgggaccgtggggtgctcattcgcattcatgctgccagtgagcactccccccaattcaattgccttcgcaagcgggcacctgttggtcaaggatatggtcagaacggggctgctgatgaacctgatgggcgtcttgctcctttctctggcaatgaacacatgggcacaaactatcttccaattgggcacgtttccagactgggccgatatgtactctgtgaatgtcactgcactgcctcctacactagctaatgacacctttcggacattatag

SEQ ID NO: 73639 - DNA, 699 bp, Artificial Sequence
  derived and/or modified sequence
atggccgctctggccgctgctgccaaaaaagtatggtccgcaaggcggctgcttgtcttgcttttcactcccctcgcactgttgcctgtggtgtttgctttaccgccaaaagaaggacggtgcctgtttgttattctcctgatggccgtctattggtgcactgaggccttacctctgtccgtgactgctctactgcccatcgttctgtttcccttcatgggaatcttgccttcaaacaaggtgtgcccccagtactttctggacaccaactttctgtttcttagcggcctcattatggcgtcggcaatcgaggaatggaatttacaccggaggatcgccttaaaaattctgatgcttgtgggggtgcagcctgcccgactcatcctggggatgatggtgactacaagtttcctgagcatgtggctgtctaacacagcatctactgcaatgatgctgccaatagctaacgctatattgaagtcactgttcggccagaaagaggtgcggaaggatccttctcaggagtcagaagaaaacaccggtatcgagcccaacacatttctatcggaggagcggctgaagctccaggctcctctggtgattcgcttgggacagatcacagaaagcggccagtggaacatgagcgggaacgacgtgtgtaactttagggtactgtctttccttcctggagggatgtag

SEQ ID NO: 73640 - DNA, 1017 bp, Artificial Sequence
  derived and/or modified sequence
atggccgcattagctgctgctgcaaagaaggtttggtcggcaaggcggcttttggtgctactgttcacaccacttgctctcttgcccgtggtgttcgctttaccccctaaagaaggcaggtgtctctttgtcatcctgctaatggccgtgtattggtgcactgaggccctgcccttgtccgtaacagctctattgcctatcgtactcttcccattcatggggattctgccctctaacaaagtttgcccacagtactttctagacaccaattttctgtttctgtctggactcatcatggccagcgcgatcgaggagtggaaccttcaccgtcgcatcgcattgaagatcctcatgttggtgggggtccaacctgctcgcctgattctgggtatgatggtaaccacttcctttctgagcatgtggctgagcaacaccgcctccaccgcaatgatgttgcccatcgccaatgcgattctgaagtccctcttcggccagaaggaggtccgcaaagacccaagtcaggaatctgaggagaataccgccaaaacaaccctgggcaggcagagatttcactggatctgcaggctcacccccggaaggaggatgaacattgttggcaccagtgggagggcctcatctagcccctcaccaacccagcccgtcttaggggctcagccccattcaagagcacagcctctgaccagtagctgtttggcatcaagtaggggctggctatggattagctttctgtatggtgggctctccttccgcggatggagaaagaataagtctgaaattcgcaccaatgccgaggatagagccagggccgtgatacgggaggaataccagaacctgggacctatcaaatttgccgaacaggcagtgtttatactcttttgcatgttcgcgatcttgctcttcactagagacccaaagttcatcccgggttgggcctcgctgtttaaccccggatgtaaaatgggaatcatcagcatctccactatccaaaagatgtag

SEQ ID NO: 73641 - DNA, 1659 bp, Artificial Sequence
  derived and/or modified sequence
atggccgctcttgcagcagcagcgaaaaaagtttggtccgcccgacgcctgctcgttctcctgtttacccccctagccctgcttcccgtcgtctttgccctgcctccaaaggaaggtcgttgtctgtttgtgattctactcatggccgtctattggtgcaccgaagctttgccattatcagttacggcactgctccctattgtgctgtttccatttatgggcatccttccctcaaataaggtctgtcctcagtatttcctcgatacaaacttcctttttttaagcggcttgattatggcctcagccatagaggagtggaacctgcaccggagaattgctcttaaaatccttatgttagtgggtgtccaacccgctaggctaatcctaggcatgatggttactacatcttttttaagcatgtggctgtcaaatacggcttccacagcaatgatgttgcctatcgcgaatgccattctcaagagtctgtttggccaaaaggaagtgcggaaggatccgtcccaggaatccgaggaaaatactgcaaaaaccacgttgggtcggcagaggtttcactggatctgccgactcaccccaggtaggagaatgaacattgttggtacctctgggcgagcctcatcctccccgagccccacccagcctgttctgggggctcaaccacactctcgggctcaaccactgacctcttcctgcttggcctcatcaaggggatggctgtggatctcattcctgtacggaggattatccttccgcggttggagaaaaaataagtccgaaatcagaacaaatgccgaagatagggcccgtgcggtgatacgtgaagagtaccagaatctgggacccataaagtttgccgaacaagccgtttttatcctgttctgtatgttcgccattctcctgtttacaagagatccaaagttcatccctgggtgggccagcctgttcaacccgggatttttgtccgacgctgttaccggcgtggcaatagtaactatactatttttttttccgtcacagcggccatctcttaagtggtggtttgattttaaagcgccaaatacggaaactgagcccctccttacatggaagaaggcacaggagaccgtgccatggaacattattctgctgctgggcggaggttttgctatggcgaagggctgtgaagagagtggactgagcgtatggatagggggtcaacttcatcctttggagaatgtgccaccagccctggcagttctgctcatcacagttgtgatagccttctttactgagttcgccagtaatacagcaacaatcatcatcttcctgcccgtgctcgccgaacttgctatccgactgcgcgtccaccctttgtaccttatgattcctggcaccgtcggttgcagctttgccttcatgttacccgtaagcacaccccctaactctattgcctttgccagtggccacctgttagtaaaggatatggtcaggacaggtcttttgatgaacttaatgggcgtgttactgctctcccttgcgatgaacacatgggcccagacaatcttccagctcgggactttcccagactgggctgacatgtactccgtcaatgtaaccgcactacccccaacactggccaacgatacatttaggactctgtag

SEQ ID NO: 73642 - DNA, 737 bp, Artificial Sequence
  derived and/or modified sequence
agtcccgggccggcccgtaccgccaggcgatcgcgctgatggcggcgctggcagcagcggccaagaaggtgtggagcgcgcggcggctgctggtgctgctgttcacgccgctcgcgctgctgccggtggtcttcgccctcccgcccaaggaaggccgctgcttgtttgtcatcctgctcatggcggtgtactggtgcacggaggccctgccgctctcagtgacggcgctgctgcccatcgtcctcttccccttcatgggcatcttgccctccaacaaggtctgcccccagtacttcctcgacaccaacttcctcttcctcagtgggctgatcatggccagcgccattgaggagtggaacctgcaccggcgaatcgccctcaagatcctgatgcttgttggagtccagccggccaggctcatcctggggatgatggtgaccacctcgttcttgtccatgtggctgagcaacaccgcctccactgccatgatgcttcccattgccaatgccatcctgaaaagtctctttggccagaaggaggttcgaaaggaccccagccaggagagtgaagagaacacaggaatagaacccaatactttcctctctgaggaaaggctgaaacttcaagctccccttgtgataagacttggtcagataactgagtctggtcaatggaatatgagtggaaatgatgtgtgcaacttccgggttctgtccttcctgccgggtggaatgtga

SEQ ID NO: 73643 - DNA, 1055 bp, Artificial Sequence
  derived and/or modified sequence
agtcccgggccggcccgtaccgccaggcgatcgcgctgatggcggcgctggcagcagcggccaagaaggtgtggagcgcgcggcggctgctggtgctgctgttcacgccgctcgcgctgctgccggtggtcttcgccctcccgcccaaggaaggccgctgcttgtttgtcatcctgctcatggcggtgtactggtgcacggaggccctgccgctctcagtgacggcgctgctgcccatcgtcctcttccccttcatgggcatcttgccctccaacaaggtctgcccccagtacttcctcgacaccaacttcctcttcctcagtgggctgatcatggccagcgccattgaggagtggaacctgcaccggcgaatcgccctcaagatcctgatgcttgttggagtccagccggccaggctcatcctggggatgatggtgaccacctcgttcttgtccatgtggctgagcaacaccgcctccactgccatgatgcttcccattgccaatgccatcctgaaaagtctctttggccagaaggaggttcgaaaggaccccagccaggagagtgaagagaacacagcaaagaccaccctggggagacagaggttccactggatctgccggctgactccaggaaggaggatgaatatcgtcggaacatctggaagggcttcctcatctccatcccctactcagccagtattgggggcacagccacactcacgggcacagcccctaacctcatcctgcttggccagctcaagaggctggctctggatctccttcctgtacgggggactgagcttcaggggctggaggaagaataaatctgagataagaaccaatgcagaagatagggctcgagctgtaattcgggaagaataccagaacctggggcccatcaagtttgccgaacaggctgttttcatccttttctgcatgtttgccatcctcctcttcacccgggacccgaagttcatccctggctgggccagcctcttcaatcctggatgcaaaatgggcattataagcatttcaacaatacagaaaatgtga

SEQ ID NO: 73644 - DNA, 2008 bp, Artificial Sequence
  derived and/or modified sequence
agtcccgggccggcccgtaccgccaggcgatcgcgctgatggcggcgctggcagcagcggccaagaaggtgtggagcgcgcggcggctgctggtgctgctgttcacgccgctcgcgctgctgccggtggtcttcgccctcccgcccaaggaaggccgctgcttgtttgtcatcctgctcatggcggtgtactggtgcacggaggccctgccgctctcagtgacggcgctgctgcccatcgtcctcttccccttcatgggcatcttgccctccaacaaggtctgcccccagtacttcctcgacaccaacttcctcttcctcagtgggctgatcatggccagcgccattgaggagtggaacctgcaccggcgaatcgccctcaagatcctgatgcttgttggagtccagccggccaggctcatcctggggatgatggtgaccacctcgttcttgtccatgtggctgagcaacaccgcctccactgccatgatgcttcccattgccaatgccatcctgaaaagtctctttggccagaaggaggttcgaaaggaccccagccaggagagtgaagagaacacagcaaagaccaccctggggagacagaggttccactggatctgccggctgactccaggaaggaggatgaatatcgtcggaacatctggaagggcttcctcatctccatcccctactcagccagtattgggggcacagccacactcacgggcacagcccctaacctcatcctgcttggccagctcaagaggctggctctggatctccttcctgtacgggggactgagcttcaggggctggaggaagaataaatctgagataagaaccaatgcagaagatagggctcgagctgtaattcgggaagaataccagaacctggggcccatcaagtttgccgaacaggctgttttcatccttttctgcatgtttgccatcctcctcttcacccgggacccgaagttcatccctggctgggccagcctcttcaatcctgggtttctttctgatgctgtcaccggcgtggctattgtcaccatcttgttcttcttcccgtcccaaaggccctctctcaagtggtggtttgacttcaaagctcccaacacagagacagagcccttgctgacctggaagaaggcccaggagacagtgccctggaacatcatccttctcctgggagggggcttcgccatggccaaaggctgtgaggaatcggggctgtctgtatggattggtgggcagctgcaccccctggagaatgtgccccccgccctggctgtgctgctcatcactgtggtcatcgccttcttcactgagtttgccagcaacacggcgaccatcatcatcttcctgccggtcctggcagagctggccatccgcctgagagtgcaccccctgtatctgatgattccgggcacagtcggctgctcctttgccttcatgctcccggtctcaacgccccccaactccatcgccttcgcctctggacacttgctggtcaaagacatggtgcggacaggcctcctgatgaacctgatgggtgtcctgctgctcagtttggctatgaatacctgggcacagaccatcttccagctgggcaccttcccggactgggctgatatgtactcggtcaatgtcacagcattgccacccaccttggccaatgacacatttcggaccctctgagtccccctggaggactcccttgaggctgaaccctctcaaagggctgtcaccatcacctgctgctaggacactacaaaacaatcaaataattcttttctgtaatccaatatgcagcaagcaagggtgacctccagtggcccactcaagtccatgagccattatctaggatactttctctctctttcatgcagttcaaagcccaggtatctctcagatctgctgcctgagaaataagctcctttatcagttagctgttttatcattaggatacaagacagcccagtgtcatcaacagtgagcaaatctggcat

SEQ ID NO: 73645 - DNA, 876 bp, Artificial Sequence
  derived and/or modified sequence
ggaagtggcactaaggtccaaaggaagctacatatgggtggtccctgctacaccagcctcccaagcctcccagtgcaccttctaggagacaagcaaggaaggccgctgcttgtttgtcatcctgctcatggcggtgtactggtgcacggaggccctgccgctctcagtgacggcgctgctgcccatcgtcctcttccccttcatgggcatcttgccctccaacaaggtctgcccccagtacttcctcgacaccaacttcctcttcctcagtgggctgatcatggccagcgccattgaggagtggaacctgcaccggcgaatcgccctcaagatcctgatgcttgttggagtccagccggccaggctcatcctggggatgatggtgaccacctcgttcttgtccatgtggctgagcaacaccgcctccactgccatgatgcttcccattgccaatgccatcctgaaaagtctctttggccagaaggaggttcgaaaggaccccagccaggagagtgaagagaacacaggaatagaacccaatactttcctctctgaggaaaggctgaaacttcaagctccccttgtgataagacttggtcagataactgagtctggtcaatggaatatgagtggaaatgatgtgtgcaacttccgggttctgtccttcctgccgggtggaatgtgaatatgatggcacctgggacccaaagacaggagccacatcttgagagatagatggcagatctgcccctgtggctttggatcatttacctcagtgaacacaacaagcattatccatgaaaccataggttttgtgtgctagttctagtttttaaaatatgaattaaattaaatacgtatctgttaaaacttaaa

SEQ ID NO: 73646 - DNA, 699 bp, Artificial Sequence
  derived and/or modified sequence
atggccgccctggccgccgccgccaagaaggtgtggagcgccagaagactgctggtgctgctgttcacccccctggccctgctgcccgtggtgttcgccctgccccccaaggagggcagatgcctgttcgtgatcctgctgatggccgtgtactggtgcaccgaggccctgcccctgagcgtgaccgccctgctgcccatcgtgctgttccccttcatgggcatcctgcccagcaacaaggtgtgcccccagtacttcctggacaccaacttcctgttcctgagcggcctgatcatggccagcgccatcgaggagtggaacctgcacagaagaatcgccctgaagatcctgatgctggtgggcgtgcagcccgccagactgatcctgggcatgatggtgaccaccagcttcctgagcatgtggctgagcaacaccgccagcaccgccatgatgctgcccatcgccaacgccatcctgaagagcctgttcggccagaaggaggtgagaaaggaccccagccaggagagcgaggagaacaccggcatcgagcccaacaccttcctgagcgaggagagactgaagctgcaggcccccctggtgatcagactgggccagatcaccgagagcggccagtggaacatgagcggcaacgacgtgtgcaacttcagagtgctgagcttcctgcccggcggcatgtag

SEQ ID NO: 73647 - DNA, 1017 bp, Artificial Sequence
  derived and/or modified sequence
atggccgccctggccgccgccgccaagaaggtgtggagcgccagaagactgctggtgctgctgttcacccccctggccctgctgcccgtggtgttcgccctgccccccaaggagggcagatgcctgttcgtgatcctgctgatggccgtgtactggtgcaccgaggccctgcccctgagcgtgaccgccctgctgcccatcgtgctgttccccttcatgggcatcctgcccagcaacaaggtgtgcccccagtacttcctggacaccaacttcctgttcctgagcggcctgatcatggccagcgccatcgaggagtggaacctgcacagaagaatcgccctgaagatcctgatgctggtgggcgtgcagcccgccagactgatcctgggcatgatggtgaccaccagcttcctgagcatgtggctgagcaacaccgccagcaccgccatgatgctgcccatcgccaacgccatcctgaagagcctgttcggccagaaggaggtgagaaaggaccccagccaggagagcgaggagaacaccgccaagaccaccctgggcagacagagattccactggatctgcagactgacccccggcagaagaatgaacatcgtgggcaccagcggcagagccagcagcagccccagccccacccagcccgtgctgggcgcccagccccacagcagagcccagcccctgaccagcagctgcctggccagcagcagaggctggctgtggatcagcttcctgtacggcggcctgagcttcagaggctggagaaagaacaagagcgagatcagaaccaacgccgaggacagagccagagccgtgatcagagaggagtaccagaacctgggccccatcaagttcgccgagcaggccgtgttcatcctgttctgcatgttcgccatcctgctgttcaccagagaccccaagttcatccccggctgggccagcctgttcaaccccggctgcaagatgggcatcatcagcatcagcaccatccagaagatgtag

SEQ ID NO: 73648 - DNA, 1659 bp, Artificial Sequence
  derived and/or modified sequence
atggccgccctggccgccgccgccaagaaggtgtggagcgccagaagactgctggtgctgctgttcacccccctggccctgctgcccgtggtgttcgccctgccccccaaggagggcagatgcctgttcgtgatcctgctgatggccgtgtactggtgcaccgaggccctgcccctgagcgtgaccgccctgctgcccatcgtgctgttccccttcatgggcatcctgcccagcaacaaggtgtgcccccagtacttcctggacaccaacttcctgttcctgagcggcctgatcatggccagcgccatcgaggagtggaacctgcacagaagaatcgccctgaagatcctgatgctggtgggcgtgcagcccgccagactgatcctgggcatgatggtgaccaccagcttcctgagcatgtggctgagcaacaccgccagcaccgccatgatgctgcccatcgccaacgccatcctgaagagcctgttcggccagaaggaggtgagaaaggaccccagccaggagagcgaggagaacaccgccaagaccaccctgggcagacagagattccactggatctgcagactgacccccggcagaagaatgaacatcgtgggcaccagcggcagagccagcagcagccccagccccacccagcccgtgctgggcgcccagccccacagcagagcccagcccctgaccagcagctgcctggccagcagcagaggctggctgtggatcagcttcctgtacggcggcctgagcttcagaggctggagaaagaacaagagcgagatcagaaccaacgccgaggacagagccagagccgtgatcagagaggagtaccagaacctgggccccatcaagttcgccgagcaggccgtgttcatcctgttctgcatgttcgccatcctgctgttcaccagagaccccaagttcatccccggctgggccagcctgttcaaccccggcttcctgagcgacgccgtgaccggcgtggccatcgtgaccatcctgttcttcttccccagccagagacccagcctgaagtggtggttcgacttcaaggcccccaacaccgagaccgagcccctgctgacctggaagaaggcccaggagaccgtgccctggaacatcatcctgctgctgggcggcggcttcgccatggccaagggctgcgaggagagcggcctgagcgtgtggatcggcggccagctgcaccccctggagaacgtgccccccgccctggccgtgctgctgatcaccgtggtgatcgccttcttcaccgagttcgccagcaacaccgccaccatcatcatcttcctgcccgtgctggccgagctggccatcagactgagagtgcaccccctgtacctgatgatccccggcaccgtgggctgcagcttcgccttcatgctgcccgtgagcaccccccccaacagcatcgccttcgccagcggccacctgctggtgaaggacatggtgagaaccggcctgctgatgaacctgatgggcgtgctgctgctgagcctggccatgaacacctgggcccagaccatcttccagctgggcaccttccccgactgggccgacatgtacagcgtgaacgtgaccgccctgccccccaccctggccaacgacaccttcagaaccctgtag

SEQ ID NO: 73649 - protein, 520 aa, Artificial Sequence
  derived and/or modified sequence
MAVYWCTEALPLSVTALLPIVLFPFMGILPSNKVCPQYFLDTNFLFLSGLIMASAIEEWNLHRRIALKILMLVGVQPARLILGMMVTTSFLSMWLSNTASTAMMLPIANAILKSLFGQKEVRKDPSQESEENTAAVRRNGLHTVPTEMQFLASTEAKDHPGETEVPLDLPADSRKEDEYRRNIWKGFLISIPYSASIGGTATLTGTAPNLILLGQLKSFFPQCDVVNFGSWFIFAFPLMLLFLLAGWLWISFLYGGLSFRGWRKNKSEIRTNAEDRARAVIREEYQNLGPIKFLSDAVTGVAIVTILFFFPSQRPSLKWWFDFKAPNTETEPLLTWKKAQETVPWNIILLLGGGFAMAKGCEESGLSVWIGGQLHPLENVPPALAVLLITVVIAFFTEFASNTATIIIFLPVLAELAIRLRVHPLYLMIPGTVGCSFAFMLPVSTPPNSIAFASGHLLVKDMVRTGLLMNLMGVLLLSLAMNTWAQTIFQLGTFPDWADMYSVNVTALPPTLANDTFRTL

SEQ ID NO: 73650 - protein, 185 aa, Artificial Sequence
  derived and/or modified sequence
MAVYWCTEALPLSVTALLPIVLFPFMGILPSNKVCPQYFLDTNFLFLSGLIMASAIEEWNLHRRIALKILMLVGVQPARLILGMMVTTSFLSMWLSNTASTAMMLPIANAILKSLFGQKEVRKDPSQESEENTGIEPNTFLSEERLKLQAPLVIRLGQITESGQWNMSGNDVCNFRVLSFLPGGM

SEQ ID NO: 73651 - DNA, 1563 bp, Artificial Sequence
  derived and/or modified sequence
atggctgtgtactggtgcacagaagctttacctctcagtgtcaccgcccttctgccgattgtcctcttccctttcatgggaatactgcccagcaataaggtctgcccccagtactttttagacacgaacttcctgtttctctcaggattgataatggcttcagcaattgaggaatggaacctgcatcgacggattgccctgaaaattctgatgcttgtgggggtccaacctgccaggttaatcttgggcatgatggtcactacaagttttttgtcgatgtggctctccaacacagcctccacggccatgatgctgccgattgcaaacgccatcctgaagtcattgtttggacaaaaggaggtccggaaggatccttctcaagaaagtgaggagaacactgctgccgtgagacgaaacggcctgcatacggtgccgaccgagatgcaatttctcgcctcaacagaggctaaggaccatcctggtgaaactgaggtgcctcttgacctccctgcggactccagaaaggaagatgaatacaggcgcaatatatggaagggcttcctgatctcaatcccctattccgcctccatcggcgggacagcgacattgactgggacagcgcctaacctcatccttctgggtcaactgaagagcttttttccacaatgcgacgtggtcaatttcggttcctggttcatcttcgcgttcccccttatgctcctgtttctcctggctggatggctgtggattagcttcctttacggcggtctttcatttagggggtggcgcaaaaacaagagcgagatcagaactaacgccgaggatcgcgcccgagccgtcatccgcgaggagtatcaaaatctggggcctatcaagtttttgagtgacgctgtgactggggtcgccatcgtgactattctcttcttctttccgtctcagagaccctccctcaaatggtggttcgattttaaggccccgaacactgagacagagcctcttttgacgtggaaaaaagcccaggagaccgtcccatggaacatcatactgctgcttggcggaggcttcgcgatggccaaaggctgtgaagaatccggtctttccgtttggattggcggacagctgcaccccctggagaatgtcccacctgccctggctgtgctgttaataactgtggtgatcgcattcttcaccgagttcgcctctaacaccgctaccattatcatctttctacctgtactggccgagcttgccattcgattacgcgtccacccactctatttaatgatccccggcaccgtcggctgctccttcgcctttatgctgccagtatctacaccaccaaatagcattgcatttgccagcggacacctgctcgttaaggatatggtgagaactggattgctgatgaacttgatgggagtgcttctcctctcccttgccatgaatacctgggctcagacaatctttcaactggggaccttcccagactgggctgacatgtattctgtgaatgtcaccgcattacctcccaccctggccaatgataccttcagaactctctag

SEQ ID NO: 73652 - DNA, 558 bp, Artificial Sequence
  derived and/or modified sequence
atggccgtctattggtgtaccgaggcactgccgctttccgtgacagcccttctcccaatcgtcttgtttccttttatggggatcctgcctagtaataaggtttgtccccagtacttcctggatacaaatttcttgtttctctccggattaattatggcatcagccatcgaagagtggaacctccatcgccgaattgccctgaagattctgatgctcgtaggtgtccaacctgctcggctcatcctcgggatgatggtaactacgagctttctcagcatgtggctaagcaatactgcatctaccgccatgatgctccctatagccaacgccatccttaagtctctgttcggccagaaggaggtgcggaaggacccctctcaagagtctgaagaaaacactggtatagaacccaacacctttcttagtgaagagaggttgaagttgcaagcacccctcgtcataagactggggcagattaccgagtcgggtcagtggaacatgtctggcaacgacgtctgcaacttcagggtgttgagcttcctcccaggtggaatgtag

SEQ ID NO: 73653 - DNA, 1563 bp, Artificial Sequence
  derived and/or modified sequence
atggctgtgtactggtgcacagaggccctgcccctgtctgtgacagccctgctgcccatcgtgctcttccccttcatgggcatcctgcccagcaacaaggtgtgcccccagtacttcctggacaccaacttcctgttcctgagcggcctcatcatggccagcgccatcgaggagtggaacctgcacagaagaattgccctgaagatcctgatgctggtgggcgtgcagcctgcccggctcatcctgggcatgatggtgaccaccagcttcctgtccatgtggctgagcaacacagccagcacagccatgatgctgcccatcgccaatgccatcctgaagagcctgtttggccagaaggaggtgaggaaggaccccagccaggagagtgaagaaaatacagctgctgtgagaagaaatggcctgcacacagtgcccacagagatgcagttcctggccagcacagaggccaaggaccaccctggagaaacagaggtgcccctggacctgcctgctgacagcaggaaggaggatgagtacagaagaaacatctggaagggcttcctgatcagcatcccctacagcgccagcattggaggaacagccaccctgaccggcacagcccccaacctgatcctgctgggccagctgaagagcttcttcccccagtgtgatgtggtgaactttggctcctggttcatctttgccttccccctgatgctgctcttcctgctggccggctggctgtggatctccttcctgtatggaggcctgtccttccggggctggaggaagaacaagtctgagatccgcaccaatgctgaggaccgggcccgggctgtgatccgggaggagtaccagaacctgggccccatcaagttcctgagtgatgctgtgactggagtggccatcgtgaccatcctcttcttcttccccagccagaggcccagcctgaagtggtggtttgacttcaaggcccccaacacagaaacagagcccctgctgacctggaagaaggcccaggagaccgtgccctggaacatcatcctgctgctgggcggcggctttgccatggccaagggctgtgaggagagcggcctgtctgtgtggattggaggccagctgcaccccctggagaatgtgcccccagccctggccgtgctgctgatcaccgtggtgattgccttcttcacagaatttgccagcaacacagccaccatcatcatcttcctgcctgtgctggccgagctggccatccggctgcgggtgcaccccctgtacctgatgatccctggcaccgtgggctgcagctttgccttcatgctgcctgtgtccaccccacccaacagcatcgcctttgccagcggccacctgctggtgaaggacatggtgaggacaggcctgctgatgaacctgatgggcgtgctgctgctgagcctggccatgaacacctgggcccagaccatcttccagctgggcaccttcccagactgggccgacatgtacagcgtgaatgtgacagccctgccccccaccctggccaatgacaccttccgcaccctgtag

SEQ ID NO: 73654 - DNA, 558 bp, Artificial Sequence
  derived and/or modified sequence
atggctgtgtactggtgcacagaggccctgcccctgtctgtgacagccctgctgcccatcgtgctcttccccttcatgggcatcctgcccagcaacaaggtgtgcccccagtacttcctggacaccaacttcctgttcctgagcggcctcatcatggccagcgccatcgaggagtggaacctgcacagaagaattgccctgaagatcctgatgctggtgggcgtgcagcctgcccggctcatcctgggcatgatggtgaccaccagcttcctgtccatgtggctgagcaacacagccagcacagccatgatgctgcccatcgccaatgccatcctgaagagcctgtttggccagaaggaggtgaggaaggaccccagccaggagagtgaagaaaatactggaattgagcccaacaccttcctgtctgaggagcggctgaagctgcaggcccccctggtgatccggctgggccagatcacagagagcggccagtggaacatgtctggaaatgatgtgtgcaacttccgggtgctgtccttcctgcccggcggcatgtag

SEQ ID NO: 73655 - DNA, 1563 bp, Artificial Sequence
  derived and/or modified sequence
atggccgtgtactggtgcaccgaggccctgcccctgagcgtgaccgctctcctgcctatcgtattgttcccattcatgggcatcctgcctagcaacaaagtgtgcccccagtactttctggatactaactttctttttctgtcaggcctgatcatggctagcgccatcgaggaatggaatttacatagaaggattgcgctgaagatcctgatgctggtgggggtgcagcctgcaagactcatcctgggaatgatggtaacaacctcctttctctccatgtggctgagcaacactgcttcaactgccatgatgctgcctatcgcaaacgctattttaaaatccttatttggccagaaggaagtgcggaaagatccctcgcaggagtcggaagagaatacagcagccgtcaggaggaacggtctacatacagtgcccactgaaatgcagttccttgcgtctacagaagcaaaagaccacccaggtgagacagaagtgccacttgatctgcctgcggattcacgaaaagaggacgagtataggcgcaacatttggaagggcttcttaattagtatcccgtactcagcgagtattggagggaccgcgactttgactggcacggccccgaacctgattttgttgggccagcttaagtcatttttcccgcaatgcgacgtggtgaactttggttcctggttcatcttcgcctttcccctgatgctgctcttcttgctagctggatggctctggatcagcttcttgtatggcggactctcattccggggatggcgcaaaaataagtctgagatccgcacaaacgctgaagaccgggctagagccgtgatccgagaggagtaccagaacctcggccccataaagttcctgtccgacgccgtgactggggtggctattgtgactatattgtttttctttccttcccagcgcccatcacttaagtggtggtttgacttcaaggcccccaacactgagacagagcccctgctgacatggaaaaaggcgcaggaaactgtgccatggaacatcatcctgttgctgggcggtgggtttgctatggccaaagggtgtgaggagtctgggctgtctgtttggattggaggacaactgcaccccctggagaatgtcccacccgctctggcagtgttgctcattaccgttgtcatcgcctttttcacagaattcgctagcaacaccgcaactattattattttcctgccggtcttggcggagctcgcaatcaggctgcgggtgcaccccctctacctcatgatccctgggaccgtgggatgttccttcgcttttatgctgcccgtgtctacaccccctaattctatcgccttcgcctctggacatttgctggtcaaggatatggtccgaactggcctgctaatgaacctgatgggcgttcttctgttaagcctggcaatgaatacctgggcccaaacgatttttcagctgggcacattcccagattgggcggatatgtacagcgtcaacgtgacagccctacccccgacccttgccaatgacacctttcggaccctctag

SEQ ID NO: 73656 - DNA, 558 bp, Artificial Sequence
  derived and/or modified sequence
atggccgtgtactggtgcaccgaggccctgcccctgagcgtgaccgctttgctgccaatcgttctattcccattcatgggaatcctaccaagtaataaggtatgtccgcaatattttttagatactaatttcctcttcctctcaggccttatcatggcatctgcgattgaggaatggaatctgcatcgtcgtatagctctaaagattctcatgctggtgggcgttcagcccgcccggcttattctggggatgatggtgaccacaagctttctgtccatgtggctgtctaatacagccagtactgcaatgatgctcccaatagcgaatgcaatcctgaaatctctgtttggacagaaagaggtgcggaaagatccgtcacaggagagcgaagagaatacgggcatagaaccaaacacgtttctcagtgaagaacgactcaagctacaggcaccactggttatcagactggggcagataacagagtctgggcagtggaatatgtctggcaatgacgtttgtaattttcgcgttttgtcatttctgcccgggggcatgtag

SEQ ID NO: 73657 - DNA, 1563 bp, Artificial Sequence
  derived and/or modified sequence
atggctgtttattggtgtacagaggcattgcctctgagtgtgaccgctctgttgccaatcgtgctgtttcccttcatgggcatcttgccctcaaataaagtctgcccacagtacttcctggatacaaacttcctcttcttgtccgggctgattatggcatcggccatcgaagaatggaacctgcacaggcgcatcgctcttaagatccttatgctggttggcgtgcagcccgcaaggttgattttgggaatgatggtaactacttccttcctgagcatgtggctgtcgaacaccgctagcaccgcaatgatgctgccaatcgcgaacgcaattctgaaaagtctctttggacagaaggaggtgaggaaggatccttcccaggagagcgaggagaacaccgccgcagtccgcaggaacggtctccataccgtcccaacagagatgcagttcctggcgtctaccgaggcgaaagatcatcctggagaaacagaagtccccctggacctaccggcagacagtcggaaggaagacgagtatcgccgaaacatttggaaggggtttctgatatcaattccttactctgcgtctattggcggtacagcaaccctgaccggcaccgcccctaacctgatcctcctgggccagctcaagtctttctttccacagtgtgacgttgtgaattttggctcctggttcatcttcgcatttccgttaatgctgctattcctgttggcgggttggctctggatttcgtttctgtacggcggtctgagcttccggggatggaggaagaataaaagtgaaatacggacgaacgctgaggacagagccagggctgtaatcagggaggagtatcagaatcttgggcctatcaaattcctctccgacgctgttacaggagtggcgatcgtcaccatcctgttcttctttcccagtcaacgaccctctttgaaatggtggttcgatttcaaggctccaaacactgagaccgagccccttctgacatggaagaaggcccaggagactgtgccctggaacatcatcctactcctaggtggaggatttgccatggcgaagggatgcgaggagagcggattgtctgtttggattgggggtcaacttcacccacttgagaacgtgcccccagccctggccgttcttctgatcactgtggtgatcgccttctttactgaatttgccagtaacactgctacaatcattatcttcttgcccgttttggcggaactagcaatccgcctcagggttcatccactttacctgatgatccctggaacagttggctgctcctttgcgtttatgctcccagtcagcactccgccaaattctattgcatttgccagtggccacctgctcgtgaaggacatggtgagaacaggcctcctgatgaatctaatgggcgtacttctgctgagcctagcaatgaacacatgggcgcagactatctttcaattgggaacctttccagactgggcagacatgtattcagttaacgtcacagccttaccccctacattagcgaacgataccttcagaacactatag

SEQ ID NO: 73658 - DNA, 558 bp, Artificial Sequence
  derived and/or modified sequence
atggccgtgtattggtgtactgaggctctgcccctcagcgtaaccgccttgttgcccatcgtgctgtttccgtttatgggaatactgccatccaataaggtgtgtccacagtacttcttggacaccaactttcttttcctgtccggcttgataatggcctctgccatcgaggagtggaatctgcatcggagaattgcgctcaagatattgatgttggtcggcgtccaaccagcgcgactgattttggggatgatggtgacgacaagttttctttccatgtggctgtctaacaccgcatcaaccgcaatgatgctgcctattgctaacgcgatcctgaagagcctgttcgggcagaaggaagttcgtaaggacccatcccaagaaagcgaggaaaacaccggcattgagcctaatacattcctttccgaagagcggctcaaactgcaggctcctctggtgatccgtctagggcagatcaccgaatccgggcaatggaatatgtccggaaacgatgtatgcaatttccgtgttctctcttttcttcctggtggcatgtag

SEQ ID NO: 73659 - DNA, 1563 bp, Artificial Sequence
  derived and/or modified sequence
atggccgtgtactggtgcaccgaggccctgcccctgagcgtgaccgccctgctgcccatcgtgctgttccccttcatgggcatcctgcccagcaacaaggtgtgcccccagtacttcctggacaccaacttcctgttcctgagcggcctgatcatggccagcgccatcgaggagtggaacctgcacagaagaatcgccctgaagatcctgatgctggtgggcgtgcagcccgccagactgatcctgggcatgatggtgaccaccagcttcctgagcatgtggctgagcaacaccgccagcaccgccatgatgctgcccatcgccaacgccatcctgaagagcctgttcggccagaaggaggtgagaaaggaccccagccaggagagcgaggagaacaccgccgccgtgagaagaaacggcctgcacaccgtgcccaccgagatgcagttcctggccagcaccgaggccaaggaccaccccggcgagaccgaggtgcccctggacctgcccgccgacagcagaaaggaggacgagtacagaagaaacatctggaagggcttcctgatcagcatcccctacagcgccagcatcggcggcaccgccaccctgaccggcaccgcccccaacctgatcctgctgggccagctgaagagcttcttcccccagtgcgacgtggtgaacttcggcagctggttcatcttcgccttccccctgatgctgctgttcctgctggccggctggctgtggatcagcttcctgtacggcggcctgagcttcagaggctggagaaagaacaagagcgagatcagaaccaacgccgaggacagagccagagccgtgatcagagaggagtaccagaacctgggccccatcaagttcctgagcgacgccgtgaccggcgtggccatcgtgaccatcctgttcttcttccccagccagagacccagcctgaagtggtggttcgacttcaaggcccccaacaccgagaccgagcccctgctgacctggaagaaggcccaggagaccgtgccctggaacatcatcctgctgctgggcggcggcttcgccatggccaagggctgcgaggagagcggcctgagcgtgtggatcggcggccagctgcaccccctggagaacgtgccccccgccctggccgtgctgctgatcaccgtggtgatcgccttcttcaccgagttcgccagcaacaccgccaccatcatcatcttcctgcccgtgctggccgagctggccatcagactgagagtgcaccccctgtacctgatgatccccggcaccgtgggctgcagcttcgccttcatgctgcccgtgagcaccccccccaacagcatcgccttcgccagcggccacctgctggtgaaggacatggtgagaaccggcctgctgatgaacctgatgggcgtgctgctgctgagcctggccatgaacacctgggcccagaccatcttccagctgggcaccttccccgactgggccgacatgtacagcgtgaacgtgaccgccctgccccccaccctggccaacgacaccttcagaaccctgtag

SEQ ID NO: 73660 - DNA, 558 bp, Artificial Sequence
  derived and/or modified sequence
atggccgtgtactggtgcaccgaggccctgcccctgagcgtgaccgccctgctgcccatcgtgctgttccccttcatgggcatcctgcccagcaacaaggtgtgcccccagtacttcctggacaccaacttcctgttcctgagcggcctgatcatggccagcgccatcgaggagtggaacctgcacagaagaatcgccctgaagatcctgatgctggtgggcgtgcagcccgccagactgatcctgggcatgatggtgaccaccagcttcctgagcatgtggctgagcaacaccgccagcaccgccatgatgctgcccatcgccaacgccatcctgaagagcctgttcggccagaaggaggtgagaaaggaccccagccaggagagcgaggagaacaccggcatcgagcccaacaccttcctgagcgaggagagactgaagctgcaggcccccctggtgatcagactgggccagatcaccgagagcggccagtggaacatgagcggcaacgacgtgtgcaacttcagagtgctgagcttcctgcccggcggcatgtag

SEQ ID NO: 73661 - protein, 306 aa, Artificial Sequence
  derived and/or modified sequence
MDADSLLLSLELASGSGQGLSPDRRASLLTSLMLVKRDYRYDRVLFWGRILGLVADYYIAQGLSEDQLAPRKTLYSLNCTEWSLLPPATEEMVAQSSVVKGRFMGDPSYEYEHTELQKVNEGEKVFEEEIVIDKAVAIIPRGALFKTPFGPTHVNRTFEGLSLSEAKKLSSYFHFREPVELKNKTLLEKADLDPSLDFMDSLEHDIPKGSEAVVQGDFTWLLSRCGFGWPCSWDSCSVSMRVLEHPDGEGQCPGGAAQPALAGPHLLPCSPHQELWLRLRGHWREEHGLALHAIEWEPAWMFLNRV

SEQ ID NO: 73662 - DNA, 921 bp, Artificial Sequence
  derived and/or modified sequence
atggacgctgattctctgctgctctccctagaactagcctcaggaagcgggcagggactgtcccccgatcgaagggcttcactgctgaccagtctcatgctggtgaaacgcgactatagatacgatagggtgctgttctggggccgcattttgggtttagtggccgactattatatagctcaggggctatcggaagatcaactggcacctcgaaaaacgctatattctctgaactgtactgagtggtcactgctcccgcctgctaccgaagaaatggtggctcaaagctctgtcgtgaaagggcgcttcatgggcgatccatcatatgagtatgagcataccgagctccagaaggtgaatgaaggcgagaaagtctttgaggaagagattgtgattgacaaggctgtagcgataataccgcgcggcgcgctgtttaaaacgccttttgggcccacccatgtaaaccgcacatttgaaggcctaagcctgtctgaggcgaaaaagctctcttcctacttccactttcgcgagccggtggaacttaagaacaaaacattgctcgagaaagccgacttggacccgagcctggacttcatggattcattggaacacgacatccccaaggggtcagaggcagtggtccagggtgattttacgtggttactctccaggtgtggctttggttggccttgctcttgggacagctgcagcgtatccatgcgtgtgcttgagcaccctgatggcgagggccagtgtcccgggggagctgcgcaacccgcccttgctggtccgcacctgctgccctgctccccccaccaggagttatggctgcggcttaggggccattggcgggaagaacacgggttggcattgcacgccatcgagtgggaacctgcatggatgtttcttaaccgggtttag

SEQ ID NO: 73663 - DNA, 921 bp, Artificial Sequence
  derived and/or modified sequence
atggatgctgacagcctgctgctgagcctggagctggccagcggcagcggccagggcctgagcccagaccggcgggccagcctgctgaccagcctgatgctggtgaagagggactaccgctatgacagagtgctcttctggggccgcatcctgggcctggtggccgactactacatcgcccagggcctgtctgaggaccagctggcccccaggaagaccctgtacagcctgaactgcacagagtggagcctgctgcccccagccacagaggagatggtggcccagagctctgtggtgaagggccgcttcatgggagaccccagctatgaatatgagcacacagagctgcagaaggtgaatgaaggagagaaggtgtttgaggaggagatcgtcatcgacaaggctgtggccatcatccccaggggggccctcttcaagaccccatttggccccacccacgtgaacagaacatttgagggcctgagcctgtctgaggccaagaagctgagcagctacttccacttccgggagcctgtggagctgaagaacaagaccctgctggagaaggctgacctggaccccagcctggacttcatggacagcctggagcatgacatccccaagggcagcgaggccgtggtgcagggcgacttcacctggctgctgagccgctgtggcttcggctggccctgctcctgggacagctgcagcgtgtccatgagggtgctggagcacccagatggagagggccagtgccctggaggagctgcccagcctgccctggccggcccccacctgctgccctgcagcccccaccaggagctgtggctgcggctgcggggccactggagggaggagcacggcctggccctgcacgccatcgagtgggagcccgcctggatgttcctgaacagagtgtag

SEQ ID NO: 73664 - DNA, 921 bp, Artificial Sequence
  derived and/or modified sequence
atggacgccgacagcctgctgctgagcctggagctggccagcggctcggggcaggggctgtccccggacagaagggcctccctactaaccagtctgatgctggtcaaacgtgactatcgctacgaccgcgtcttgttctgggggcgcattctgggcctcgttgccgactactacattgctcagggattatccgaggaccagttggccccacgcaaaacactgtatagcctgaactgtactgaatggtcactgctaccccccgctacggaggaaatggtggcccaatccagcgtggttaagggacgctttatgggggatccctcttatgagtatgaacatacggaactgcagaaggtgaacgagggggagaaggtctttgaggaggagatcgtaatcgataaggcggttgccattattcccaggggcgccctgtttaagacaccatttggccccacccacgtcaacagaaccttcgaggggctgtcactgtccgaagccaaaaagctctcatcctacttccacttccgagagcccgttgaactaaaaaataagacactgctggagaaagctgatctcgacccatcactcgacttcatggactcgctggagcatgatatacctaagggctccgaagctgttgtacaaggcgatttcacttggctgctaagtcgctgcgggtttggatggccttgcagttgggactcatgctcagtatcaatgagggtgctcgaacatccggatggggaaggacaatgccctggcggggccgcccagccggccctggccggccctcatctgctaccctgcagcccacaccaggagttatggctgcggctgcgtggacactggcgagaggaacacgggctggcactccatgccattgagtgggaaccggcttggatgttcctgaatcgtgtctag

SEQ ID NO: 73665 - DNA, 921 bp, Artificial Sequence
  derived and/or modified sequence
atggatgctgacagcctcctccttagcttggaactagcctctggttctggacagggactgtcacccgaccggagggcctcattgttgacctccctgatgctggttaaaagggattaccggtacgatagagtgctcttttggggacgcattctcggactggtcgctgattactatatagcccagggattatccgaagatcagcttgccccacgcaaaactttatattccttgaactgcactgagtggtctctgcttccccctgctaccgaagagatggtggcccagagtagtgttgtgaagggacgcttcatgggagatccctcttatgaatacgagcacactgagcttcagaaggttaacgagggagaaaaagtattcgaggaagaaatcgtgatcgataaagccgtcgcaataatccctaggggcgctctatttaagaccccatttggccctacacatgtgaaccgcacgttcgaaggcctctctttgagcgaagcgaaaaagttgtcctcctatttccacttccgggaacctgtcgaactgaagaataaaacactgttggagaaggcggacctcgacccaagccttgattttatggatagcctcgaacacgacatccccaaaggatctgaggctgtggtgcaaggcgattttacctggctgctgtccaggtgtggctttgggtggccttgcagctgggatagctgctctgtcagcatgcgcgtactcgaacacccagacggcgagggtcaatgcccaggcggtgctgcccaacccgctcttgccggaccccatctcctgccctgttctccacatcaggagctgtggctccgcttgcgcggacactggagggaagaacatggcctggcactccacgcaatcgaatgggaaccagcttggatgttcctgaacagagtgtag

SEQ ID NO: 73666 - DNA, 2586 bp, Artificial Sequence
  derived and/or modified sequence
ggaggcggcttctcctagcaactcgacgggcgttgagcggagccgctgacctgatggacgccgacagcctcctgctgtctctggagctggcgtccggcagtgggcagggcctcagcccggaccgtcgggcctcgctgctcacgtctcttatgctggttaagcgcgactaccgctatgatcgggttctcttctggggccgcatccttggcctcgtcgccgattactacatcgcgcagggcctgagtgaggaccagctcgcaccgcgcaagacgctctatagcctgaactgcacagagtggagcctcttgccccctgccacagaggagatggtggcgcagtcgtctgtggtgaagggccgcttcatgggggacccatcatacgaatatgaacacactgagctgcagaaggtgaatgaaggtgaaaaagtctttgaagaagaaatagtgattgacaaggctgtggccatcatcccccgaggcgccctcttcaagaccccttttggacccacccatgtcaatcggacctttgaaggactgtccttgtctgaggccaagaagctcagctcctacttccatttcagggagcctgttgagctaaagaataagaccttgcttgagaaggctgacctggacccctccctggatttcatggactccttggagcatgacattcccaaagggtctgaggcagttgttcagggtgacttcacgtggcttctgagcaggtgtggttttggttggccctgttcctgggactcctgctctgtgtccatgagggtcctggagcatccagatggagaggggcaatgccctggtggtgctgcgcagcctgctctggccgggcctcaccttctaccatgctccccgcaccaagaactatggctacgtctacgtgggcactggcgagaagaacatggacttgcccttcatgctatagaatgggagccagcctggatgtttttaaacagagtctaaacatgattttcttaagcttcagtgaacttggcctgcctgttctgtcctatcttcttaactccacctccgtctggttccagattctgaaaggcccactgagccagggagctcatttctaaaccaagtggcagaggggttggaatgtgctaatgaaagagattctagacaacgatgggtggaaatggctgtgggagaaggtgacaaccagggcccctttgaggaacgcagtttcttggattcacacgagagcggcaagtgtgtcaggcagcccaccttggctccctgcagctctcccacagtaaggagctcacagctgtcatgaagaggatgggacctgtttggcccatgaattcaattgactcattggccccatcacaagagatcagtgactcaatgctcagcacccagctggcaatgtgcccaggaccccctgcacttcccaagcagtgagcgcacacccaatgggtaagcccatgaacccagtttatgacactgcgttgggcaaaactcctgtccccagcactgagcatggcctaagccccatagcagctggcaagggacccaactgccctgcctgcctctagctcccagcattgctactgtgcaggccaagggtactgaagttagtcccactgtcccctgtccatgcatgttggagggaccaggccatcgtggtggggtgggacaggagtatagttgtggccaagggcttgtgagtgggcctcctactccccagcacaggtgcaggaggaactctggaagcactgctctctgtcagtgatacagcttccaaggtgttcttgagtagcagacattgtccctcagaaggggtgaccccacgggcatgcgcaccctgttccagcgggggccttttttgtagatgggcttgacggagccaggagcccagcgcgtcaggtacctgtggagggagaacaaagaggtgcctgtgagggctgggggcccaagctggacgtgggagagtggagcactacctcctcaggccaggccacggttgggcaagcaaatcctttcaccagtttccctttcctgaagtgcagggattttcctgggagtaactgctgagcgtcctgtaaacagatgggctgggctcttgctgccgcaagcctgtgtggccaggttcaggcagcccagggccacaagctcccttgatctttgtaaatgtcaatgttggtgtgtgtttgctgaggaaaaggtggcgaagaggctgcctgaagagcagatcattcctctctggcctcagccatggggcgagaagagctgatgtaaggctctggaggaacccattgctcttccccatttggctcactcagctaccccaaccttcagggaactccccagggtactataactggtataagacccctgcccctcacccaacctgtgatgggaatcaaggggtaagggcccgtgggcgcagccctagcctaggaaggttcctgtaaataggaggggggtggggaaagatggctgccgcccatggacctttggcctcctttggggatggccagggccctgatagttcccagaaaagtggctcatgccggctaggattgggttttactctgtccagaataaaacttggatcctgtcc

SEQ ID NO: 73667 - DNA, 921 bp, Artificial Sequence
  derived and/or modified sequence
atggacgccgacagcctgctgctgagcctggagctggccagcggcagcggccagggcctgagccccgacagaagagccagcctgctgaccagcctgatgctggtgaagagagactacagatacgacagagtgctgttctggggcagaatcctgggcctggtggccgactactacatcgcccagggcctgagcgaggaccagctggcccccagaaagaccctgtacagcctgaactgcaccgagtggagcctgctgccccccgccaccgaggagatggtggcccagagcagcgtggtgaagggcagattcatgggcgaccccagctacgagtacgagcacaccgagctgcagaaggtgaacgagggcgagaaggtgttcgaggaggagatcgtgatcgacaaggccgtggccatcatccccagaggcgccctgttcaagacccccttcggccccacccacgtgaacagaaccttcgagggcctgagcctgagcgaggccaagaagctgagcagctacttccacttcagagagcccgtggagctgaagaacaagaccctgctggagaaggccgacctggaccccagcctggacttcatggacagcctggagcacgacatccccaagggcagcgaggccgtggtgcagggcgacttcacctggctgctgagcagatgcggcttcggctggccctgcagctgggacagctgcagcgtgagcatgagagtgctggagcaccccgacggcgagggccagtgccccggcggcgccgcccagcccgccctggccggcccccacctgctgccctgcagcccccaccaggagctgtggctgagactgagaggccactggagagaggagcacggcctggccctgcacgccatcgagtgggagcccgcctggatgttcctgaacagagtgtag

SEQ ID NO: 73668 - protein, 187 aa, Artificial Sequence
  derived and/or modified sequence
MLSPAWLLSPSCSSSRPKGPLSSGGLTSKESGLSVWIGGQLHPLENVPPALAVLLITVVIAFFTEFASNTATIIIFLPVLAELAIRLRVHPLYLMIPGTVGCSFAFMLPVSTPPNSIAFASGHLLVKDMVRTGLLMNLMGVLLLSLAMNTWAQTIFQLGTFPDWADMYSVNVTALPPTLANDTFRTL

SEQ ID NO: 73669 - DNA, 564 bp, Artificial Sequence
  derived and/or modified sequence
atgctcagccccgcctggcttctttctcctagctgcagctcatcaaggcccaagggccctctctcttccgggggcctcacttccaaggaaagtggtttgagcgtctggatcggtgggcaactacatcctcttgagaacgtaccaccggccctggccgtgctcctgatcaccgtcgtgattgccttcttcacagagtttgcaagtaacaccgctacgatcataatctttctcccagtgttggctgaactggctatcaggctgagggtgcacccactctacctgatgattcccggaaccgtggggtgctcctttgcattcatgctgcccgtctccacaccacctaattccatagctttcgcatctggacacctactcgtcaaggacatggtgcggaccggcctgttaatgaatctgatgggagtgctgctcttgtcattagctatgaacacatgggcacaaacgatcttccagctgggcaccttccccgattgggccgatatgtattctgtcaacgtaactgctctaccaccaacactggctaatgacacctttagaacattatag

SEQ ID NO: 73670 - DNA, 564 bp, Artificial Sequence
  derived and/or modified sequence
atgctgagccctgcctggctgctgagccccagctgcagcagcagccggcccaagggccccctgagcagcggcggcctgaccagcaaggagagcggcctgtctgtgtggattggaggccagctgcaccccctggagaatgtgcccccagccctggccgtgctgctgatcaccgtggtgattgccttcttcacagaatttgccagcaacacagccaccatcatcatcttcctgcctgtgctggccgagctggccatccggctgcgggtgcaccccctgtacctgatgatccctggcaccgtgggctgcagctttgccttcatgctgcctgtgtccaccccacccaacagcatcgcctttgccagcggccacctgctggtgaaggacatggtgaggacaggcctgctgatgaacctgatgggcgtgctgctgctgagcctggccatgaacacctgggcccagaccatcttccagctgggcaccttcccagactgggccgacatgtacagcgtgaatgtgacagccctgccccccaccctggccaatgacaccttccgcaccctgtag

SEQ ID NO: 73671 - DNA, 564 bp, Artificial Sequence
  derived and/or modified sequence
atgctgagccccgcctggctgctgagccccagctgcagcagcagcagaccgaaggggcccttgagcagcggtgggcttaccagtaaggagagtggactcagtgtttggataggcggccagctccaccccctggagaatgtgccgcccgctttggccgtgctgctaatcacggtcgtgatcgccttttttactgaatttgcaagcaataccgctaccattattatttttttacctgtgttagccgaactagctatacgtttgcgcgttcacccattgtacctgatgattcccggtacagtcggatgctcttttgccttcatgctgccagtgtccacccctccaaacagcatagcgtttgctagcggccacctgcttgtcaaggacatggttcgaactggattgctgatgaacttaatgggcgtgttacttctgagcctggctatgaacacctgggcccagaccatcttccagcttggcactttccctgactgggcagatatgtacagcgttaatgtgaccgccctgccccctacattggctaatgatactttcaggacattatag

SEQ ID NO: 73672 - DNA, 564 bp, Artificial Sequence
  derived and/or modified sequence
atgctaagccccgcatggctgttgagtccctcttgctcttcatcacgacccaagggcccactgtcctctggaggacttacatccaaagagagcggcctatcagtatggatcggcggacaactgcatcccctcgagaatgtaccgccagctctcgcagtgctgctgattacagtagttattgcatttttcactgagttcgcttccaacactgcaacaatcatcatcttcctgccagtgctggcagaactggctatccgtctgagagtgcacccactgtatcttatgatacctggcacggtgggctgctcctttgcctttatgctgccagtcagcacacctccaaattctatcgctttcgcatcggggcacctgctcgtgaaagacatggtccgaacggggctgttaatgaatttaatgggggtattgctgctctccttagctatgaacacatgggcacaaactattttccagctgggtaccttccccgactgggctgacatgtattctgtcaatgtcacagcattgccgcctacactagctaacgacactttcagaactttgtag

SEQ ID NO: 73673 - DNA, 564 bp, Artificial Sequence
  derived and/or modified sequence
atgctgagccccgcctggctgctgagccccagctgcagcagcagcagacccaagggccccctgagcagcggcggcctgaccagcaaggagagcggcctgagcgtgtggatcggcggccagctgcaccccctggagaacgtgccccccgccctggccgtgctgctgatcaccgtggtgatcgccttcttcaccgagttcgccagcaacaccgccaccatcatcatcttcctgcccgtgctggccgagctggccatcagactgagagtgcaccccctgtacctgatgatccccggcaccgtgggctgcagcttcgccttcatgctgcccgtgagcaccccccccaacagcatcgccttcgccagcggccacctgctggtgaaggacatggtgagaaccggcctgctgatgaacctgatgggcgtgctgctgctgagcctggccatgaacacctgggcccagaccatcttccagctgggcaccttccccgactgggccgacatgtacagcgtgaacgtgaccgccctgccccccaccctggccaacgacaccttcagaaccctgtag

SEQ ID NO: 73674 - protein, 483 aa, Artificial Sequence
  derived and/or modified sequence
MGRKKIQITRIMDERNRQVTFTKRKFGLMKKAYELSVLCDCEIALIIFNSTNKLFQYASTDMDKVLLKYTEYNEPHESRTNSDIVETLRKKGLNGCDSPDPDADDSALNKKENKGCESPDPDSSYALTPRTEEKYKKINEEFDNMIKSHKIPAVPPPNFEMPVSIPVSSHNSLVYSNPVSSLGNPNLLPLAHPSLQRNSMSPGVTHRPPSAGNTGGLMGGDLTSGAGTSAGNGYGNPRNSPGLLVSPGNLNKNMQAKSPPPMNLGMNNRKPDLRVLIPPGSKNTMPSVNQRINNSQSAQSLATPVVSVATPTLPGQGMGGYPSAISTTYGTEYSLSSADLSSLSGFNTASALHLGSVTGWQQQHLHNMPPSALSQLGACTSTHLSQSSNLSLPSTQSLNIKSEPVSPPRDRTTTPSRYPQHTRHEAGRSPVDSLSSCSSSYDGSDREDHRNEFHSPIGLTRPSPDERESPSVKRMRLSEGWAT

SEQ ID NO: 73675 - DNA, 6254 bp, Artificial Sequence
  derived and/or modified sequence
aagggggcaaagcctcggtcttcatagaaaaggagaggaggcaaacgcagcccaaactggggggtttctcttcaaagccagctggtctggctttattctgcaggaatttttttacctgtcagggtttggacaacaaagccctcagcaggtgctgacgggtacaacttcctggagaagcagaaaggcactggtgccaaagaagagttgcaaactgtgaagtaacttctatgaagagatgaagtaaagaacggaaggcaaatgattgtggcagtaaagaagtgtatgtgcaggaacgaatgcaggaatttgggaactgagctgtgcaagtgctgaagaaggagatttgtttggaggaaacaggaaagagaaagaaaaggaaggaaaaaatacataatttcagggacgagagagagaagaaaaacggggactatggggagaaaaaagattcagattacgaggattatggatgaacgtaacagacaggtgacatttacaaagaggaaatttgggttgatgaagaaggcttatgagctgagcgtgctgtgtgactgtgagattgcgctgatcatcttcaacagcaccaacaagctgttccagtatgccagcaccgacatggacaaagtgcttctcaagtacacggagtacaacgagccgcatgagagccggacaaactcagacatcgtggagacgttgagaaagaagggccttaatggctgtgacagcccagaccccgatgcggacgattccgcattgaacaagaaagaaaacaaaggctgtgaaagccccgatcccgactcctcttatgcactcaccccacgcactgaagaaaaatacaaaaaaattaatgaagaatttgataatatgatcaagagtcataaaattcctgctgttccacctcccaacttcgagatgccagtctccatcccagtgtccagccacaacagtttggtgtacagcaaccctgtcagctcactgggaaaccccaacctattgccactggctcacccttctctgcagaggaatagtatgtctcctggtgtaacacatcgacctccaagtgcaggtaacacaggtggtctgatgggtggagacctcacgtctggtgcaggcaccagtgcagggaacgggtatggcaatccccgaaactcaccaggtctgctggtctcacctggtaacttgaacaagaatatgcaagcaaaatctcctcccccaatgaatttaggaatgaataaccgtaaaccagatctccgagttcttattccaccaggcagcaagaatacgatgccatcagtgaatcaaaggataaataactcccagtcggctcagtcattggctaccccagtggtttccgtagcaactcctactttaccaggacaaggaatgggaggatatccatcagccatttcaacaacatatggtaccgagtactctctgagtagtgcagacctgtcatctctgtctgggtttaacaccgccagcgctcttcaccttggttcagtaactggctggcaacagcaacacctacataacatgccaccatctgccctcagtcagttgggagcttgcactagcactcatttatctcagagttcaaatctctccctgccttctactcaaagcctcaacatcaagtcagaacctgtttctcctcctagagaccgtaccaccaccccttcgagatacccacaacacacgcgccacgaggcggggagatctcctgttgacagcttgagcagctgtagcagttcgtacgacgggagcgaccgagaggatcaccggaacgaattccactcccccattggactcaccagaccttcgccggacgaaagggaaagtccctcagtcaagcgcatgcgactttctgaaggatgggcaacatgatcagattattacttactagtttttttttttttcttgcagtgtgtgtgtgtgctataccttaatggggaaggggggtcgatatgcattatatgtgccgtgtgtggaaaaaaaaaaagtcaggtactctgttttgtaaaagtacttttaaattgcctcagtgatacagtataaagataaacagaaatgctgagataagcttagcacttgagttgtacaacagaacacttgtacaaaatagattttaaggctaacttcttttcactgttgtgctcctttgcaaaatgtatgttacaatagatagtgtcatgttgcaggttcaacgttatttacatgtaaatagacaaaaggaaacatttgccaaaagcggcagatctttactgaaagagagagcagctgttatgcaacatatagaaaaatgtatagatgcttggacagacccggtaatgggtggccattggtaaatgttaggaacacaccaggtcacctgacatcccaagaatgctcacaaacctgcaggcatatcattggcgtatggcactcattaaaaaggatcagagaccattaaaagaggaccatacctattaaaaaaaaatgtggagttggagggctaacatatttaattaaataaataaataaatctgggtctgcatctcttattaaataaaaatataaaaatatgtacattacattttgcttattttcatataaaaggtaagacagagtttgcaaagcatttgtggctttttgtagtttacttaagccaaaatgtgtttttttccccttgatagcttcgctaatattttaaacagtcctgtaaaaaaccaaaaaggactttttgtatagaaagcactaccctaagccatgaagaactccatgctttgctaaccaagataactgttttctctttgtagaagttttgtttttgaaatgtgtatttctaattatataaaatattaagaatcttttaaaaaaatctgtgaaattaacatgcttgtgtatagctttctaatatatataatattatggtaatagcagaagttttgttatcttaatagcgggaggggggtatatttgtgcagttgcacatttgagtaactattttctttctgttttcttttactctgcttacattttataagtttaaggtcagctgtcaaaaggataacctgtggggttagaacatatcacattgcaacaccctaaattgtttttaatacattagcaatctattgggtcaactgacatccattgtatatactagtttctttcatgctatttttattttgttttttgcatttttatcaaatgcagggcccctttctgatctcaccatttcaccatgcatcttggaattcagtaagtgcatatcctaacttgcccatattctaaatcatctggttggttttcagcctagaatttgatacgctttttagaaatatgcccagaatagaaaagctatgttggggcacatgtcctgcaaatatggccctagaaacaagtgatatggaatttacttggtgaataagttataaattcccacagaagaaaaatgtgaaagactgggtgctagacaagaaggaagcaggtaaagggatagttgctttgtcatccgtttttaattattttaactgacccttgacaatcttgtcagcaatataggactgttgaacaatcccggtgtgtcaggacccccaaatgtcacttctgcataaagcatgtatgtcatctattttttcttcaataaagagatttaatagccatttcaagaaatcccataaagaacctctctatgtccctttttttaatttaaaaaaaatgactcttgtctaatattcgtctataagggattaattttcagaccctttaataagtgagtgccataagaaagtcaatatatattgtttaaaagatatttcagtctaggaaagattttccttctcttggaatgtgaagatctgtcgattcatctccaatcatatgcattgacatacacagcaaagaagatataggcagtaatatcaacactgctatatcatgtgtaggacatttcttatccattttttctcttttacttgcatagttgctatgtgtttctcattgtaaaaggctgccgctgggtggcagaagccaagagaccttattaactaggctatatttttcttaacttgatctgaaatccacaattagaccacaatgcacctttggttgtatccataaaggatgctagcctgccttgtactaatgttttatatattaaaaaaaaaaaatctatcaaccatttcatatatatcccactactcaaggtatccatggaacatgaaagaataacatttatgcagaggaaaaacaaaaacatccctgaaaatatacacactcatacacacacacgcacaggggaataaaataagaaaatcattttcctcaccatagacttgatcccatccttacaacccatccttctaacttgatgtgtataaaatatgcaaacatttcacaaatgttctttgtcatttcaaaatactttagtatatcaatatcagtagataccagtgggtgggaaagggtcattacatgaaaatatgaagaaatagccatattagttttttaacctgcaatttgcctcagcaacaaagaaaaagtgaatttttaatgctgaagataaagtaagctaaagtaccagcagaagccttggctatttatagcagttctgacaatagttttataagaacatgaagagaacagaatcacttgaaaatggatgccagtcatctcttgttcccactactgaattcttataaagtggtggcaagatagggaagggataatctgagaatttttaaaagatgatttaatgagaagaagcacaattttgattttgatgagtcactttctgtaaacaatcttggtctatctttacccttataccttatctgtaatttaccatttattgtatttgcaaagctagtatggtttttaatcacagtaaatcctttgtattccagactttagggcagagccctgagggagtattattttacataacccgtcctagagtaacattttaggcaacattcttcattgcaagtaaaagatccataagtggcattttacacggctgcgagtattgttatatctaatcctattttaaaagatttttggtaatatgaagcttgaatactggtaacagtgatgcaatatacgcaagctgcacaacctgtatattgtatgcattgctgcgtggaggctgtttatttcaacctttttaaaaattgtgttttttagtaaaatggcttattttttcccaaaggtggaatttagcattttgtaatgatgaatataaaaatacctgtcatccccagatcatttaaaagttaactaaagtgagaatgaaaaaacaaaattccaagacactttttaaaagaatgtctgccctcacacacttttatggatttgtttttcttacatacccatcttttaacttagagatagcattttttgccctctttattttgttgtttgtttctccagagagtaaacgctttgtagttctttctttaaaaaacattttttttaaagaagaagaagccacttgaaccctcaataaaggctgttgcctaagcatggcatacttcatctgttctcatttgtgccatctgccgtgatgtcgtcacttttatggcgttaatttcctgccactacagatcttttgaagattgctggaatactggtgtctgttagaatgcttcagactacagatgtaattaaaggcttttcttaatatgttttaaccaaagatgtggagcaatccaagccacatatcttctacatcaaatttttccattttggttattttcataatctggtattgcattttgccttccctgttcatacctcaaattgattcatacctcagtttaattcagagaggtcagttaagtgacggattctgttgtggtttgaatgcagtaccagtgttctcttcgagcaaagtagacctgggtcactgtaggcataggacttggattgcttcagatggtttgctgtatcatttttcttctttttcttttcctggggacttgtttccattaaatgagagtaattaaaatcgcttgtaaatgagggcatacaagcatttgcaacaaatattcaaatagaggctcacagcggcataagctggactttgtcgccactagatgacaagatgttataactaagttaaaccacatctgtgtatctcaagggacttaattcagctgtctgtagtgaataaaagtgggaaattttcaaaagtttctcctgctggaaataaggtataatttgtattttgcagacaattcagtaaagttactggctttcttagtgaaaaaaaaaaa

SEQ ID NO: 73676 - DNA, 1452 bp, Artificial Sequence
  derived and/or modified sequence
atgggcaggaagaaaatacaaatcactcgaataatggacgaacgcaataggcaggtgacttttaccaagagaaaatttgggcttatgaagaaggcttacgagctgtcagtgttgtgtgattgcgaaatcgccctgattatttttaacagtaccaataagctcttccagtacgcatccactgacatggacaaggtgctgcttaagtacactgagtacaacgagccccacgagtctcggaccaattccgatatcgtggagacattacgcaaaaaggggttgaatggctgcgactcccctgatcctgatgccgacgattcggctctcaacaaaaaggaaaacaaaggctgtgaatcccctgaccccgacagcagctatgcgttgacacccaggacagaagagaaatacaagaaaatcaatgaggaattcgacaatatgattaagagccataagattccagccgtgccccctcccaacttcgaaatgccagtttcaatcccggtgtcctcacacaactccctggtctacagcaatcctgttagctctctgggaaatcccaacctgctaccactggcgcatccatcattgcagagaaactccatgtcaccgggcgtgacccataggccccccagtgccggcaacaccggcggtctcatgggcggagatctaacctctggcgcagggaccagtgccgggaacggctacgggaacccccggaatagcccagggctgctcgtgagtcctgggaacttgaataagaacatgcaggccaaatcacccccacctatgaacctcggaatgaataatcggaaaccagacctcagagttctgattcctccgggatccaaaaacactatgccctctgtcaatcagcgcattaataattcgcagtcagcacagagcttagcaacaccagtggtgtcggttgccacccccaccctgccaggccagggaatgggtggctacccttccgcgatcagcactacatatgggacggagtatagtctatctagtgcggatctctcctccctttctggattcaacactgcgtctgccctgcacctcggtagtgtgactgggtggcaacagcaacatttgcataatatgccacccagcgccctgtctcagcttggtgcatgcacatctacacacctgtcccagtctagcaatctgtcactgccatcaacccagtctttaaacatcaagtctgagccagtatccccccccagagatcgcaccaccaccccgtctcgttacccacagcacactcgtcacgaggccggcaggtcccccgttgacagcctatcatcctgttccagcagctatgacggatcagaccgagaggaccaccggaacgagttccattccccaatcgggctgaccaggccaagccctgacgaacgcgagagccccagtgtcaagcggatgcgcctgagcgagggttgggccacgtag

SEQ ID NO: 73677 - DNA, 1452 bp, Artificial Sequence
  derived and/or modified sequence
atgggcaggaagaagatccagatcacccgcatcatggatgaaagaaaccggcaggtgaccttcaccaagaggaagtttggcctgatgaagaaggcctatgagctgtctgtgctgtgtgactgtgaaattgccctgatcatcttcaacagcaccaacaagctgttccagtatgccagcacagacatggacaaggtgctgctgaagtacacagagtacaatgagccccatgagagcaggaccaacagcgacatcgtggagaccctgaggaagaagggcctgaatggctgtgacagcccagaccctgatgctgatgacagcgccctgaacaagaaggagaacaagggctgtgagagcccagaccctgacagcagctatgccctgacccccaggacagaggagaagtacaagaagatcaatgaggagtttgacaacatgatcaagagccacaagatcccagctgtgcccccacccaactttgagatgcctgtgtccatccctgtgagcagccacaacagcctggtgtacagcaaccctgtgagcagcctgggcaaccccaacctgctgcccctggcccaccccagcctgcagagaaattccatgagccctggggtgacccaccggccccccagcgctggcaacacaggaggcctgatgggcggggacctgaccagcggggccggcaccagcgctggaaatggctacggcaaccccaggaacagccctggcctgctggtgtccccaggcaacctgaacaagaacatgcaggccaagagccccccacccatgaacctgggcatgaacaacaggaagccagacctgcgggtgctgatccccccaggcagcaagaacaccatgcccagcgtgaaccagaggatcaacaacagccagagcgcccagagcctggccacccctgtggtgtctgtggccacccccaccctgcccggccagggcatgggcggctaccccagcgccatcagcaccacctatggaacagagtacagcctgagcagcgctgacctgagcagcctgagcggcttcaacacagccagcgccctgcacctgggctctgtgacaggctggcagcagcagcacctgcacaacatgcctccttctgccctgagccagctgggcgcctgcaccagcacccacctgagccagagcagcaacctgagcctgcccagcacccagagcctgaacatcaagtctgagcctgtgtccccaccccgggacaggaccaccacccccagccgctacccccagcacaccaggcatgaggccggccgcagccctgtggacagcctgagcagctgcagcagcagctatgatggcagtgaccgggaggaccacagaaatgagttccacagccccatcggcctgacccggcccagcccagatgagcgggagagccccagcgtgaagaggatgaggctgtctgagggctgggccacctag

SEQ ID NO: 73678 - DNA, 6304 bp, Artificial Sequence
  derived and/or modified sequence
atagaaaaggagaggaggcaaacgcagcccaaactggggggtttctcttcaaagccagctggtctggctttattctgcaggaatttttttacctgtcagggtttggacaacaaagccctcagcaggtgctgacgggtacaacttcctggagaagcagaaaggcactggtgccaaagaagagttgcaaactgtgaagtaacttctatgaagagatgaagtaaagaacggaaggcaaatgattgtggcagtaaagaagtgtatgtgcaggaacgaatgcaggaatttgggaactgagctgtgcaagtgctgaagaaggagatttgtttggaggaaacaggaaagagaaagaaaaggaaggaaaaaatacataatttcagggacgagagagagaagaaaaacggggactatggggagaaaaaagattcagattacgaggattatggatgaacgtaacagacaggtgacatttacaaagaggaaatttgggttgatgaagaaggcttatgagctgagcgtgctgtgtgactgtgagattgcgctgatcatcttcaacagcaccaacaagctgttccagtatgccagcaccgacatggacaaagtgcttctcaagtacacggagtacaacgagccgcatgagagccggacaaactcagacatcgtggagacgttgagaaagaagggccttaatggctgtgacagcccagaccccgatgcggacgattccgcattgaacaagaaagaaaacaaaggctgtgaaagccccgatcccgactcctcttatgcactcaccccacgcactgaagaaaaatacaaaaaaattaatgaagaatttgataatatgatcaagagtcataaaattcctgctgttccacctcccaacttcgagatgccagtctccatcccagtgtccagccacaacagtttggtgtacagcaaccctgtcagctcactgggaaaccccaacctattgccactggctcacccttctctgcagaggaatagtatgtctcctggtgtaacacatcgacctccaagtgcaggtaacacaggtggtctgatgggtggagacctcacgtctggtgcaggcaccagtgcagggaacgggtatggcaatccccgaaactcaccaggtctgctggtctcacctggtaacttgaacaagaatatgcaagcaaaatctcctcccccaatgaatttaggaatgaataaccgtaaaccagatctccgagttcttattccaccaggcagcaagaatacgatgccatcagtgaatcaaaggataaataactcccagtcggctcagtcattggctaccccagtggtttccgtagcaactcctactttaccaggacaaggaatgggaggatatccatcagccatttcaacaacatatggtaccgagtactctctgagtagtgcagacctgtcatctctgtctgggtttaacaccgccagcgctcttcaccttggttcagtaactggctggcaacagcaacacctacataacatgccaccatctgccctcagtcagttgggagcttgcactagcactcatttatctcagagttcaaatctctccctgccttctactcaaagcctcaacatcaagtcagaacctgtttctcctcctagagaccgtaccaccaccccttcgagatacccacaacacacgcgccacgaggcggggagatctcctgttgacagcttgagcagctgtagcagttcgtacgacgggagcgaccgagaggatcaccggaacgaattccactcccccattggactcaccagaccttcgccggacgaaagggaaagtccctcagtcaagcgcatgcgactttctgaaggatgggcaacatgatcagattattacttactagtttttttttttttcttgcagtgtgtgtgtgtgctataccttaatggggaaggggggtcgatatgcattatatgtgccgtgtgtggaaaaaaaaaaagtcaggtactctgttttgtaaaagtacttttaaattgcctcagtgatacagtataaagataaacagaaatgctgagataagcttagcacttgagttgtacaacagaacacttgtacaaaatagattttaaggctaacttcttttcactgttgtgctcctttgcaaaatgtatgttacaatagatagtgtcatgttgcaggttcaacgttatttacatgtaaatagacaaaaggaaacatttgccaaaagcggcagatctttactgaaagagagagcagctgttatgcaacatatagaaaaatgtatagatgcttggacagacccggtaatgggtggccattggtaaatgttaggaacacaccaggtcacctgacatcccaagaatgctcacaaacctgcaggcatatcattggcgtatggcactcattaaaaaggatcagagaccattaaaagaggaccatacctattaaaaaaaaatgtggagttggagggctaacatatttaattaaataaataaataaatctgggtctgcatctcttattaaataaaaatataaaaatatgtacattacattttgcttattttcatataaaaggtaagacagagtttgcaaagcatttgtggctttttgtagtttacttaagccaaaatgtgtttttttccccttgatagcttcgctaatattttaaacagtcctgtaaaaaaccaaaaaggactttttgtatagaaagcactaccctaagccatgaagaactccatgctttgctaaccaagataactgttttctctttgtagaagttttgtttttgaaatgtgtatttctaattatataaaatattaagaatcttttaaaaaaatctgtgaaattaacatgcttgtgtatagctttctaatatatataatattatggtaatagcagaagttttgttatcttaatagcgggaggggggtatatttgtgcagttgcacatttgagtaactattttctttctgttttcttttactctgcttacattttataagtttaaggtcagctgtcaaaaggataacctgtggggttagaacatatcacattgcaacaccctaaattgtttttaatacattagcaatctattgggtcaactgacatccattgtatatactagtttctttcatgctatttttattttgttttttgcatttttatcaaatgcagggcccctttctgatctcaccatttcaccatgcatcttggaattcagtaagtgcatatcctaacttgcccatattctaaatcatctggttggttttcagcctagaatttgatacgctttttagaaatatgcccagaatagaaaagctatgttggggcacatgtcctgcaaatatggccctagaaacaagtgatatggaatttacttggtgaataagttataaattcccacagaagaaaaatgtgaaagactgggtgctagacaagaaggaagcaggtaaagggatagttgctttgtcatccgtttttaattattttaactgacccttgacaatcttgtcagcaatataggactgttgaacaatcccggtgtgtcaggacccccaaatgtcacttctgcataaagcatgtatgtcatctattttttcttcaataaagagatttaatagccatttcaagaaatcccataaagaacctctctatgtccctttttttaatttaaaaaaaatgactcttgtctaatattcgtctataagggattaattttcagaccctttaataagtgagtgccataagaaagtcaatatatattgtttaaaagatatttcagtctaggaaagattttccttctcttggaatgtgaagatctgtcgattcatctccaatcatatgcattgacatacacagcaaagaagatataggcagtaatatcaacactgctatatcatgtgtaggacatttcttatccattttttctcttttacttgcatagttgctatgtgtttctcattgtaaaaggctgccgctgggtggcagaagccaagagaccttattaactaggctatatttttcttaacttgatctgaaatccacaattagaccacaatgcacctttggttgtatccataaaggatgctagcctgccttgtactaatgttttatatattaaaaaaaaaaaatctatcaaccatttcatatatatcccactactcaaggtatccatggaacatgaaagaataacatttatgcagaggaaaaacaaaaacatccctgaaaatatacacactcatacacacacacgcacaggggaataaaataagaaaatcattttcctcaccatagacttgatcccatccttacaacccatccttctaacttgatgtgtataaaatatgcaaacatttcacaaatgttctttgtcatttcaaaatactttagtatatcaatatcagtagataccagtgggtgggaaagggtcattacatgaaaatatgaagaaatagccatattagttttttaacctgcaatttgcctcagcaacaaagaaaaagtgaatttttaatgctgaagataaagtaagctaaagtaccagcagaagccttggctatttatagcagttctgacaatagttttataagaacatgaagagaacagaatcacttgaaaatggatgccagtcatctcttgttcccactactgaattcttataaagtggtggcaagatagggaagggataatctgagaatttttaaaagatgatttaatgagaagaagcacaattttgattttgatgagtcactttctgtaaacaatcttggtctatctttacccttataccttatctgtaatttaccatttattgtatttgcaaagctagtatggtttttaatcacagtaaatcctttgtattccagactttagggcagagccctgagggagtattattttacataacccgtcctagagtaacattttaggcaacattcttcattgcaagtaaaagatccataagtggcattttacacggctgcgagtattgttatatctaatcctattttaaaagatttttggtaatatgaagcttgaatactggtaacagtgatgcaatatacgcaagctgcacaacctgtatattgtatgcattgctgcgtggaggctgtttatttcaacctttttaaaaattgtgttttttagtaaaatggcttattttttcccaaaggtggaatttagcattttgtaatgatgaatataaaaatacctgtcatccccagatcatttaaaagttaactaaagtgagaatgaaaaaacaaaattccaagacactttttaaaagaatgtctgccctcacacacttttatggatttgtttttcttacatacccatcttttaacttagagatagcattttttgccctctttattttgttgtttgtttctccagagagtaaacgctttgtagttctttctttaaaaaacattttttttaaagaagaagaagccacttgaaccctcaataaaggctgttgcctaagcatggcatacttcatctgttctcatttgtgccatctgccgtgatgtcgtcacttttatggcgttaatttcctgccactacagatcttttgaagattgctggaatactggtgtctgttagaatgcttcagactacagatgtaattaaaggcttttcttaatatgttttaaccaaagatgtggagcaatccaagccacatatcttctacatcaaatttttccattttggttattttcataatctggtattgcattttgccttccctgttcatacctcaaattgattcatacctcagtttaattcagagaggtcagttaagtgacggattctgttgtggtttgaatgcagtaccagtgttctcttcgagcaaagtagacctgggtcactgtaggcataggacttggattgcttcagatggtttgctgtatcatttttcttctttttcttttcctggggacttgtttccattaaatgagagtaattaaaatcgcttgtaaatgagggcatacaagcatttgcaacaaatattcaaatagaggctcacagcggcataagctggactttgtcgccactagatgacaagatgttataactaagttaaaccacatctgtgtatctcaagggacttaattcagctgtctgtagtgaataaaagtgggaaattttcaaaagtttctcctgctggaaataaggtataatttgtattttgcagacaattcagtaaagttactggctttcttagtgatgcagtgtccgtggtgcatttttttaaattaatgttttgctgtttaaatttattcaattttattgtgttttttaaaaagcagc

SEQ ID NO: 73679 - DNA, 1452 bp, Artificial Sequence
  derived and/or modified sequence
atgggccggaagaagatccagatcacccggatcatggacgagcggaatcgccaggtgaccttcaccaaacgcaaattcgggttgatgaaaaaggcctatgaactcagcgtactttgtgactgcgagattgctctgatcatctttaattcaacaaacaagttattccagtacgcctctactgatatggacaaagtccttttgaaatacactgaatataatgaaccgcatgagtcccgcaccaatagtgatatcgttgaaaccctgcgcaagaaagggcttaacggttgtgacagtccagacccagacgccgacgattcagctctcaataagaaggagaacaagggctgcgaatcccctgatccagatagttcatacgccctgacaccacggacagaagagaaatacaagaagattaatgaggaatttgacaacatgataaagagtcacaagatacctgctgtacctccgcccaactttgagatgcctgtgtctataccagtgtcatctcacaacagcttggtttacagcaacccagtctcctcactgggaaacccaaatcttctgccactggcccacccatccttgcagagaaactctatgagccctggagtaacccatcggcctccgtccgcaggcaataccggcggtctgatgggcggggaccttacatctggagctgggaccagtgccggtaatggatacggcaatccaaggaactcccccggcctgctcgtttcacctggtaacctgaataagaatatgcaggcaaagagtccaccaccaatgaacctcggcatgaataatcgcaaacccgatctgcgagttttgatacctccaggctctaagaatactatgccgtctgtgaaccaaagaatcaataactctcaatctgcgcagtccctcgctaccccggtggtgtctgtggcgacccctacgcttcctggacagggcatgggaggttatccttccgccatcagcaccacctatggtaccgagtattcactttcctcagccgacctctcttcgctcagcggatttaacactgccagcgcactgcacctcggtagtgtgaccggctggcagcaacagcacttacacaatatgcccccttccgcactcagtcagttgggagcatgtacttccactcatttgtcccaaagctccaacctctcactgcctagcacccagagcctcaatatcaagtccgaaccagtcagcccgccaagagacaggactacaacgccatcacgataccctcagcacacaaggcacgaggcaggtaggagtcctgttgactcactctcatcctgctcttctagctacgacgggagcgaccgggaagaccaccggaacgaattccattcacctatcgggctgaccaggcctagccccgatgaaagagaaagcccttccgtcaagcggatgcggctgtctgaaggatgggctacttag

SEQ ID NO: 73680 - DNA, 1452 bp, Artificial Sequence
  derived and/or modified sequence
atgggaaggaagaagatccagatcactcgcatcatggatgagcggaatcggcaagtgacttttaccaagaggaaattcggtctgatgaaaaaggcatacgagctgtccgttctctgtgactgcgagatcgccctaattattttcaactcgacaaataaactcttccagtatgcatccaccgatatggacaaggtgcttctcaaatacacagagtacaacgagcctcacgaatccaggaccaactctgacatcgtggagactctcaggaaaaagggacttaacggctgcgatagtccggatcccgacgccgacgacagcgctctgaacaagaaggagaacaagggatgcgaaagtcccgacccagactcctcatacgctctgacacccagaaccgaggagaaatacaagaaaatcaatgaagaatttgataatatgatcaaatctcacaaaatccccgctgtgcccccaccaaacttcgagatgcctgtgtccatccctgtctcttctcacaacagcctggtctactcaaatcccgtatcttccctgggaaatcccaacttgttgcctctcgcacaccctagcctgcagcgcaattcaatgtcccctggcgtaactcaccgcccaccctctgcaggtaacaccgggggattgatggggggtgacctcacaagtggcgcaggcacatccgcaggaaatggctacgggaacccgagaaactcacccggactactggtatccccaggcaacctgaataagaatatgcaggccaagagtcccccaccaatgaacctggggatgaataacagaaagcctgacctacgggtgctgattcctcctgggtcaaagaatacaatgccgagtgttaatcaacggataaacaacagccaaagtgcccagagcttggccactcctgtggtgtcagttgccacaccgacacttccaggacagggaatggggggatatccgagcgctatctccacaacatacgggacagagtattctctgtcctccgcagacttgagttcactctccggattcaatacagcttcggcacttcacctcggctcagtgacgggttggcagcaacaacacctgcataacatgcctccatctgccctgagccagcttggggcatgtactagcacccacttatctcagtccagcaacctaagccttccatccacccagtctttgaacatcaagtcagagccggtcagccctccccgagaccgcacaacaactccctcccggtaccctcagcatacaagacatgaggcgggtcggtctccagtggatagcttgtccagttgttcctctagttacgacggatcagaccgggaggatcaccgtaacgaattccattcccccatcgggctgaccaggccatcccccgacgagcgggaaagcccaagtgtaaaaaggatgcggctttctgaagggtgggccacctag

SEQ ID NO: 73681 - DNA, 1452 bp, Artificial Sequence
  derived and/or modified sequence
atgggcagaaagaagatccagatcaccagaatcatggacgagagaaacagacaggtgaccttcaccaagagaaagttcggcctgatgaagaaggcctacgagctgagcgtgctgtgcgactgcgagatcgccctgatcatcttcaacagcaccaacaagctgttccagtacgccagcaccgacatggacaaggtgctgctgaagtacaccgagtacaacgagccccacgagagcagaaccaacagcgacatcgtggagaccctgagaaagaagggcctgaacggctgcgacagccccgaccccgacgccgacgacagcgccctgaacaagaaggagaacaagggctgcgagagccccgaccccgacagcagctacgccctgacccccagaaccgaggagaagtacaagaagatcaacgaggagttcgacaacatgatcaagagccacaagatccccgccgtgcccccccccaacttcgagatgcccgtgagcatccccgtgagcagccacaacagcctggtgtacagcaaccccgtgagcagcctgggcaaccccaacctgctgcccctggcccaccccagcctgcagagaaacagcatgagccccggcgtgacccacagaccccccagcgccggcaacaccggcggcctgatgggcggcgacctgaccagcggcgccggcaccagcgccggcaacggctacggcaaccccagaaacagccccggcctgctggtgagccccggcaacctgaacaagaacatgcaggccaagagccccccccccatgaacctgggcatgaacaacagaaagcccgacctgagagtgctgatcccccccggcagcaagaacaccatgcccagcgtgaaccagagaatcaacaacagccagagcgcccagagcctggccacccccgtggtgagcgtggccacccccaccctgcccggccagggcatgggcggctaccccagcgccatcagcaccacctacggcaccgagtacagcctgagcagcgccgacctgagcagcctgagcggcttcaacaccgccagcgccctgcacctgggcagcgtgaccggctggcagcagcagcacctgcacaacatgccccccagcgccctgagccagctgggcgcctgcaccagcacccacctgagccagagcagcaacctgagcctgcccagcacccagagcctgaacatcaagagcgagcccgtgagcccccccagagacagaaccaccacccccagcagatacccccagcacaccagacacgaggccggcagaagccccgtggacagcctgagcagctgcagcagcagctacgacggcagcgacagagaggaccacagaaacgagttccacagccccatcggcctgaccagacccagccccgacgagagagagagccccagcgtgaagagaatgagactgagcgagggctgggccacctag

SEQ ID NO: 73682 - protein, 417 aa, Artificial Sequence
  derived and/or modified sequence
MGRKKIQITRIMDERNRQVTFTKRKFGLMKKAYELSVLCDCEIALIIFNSTNKLFQYASTDMDKVLLKYTEYNEPHESRTNSDIVEAVPPPNFEMPVSIPVSSHNSLVYSNPVSSLGNPNLLPLAHPSLQRNSMSPGVTHRPPSAGNTGGLMGGDLTSGAGTSAGNGYGNPRNSPGLLVSPGNLNKNMQAKSPPPMNLGMNNRKPDLRVLIPPGSKNTMPSVNQRINNSQSAQSLATPVVSVATPTLPGQGMGGYPSAISTTYGTEYSLSSADLSSLSGFNTASALHLGSVTGWQQQHLHNMPPSALSQLGACTSTHLSQSSNLSLPSTQSLNIKSEPVSPPRDRTTTPSRYPQHTRHEAGRSPVDSLSSCSSSYDGSDREDHRNEFHSPIGLTRPSPDERESPSVKRMRLSEGWAT

SEQ ID NO: 73683 - DNA, 5766 bp, Artificial Sequence
  derived and/or modified sequence
gaacgaatgcaggaatttgggaactgagctgtgcaagtgctgaagaaggagatttgtttggaggaaacaggaaagagaaagaaaaggaaggaaaaaatacataatttcagggacgagagagagaagaaaaacggggactatggggagaaaaaagattcagattacgaggattatggatgaacgtaacagacaggtgacatttacaaagaggaaatttgggttgatgaagaaggcttatgagctgagcgtgctgtgtgactgtgagattgcgctgatcatcttcaacagcaccaacaagctgttccagtatgccagcaccgacatggacaaagtgcttctcaagtacacggagtacaacgagccgcatgagagccggacaaactcagacatcgtggaggctgttccacctcccaacttcgagatgccagtctccatcccagtgtccagccacaacagtttggtgtacagcaaccctgtcagctcactgggaaaccccaacctattgccactggctcacccttctctgcagaggaatagtatgtctcctggtgtaacacatcgacctccaagtgcaggtaacacaggtggtctgatgggtggagacctcacgtctggtgcaggcaccagtgcagggaacgggtatggcaatccccgaaactcaccaggtctgctggtctcacctggtaacttgaacaagaatatgcaagcaaaatctcctcccccaatgaatttaggaatgaataaccgtaaaccagatctccgagttcttattccaccaggcagcaagaatacgatgccatcagtgaatcaaaggataaataactcccagtcggctcagtcattggctaccccagtggtttccgtagcaactcctactttaccaggacaaggaatgggaggatatccatcagccatttcaacaacatatggtaccgagtactctctgagtagtgcagacctgtcatctctgtctgggtttaacaccgccagcgctcttcaccttggttcagtaactggctggcaacagcaacacctacataacatgccaccatctgccctcagtcagttgggagcttgcactagcactcatttatctcagagttcaaatctctccctgccttctactcaaagcctcaacatcaagtcagaacctgtttctcctcctagagaccgtaccaccaccccttcgagatacccacaacacacgcgccacgaggcggggagatctcctgttgacagcttgagcagctgtagcagttcgtacgacgggagcgaccgagaggatcaccggaacgaattccactcccccattggactcaccagaccttcgccggacgaaagggaaagtccctcagtcaagcgcatgcgactttctgaaggatgggcaacatgatcagattattacttactagtttttttttttttcttgcagtgtgtgtgtgtgctataccttaatggggaaggggggtcgatatgcattatatgtgccgtgtgtggaaaaaaaaaaagtcaggtactctgttttgtaaaagtacttttaaattgcctcagtgatacagtataaagataaacagaaatgctgagataagcttagcacttgagttgtacaacagaacacttgtacaaaatagattttaaggctaacttcttttcactgttgtgctcctttgcaaaatgtatgttacaatagatagtgtcatgttgcaggttcaacgttatttacatgtaaatagacaaaaggaaacatttgccaaaagcggcagatctttactgaaagagagagcagctgttatgcaacatatagaaaaatgtatagatgcttggacagacccggtaatgggtggccattggtaaatgttaggaacacaccaggtcacctgacatcccaagaatgctcacaaacctgcaggcatatcattggcgtatggcactcattaaaaaggatcagagaccattaaaagaggaccatacctattaaaaaaaaatgtggagttggagggctaacatatttaattaaataaataaataaatctgggtctgcatctcttattaaataaaaatataaaaatatgtacattacattttgcttattttcatataaaaggtaagacagagtttgcaaagcatttgtggctttttgtagtttacttaagccaaaatgtgtttttttccccttgatagcttcgctaatattttaaacagtcctgtaaaaaaccaaaaaggactttttgtatagaaagcactaccctaagccatgaagaactccatgctttgctaaccaagataactgttttctctttgtagaagttttgtttttgaaatgtgtatttctaattatataaaatattaagaatcttttaaaaaaatctgtgaaattaacatgcttgtgtatagctttctaatatatataatattatggtaatagcagaagttttgttatcttaatagcgggaggggggtatatttgtgcagttgcacatttgagtaactattttctttctgttttcttttactctgcttacattttataagtttaaggtcagctgtcaaaaggataacctgtggggttagaacatatcacattgcaacaccctaaattgtttttaatacattagcaatctattgggtcaactgacatccattgtatatactagtttctttcatgctatttttattttgttttttgcatttttatcaaatgcagggcccctttctgatctcaccatttcaccatgcatcttggaattcagtaagtgcatatcctaacttgcccatattctaaatcatctggttggttttcagcctagaatttgatacgctttttagaaatatgcccagaatagaaaagctatgttggggcacatgtcctgcaaatatggccctagaaacaagtgatatggaatttacttggtgaataagttataaattcccacagaagaaaaatgtgaaagactgggtgctagacaagaaggaagcaggtaaagggatagttgctttgtcatccgtttttaattattttaactgacccttgacaatcttgtcagcaatataggactgttgaacaatcccggtgtgtcaggacccccaaatgtcacttctgcataaagcatgtatgtcatctattttttcttcaataaagagatttaatagccatttcaagaaatcccataaagaacctctctatgtccctttttttaatttaaaaaaaatgactcttgtctaatattcgtctataagggattaattttcagaccctttaataagtgagtgccataagaaagtcaatatatattgtttaaaagatatttcagtctaggaaagattttccttctcttggaatgtgaagatctgtcgattcatctccaatcatatgcattgacatacacagcaaagaagatataggcagtaatatcaacactgctatatcatgtgtaggacatttcttatccattttttctcttttacttgcatagttgctatgtgtttctcattgtaaaaggctgccgctgggtggcagaagccaagagaccttattaactaggctatatttttcttaacttgatctgaaatccacaattagaccacaatgcacctttggttgtatccataaaggatgctagcctgccttgtactaatgttttatatattaaaaaaaaaaaatctatcaaccatttcatatatatcccactactcaaggtatccatggaacatgaaagaataacatttatgcagaggaaaaacaaaaacatccctgaaaatatacacactcatacacacacacgcacaggggaataaaataagaaaatcattttcctcaccatagacttgatcccatccttacaacccatccttctaacttgatgtgtataaaatatgcaaacatttcacaaatgttctttgtcatttcaaaatactttagtatatcaatatcagtagataccagtgggtgggaaagggtcattacatgaaaatatgaagaaatagccatattagttttttaacctgcaatttgcctcagcaacaaagaaaaagtgaatttttaatgctgaagataaagtaagctaaagtaccagcagaagccttggctatttatagcagttctgacaatagttttataagaacatgaagagaacagaatcacttgaaaatggatgccagtcatctcttgttcccactactgaattcttataaagtggtggcaagatagggaagggataatctgagaatttttaaaagatgatttaatgagaagaagcacaattttgattttgatgagtcactttctgtaaacaatcttggtctatctttacccttataccttatctgtaatttaccatttattgtatttgcaaagctagtatggtttttaatcacagtaaatcctttgtattccagactttagggcagagccctgagggagtattattttacataacccgtcctagagtaacattttaggcaacattcttcattgcaagtaaaagatccataagtggcattttacacggctgcgagtattgttatatctaatcctattttaaaagatttttggtaatatgaagcttgaatactggtaacagtgatgcaatatacgcaagctgcacaacctgtatattgtatgcattgctgcgtggaggctgtttatttcaacctttttaaaaattgtgttttttagtaaaatggcttattttttcccaaaggtggaatttagcattttgtaatgatgaatataaaaatacctgtcatccccagatcatttaaaagttaactaaagtgagaatgaaaaaacaaaattccaagacactttttaaaagaatgtctgccctcacacacttttatggatttgtttttcttacatacccatcttttaacttagagatagcattttttgccctctttattttgttgtttgtttctccagagagtaaacgctttgtagttctttctttaaaaaacattttttttaaagaagaagaagccacttgaaccctcaataaaggctgttgcctaagcatggcatacttcatctgttctcatttgtgccatctgccgtgatgtcgtcacttttatggcgttaatttcctgccactacagatcttttgaagattgctggaatactggtgtctgttagaatgcttcagactacagatgtaattaaaggcttttcttaatatgttttaaccaaagatgtggagcaatccaagccacatatcttctacatcaaatttttccattttggttattttcataatctggtattgcattttgccttccctgttcatacctcaaattgattcatacctcagtttaattcagagaggtcagttaagtgacggattctgttgtggtttgaatgcagtaccagtgttctcttcgagcaaagtagacctgggtcactgtaggcataggacttggattgcttcagatggtttgctgtatcatttttcttctttttcttttcctggggacttgtttccattaaatgagagtaattaaaatcgcttgtaaatgagggcatacaagcatttgcaacaaatattcaaatagaggctcacagcggcataagctggactttgtcgccactagatgacaagatgttataactaagttaaaccacatctgtgtatctcaagggacttaattcagctgtctgtagtgaataaaagtgggaaattttcaaaagtttctcctgctggaaataaggtataatttgtattttgcagacaattcagtaaagttactggctttcttagtgaaaaaaaaaaa

SEQ ID NO: 73684 - DNA, 387 bp, Artificial Sequence
  derived and/or modified sequence
atgaagcacaaatataacaccctatcctggtataaaaaagagcggtcaacccagctgcgccgtttcatcgtgcatcaacctgaggttggcttgttcttcttcctcagggacgtggtgtataattacatcacagagaaaacaacctgcagatgcccacttacacaagagagaccttgtgatacaggaggcaaattcggccgaatctggatctgccaaccggaggagctgggcaagatgcagatctggatttgtcagccggaggagctaggcaaaatgcaaattgacaagaacaggactatggtccagcagatgtggtatatatggtatgggggactcgacacctcaaccaatagcctgcttccaatcctagtccgtggaatggcatag

SEQ ID NO: 73685 - DNA, 1254 bp, Artificial Sequence
  derived and/or modified sequence
atggggaggaagaagatacagatcactagaatcatggacgaaaggaaccgtcaggttacctttacgaagcggaaattcggactgatgaaaaaggcatacgagctgtctgtcctctgtgactgtgaaatcgcgctgattattttcaacagcacaaacaaactattccaatatgcctcaacagacatggataaggtgctccttaaatacaccgaatacaacgagcctcacgagtcgcgaactaattctgacatcgtagaagccgtccccccaccaaactttgagatgcccgtgtctatcccggtgagttcacataactccctggtgtacagcaacccagtgtcctcattggggaatcccaatctattgcccctcgcccacccgagtcttcagaggaattccatgagccccggtgtgacacatcgtcctccttctgctgggaacaccggcggtctcatgggcggtgatctgacaagtggcgctggcactagtgcggggaatggttacgggaatccacgtaacagtcccggcttactcgtgtcaccggggaacctgaataaaaacatgcaggcgaagagtccccccccgatgaatttaggcatgaacaaccgcaaacctgaccttagagtcttgattccccctggtagtaagaacaccatgccgtctgtgaatcaacgtatcaataacagccagtccgctcagtcccttgctactccggtggtatcagtggccaccccaaccctgcccggccaagggatggggggttacccaagtgcaatctctactacttatggaacagaatattccctgtcaagcgcagacctcagctcgctgagtggcttcaatacagctagtgcccttcaccttggttctgtgaccggctggcagcagcagcacctgcataatatgcctcccagcgctctgagtcaattgggcgcctgcaccagcacgcacctgagtcaatcctccaatctgtctctgccatcaactcagagcctgaacattaagtccgaacccgtgtctcccccgcgcgatagaacaaccaccccctctaggtacccccagcacacgcggcacgaagccggacgatcccccgtcgactcattatccagctgtagttcctcctacgatggttcagatagagaagatcatagaaacgagttccacagtccaataggcttaacaaggccgtcccccgacgagagggaatcaccaagcgtgaaacgaatgcgcctgtctgagggctgggccacatag

SEQ ID NO: 73686 - DNA, 1254 bp, Artificial Sequence
  derived and/or modified sequence
atgggcaggaagaagatccagatcacccgcatcatggatgaaagaaaccggcaggtgaccttcaccaagaggaagtttggcctgatgaagaaggcctatgagctgtctgtgctgtgtgactgtgaaattgccctgatcatcttcaacagcaccaacaagctgttccagtatgccagcacagacatggacaaggtgctgctgaagtacacagagtacaatgagccccatgagagcaggaccaacagcgacatcgtggaggccgtgcccccacccaactttgagatgcctgtgtccatccctgtgagcagccacaacagcctggtgtacagcaaccctgtgagcagcctgggcaaccccaacctgctgcccctggcccaccccagcctgcagagaaattccatgagccctggggtgacccaccggccccccagcgctggcaacacaggaggcctgatgggcggggacctgaccagcggggccggcaccagcgctggaaatggctacggcaaccccaggaacagccctggcctgctggtgtccccaggcaacctgaacaagaacatgcaggccaagagccccccacccatgaacctgggcatgaacaacaggaagccagacctgcgggtgctgatccccccaggcagcaagaacaccatgcccagcgtgaaccagaggatcaacaacagccagagcgcccagagcctggccacccctgtggtgtctgtggccacccccaccctgcccggccagggcatgggcggctaccccagcgccatcagcaccacctatggaacagagtacagcctgagcagcgctgacctgagcagcctgagcggcttcaacacagccagcgccctgcacctgggctctgtgacaggctggcagcagcagcacctgcacaacatgcctccttctgccctgagccagctgggcgcctgcaccagcacccacctgagccagagcagcaacctgagcctgcccagcacccagagcctgaacatcaagtctgagcctgtgtccccaccccgggacaggaccaccacccccagccgctacccccagcacaccaggcatgaggccggccgcagccctgtggacagcctgagcagctgcagcagcagctatgatggcagtgaccgggaggaccacagaaatgagttccacagccccatcggcctgacccggcccagcccagatgagcgggagagccccagcgtgaagaggatgaggctgtctgagggctgggccacctag

SEQ ID NO: 73687 - DNA, 1254 bp, Artificial Sequence
  derived and/or modified sequence
atggggagaaaaaagattcagattacgaggattatggatgaacgtaacagacaggtgacatttacaaagaggaaatttgggttgatgaagaaggcttatgagctgagcgtgctgtgtgactgtgagattgcgctgatcatcttcaacagcaccaacaagctgttccagtatgccagcaccgacatggacaaagtgcttctcaagtacacggagtacaacgagccgcatgagagccggacaaactcagacatcgtggaggctgttccacctcccaacttcgagatgccagtctccatcccagtgtccagccacaacagtttggtgtacagcaaccctgtcagctcactgggaaaccccaacctattgccactggctcacccttctctgcagaggaatagtatgtctcctggtgtaacacatcgacctccaagtgcaggtaacacaggtggtctgatgggtggagacctcacgtctggtgcaggcaccagtgcagggaacgggtatggcaatccccgaaactcaccaggtctgctggtctcacctggtaacttgaacaagaatatgcaagcaaaatctcctcccccaatgaatttaggaatgaataaccgtaaaccagatctccgagttcttattccaccaggcagcaagaatacgatgccatcagtgaatcaaaggataaataactcccagtcggctcagtcattggctaccccagtggtttccgtagcaactcctactttaccaggacaaggaatgggaggatatccatcagccatttcaacaacatatggtaccgagtactctctgagtagtgcagacctgtcatctctgtctgggtttaacaccgccagcgctcttcaccttggttcagtaactggctggcaacagcaacacctacataacatgccaccatctgccctcagtcagttgggagcttgcactagcactcatttatctcagagttcaaatctctccctgccttctactcaaagcctcaacatcaagtcagaacctgtttctcctcctagagaccgtaccaccaccccttcgagatacccacaacacacgcgccacgaggcggggagatctcctgttgacagcttgagcagctgtagcagttcgtacgacgggagcgaccgagaggatcaccggaacgaattccactcccccattggactcaccagaccttcgccggacgaaagggaaagtccctcagtcaagcgcatgcgactttctgaaggatgggcaacatga

SEQ ID NO: 73688 - DNA, 1254 bp, Artificial Sequence
  derived and/or modified sequence
atgggccggaagaagatccagatcacccggatcatggacgagcggaatcgacaagtgacgttcacaaagagaaagttcggcctcatgaagaaagcatacgagctgagtgttctctgcgactgcgagattgccctaatcatctttaattcgactaataagttgtttcagtatgcctccactgatatggacaaggtcctgcttaaatacacggagtacaatgaaccccacgagagccgcacaaattcagatattgttgaagcagtcccgcctcctaattttgaaatgcccgtgtccatcccagtttccagccacaattcactcgtgtattccaaccctgtttcatctctgggcaatcccaaccttcttcccctggcacatccatcactccaaaggaactccatgagccccggtgtgacccatagacctccatccgcaggtaacaccgggggactcatggggggcgatctaacttcaggggccggaacctccgccggaaatggctacgggaacccacggaattcccccggcttgctggtctcgccaggcaatttgaataagaacatgcaagctaaatctcctcctcccatgaacctggggatgaataatcggaagcctgatctgagggtgttaatacctcctgggtcaaagaacactatgccctcggttaaccagcggatcaacaactcccaatccgcccagtcacttgccactccagtcgtgagcgtggccaccccaaccctgccagggcagggaatggggggatatccaagtgcgatctcaacaacttacggaactgaatactcactgagtagcgctgacctgtcatccctgtcagggtttaacacggcctctgccctccatctaggctccgttaccgggtggcagcagcaacacttgcataatatgcccccttctgcattatcccagctgggagcctgcaccagtacgcaccttagccaatcttcgaacctctccctcccctcgactcagtctctcaatatcaagagcgagcccgttagcccaccccgcgatagaaccactacaccatctcggtatcctcagcacacccgacacgaggcaggtcgaagtcccgtggactccttgtcatcttgctcatctagctacgacggatctgatcgagaggaccataggaatgagtttcactctccaatcggcctcactcgcccctcccccgatgagcgcgagtcaccttcagtcaaacggatgagactctcagaaggttgggcaacatag

SEQ ID NO: 73689 - DNA, 1254 bp, Artificial Sequence
  derived and/or modified sequence
atgggccgaaaaaagattcagatcacacgtattatggacgagagaaaccgacaggtgaccttcactaaacggaaattcgggctcatgaagaaggcctatgaactgtcggttctgtgtgactgcgaaattgctctcataatctttaactccacaaacaaacttttccagtacgctagcaccgatatggacaaggttctgctgaagtacaccgaatacaacgagccccacgagagccgaacaaacagcgacatcgttgaagccgtcccccctcccaattttgaaatgcctgtctcaattccagtgtcatcccacaattctctagtgtactcaaatccggtctcatcactgggcaatcccaacctgctcccgctcgcccacccgtctttacagaggaattcaatgtcaccgggtgtgactcaccggccaccaagcgctggcaatactgggggtctgatgggtggggacctgacctccggtgccggaacgtcagcaggcaacggatacggaaatcccaggaactcacccggtcttctcgtgtcccccggtaatctgaataaaaacatgcaagctaagagtccacctccaatgaatctgggtatgaacaaccgcaaacctgatctacgggtcctaatcccacccggttcaaaaaatacaatgcccagcgttaatcagcgcatcaataatagccagtcggcacagtccctggctacgcccgtggtttctgtggcgacgcctacgctgccaggtcagggcatggggggttacccctccgccatttccaccacatatgggaccgagtattcactgagttccgccgacctgtcatccctgtctggctttaataccgcttctgcgttgcacttaggatcagtaaccggatggcagcaacagcacctccacaacatgcccccatctgctcttagccaattaggagcatgcacgtcaactcacctcagccaatccagcaatctcagcctgccttccacccagtctctcaatataaagtccgagccagtctcccccccacgggacagaacaacaaccccttctaggtatccccagcatacaaggcatgaagctggcaggagccctgtggactccttgtcctcttgcagctccagctatgacggaagcgaccgtgaagatcacaggaatgaattccatagcccaattggactgaccagaccttctcctgacgagcgtgaatcaccatccgttaaacgcatgcggctgtctgagggatgggcaacctag

SEQ ID NO: 73690 - DNA, 1254 bp, Artificial Sequence
  derived and/or modified sequence
atgggcagaaagaagatccagatcaccagaatcatggacgagagaaacagacaggtgaccttcaccaagagaaagttcggcctgatgaagaaggcctacgagctgagcgtgctgtgcgactgcgagatcgccctgatcatcttcaacagcaccaacaagctgttccagtacgccagcaccgacatggacaaggtgctgctgaagtacaccgagtacaacgagccccacgagagcagaaccaacagcgacatcgtggaggccgtgcccccccccaacttcgagatgcccgtgagcatccccgtgagcagccacaacagcctggtgtacagcaaccccgtgagcagcctgggcaaccccaacctgctgcccctggcccaccccagcctgcagagaaacagcatgagccccggcgtgacccacagaccccccagcgccggcaacaccggcggcctgatgggcggcgacctgaccagcggcgccggcaccagcgccggcaacggctacggcaaccccagaaacagccccggcctgctggtgagccccggcaacctgaacaagaacatgcaggccaagagccccccccccatgaacctgggcatgaacaacagaaagcccgacctgagagtgctgatcccccccggcagcaagaacaccatgcccagcgtgaaccagagaatcaacaacagccagagcgcccagagcctggccacccccgtggtgagcgtggccacccccaccctgcccggccagggcatgggcggctaccccagcgccatcagcaccacctacggcaccgagtacagcctgagcagcgccgacctgagcagcctgagcggcttcaacaccgccagcgccctgcacctgggcagcgtgaccggctggcagcagcagcacctgcacaacatgccccccagcgccctgagccagctgggcgcctgcaccagcacccacctgagccagagcagcaacctgagcctgcccagcacccagagcctgaacatcaagagcgagcccgtgagcccccccagagacagaaccaccacccccagcagatacccccagcacaccagacacgaggccggcagaagccccgtggacagcctgagcagctgcagcagcagctacgacggcagcgacagagaggaccacagaaacgagttccacagccccatcggcctgaccagacccagccccgacgagagagagagccccagcgtgaagagaatgagactgagcgagggctgggccacctag

SEQ ID NO: 73691 - DNA, 5694 bp, Artificial Sequence
  derived and/or modified sequence
gaacgaatgcaggaatttgggaactgagctgtgcaagtgctgaagaaggagatttgtttggaggaaacaggaaagagaaagaaaaggaaggaaaaaatacataatttcagggacgagagagagaagaaaaacggggactatggggagaaaaaagattcagattacgaggattatggatgaacgtaacagacaggtgacatttacaaagaggaaatttgggttgatgaagaaggcttatgagctgagcgtgctgtgtgactgtgagattgcgctgatcatcttcaacagcaccaacaagctgttccagtatgccagcaccgacatggacaaagtgcttctcaagtacacggagtacaacgagccgcatgagagccggacaaactcagacatcgtggaggctgttccacctcccaacttcgagatgccagtctccatcccagtgtccagccacaacagtttggtgtacagcaaccctgtcagctcactgggaaaccccaacctattgccactggctcacccttctctgcagaggaatagtatgtctcctggtgtaacacatcgacctccaagtgcaggtaacacaggtggtctgatgggtggagacctcacgtctggtgcaggcaccagtgcagggaacgggtatggcaatccccgaaactcaccaggtctgctggtctcacctggtaacttgaacaagaatatgcaagcaaaatctcctcccccaatgaatttaggaatgaataaccgtaaaccagatctccgagttcttattccaccaggcagcaagaatacgatgccatcagtgtctgaggatgtcgacctgcttttgaatcaaaggataaataactcccagtcggctcagtcattggctaccccagtggtttccgtagcaactcctactttaccaggacaaggaatgggaggatatccatcagccatttcaacaacatatggtaccgagtactctctgagtagtgcagacctgtcatctctgtctgggtttaacaccgccagcgctcttcaccttggttcagtaactggctggcaacagcaacacctacataacatgccaccatctgccctcagtcagttgggagaccgtaccaccaccccttcgagatacccacaacacacgcgccacgaggcggggagatctcctgttgacagcttgagcagctgtagcagttcgtacgacgggagcgaccgagaggatcaccggaacgaattccactcccccattggactcaccagaccttcgccggacgaaagggaaagtccctcagtcaagcgcatgcgactttctgaaggatgggcaacatgatcagattattacttactagtttttttttttttcttgcagtgtgtgtgtgtgctataccttaatggggaaggggggtcgatatgcattatatgtgccgtgtgtggaaaaaaaaaaagtcaggtactctgttttgtaaaagtacttttaaattgcctcagtgatacagtataaagataaacagaaatgctgagataagcttagcacttgagttgtacaacagaacacttgtacaaaatagattttaaggctaacttcttttcactgttgtgctcctttgcaaaatgtatgttacaatagatagtgtcatgttgcaggttcaacgttatttacatgtaaatagacaaaaggaaacatttgccaaaagcggcagatctttactgaaagagagagcagctgttatgcaacatatagaaaaatgtatagatgcttggacagacccggtaatgggtggccattggtaaatgttaggaacacaccaggtcacctgacatcccaagaatgctcacaaacctgcaggcatatcattggcgtatggcactcattaaaaaggatcagagaccattaaaagaggaccatacctattaaaaaaaaatgtggagttggagggctaacatatttaattaaataaataaataaatctgggtctgcatctcttattaaataaaaatataaaaatatgtacattacattttgcttattttcatataaaaggtaagacagagtttgcaaagcatttgtggctttttgtagtttacttaagccaaaatgtgtttttttccccttgatagcttcgctaatattttaaacagtcctgtaaaaaaccaaaaaggactttttgtatagaaagcactaccctaagccatgaagaactccatgctttgctaaccaagataactgttttctctttgtagaagttttgtttttgaaatgtgtatttctaattatataaaatattaagaatcttttaaaaaaatctgtgaaattaacatgcttgtgtatagctttctaatatatataatattatggtaatagcagaagttttgttatcttaatagcgggaggggggtatatttgtgcagttgcacatttgagtaactattttctttctgttttcttttactctgcttacattttataagtttaaggtcagctgtcaaaaggataacctgtggggttagaacatatcacattgcaacaccctaaattgtttttaatacattagcaatctattgggtcaactgacatccattgtatatactagtttctttcatgctatttttattttgttttttgcatttttatcaaatgcagggcccctttctgatctcaccatttcaccatgcatcttggaattcagtaagtgcatatcctaacttgcccatattctaaatcatctggttggttttcagcctagaatttgatacgctttttagaaatatgcccagaatagaaaagctatgttggggcacatgtcctgcaaatatggccctagaaacaagtgatatggaatttacttggtgaataagttataaattcccacagaagaaaaatgtgaaagactgggtgctagacaagaaggaagcaggtaaagggatagttgctttgtcatccgtttttaattattttaactgacccttgacaatcttgtcagcaatataggactgttgaacaatcccggtgtgtcaggacccccaaatgtcacttctgcataaagcatgtatgtcatctattttttcttcaataaagagatttaatagccatttcaagaaatcccataaagaacctctctatgtccctttttttaatttaaaaaaaatgactcttgtctaatattcgtctataagggattaattttcagaccctttaataagtgagtgccataagaaagtcaatatatattgtttaaaagatatttcagtctaggaaagattttccttctcttggaatgtgaagatctgtcgattcatctccaatcatatgcattgacatacacagcaaagaagatataggcagtaatatcaacactgctatatcatgtgtaggacatttcttatccattttttctcttttacttgcatagttgctatgtgtttctcattgtaaaaggctgccgctgggtggcagaagccaagagaccttattaactaggctatatttttcttaacttgatctgaaatccacaattagaccacaatgcacctttggttgtatccataaaggatgctagcctgccttgtactaatgttttatatattaaaaaaaaaaaatctatcaaccatttcatatatatcccactactcaaggtatccatggaacatgaaagaataacatttatgcagaggaaaaacaaaaacatccctgaaaatatacacactcatacacacacacgcacaggggaataaaataagaaaatcattttcctcaccatagacttgatcccatccttacaacccatccttctaacttgatgtgtataaaatatgcaaacatttcacaaatgttctttgtcatttcaaaatactttagtatatcaatatcagtagataccagtgggtgggaaagggtcattacatgaaaatatgaagaaatagccatattagttttttaacctgcaatttgcctcagcaacaaagaaaaagtgaatttttaatgctgaagataaagtaagctaaagtaccagcagaagccttggctatttatagcagttctgacaatagttttataagaacatgaagagaacagaatcacttgaaaatggatgccagtcatctcttgttcccactactgaattcttataaagtggtggcaagatagggaagggataatctgagaatttttaaaagatgatttaatgagaagaagcacaattttgattttgatgagtcactttctgtaaacaatcttggtctatctttacccttataccttatctgtaatttaccatttattgtatttgcaaagctagtatggtttttaatcacagtaaatcctttgtattccagactttagggcagagccctgagggagtattattttacataacccgtcctagagtaacattttaggcaacattcttcattgcaagtaaaagatccataagtggcattttacacggctgcgagtattgttatatctaatcctattttaaaagatttttggtaatatgaagcttgaatactggtaacagtgatgcaatatacgcaagctgcacaacctgtatattgtatgcattgctgcgtggaggctgtttatttcaacctttttaaaaattgtgttttttagtaaaatggcttattttttcccaaaggtggaatttagcattttgtaatgatgaatataaaaatacctgtcatccccagatcatttaaaagttaactaaagtgagaatgaaaaaacaaaattccaagacactttttaaaagaatgtctgccctcacacacttttatggatttgtttttcttacatacccatcttttaacttagagatagcattttttgccctctttattttgttgtttgtttctccagagagtaaacgctttgtagttctttctttaaaaaacattttttttaaagaagaagaagccacttgaaccctcaataaaggctgttgcctaagcatggcatacttcatctgttctcatttgtgccatctgccgtgatgtcgtcacttttatggcgttaatttcctgccactacagatcttttgaagattgctggaatactggtgtctgttagaatgcttcagactacagatgtaattaaaggcttttcttaatatgttttaaccaaagatgtggagcaatccaagccacatatcttctacatcaaatttttccattttggttattttcataatctggtattgcattttgccttccctgttcatacctcaaattgattcatacctcagtttaattcagagaggtcagttaagtgacggattctgttgtggtttgaatgcagtaccagtgttctcttcgagcaaagtagacctgggtcactgtaggcataggacttggattgcttcagatggtttgctgtatcatttttcttctttttcttttcctggggacttgtttccattaaatgagagtaattaaaatcgcttgtaaatgagggcatacaagcatttgcaacaaatattcaaatagaggctcacagcggcataagctggactttgtcgccactagatgacaagatgttataactaagttaaaccacatctgtgtatctcaagggacttaattcagctgtctgtagtgaataaaagtgggaaattttcaaaagtttctcctgctggaaataaggtataatttgtattttgcagacaattcagtaaagttactggctttcttagtgaaaaaaaaaaa

SEQ ID NO: 73692 - protein, 473 aa, Artificial Sequence
  derived and/or modified sequence
MGRKKIQITRIMDERNRQVTFTKRKFGLMKKAYELSVLCDCEIALIIFNSTNKLFQYASTDMDKVLLKYTEYNEPHESRTNSDIVETLRKKGLNGCDSPDPDADDSVGHSPESEDKYRKINEDIDLMISRQRLCAVPPPNFEMPVSIPVSSHNSLVYSNPVSSLGNPNLLPLAHPSLQRNSMSPGVTHRPPSAGNTGGLMGGDLTSGAGTSAGNGYGNPRNSPGLLVSPGNLNKNMQAKSPPPMNLGMNNRKPDLRVLIPPGSKNTMPSVSEDVDLLLNQRINNSQSAQSLATPVVSVATPTLPGQGMGGYPSAISTTYGTEYSLSSADLSSLSGFNTASALHLGSVTGWQQQHLHNMPPSALSQLGACTSTHLSQSSNLSLPSTQSLNIKSEPVSPPRDRTTTPSRYPQHTRHEAGRSPVDSLSSCSSSYDGSDREDHRNEFHSPIGLTRPSPDERESPSVKRMRLSEGWAT

SEQ ID NO: 73693 - protein, 98 aa, Artificial Sequence
  derived and/or modified sequence
MGRKKIQITRIMDERNRQVTFTKRKFGLMKKAYELSVLCDCEIALIIFNSTNKLFQYASTDMDKVLLKYTEYNEPHESRTNSDIVETLRKKGLNGCDS

SEQ ID NO: 73694 - protein, 87 aa, Artificial Sequence
  derived and/or modified sequence
MGRKKIQITRIMDERNRQVTFTKRKFGLMKKAYELSVLCDCEIALIIFNSTNKLFQYASTDMDKVLLKYTEYNEPHESRTNSDIVET

SEQ ID NO: 73695 - protein, 473 aa, Artificial Sequence
  derived and/or modified sequence
MGRKKIQITRIMDERNRQVTFTKRKFGLMKKAYELSVLCDCEIALIIFNSTNKLFQYASTDMDKVLLKYTEYNEPHESRTNSDIVETLRKKGLNGCDSPDPDADDSVGHSPESEDKYRKINEDIDLMISRQRLCAVPPPNFEMPVSIPVSSHNSLVYSNPVSSLGNPNLLPLAHPSLQRNSMSPGVTHRPPSAGNTGGLMGGDLTSGAGTSAGNGYGNPRNSPGLLVSPGNLNKNMQAKSPPPMNLGMNNRKPDLRVLIPPGSKNTMPSVVIQNYILKNQRINNSQSAQSLATPVVSVATPTLPGQGMGGYPSAISTTYGTEYSLSSADLSSLSGFNTASALHLGSVTGWQQQHLHNMPPSALSQLGACTSTHLSQSSNLSLPSTQSLNIKSEPVSPPRDRTTTPSRYPQHTRHEAGRSPVDSLSSCSSSYDGSDREDHRNEFHSPIGLTRPSPDERESPSVKRMRLSEGWAT

SEQ ID NO: 73696 - DNA, 6458 bp, Artificial Sequence
  derived and/or modified sequence
gcgatgtttcaaacgctgtgagctgttctccttttcccattcgtcttctgtcacttccttcctggacgcagttttctggacgagtctggttacttttaatccgaccggccgctgagagccactttctcctcctcctcctcctcctccttctcttcctcctccttcttcctcctcctcctcctcttccgagcggcctcggcgcgcgcgaatgcgcggccccgcgccccccccctcgcgcgcgctcccctcgcgcgcgcgcacacacgcacacatcgtctccagctctctgctcgctctgctcgcagtcacagacacttgagcacacgcgtacacccagacatcttcgggctgctattggattgactttgaaggttctgtgtgggtcgccgtggctgcatgtttgaatcaggtggagaagcacttcaacgctggacgaagtaaagattattgttgttattttttttttctctctctctctctcttaagaaaggaaaatatcccaaggactaatctgatcgggtcttccttcatcaggaacgaatgcaggaatttgggaactgagctgtgcaagtgctgaagaaggagatttgtttggaggaaacaggaaagagaaagaaaaggaaggaaaaaatacataatttcagggacgagagagagaagaaaaacggggactatggggagaaaaaagattcagattacgaggattatggatgaacgtaacagacaggtgacatttacaaagaggaaatttgggttgatgaagaaggcttatgagctgagcgtgctgtgtgactgtgagattgcgctgatcatcttcaacagcaccaacaagctgttccagtatgccagcaccgacatggacaaagtgcttctcaagtacacggagtacaacgagccgcatgagagccggacaaactcagacatcgtggagacgttgagaaagaagggccttaatggctgtgacagcccagaccccgatgcggacgattccgtaggtcacagccctgagtctgaggacaagtacaggaaaattaacgaagatattgatctaatgatcagcaggcaaagattgtgtgctgttccacctcccaacttcgagatgccagtctccatcccagtgtccagccacaacagtttggtgtacagcaaccctgtcagctcactgggaaaccccaacctattgccactggctcacccttctctgcagaggaatagtatgtctcctggtgtaacacatcgacctccaagtgcaggtaacacaggtggtctgatgggtggagacctcacgtctggtgcaggcaccagtgcagggaacgggtatggcaatccccgaaactcaccaggtctgctggtctcacctggtaacttgaacaagaatatgcaagcaaaatctcctcccccaatgaatttaggaatgaataaccgtaaaccagatctccgagttcttattccaccaggcagcaagaatacgatgccatcagtgtctgaggatgtcgacctgcttttgaatcaaaggataaataactcccagtcggctcagtcattggctaccccagtggtttccgtagcaactcctactttaccaggacaaggaatgggaggatatccatcagccatttcaacaacatatggtaccgagtactctctgagtagtgcagacctgtcatctctgtctgggtttaacaccgccagcgctcttcaccttggttcagtaactggctggcaacagcaacacctacataacatgccaccatctgccctcagtcagttgggagcttgcactagcactcatttatctcagagttcaaatctctccctgccttctactcaaagcctcaacatcaagtcagaacctgtttctcctcctagagaccgtaccaccaccccttcgagatacccacaacacacgcgccacgaggcggggagatctcctgttgacagcttgagcagctgtagcagttcgtacgacgggagcgaccgagaggatcaccggaacgaattccactcccccattggactcaccagaccttcgccggacgaaagggaaagtccctcagtcaagcgcatgcgactttctgaaggatgggcaacatgatcagattattacttactagtttttttttttttcttgcagtgtgtgtgtgtgctataccttaatggggaaggggggtcgatatgcattatatgtgccgtgtgtggaaaaaaaaaaagtcaggtactctgttttgtaaaagtacttttaaattgcctcagtgatacagtataaagataaacagaaatgctgagataagcttagcacttgagttgtacaacagaacacttgtacaaaatagattttaaggctaacttcttttcactgttgtgctcctttgcaaaatgtatgttacaatagatagtgtcatgttgcaggttcaacgttatttacatgtaaatagacaaaaggaaacatttgccaaaagcggcagatctttactgaaagagagagcagctgttatgcaacatatagaaaaatgtatagatgcttggacagacccggtaatgggtggccattggtaaatgttaggaacacaccaggtcacctgacatcccaagaatgctcacaaacctgcaggcatatcattggcgtatggcactcattaaaaaggatcagagaccattaaaagaggaccatacctattaaaaaaaaatgtggagttggagggctaacatatttaattaaataaataaataaatctgggtctgcatctcttattaaataaaaatataaaaatatgtacattacattttgcttattttcatataaaaggtaagacagagtttgcaaagcatttgtggctttttgtagtttacttaagccaaaatgtgtttttttccccttgatagcttcgctaatattttaaacagtcctgtaaaaaaccaaaaaggactttttgtatagaaagcactaccctaagccatgaagaactccatgctttgctaaccaagataactgttttctctttgtagaagttttgtttttgaaatgtgtatttctaattatataaaatattaagaatcttttaaaaaaatctgtgaaattaacatgcttgtgtatagctttctaatatatataatattatggtaatagcagaagttttgttatcttaatagcgggaggggggtatatttgtgcagttgcacatttgagtaactattttctttctgttttcttttactctgcttacattttataagtttaaggtcagctgtcaaaaggataacctgtggggttagaacatatcacattgcaacaccctaaattgtttttaatacattagcaatctattgggtcaactgacatccattgtatatactagtttctttcatgctatttttattttgttttttgcatttttatcaaatgcagggcccctttctgatctcaccatttcaccatgcatcttggaattcagtaagtgcatatcctaacttgcccatattctaaatcatctggttggttttcagcctagaatttgatacgctttttagaaatatgcccagaatagaaaagctatgttggggcacatgtcctgcaaatatggccctagaaacaagtgatatggaatttacttggtgaataagttataaattcccacagaagaaaaatgtgaaagactgggtgctagacaagaaggaagcaggtaaagggatagttgctttgtcatccgtttttaattattttaactgacccttgacaatcttgtcagcaatataggactgttgaacaatcccggtgtgtcaggacccccaaatgtcacttctgcataaagcatgtatgtcatctattttttcttcaataaagagatttaatagccatttcaagaaatcccataaagaacctctctatgtccctttttttaatttaaaaaaaatgactcttgtctaatattcgtctataagggattaattttcagaccctttaataagtgagtgccataagaaagtcaatatatattgtttaaaagatatttcagtctaggaaagattttccttctcttggaatgtgaagatctgtcgattcatctccaatcatatgcattgacatacacagcaaagaagatataggcagtaatatcaacactgctatatcatgtgtaggacatttcttatccattttttctcttttacttgcatagttgctatgtgtttctcattgtaaaaggctgccgctgggtggcagaagccaagagaccttattaactaggctatatttttcttaacttgatctgaaatccacaattagaccacaatgcacctttggttgtatccataaaggatgctagcctgccttgtactaatgttttatatattaaaaaaaaaaaatctatcaaccatttcatatatatcccactactcaaggtatccatggaacatgaaagaataacatttatgcagaggaaaaacaaaaacatccctgaaaatatacacactcatacacacacacgcacaggggaataaaataagaaaatcattttcctcaccatagacttgatcccatccttacaacccatccttctaacttgatgtgtataaaatatgcaaacatttcacaaatgttctttgtcatttcaaaatactttagtatatcaatatcagtagataccagtgggtgggaaagggtcattacatgaaaatatgaagaaatagccatattagttttttaacctgcaatttgcctcagcaacaaagaaaaagtgaatttttaatgctgaagataaagtaagctaaagtaccagcagaagccttggctatttatagcagttctgacaatagttttataagaacatgaagagaacagaatcacttgaaaatggatgccagtcatctcttgttcccactactgaattcttataaagtggtggcaagatagggaagggataatctgagaatttttaaaagatgatttaatgagaagaagcacaattttgattttgatgagtcactttctgtaaacaatcttggtctatctttacccttataccttatctgtaatttaccatttattgtatttgcaaagctagtatggtttttaatcacagtaaatcctttgtattccagactttagggcagagccctgagggagtattattttacataacccgtcctagagtaacattttaggcaacattcttcattgcaagtaaaagatccataagtggcattttacacggctgcgagtattgttatatctaatcctattttaaaagatttttggtaatatgaagcttgaatactggtaacagtgatgcaatatacgcaagctgcacaacctgtatattgtatgcattgctgcgtggaggctgtttatttcaacctttttaaaaattgtgttttttagtaaaatggcttattttttcccaaaggtggaatttagcattttgtaatgatgaatataaaaatacctgtcatccccagatcatttaaaagttaactaaagtgagaatgaaaaaacaaaattccaagacactttttaaaagaatgtctgccctcacacacttttatggatttgtttttcttacatacccatcttttaacttagagatagcattttttgccctctttattttgttgtttgtttctccagagagtaaacgctttgtagttctttctttaaaaaacattttttttaaagaagaagaagccacttgaaccctcaataaaggctgttgcctaagcatggcatacttcatctgttctcatttgtgccatctgccgtgatgtcgtcacttttatggcgttaatttcctgccactacagatcttttgaagattgctggaatactggtgtctgttagaatgcttcagactacagatgtaattaaaggcttttcttaatatgttttaaccaaagatgtggagcaatccaagccacatatcttctacatcaaatttttccattttggttattttcataatctggtattgcattttgccttccctgttcatacctcaaattgattcatacctcagtttaattcagagaggtcagttaagtgacggattctgttgtggtttgaatgcagtaccagtgttctcttcgagcaaagtagacctgggtcactgtaggcataggacttggattgcttcagatggtttgctgtatcatttttcttctttttcttttcctggggacttgtttccattaaatgagagtaattaaaatcgcttgtaaatgagggcatacaagcatttgcaacaaatattcaaatagaggctcacagcggcataagctggactttgtcgccactagatgacaagatgttataactaagttaaaccacatctgtgtatctcaagggacttaattcagctgtctgtagtgaataaaagtgggaaattttcaaaagtttctcctgctggaaataaggtataatttgtattttgcagacaattcagtaaagttactggctttcttagtga

SEQ ID NO: 73697 - DNA, 6449 bp, Artificial Sequence
  derived and/or modified sequence
gagctgttctccttttcccattcgtcttctgtcacttccttcctggacgcagttttctggacgagtctggttacttttaatccgaccggccgctgagagccactttctcctcctcctcctcctcctccttctcttcctcctccttcttcctcctcctcctcctcttccgagcggcctcggcgcgcgcgaatgcgcggccccgcgccccccccctcgcgcgcgctcccctcgcgcgcgcgcacacacgcacacatcgtctccagctctctgctcgctctgctcgcagtcacagacacttgagcacacgcgtacacccagacatcttcgggctgctattggattgactttgaaggttctgtgtgggtcgccgtggctgcatgtttgaatcaggtggagaagcacttcaacgctggacgaagtaaagattattgttgttattttttttttctctctctctctctcttaagaaaggaaaatatcccaaggactaatctgatcgggtcttccttcatcaggaacgaatgcaggaatttgggaactgagctgtgcaagtgctgaagaaggagatttgtttggaggaaacaggaaagagaaagaaaaggaaggaaaaaatacataatttcagggacgagagagagaagaaaaacggggactatggggagaaaaaagattcagattacgaggattatggatgaacgtaacagacaggtgacatttacaaagaggaaatttgggttgatgaagaaggcttatgagctgagcgtgctgtgtgactgtgagattgcgctgatcatcttcaacagcaccaacaagctgttccagtatgccagcaccgacatggacaaagtgcttctcaagtacacggagtacaacgagccgcatgagagccggacaaactcagacatcgtggagacgttgagaaagaagggccttaatggctgtgacagcccagaccccgatgcggacgattccgtaggtcacagccctgagtctgaggacaagtacaggaaaattaacgaagatattgatctaatgatcagcaggcaaagattgtgtgctgttccacctcccaacttcgagatgccagtctccatcccagtgtccagccacaacagtttggtgtacagcaaccctgtcagctcactgggaaaccccaacctattgccactggctcacccttctctgcagaggaatagtatgtctcctggtgtaacacatcgacctccaagtgcaggtaacacaggtggtctgatgggtggagacctcacgtctggtgcaggcaccagtgcagggaacgggtatggcaatccccgaaactcaccaggtctgctggtctcacctggtaacttgaacaagaatatgcaagcaaaatctcctcccccaatgaatttaggaatgaataaccgtaaaccagatctccgagttcttattccaccaggcagcaagaatacgatgccatcagtgtctgaggatgtcgacctgcttttgaatcaaaggataaataactcccagtcggctcagtcattggctaccccagtggtttccgtagcaactcctactttaccaggacaaggaatgggaggatatccatcagccatttcaacaacatatggtaccgagtactctctgagtagtgcagacctgtcatctctgtctgggtttaacaccgccagcgctcttcaccttggttcagtaactggctggcaacagcaacacctacataacatgccaccatctgccctcagtcagttgggagcttgcactagcactcatttatctcagagttcaaatctctccctgccttctactcaaagcctcaacatcaagtcagaacctgtttctcctcctagagaccgtaccaccaccccttcgagatacccacaacacacgcgccacgaggcggggagatctcctgttgacagcttgagcagctgtagcagttcgtacgacgggagcgaccgagaggatcaccggaacgaattccactcccccattggactcaccagaccttcgccggacgaaagggaaagtccctcagtcaagcgcatgcgactttctgaaggatgggcaacatgatcagattattacttactagtttttttttttttcttgcagtgtgtgtgtgtgctataccttaatggggaaggggggtcgatatgcattatatgtgccgtgtgtggaaaaaaaaaaagtcaggtactctgttttgtaaaagtacttttaaattgcctcagtgatacagtataaagataaacagaaatgctgagataagcttagcacttgagttgtacaacagaacacttgtacaaaatagattttaaggctaacttcttttcactgttgtgctcctttgcaaaatgtatgttacaatagatagtgtcatgttgcaggttcaacgttatttacatgtaaatagacaaaaggaaacatttgccaaaagcggcagatctttactgaaagagagagcagctgttatgcaacatatagaaaaatgtatagatgcttggacagacccggtaatgggtggccattggtaaatgttaggaacacaccaggtcacctgacatcccaagaatgctcacaaacctgcaggcatatcattggcgtatggcactcattaaaaaggatcagagaccattaaaagaggaccatacctattaaaaaaaaatgtggagttggagggctaacatatttaattaaataaataaataaatctgggtctgcatctcttattaaataaaaatataaaaatatgtacattacattttgcttattttcatataaaaggtaagacagagtttgcaaagcatttgtggctttttgtagtttacttaagccaaaatgtgtttttttccccttgatagcttcgctaatattttaaacagtcctgtaaaaaaccaaaaaggactttttgtatagaaagcactaccctaagccatgaagaactccatgctttgctaaccaagataactgttttctctttgtagaagttttgtttttgaaatgtgtatttctaattatataaaatattaagaatcttttaaaaaaatctgtgaaattaacatgcttgtgtatagctttctaatatatataatattatggtaatagcagaagttttgttatcttaatagcgggaggggggtatatttgtgcagttgcacatttgagtaactattttctttctgttttcttttactctgcttacattttataagtttaaggtcagctgtcaaaaggataacctgtggggttagaacatatcacattgcaacaccctaaattgtttttaatacattagcaatctattgggtcaactgacatccattgtatatactagtttctttcatgctatttttattttgttttttgcatttttatcaaatgcagggcccctttctgatctcaccatttcaccatgcatcttggaattcagtaagtgcatatcctaacttgcccatattctaaatcatctggttggttttcagcctagaatttgatacgctttttagaaatatgcccagaatagaaaagctatgttggggcacatgtcctgcaaatatggccctagaaacaagtgatatggaatttacttggtgaataagttataaattcccacagaagaaaaatgtgaaagactgggtgctagacaagaaggaagcaggtaaagggatagttgctttgtcatccgtttttaattattttaactgacccttgacaatcttgtcagcaatataggactgttgaacaatcccggtgtgtcaggacccccaaatgtcacttctgcataaagcatgtatgtcatctattttttcttcaataaagagatttaatagccatttcaagaaatcccataaagaacctctctatgtccctttttttaatttaaaaaaaatgactcttgtctaatattcgtctataagggattaattttcagaccctttaataagtgagtgccataagaaagtcaatatatattgtttaaaagatatttcagtctaggaaagattttccttctcttggaatgtgaagatctgtcgattcatctccaatcatatgcattgacatacacagcaaagaagatataggcagtaatatcaacactgctatatcatgtgtaggacatttcttatccattttttctcttttacttgcatagttgctatgtgtttctcattgtaaaaggctgccgctgggtggcagaagccaagagaccttattaactaggctatatttttcttaacttgatctgaaatccacaattagaccacaatgcacctttggttgtatccataaaggatgctagcctgccttgtactaatgttttatatattaaaaaaaaaaaatctatcaaccatttcatatatatcccactactcaaggtatccatggaacatgaaagaataacatttatgcagaggaaaaacaaaaacatccctgaaaatatacacactcatacacacacacgcacaggggaataaaataagaaaatcattttcctcaccatagacttgatcccatccttacaacccatccttctaacttgatgtgtataaaatatgcaaacatttcacaaatgttctttgtcatttcaaaatactttagtatatcaatatcagtagataccagtgggtgggaaagggtcattacatgaaaatatgaagaaatagccatattagttttttaacctgcaatttgcctcagcaacaaagaaaaagtgaatttttaatgctgaagataaagtaagctaaagtaccagcagaagccttggctatttatagcagttctgacaatagttttataagaacatgaagagaacagaatcacttgaaaatggatgccagtcatctcttgttcccactactgaattcttataaagtggtggcaagatagggaagggataatctgagaatttttaaaagatgatttaatgagaagaagcacaattttgattttgatgagtcactttctgtaaacaatcttggtctatctttacccttataccttatctgtaatttaccatttattgtatttgcaaagctagtatggtttttaatcacagtaaatcctttgtattccagactttagggcagagccctgagggagtattattttacataacccgtcctagagtaacattttaggcaacattcttcattgcaagtaaaagatccataagtggcattttacacggctgcgagtattgttatatctaatcctattttaaaagatttttggtaatatgaagcttgaatactggtaacagtgatgcaatatacgcaagctgcacaacctgtatattgtatgcattgctgcgtggaggctgtttatttcaacctttttaaaaattgtgttttttagtaaaatggcttattttttcccaaaggtggaatttagcattttgtaatgatgaatataaaaatacctgtcatccccagatcatttaaaagttaactaaagtgagaatgaaaaaacaaaattccaagacactttttaaaagaatgtctgccctcacacacttttatggatttgtttttcttacatacccatcttttaacttagagatagcattttttgccctctttattttgttgtttgtttctccagagagtaaacgctttgtagttctttctttaaaaaacattttttttaaagaagaagaagccacttgaaccctcaataaaggctgttgcctaagcatggcatacttcatctgttctcatttgtgccatctgccgtgatgtcgtcacttttatggcgttaatttcctgccactacagatcttttgaagattgctggaatactggtgtctgttagaatgcttcagactacagatgtaattaaaggcttttcttaatatgttttaaccaaagatgtggagcaatccaagccacatatcttctacatcaaatttttccattttggttattttcataatctggtattgcattttgccttccctgttcatacctcaaattgattcatacctcagtttaattcagagaggtcagttaagtgacggattctgttgtggtttgaatgcagtaccagtgttctcttcgagcaaagtagacctgggtcactgtaggcataggacttggattgcttcagatggtttgctgtatcatttttcttctttttcttttcctggggacttgtttccattaaatgagagtaattaaaatcgcttgtaaatgagggcatacaagcatttgcaacaaatattcaaatagaggctcacagcggcataagctggactttgtcgccactagatgacaagatgttataactaagttaaaccacatctgtgtatctcaagggacttaattcagctgtctgtagtgaataaaagtgggaaattttcaaaagtttctcctgctggaaataaggtataatttgtattttgcagacaattcagtaaagttactggctttcttagtgaaaaaaaaaaa

SEQ ID NO: 73698 - DNA, 6446 bp, Artificial Sequence
  derived and/or modified sequence
gagctgttctccttttcccattcgtcttctgtcacttccttcctggacgcagttttctggacgagtctggttacttttaatccgaccggccgctgagagccactttctcctcctcctcctcctcctccttctcttcctcctccttcttcctcctcctcctcctcttccgagcggcctcggcgcgcgcgaatgcgcggccccgcgccccccccctcgcgcgcgctcccctcgcgcgcgcgcacacacgcacacatcgtctccagctctctgctcgctctgctcgcagtcacagacacttgagcacacgcgtacacccagacatcttcgggctgctattggattgactttgaaggttctgtgtgggtcgccgtggctgcatgtttgaatcaggtggagaagcacttcaacgctggacgaagtaaagattattgttgttattttttttttctctctctctctctcttaagaaaggaaaatatcccaaggactaatctgatcgggtcttccttcatgaacgaatgcaggaatttgggaactgagctgtgcaagtgctgaagaaggagatttgtttggaggaaacaggaaagagaaagaaaaggaaggaaaaaatacataatttcagggacgagagagagaagaaaaacggggactatggggagaaaaaagattcagattacgaggattatggatgaacgtaacagacaggtgacatttacaaagaggaaatttgggttgatgaagaaggcttatgagctgagcgtgctgtgtgactgtgagattgcgctgatcatcttcaacagcaccaacaagctgttccagtatgccagcaccgacatggacaaagtgcttctcaagtacacggagtacaacgagccgcatgagagccggacaaactcagacatcgtggagacgttgagaaagaagggccttaatggctgtgacagcccagaccccgatgcggacgattccgtaggtcacagccctgagtctgaggacaagtacaggaaaattaacgaagatattgatctaatgatcagcaggcaaagattgtgtgctgttccacctcccaacttcgagatgccagtctccatcccagtgtccagccacaacagtttggtgtacagcaaccctgtcagctcactgggaaaccccaacctattgccactggctcacccttctctgcagaggaatagtatgtctcctggtgtaacacatcgacctccaagtgcaggtaacacaggtggtctgatgggtggagacctcacgtctggtgcaggcaccagtgcagggaacgggtatggcaatccccgaaactcaccaggtctgctggtctcacctggtaacttgaacaagaatatgcaagcaaaatctcctcccccaatgaatttaggaatgaataaccgtaaaccagatctccgagttcttattccaccaggcagcaagaatacgatgccatcagtgtctgaggatgtcgacctgcttttgaatcaaaggataaataactcccagtcggctcagtcattggctaccccagtggtttccgtagcaactcctactttaccaggacaaggaatgggaggatatccatcagccatttcaacaacatatggtaccgagtactctctgagtagtgcagacctgtcatctctgtctgggtttaacaccgccagcgctcttcaccttggttcagtaactggctggcaacagcaacacctacataacatgccaccatctgccctcagtcagttgggagcttgcactagcactcatttatctcagagttcaaatctctccctgccttctactcaaagcctcaacatcaagtcagaacctgtttctcctcctagagaccgtaccaccaccccttcgagatacccacaacacacgcgccacgaggcggggagatctcctgttgacagcttgagcagctgtagcagttcgtacgacgggagcgaccgagaggatcaccggaacgaattccactcccccattggactcaccagaccttcgccggacgaaagggaaagtccctcagtcaagcgcatgcgactttctgaaggatgggcaacatgatcagattattacttactagtttttttttttttcttgcagtgtgtgtgtgtgctataccttaatggggaaggggggtcgatatgcattatatgtgccgtgtgtggaaaaaaaaaaagtcaggtactctgttttgtaaaagtacttttaaattgcctcagtgatacagtataaagataaacagaaatgctgagataagcttagcacttgagttgtacaacagaacacttgtacaaaatagattttaaggctaacttcttttcactgttgtgctcctttgcaaaatgtatgttacaatagatagtgtcatgttgcaggttcaacgttatttacatgtaaatagacaaaaggaaacatttgccaaaagcggcagatctttactgaaagagagagcagctgttatgcaacatatagaaaaatgtatagatgcttggacagacccggtaatgggtggccattggtaaatgttaggaacacaccaggtcacctgacatcccaagaatgctcacaaacctgcaggcatatcattggcgtatggcactcattaaaaaggatcagagaccattaaaagaggaccatacctattaaaaaaaaatgtggagttggagggctaacatatttaattaaataaataaataaatctgggtctgcatctcttattaaataaaaatataaaaatatgtacattacattttgcttattttcatataaaaggtaagacagagtttgcaaagcatttgtggctttttgtagtttacttaagccaaaatgtgtttttttccccttgatagcttcgctaatattttaaacagtcctgtaaaaaaccaaaaaggactttttgtatagaaagcactaccctaagccatgaagaactccatgctttgctaaccaagataactgttttctctttgtagaagttttgtttttgaaatgtgtatttctaattatataaaatattaagaatcttttaaaaaaatctgtgaaattaacatgcttgtgtatagctttctaatatatataatattatggtaatagcagaagttttgttatcttaatagcgggaggggggtatatttgtgcagttgcacatttgagtaactattttctttctgttttcttttactctgcttacattttataagtttaaggtcagctgtcaaaaggataacctgtggggttagaacatatcacattgcaacaccctaaattgtttttaatacattagcaatctattgggtcaactgacatccattgtatatactagtttctttcatgctatttttattttgttttttgcatttttatcaaatgcagggcccctttctgatctcaccatttcaccatgcatcttggaattcagtaagtgcatatcctaacttgcccatattctaaatcatctggttggttttcagcctagaatttgatacgctttttagaaatatgcccagaatagaaaagctatgttggggcacatgtcctgcaaatatggccctagaaacaagtgatatggaatttacttggtgaataagttataaattcccacagaagaaaaatgtgaaagactgggtgctagacaagaaggaagcaggtaaagggatagttgctttgtcatccgtttttaattattttaactgacccttgacaatcttgtcagcaatataggactgttgaacaatcccggtgtgtcaggacccccaaatgtcacttctgcataaagcatgtatgtcatctattttttcttcaataaagagatttaatagccatttcaagaaatcccataaagaacctctctatgtccctttttttaatttaaaaaaaatgactcttgtctaatattcgtctataagggattaattttcagaccctttaataagtgagtgccataagaaagtcaatatatattgtttaaaagatatttcagtctaggaaagattttccttctcttggaatgtgaagatctgtcgattcatctccaatcatatgcattgacatacacagcaaagaagatataggcagtaatatcaacactgctatatcatgtgtaggacatttcttatccattttttctcttttacttgcatagttgctatgtgtttctcattgtaaaaggctgccgctgggtggcagaagccaagagaccttattaactaggctatatttttcttaacttgatctgaaatccacaattagaccacaatgcacctttggttgtatccataaaggatgctagcctgccttgtactaatgttttatatattaaaaaaaaaaaatctatcaaccatttcatatatatcccactactcaaggtatccatggaacatgaaagaataacatttatgcagaggaaaaacaaaaacatccctgaaaatatacacactcatacacacacacgcacaggggaataaaataagaaaatcattttcctcaccatagacttgatcccatccttacaacccatccttctaacttgatgtgtataaaatatgcaaacatttcacaaatgttctttgtcatttcaaaatactttagtatatcaatatcagtagataccagtgggtgggaaagggtcattacatgaaaatatgaagaaatagccatattagttttttaacctgcaatttgcctcagcaacaaagaaaaagtgaatttttaatgctgaagataaagtaagctaaagtaccagcagaagccttggctatttatagcagttctgacaatagttttataagaacatgaagagaacagaatcacttgaaaatggatgccagtcatctcttgttcccactactgaattcttataaagtggtggcaagatagggaagggataatctgagaatttttaaaagatgatttaatgagaagaagcacaattttgattttgatgagtcactttctgtaaacaatcttggtctatctttacccttataccttatctgtaatttaccatttattgtatttgcaaagctagtatggtttttaatcacagtaaatcctttgtattccagactttagggcagagccctgagggagtattattttacataacccgtcctagagtaacattttaggcaacattcttcattgcaagtaaaagatccataagtggcattttacacggctgcgagtattgttatatctaatcctattttaaaagatttttggtaatatgaagcttgaatactggtaacagtgatgcaatatacgcaagctgcacaacctgtatattgtatgcattgctgcgtggaggctgtttatttcaacctttttaaaaattgtgttttttagtaaaatggcttattttttcccaaaggtggaatttagcattttgtaatgatgaatataaaaatacctgtcatccccagatcatttaaaagttaactaaagtgagaatgaaaaaacaaaattccaagacactttttaaaagaatgtctgccctcacacacttttatggatttgtttttcttacatacccatcttttaacttagagatagcattttttgccctctttattttgttgtttgtttctccagagagtaaacgctttgtagttctttctttaaaaaacattttttttaaagaagaagaagccacttgaaccctcaataaaggctgttgcctaagcatggcatacttcatctgttctcatttgtgccatctgccgtgatgtcgtcacttttatggcgttaatttcctgccactacagatcttttgaagattgctggaatactggtgtctgttagaatgcttcagactacagatgtaattaaaggcttttcttaatatgttttaaccaaagatgtggagcaatccaagccacatatcttctacatcaaatttttccattttggttattttcataatctggtattgcattttgccttccctgttcatacctcaaattgattcatacctcagtttaattcagagaggtcagttaagtgacggattctgttgtggtttgaatgcagtaccagtgttctcttcgagcaaagtagacctgggtcactgtaggcataggacttggattgcttcagatggtttgctgtatcatttttcttctttttcttttcctggggacttgtttccattaaatgagagtaattaaaatcgcttgtaaatgagggcatacaagcatttgcaacaaatattcaaatagaggctcacagcggcataagctggactttgtcgccactagatgacaagatgttataactaagttaaaccacatctgtgtatctcaagggacttaattcagctgtctgtagtgaataaaagtgggaaattttcaaaagtttctcctgctggaaataaggtataatttgtattttgcagacaattcagtaaagttactggctttcttagtgaaaaaaaaaaa

SEQ ID NO: 73699 - DNA, 1422 bp, Artificial Sequence
  derived and/or modified sequence
atgggacgcaagaaaattcaaataaccaggattatggatgaacgcaacagacaggtgaccttcaccaaaagaaagttcggcctcatgaaaaaagcctacgaactgtctgtcttgtgcgactgcgaaatcgccctcattatcttcaattcaactaacaaattgtttcaatacgcctccacggacatggataaagtcttgctcaaatacaccgagtataatgaacctcacgaaagccggaccaactctgacatagtcgagacactgaggaaaaaagggctcaatggttgtgactcccccgaccctgacgctgacgattccgtggggcactccccagagtcggaagataaatataggaagattaacgaggacattgacctgatgatatctagacagcgattgtgtgccgtacccccacccaatttcgaaatgcctgtgtccattccagtgagttcacataattcgctcgtgtactctaatccggtgtcttcccttggtaaccctaacttgttgcctctggcacatcctagtctgcaaagaaactccatgtcacctggcgtgactcatagacctcccagcgccgggaacaccggtggcctcatgggaggcgacttaacatctggggctggaactagcgctggcaacggttacggcaacccaagaaattctcctggcctactagtctccccaggcaacctaaacaagaatatgcaggccaagtcaccccctccaatgaatttgggtatgaataatagaaagccagatctgagagtgctcatcccacccgggtcaaaaaataccatgccatctgtgtccgaggacgtcgacttactcctgaaccagcgcatcaataattcacagtcagcccaatcattggcaactccggtcgtgagtgtggcaacccccactctgcctggccagggtatgggtgggtacccttctgccatttccactacgtacggcactgaatattcactgtccagcgcagatctgagttcccttagtggctttaacaccgcgtccgcactacacctgggatctgtgaccgggtggcaacagcaacacctacataatatgcccccttcagccttgagccagctcggagcttgtacgtccacccacctgtcgcagtctagcaacctgtcactcccaagcactcagtcgctgaatattaaaagtgaacccgtgtcgccgcccagagacaggaccaccactccaagcagatacccacagcacacaaggcacgaagcggggcggagtcctgtcgattccctcagttcatgttcttcctcttatgatggaagtgatcgcgaggaccataggaatgagtttcattccccaataggactgacccgcccgtccccagacgagcgagaatccccctcagttaaaaggatgcgacttagtgaagggtgggccacttag

SEQ ID NO: 73700 - DNA, 1422 bp, Artificial Sequence
  derived and/or modified sequence
atgggtcgaaagaagatccaaatcacaagaataatggatgagcggaatcggcaggtgacctttactaagcgaaaattcggtctgatgaaaaaggcctacgagctgtccgtgctgtgtgattgtgaaatcgccctcatcatttttaatagtactaataagctgtttcagtatgcttcgaccgacatggataaggtgctcttgaagtatacggaatacaatgaaccacatgaaagcaggacaaattcagatattgtggagaccctgcgtaagaaaggcctcaacggttgtgactctcccgatcctgatgccgacgatagcgtcgggcattccccggagagcgaagataaatatcgcaagatcaatgaggacatcgacctaatgattagcagacagaggctctgtgcagtgccacctccaaatttcgaaatgcctgtgagcattcctgtgtcttctcataatagtctggtctatagcaatcccgtgagttcactgggtaatcctaacctgcttcctcttgcgcatcctagcttgcagaggaatagtatgagccccggagtcacacacagacccccatccgccggaaatacaggcggcctgatgggtggtgaccttacctccggcgccggaacctccgctgggaacggttatgggaaccccaggaattcacccgggctgctagtctcccccgggaacctcaacaagaatatgcaggcaaaatcccctccccccatgaacttgggcatgaataataggaaacctgatctcagggtcttgatcccgcccgggtcaaaaaacactatgcctagtgtggtgatccagaactatatcctgaaaaatcaaagaatcaacaatagtcaatccgctcaatctctcgcgacgccggtggtctccgtagctactccgacgctccccggccaggggatgggcggctacccatccgccatctctactacctacgggacggaatattcactctcctccgccgacttaagttcactgagtggatttaacaccgcaagtgccctgcatctggggtccgttactggctggcagcagcaacacctacacaatatgccgccctccgcccttagccagttgggggcctgtaccagtacccatctttctcagagtagcaacctgtcattaccctccacccaatcactgaacattaagtctgaacctgtgtcccctccaagggaccgcacgaccacgccttccaggtacccacaacacacccgacatgaagcaggcaggagcccggtcgattctttgtcctcttgttccagttcctatgatggtagcgatcgggaagatcataggaatgagtttcacagcccaattggcctcacaaggcccagccctgatgagagagaaagtccgtctgtaaaacgcatgagactgtcagaaggatgggctacatag

SEQ ID NO: 73701 - DNA, 1422 bp, Artificial Sequence
  derived and/or modified sequence
atgggaagaaagaagattcagataacacgtatcatggatgaacggaatcgccaggtcacattcaccaaaagaaaattcgggcttatgaagaaggcttatgagctgagtgtcctttgcgattgtgaaatcgcgctgatcatttttaacagcacgaataaactttttcagtatgcaagcacagacatggacaaagtgttgctgaagtacactgagtataatgaaccgcacgaatcccggacaaattcagatatcgtggaaacgctgaggaagaaggggctcaatggatgcgattcacccgaccccgacgcagatgattccgtcggtcactcccctgagagcgaggataaatatcgcaagatcaacgaggacatcgatctgatgatcagcaggcagaggctgtgtgctgtgcccccccctaattttgaaatgccagtgagcattcccgtatcatcccacaattcattggtctattccaacccagtgtcctcgctgggcaaccccaacctgctccctctggcccacccttccctgcagcggaattctatgtctcctggagtaacccaccggcccccatccgccggcaacacaggtggactgatgggtggagatcttacaagtggggctgggacctcagccggcaatggttatggtaatccccgcaactcacctgggctgctagtatcccctggaaacctgaataagaacatgcaagccaaatctccccctccaatgaacctcgggatgaacaatcggaagcctgatctcagagtgctgataccacctggctccaagaataccatgccatccgtttccgaggacgtggacctcctcctaaatcagaggatcaataattcccaatcagcacaaagcttggctacgccagtggttagtgtggccactcccacgctgccgggacagggaatgggtggctacccatctgcgattagtacaacttatggaaccgaatatagcctgagcagcgccgatctatcttccttgtctggcttcaacacggcgtcggcgctgcatttaggcagcgttaccggctggcagcagcagcacctgcataacatgcccccatctgcgctgagtcaactcggagcttgtacatcaacccatttgagccagtcctctaacctcagtttaccgagtactcagagtttaaatattaaaagcgagcccgtgtctccaccgcgggaccggacaactaccccctctagataccctcagcacacacgacatgaagcaggtcgctctcccgtagactcactttcctcctgttcctctagctacgatggaagcgatcgcgaggatcatcgcaatgagtttcattccccaatcgggttaacgcgacctagccctgacgagagagagagtcctagcgtgaagcggatgcggctttcggaaggctgggcgacatag

SEQ ID NO: 73702 - DNA, 1422 bp, Artificial Sequence
  derived and/or modified sequence
atgggcaggaagaagatccagatcacccgcatcatggatgaaagaaaccggcaggtgaccttcaccaagaggaagtttggcctgatgaagaaggcctatgagctgtctgtgctgtgtgactgtgaaattgccctgatcatcttcaacagcaccaacaagctgttccagtatgccagcacagacatggacaaggtgctgctgaagtacacagagtacaatgagccccatgagagcaggaccaacagcgacatcgtggagaccctgaggaagaagggcctgaatggctgtgacagcccagaccctgatgctgatgacagcgtgggccacagccctgagagcgaggacaagtacaggaagatcaatgaagacatcgacctgatgatcagccggcagaggctgtgtgctgtgcccccacccaactttgagatgcctgtgtccatccctgtgagcagccacaacagcctggtgtacagcaaccctgtgagcagcctgggcaaccccaacctgctgcccctggcccaccccagcctgcagagaaattccatgagccctggggtgacccaccggccccccagcgctggcaacacaggaggcctgatgggcggggacctgaccagcggggccggcaccagcgctggaaatggctacggcaaccccaggaacagccctggcctgctggtgtccccaggcaacctgaacaagaacatgcaggccaagagccccccacccatgaacctgggcatgaacaacaggaagccagacctgcgggtgctgatccccccaggcagcaagaacaccatgcccagcgtgtctgaagatgtggacctgctgctgaaccagaggatcaacaacagccagagcgcccagagcctggccacccctgtggtgtctgtggccacccccaccctgcccggccagggcatgggcggctaccccagcgccatcagcaccacctatggaacagagtacagcctgagcagcgctgacctgagcagcctgagcggcttcaacacagccagcgccctgcacctgggctctgtgacaggctggcagcagcagcacctgcacaacatgcctccttctgccctgagccagctgggcgcctgcaccagcacccacctgagccagagcagcaacctgagcctgcccagcacccagagcctgaacatcaagtctgagcctgtgtccccaccccgggacaggaccaccacccccagccgctacccccagcacaccaggcatgaggccggccgcagccctgtggacagcctgagcagctgcagcagcagctatgatggcagtgaccgggaggaccacagaaatgagttccacagccccatcggcctgacccggcccagcccagatgagcgggagagccccagcgtgaagaggatgaggctgtctgagggctgggccacctag

SEQ ID NO: 73703 - DNA, 1422 bp, Artificial Sequence
  derived and/or modified sequence
atgggcaggaagaagatccagatcacccgcatcatggatgaaagaaaccggcaggtgaccttcaccaagaggaagtttggcctgatgaagaaggcctatgagctgtctgtgctgtgtgactgtgaaattgccctgatcatcttcaacagcaccaacaagctgttccagtatgccagcacagacatggacaaggtgctgctgaagtacacagagtacaatgagccccatgagagcaggaccaacagcgacatcgtggagaccctgaggaagaagggcctgaatggctgtgacagcccagaccctgatgctgatgacagcgtgggccacagccctgagagcgaggacaagtacaggaagatcaatgaagacatcgacctgatgatcagccggcagaggctgtgtgctgtgcccccacccaactttgagatgcctgtgtccatccctgtgagcagccacaacagcctggtgtacagcaaccctgtgagcagcctgggcaaccccaacctgctgcccctggcccaccccagcctgcagagaaattccatgagccctggggtgacccaccggccccccagcgctggcaacacaggaggcctgatgggcggggacctgaccagcggggccggcaccagcgctggaaatggctacggcaaccccaggaacagccctggcctgctggtgtccccaggcaacctgaacaagaacatgcaggccaagagccccccacccatgaacctgggcatgaacaacaggaagccagacctgcgggtgctgatccccccaggcagcaagaacaccatgcccagcgtggtgatccagaactacatcctgaagaaccagaggatcaacaacagccagagcgcccagagcctggccacccctgtggtgtctgtggccacccccaccctgcccggccagggcatgggcggctaccccagcgccatcagcaccacctatggaacagagtacagcctgagcagcgctgacctgagcagcctgagcggcttcaacacagccagcgccctgcacctgggctctgtgacaggctggcagcagcagcacctgcacaacatgcctccttctgccctgagccagctgggcgcctgcaccagcacccacctgagccagagcagcaacctgagcctgcccagcacccagagcctgaacatcaagtctgagcctgtgtccccaccccgggacaggaccaccacccccagccgctacccccagcacaccaggcatgaggccggccgcagccctgtggacagcctgagcagctgcagcagcagctatgatggcagtgaccgggaggaccacagaaatgagttccacagccccatcggcctgacccggcccagcccagatgagcgggagagccccagcgtgaagaggatgaggctgtctgagggctgggccacctag

SEQ ID NO: 73704 - DNA, 4095 bp, Artificial Sequence
  derived and/or modified sequence
cgcgcgcacacacgcacacatcgtctccagctctctgctcgctctgctcgcagtcacagacacttgagcacacgcgtacacccagacatcttcgggctgctattggattgactttgaaggttctgtgtgggtcgccgtggctgcatgtttgaatcaggtggagaagcacttcaacgctggacgaagtaaagattattgttgttattttttttttctctctctctctctcttaagaaaggaaaatatcccaaggactaatctgatcgggtcttccttcatgaacgaatgcaggaatttgggaactgagctgtgcaagtgctgaagaaggagatttgtttggaggaaacaggaaagagaaagaaaaggaaggaaaaaatacataatttcagggacgagagagagaagaaaaacggggactatggggagaaaaaagattcagattacgaggattatggatgaacgtaacagacaggtgacatttacaaagaggaaatttgggttgatgaagaaggcttatgagctgagcgtgctgtgtgactgtgagattgcgctgatcatcttcaacagcaccaacaagctgttccagtatgccagcaccgacatggacaaagtgcttctcaagtacacggagtacaacgagccgcatgagagccggacaaactcagacatcgtggagacgttgagaaagaagggccttaatggctgtgacagcccagaccccgatgcggacgattccgtaggtcacagccctgagtctgaggacaagtacaggaaaattaacgaagatattgatctaatgatcagcaggcaaagattgtgtgctgttccacctcccaacttcgagatgccagtctccatcccagtgtccagccacaacagtttggtgtacagcaaccctgtcagctcactgggaaaccccaacctattgccactggctcacccttctctgcagaggaatagtatgtctcctggtgtaacacatcgacctccaagtgcaggtaacacaggtggtctgatgggtggagacctcacgtctggtgcaggcaccagtgcagggaacgggtatggcaatccccgaaactcaccaggtctgctggtctcacctggtaacttgaacaagaatatgcaagcaaaatctcctcccccaatgaatttaggaatgaataaccgtaaaccagatctccgagttcttattccaccaggcagcaagaatacgatgccatcagtgtctgaggatgtcgacctgcttttgaatcaaaggataaataactcccagtcggctcagtcattggctaccccagtggtttccgtagcaactcctactttaccaggacaaggaatgggaggatatccatcagccatttcaacaacatatggtaccgagtactctctgagtagtgcagacctgtcatctctgtctgggtttaacaccgccagcgctcttcaccttggttcagtaactggctggcaacagcaacacctacataacatgccaccatctgccctcagtcagttgggagcttgcactagcactcatttatctcagagttcaaatctctccctgccttctactcaaagcctcaacatcaagtcagaacctgtttctcctcctagagaccgtaccaccaccccttcgagatacccacaacacacgcgccacgaggcggggagatctcctgttgacagcttgagcagctgtagcagttcgtacgacgggagcgaccgagaggatcaccggaacgaattccactcccccattggactcaccagaccttcgccggacgaaagggaaagtccctcagtcaagcgcatgcgactttctgaaggatgggcaacatgatcagattattacttactagtttttttttttttcttgcagtgtgtgtgtgtgctataccttaatggggaaggggggtcgatatgcattatatgtgccgtgtgtggaaaaaaaaaaagtcaggtactctgttttgtaaaagtacttttaaattgcctcagtgatacagtataaagataaacagaaatgctgagataagcttagcacttgagttgtacaacagaacacttgtacaaaatagattttaaggctaacttcttttcactgttgtgctcctttgcaaaatgtatgttacaatagatagtgtcatgttgcaggttcaacgttatttacatgtaaatagacaaaaggaaacatttgccaaaagcggcagatctttactgaaagagagagcagctgttatgcaacatatagaaaaatgtatagatgcttggacagacccggtaatgggtggccattggtaaatgttaggaacacaccaggtcacctgacatcccaagaatgctcacaaacctgcaggcatatcattggcgtatggcactcattaaaaaggatcagagaccattaaaagaggaccatacctattaaaaaaaaatgtggagttggagggctaacatatttaattaaataaataaataaatctgggtctgcatctcttattaaataaaaatataaaaatatgtacattacattttgcttattttcatataaaaggtaagacagagtttgcaaagcatttgtggctttttgtagtttacttaagccaaaatgtgtttttttccccttgatagcttcgctaatattttaaacagtcctgtaaaaaaccaaaaaggactttttgtatagaaagcactaccctaagccatgaagaactccatgctttgctaaccaagataactgttttctctttgtagaagttttgtttttgaaatgtgtatttctaattatataaaatattaagaatcttttaaaaaaatctgtgaaattaacatgcttgtgtatagctttctaatatatataatattatggtaatagcagaagttttgttatcttaatagcgggaggggggtatatttgtgcagttgcacatttgagtaactattttctttctgttttcttttactctgcttacattttataagtttaaggtcagctgtcaaaaggataacctgtggggttagaacatatcacattgcaacaccctaaattgtttttaatacattagcaatctattgggtcaactgacatccattgtatatactagtttctttcatgctatttttattttgttttttgcatttttatcaaatgcagggcccctttctgatctcaccatttcaccatgcatcttggaattcagtaagtgcatatcctaacttgcccatattctaaatcatctggttggttttcagcctagaatttgatacgctttttagaaatatgcccagaatagaaaagctatgttggggcacatgtcctgcaaatatggccctagaaacaagtgatatggaatttacttggtgaataagttataaattcccacagaagaaaaatgtgaaagactgggtgctagacaagaaggaagcaggtaaagggatagttgctttgtcatccgtttttaattattttaactgacccttgacaatcttgtcagcaatataggactgttgaacaatcccggtgtgtcaggacccccaaatgtcacttctgcataaagcatgtatgtcatctattttttcttcaataaagagatttaatagccatttcaagaaatcccataaagaacctctctatgtccctttttttaatttaaaaaaaatgactcttgtctaatattcgtctataagggattaattttcagaccctttaataagtgagtgccataagaaagtcaatatatattgtttaaaagatatttcagtctaggaaagattttccttctcttggaatgtgaagatctgtcgattcatctccaatcatatgcattgacatacacagcaaagaagatataggcagtaatatcaacactgctatatcatgtgtaggacatttcttatccattttttctcttttacttgcatagttgctatgtgtttctcattgtaaaaggctgccgctgggtggcagaagccaagagaccttattaactaggctatatttttcttaacttgatctgaaatccacaattagaccacaatgcacctttggttgtatccataaaggatgctagcctgccttgtactaatgttttatatatt

SEQ ID NO: 73705 - DNA, 6458 bp, Artificial Sequence
  derived and/or modified sequence
gcgatgtttcaaacgctgtgagctgttctccttttcccattcgtcttctgtcacttccttcctggacgcagttttctggacgagtctggttacttttaatccgaccggccgctgagagccactttctcctcctcctcctcctcctccttctcttcctcctccttcttcctcctcctcctcctcttccgagcggcctcggcgcgcgcgaatgcgcggccccgcgccccccccctcgcgcgcgctcccctcgcgcgcgcgcacacacgcacacatcgtctccagctctctgctcgctctgctcgcagtcacagacacttgagcacacgcgtacacccagacatcttcgggctgctattggattgactttgaaggttctgtgtgggtcgccgtggctgcatgtttgaatcaggtggagaagcacttcaacgctggacgaagtaaagattattgttgttattttttttttctctctctctctctcttaagaaaggaaaatatcccaaggactaatctgatcgggtcttccttcatcaggaacgaatgcaggaatttgggaactgagctgtgcaagtgctgaagaaggagatttgtttggaggaaacaggaaagagaaagaaaaggaaggaaaaaatacataatttcagggacgagagagagaagaaaaacggggactatggggagaaaaaagattcagattacgaggattatggatgaacgtaacagacaggtgacatttacaaagaggaaatttgggttgatgaagaaggcttatgagctgagcgtgctgtgtgactgtgagattgcgctgatcatcttcaacagcaccaacaagctgttccagtatgccagcaccgacatggacaaagtgcttctcaagtacacggagtacaacgagccgcatgagagccggacaaactcagacatcgtggagacgttgagaaagaagggccttaatggctgtgacagcccagaccccgatgcggacgattccgtaggtcacagccctgagtctgaggacaagtacaggaaaattaacgaagatattgatctaatgatcagcaggcaaagattgtgtgctgttccacctcccaacttcgagatgccagtctccatcccagtgtccagccacaacagtttggtgtacagcaaccctgtcagctcactgggaaaccccaacctattgccactggctcacccttctctgcagaggaatagtatgtctcctggtgtaacacatcgacctccaagtgcaggtaacacaggtggtctgatgggtggagacctcacgtctggtgcaggcaccagtgcagggaacgggtatggcaatccccgaaactcaccaggtctgctggtctcacctggtaacttgaacaagaatatgcaagcaaaatctcctcccccaatgaatttaggaatgaataaccgtaaaccagatctccgagttcttattccaccaggcagcaagaatacgatgccatcagtggtaatacaaaactacattttaaagaatcaaaggataaataactcccagtcggctcagtcattggctaccccagtggtttccgtagcaactcctactttaccaggacaaggaatgggaggatatccatcagccatttcaacaacatatggtaccgagtactctctgagtagtgcagacctgtcatctctgtctgggtttaacaccgccagcgctcttcaccttggttcagtaactggctggcaacagcaacacctacataacatgccaccatctgccctcagtcagttgggagcttgcactagcactcatttatctcagagttcaaatctctccctgccttctactcaaagcctcaacatcaagtcagaacctgtttctcctcctagagaccgtaccaccaccccttcgagatacccacaacacacgcgccacgaggcggggagatctcctgttgacagcttgagcagctgtagcagttcgtacgacgggagcgaccgagaggatcaccggaacgaattccactcccccattggactcaccagaccttcgccggacgaaagggaaagtccctcagtcaagcgcatgcgactttctgaaggatgggcaacatgatcagattattacttactagtttttttttttttcttgcagtgtgtgtgtgtgctataccttaatggggaaggggggtcgatatgcattatatgtgccgtgtgtggaaaaaaaaaaagtcaggtactctgttttgtaaaagtacttttaaattgcctcagtgatacagtataaagataaacagaaatgctgagataagcttagcacttgagttgtacaacagaacacttgtacaaaatagattttaaggctaacttcttttcactgttgtgctcctttgcaaaatgtatgttacaatagatagtgtcatgttgcaggttcaacgttatttacatgtaaatagacaaaaggaaacatttgccaaaagcggcagatctttactgaaagagagagcagctgttatgcaacatatagaaaaatgtatagatgcttggacagacccggtaatgggtggccattggtaaatgttaggaacacaccaggtcacctgacatcccaagaatgctcacaaacctgcaggcatatcattggcgtatggcactcattaaaaaggatcagagaccattaaaagaggaccatacctattaaaaaaaaatgtggagttggagggctaacatatttaattaaataaataaataaatctgggtctgcatctcttattaaataaaaatataaaaatatgtacattacattttgcttattttcatataaaaggtaagacagagtttgcaaagcatttgtggctttttgtagtttacttaagccaaaatgtgtttttttccccttgatagcttcgctaatattttaaacagtcctgtaaaaaaccaaaaaggactttttgtatagaaagcactaccctaagccatgaagaactccatgctttgctaaccaagataactgttttctctttgtagaagttttgtttttgaaatgtgtatttctaattatataaaatattaagaatcttttaaaaaaatctgtgaaattaacatgcttgtgtatagctttctaatatatataatattatggtaatagcagaagttttgttatcttaatagcgggaggggggtatatttgtgcagttgcacatttgagtaactattttctttctgttttcttttactctgcttacattttataagtttaaggtcagctgtcaaaaggataacctgtggggttagaacatatcacattgcaacaccctaaattgtttttaatacattagcaatctattgggtcaactgacatccattgtatatactagtttctttcatgctatttttattttgttttttgcatttttatcaaatgcagggcccctttctgatctcaccatttcaccatgcatcttggaattcagtaagtgcatatcctaacttgcccatattctaaatcatctggttggttttcagcctagaatttgatacgctttttagaaatatgcccagaatagaaaagctatgttggggcacatgtcctgcaaatatggccctagaaacaagtgatatggaatttacttggtgaataagttataaattcccacagaagaaaaatgtgaaagactgggtgctagacaagaaggaagcaggtaaagggatagttgctttgtcatccgtttttaattattttaactgacccttgacaatcttgtcagcaatataggactgttgaacaatcccggtgtgtcaggacccccaaatgtcacttctgcataaagcatgtatgtcatctattttttcttcaataaagagatttaatagccatttcaagaaatcccataaagaacctctctatgtccctttttttaatttaaaaaaaatgactcttgtctaatattcgtctataagggattaattttcagaccctttaataagtgagtgccataagaaagtcaatatatattgtttaaaagatatttcagtctaggaaagattttccttctcttggaatgtgaagatctgtcgattcatctccaatcatatgcattgacatacacagcaaagaagatataggcagtaatatcaacactgctatatcatgtgtaggacatttcttatccattttttctcttttacttgcatagttgctatgtgtttctcattgtaaaaggctgccgctgggtggcagaagccaagagaccttattaactaggctatatttttcttaacttgatctgaaatccacaattagaccacaatgcacctttggttgtatccataaaggatgctagcctgccttgtactaatgttttatatattaaaaaaaaaaaatctatcaaccatttcatatatatcccactactcaaggtatccatggaacatgaaagaataacatttatgcagaggaaaaacaaaaacatccctgaaaatatacacactcatacacacacacgcacaggggaataaaataagaaaatcattttcctcaccatagacttgatcccatccttacaacccatccttctaacttgatgtgtataaaatatgcaaacatttcacaaatgttctttgtcatttcaaaatactttagtatatcaatatcagtagataccagtgggtgggaaagggtcattacatgaaaatatgaagaaatagccatattagttttttaacctgcaatttgcctcagcaacaaagaaaaagtgaatttttaatgctgaagataaagtaagctaaagtaccagcagaagccttggctatttatagcagttctgacaatagttttataagaacatgaagagaacagaatcacttgaaaatggatgccagtcatctcttgttcccactactgaattcttataaagtggtggcaagatagggaagggataatctgagaatttttaaaagatgatttaatgagaagaagcacaattttgattttgatgagtcactttctgtaaacaatcttggtctatctttacccttataccttatctgtaatttaccatttattgtatttgcaaagctagtatggtttttaatcacagtaaatcctttgtattccagactttagggcagagccctgagggagtattattttacataacccgtcctagagtaacattttaggcaacattcttcattgcaagtaaaagatccataagtggcattttacacggctgcgagtattgttatatctaatcctattttaaaagatttttggtaatatgaagcttgaatactggtaacagtgatgcaatatacgcaagctgcacaacctgtatattgtatgcattgctgcgtggaggctgtttatttcaacctttttaaaaattgtgttttttagtaaaatggcttattttttcccaaaggtggaatttagcattttgtaatgatgaatataaaaatacctgtcatccccagatcatttaaaagttaactaaagtgagaatgaaaaaacaaaattccaagacactttttaaaagaatgtctgccctcacacacttttatggatttgtttttcttacatacccatcttttaacttagagatagcattttttgccctctttattttgttgtttgtttctccagagagtaaacgctttgtagttctttctttaaaaaacattttttttaaagaagaagaagccacttgaaccctcaataaaggctgttgcctaagcatggcatacttcatctgttctcatttgtgccatctgccgtgatgtcgtcacttttatggcgttaatttcctgccactacagatcttttgaagattgctggaatactggtgtctgttagaatgcttcagactacagatgtaattaaaggcttttcttaatatgttttaaccaaagatgtggagcaatccaagccacatatcttctacatcaaatttttccattttggttattttcataatctggtattgcattttgccttccctgttcatacctcaaattgattcatacctcagtttaattcagagaggtcagttaagtgacggattctgttgtggtttgaatgcagtaccagtgttctcttcgagcaaagtagacctgggtcactgtaggcataggacttggattgcttcagatggtttgctgtatcatttttcttctttttcttttcctggggacttgtttccattaaatgagagtaattaaaatcgcttgtaaatgagggcatacaagcatttgcaacaaatattcaaatagaggctcacagcggcataagctggactttgtcgccactagatgacaagatgttataactaagttaaaccacatctgtgtatctcaagggacttaattcagctgtctgtagtgaataaaagtgggaaattttcaaaagtttctcctgctggaaataaggtataatttgtattttgcagacaattcagtaaagttactggctttcttagtga

SEQ ID NO: 73706 - DNA, 4079 bp, Artificial Sequence
  derived and/or modified sequence
atcgtctccagctctctgctcgctctgctcgcagtcacagacacttgagcacacgcgtacacccagacatcttcgggctgctattggattgactttgaaggttctgtgtgggtcgccgtggctgcatgtttgaatcaggtggagaagcacttcaacgctggacgaagtaaagattattgttgttattttttttttctctctctctctctcttaagaaaggaaaatatcccaaggactaatctgatcgggtcttccttcatcaggaacgaatgcaggaatttgggaactgagctgtgcaagtgctgaagaaggagatttgtttggaggaaacaggaaagagaaagaaaaggaaggaaaaaatacataatttcagggacgagagagagaagaaaaacggggactatggggagaaaaaagattcagattacgaggattatggatgaacgtaacagacaggtgacatttacaaagaggaaatttgggttgatgaagaaggcttatgagctgagcgtgctgtgtgactgtgagattgcgctgatcatcttcaacagcaccaacaagctgttccagtatgccagcaccgacatggacaaagtgcttctcaagtacacggagtacaacgagccgcatgagagccggacaaactcagacatcgtggagacgttgagaaagaagggccttaatggctgtgacagcccagaccccgatgcggacgattccgtaggtcacagccctgagtctgaggacaagtacaggaaaattaacgaagatattgatctaatgatcagcaggcaaagattgtgtgctgttccacctcccaacttcgagatgccagtctccatcccagtgtccagccacaacagtttggtgtacagcaaccctgtcagctcactgggaaaccccaacctattgccactggctcacccttctctgcagaggaatagtatgtctcctggtgtaacacatcgacctccaagtgcaggtaacacaggtggtctgatgggtggagacctcacgtctggtgcaggcaccagtgcagggaacgggtatggcaatccccgaaactcaccaggtctgctggtctcacctggtaacttgaacaagaatatgcaagcaaaatctcctcccccaatgaatttaggaatgaataaccgtaaaccagatctccgagttcttattccaccaggcagcaagaatacgatgccatcagtgtctgaggatgtcgacctgcttttgaatcaaaggataaataactcccagtcggctcagtcattggctaccccagtggtttccgtagcaactcctactttaccaggacaaggaatgggaggatatccatcagccatttcaacaacatatggtaccgagtactctctgagtagtgcagacctgtcatctctgtctgggtttaacaccgccagcgctcttcaccttggttcagtaactggctggcaacagcaacacctacataacatgccaccatctgccctcagtcagttgggagcttgcactagcactcatttatctcagagttcaaatctctccctgccttctactcaaagcctcaacatcaagtcagaacctgtttctcctcctagagaccgtaccaccaccccttcgagatacccacaacacacgcgccacgaggcggggagatctcctgttgacagcttgagcagctgtagcagttcgtacgacgggagcgaccgagaggatcaccggaacgaattccactcccccattggactcaccagaccttcgccggacgaaagggaaagtccctcagtcaagcgcatgcgactttctgaaggatgggcaacatgatcagattattacttactagtttttttttttttcttgcagtgtgtgtgtgtgctataccttaatggggaaggggggtcgatatgcattatatgtgccgtgtgtggaaaaaaaaaaagtcaggtactctgttttgtaaaagtacttttaaattgcctcagtgatacagtataaagataaacagaaatgctgagataagcttagcacttgagttgtacaacagaacacttgtacaaaatagattttaaggctaacttcttttcactgttgtgctcctttgcaaaatgtatgttacaatagatagtgtcatgttgcaggttcaacgttatttacatgtaaatagacaaaaggaaacatttgccaaaagcggcagatctttactgaaagagagagcagctgttatgcaacatatagaaaaatgtatagatgcttggacagacccggtaatgggtggccattggtaaatgttaggaacacaccaggtcacctgacatcccaagaatgctcacaaacctgcaggcatatcattggcgtatggcactcattaaaaaggatcagagaccattaaaagaggaccatacctattaaaaaaaaatgtggagttggagggctaacatatttaattaaataaataaataaatctgggtctgcatctcttattaaataaaaatataaaaatatgtacattacattttgcttattttcatataaaaggtaagacagagtttgcaaagcatttgtggctttttgtagtttacttaagccaaaatgtgtttttttccccttgatagcttcgctaatattttaaacagtcctgtaaaaaaccaaaaaggactttttgtatagaaagcactaccctaagccatgaagaactccatgctttgctaaccaagataactgttttctctttgtagaagttttgtttttgaaatgtgtatttctaattatataaaatattaagaatcttttaaaaaaatctgtgaaattaacatgcttgtgtatagctttctaatatatataatattatggtaatagcagaagttttgttatcttaatagcgggaggggggtatatttgtgcagttgcacatttgagtaactattttctttctgttttcttttactctgcttacattttataagtttaaggtcagctgtcaaaaggataacctgtggggttagaacatatcacattgcaacaccctaaattgtttttaatacattagcaatctattgggtcaactgacatccattgtatatactagtttctttcatgctatttttattttgttttttgcatttttatcaaatgcagggcccctttctgatctcaccatttcaccatgcatcttggaattcagtaagtgcatatcctaacttgcccatattctaaatcatctggttggttttcagcctagaatttgatacgctttttagaaatatgcccagaatagaaaagctatgttggggcacatgtcctgcaaatatggccctagaaacaagtgatatggaatttacttggtgaataagttataaattcccacagaagaaaaatgtgaaagactgggtgctagacaagaaggaagcaggtaaagggatagttgctttgtcatccgtttttaattattttaactgacccttgacaatcttgtcagcaatataggactgttgaacaatcccggtgtgtcaggacccccaaatgtcacttctgcataaagcatgtatgtcatctattttttcttcaataaagagatttaatagccatttcaagaaatcccataaagaacctctctatgtccctttttttaatttaaaaaaaatgactcttgtctaatattcgtctataagggattaattttcagaccctttaataagtgagtgccataagaaagtcaatatatattgtttaaaagatatttcagtctaggaaagattttccttctcttggaatgtgaagatctgtcgattcatctccaatcatatgcattgacatacacagcaaagaagatataggcagtaatatcaacactgctatatcatgtgtaggacatttcttatccattttttctcttttacttgcatagttgctatgtgtttctcattgtaaaaggctgccgctgggtggcagaagccaagagaccttattaactaggctatatttttcttaacttgatctgaaatccacaattagaccacaatgcacctttggttgtatccataaaggatgctagcctgccttgtactaatgttttatatatt

SEQ ID NO: 73707 - DNA, 1422 bp, Artificial Sequence
  derived and/or modified sequence
atgggccggaagaagatccagatcacccggatcatggacgagcggaatagacaagttaccttcacaaaacgcaagtttggcttaatgaagaaggcctatgagttatcggtgctttgcgactgcgaaatagccctaatcatattcaatagcacaaacaaactctttcagtatgcatctacagatatggacaaagtgctgttgaaatataccgagtacaatgaaccccacgagtccagaaccaattctgacatagtggaaactcttagaaaaaagggtcttaacggctgcgactccccggatccggacgctgatgacagcgtcgggcattcccctgaaagcgaagacaagtacaggaagatcaatgaagacatagacctcatgataagcagacagcgactgtgtgccgtgcccccacccaactttgagatgcccgttagcatcccagtaagctcgcataattcgctggtctattccaatcctgtatcttctctgggaaatccaaatcttctgccgctggcccatccaagcctgcagcgtaattcaatgtccccaggagtgacccaccgccccccatcagccggcaacacgggtggactgatgggtggcgacctaacctctggagcagggacaagcgccggcaacggttatggcaatcctcgaaacagcccaggcctgctcgtctcaccaggcaatttgaataaaaatatgcaagccaaaagtccacccccaatgaatctgggaatgaataaccgaaagcctgacctgcgcgtacttattccccctggttcgaaaaataccatgccttctgtatctgaggatgtagacttgctgcttaaccagcggatcaacaattcacaaagtgcccagagtctggccacacccgtggtttctgtcgcaactcctactctgccaggacagggtatgggcggttacccttccgccatttccaccacatatggaacagagtactccctgtcaagcgcagatctctcttccctgtcaggctttaataccgcctccgccctgcatctagggtcagtcactggttggcaacagcaacaccttcataatatgcctcctagcgctctgtcccagctcggagcttgcacgagtactcacctgtcccagtcaagcaacttatcgctgccatcaacccagtcacttaacataaaaagcgagccggtttctccccctcgggaccgcaccacaacaccaagccggtatccccagcataccaggcacgaagctggtcggagcccagttgactctctgagctcttgctcatcctcctacgatgggtcggatagagaagaccacagaaacgagttccactctcctattggtctcactaggcccagtcccgacgagcgagagtccccgtcagtgaaacgtatgagactgtcagagggatgggccacttag

SEQ ID NO: 73708 - DNA, 1422 bp, Artificial Sequence
  derived and/or modified sequence
atgggccggaagaagatccagatcacccggatcatggacgagcggaacaggcaggttacatttactaagcgcaaattcggacttatgaagaaggcctacgaactgtccgtcctctgcgattgtgagatcgccctcattatcttcaattcaactaataagctgtttcaatacgcttccaccgacatggacaaagtgctgctgaagtacaccgagtacaatgagccacacgagagccgcaccaactctgatattgtggaaacacttagaaagaagggcctgaacggatgtgatagccccgaccctgacgcggatgactccgtcggacacagtcctgagtctgaagacaagtatcggaagattaatgaagatatcgacctgatgatcagccggcagaggctgtgcgccgtccctcctccaaactttgaaatgcccgtgtcgatccccgtgtccagtcacaatagcttggtttacagcaatcccgtttctagccttggaaaccctaatctgctccctttggcccatccctccttgcagaggaatagcatgtcccctggcgtaacacatcgcccaccttctgccggaaacacaggaggtctcatgggcggtgatttgacttcgggtgccgggacaagtgcaggcaatgggtacgggaatcctcggaacagtcctgggttactcgtttcaccaggcaacctgaataagaacatgcaagccaaatcacccccccctatgaatctcggcatgaacaataggaaacccgatttgcgcgttcttattcctccagggagtaagaacaccatgccctcggtcgtcatacagaattatatactcaaaaatcagaggatcaacaactcccagtcagcccagtccctagcaacccctgtggtgagcgtagctacccctactttgcctggccagggcatgggggggtatccaagtgccatcagcactacctacggtacggagtactcgctgtcctctgctgatctgagtagtctgagcggttttaatactgcttcagctctgcacctcggctccgtgactgggtggcagcagcagcatctgcacaatatgccaccatcagcactgagccagctgggcgcctgcacctctactcacctgtctcagtcctctaatttgtctctgccctccactcagagcttgaatatcaaatcagagccagtgagccctcctagagaccggaccacaactccctctaggtaccctcagcatacaaggcatgaggctggaaggtccccagtggatagtctctcctcttgttcgtcttcttatgatggaagtgatcgggaggaccatcgtaatgagttccattcccctataggcttgactcggccgtctcctgatgaacgtgagtcaccatctgtcaagcgcatgagactatccgagggctgggccacatag

SEQ ID NO: 73709 - DNA, 1422 bp, Artificial Sequence
  derived and/or modified sequence
atgggccggaagaagatccagatcacccggatcatggacgagcggaaccgccaggttacttttacaaaacgaaaatttggattaatgaagaaggcatacgagttgtctgtgctgtgcgactgcgaaatcgcgcttataatttttaattcaaccaataagctgttccagtacgcttcgacagatatggacaaggtactcctcaaatatactgagtacaatgaaccccatgaatctcggacaaattcagacatcgtggaaacattgaggaagaagggactcaatggttgcgattccccagaccccgatgctgatgattcggtcggacactctcccgagagtgaggacaagtacagaaaaatcaacgaagatattgacctcatgataagccgtcaacgcctgtgtgcagtgccccctccaaattttgagatgccagtttctattcccgtcagcagtcataacagtctggtgtactccaatccggtctctagtttgggcaaccccaatctgctgccgctggctcacccatccttacagcgcaattccatgagccctggggtcacccataggcccccttctgcaggtaacaccggcggcttgatgggtggggacctcactagcggagctgggacctcagccggaaatggctacggcaacccacgcaactcccctggcctcttggtgagccctgggaacctgaacaaaaacatgcaggccaagagcccaccccccatgaatttgggaatgaacaatcgaaaaccagacctaagggttctcattccccccggtagtaaaaatacaatgccttccgtctccgaggacgtggacctgctcctcaatcagaggataaacaactcccaatctgcacagtctctggcgacgcccgtcgtgagcgtcgctactccaacactgcccggccaggggatgggagggtaccctagcgcaataagcacaacctacggcaccgagtatagcctatccagcgctgatttgtcatcactgtctggctttaataccgcatctgctttacacctcgggtccgtgactggatggcagcagcagcatctgcataatatgccacctagtgccctgtcccagctgggggcatgcacaagtacacaccttagccagagtagcaatctgagcctcccaagtacccagtcactcaatattaagagcgaaccggttagccccccccgcgacagaacaacgaccccaagccgatacccccagcataccagacatgaggctgggcgttcacctgttgactccctgtctagttgtagctctagctatgatggctcagatcgcgaagatcaccggaacgaattccacagcccaattgggttgactaggcccagccccgacgaacgggagtcaccttcagtcaagcgtatgcgtctctctgaggggtgggcgacgtag

SEQ ID NO: 73710 - DNA, 1422 bp, Artificial Sequence
  derived and/or modified sequence
atggggaggaagaagatccagataacacggataatggatgaacggaaccgccaggtgacttttactaaacgtaagtttgggcttatgaagaaggcctacgagctgagcgtgctgtgtgattgcgaaatcgctctgatcatctttaattccaccaacaaactgtttcagtacgctagcacagacatggacaaggtactgttaaaatatacagaatataacgaaccacatgagtcccgtacaaattctgacatcgtagagaccttacgcaagaaagggctgaacgggtgcgattcccccgaccccgacgctgatgactccgtgggccactctcccgagtccgaagacaagtacagaaaaataaacgaagatatagatcttatgattagcagacaacgtttgtgcgccgtaccaccacccaatttcgagatgccagtgtccatcccggtatccagtcacaacagtctagtttactccaatccagtgagttctcttggaaatccaaacctgctgccattggctcatcccagcttacagcggaactcaatgtcgcccggagtaactcatcgacccccatccgccggaaacaccggcggtcttatgggaggagacctgacatcaggagcaggaactagcgctggcaacgggtatggcaatccgcgtaattccccaggattgctggtttcgcccggtaatctgaataagaatatgcaggctaagtcccctcccccaatgaatttgggaatgaataacaggaagccagatctccgggttttgattccgcctggctctaaaaatacaatgccgagcgtcagcgaggatgttgacttgctgctcaaccagaggatcaataatagccagagcgcacagagcctcgcaacgcctgtggtgagtgtggctacacccacccttccaggtcagggtatggggggatacccatcagcaatttccaccacgtatggcacagagtactctctttcctctgcggacctctcgtccctgtctggtttcaacaccgcttctgccctccatctgggttccgttactgggtggcagcagcagcacttgcacaatatgcccccatctgcactctcacagctcggagcctgtacgtccactcatctgtctcagagtagtaatctgagcctgccttctacacagtccttaaatattaaatccgaacccgtgtcaccccctcgggaccgcaccacaactccgtccaggtatccgcagcacaccaggcacgaagccggtcgctcccccgtagattcccttagcagctgttctagttcttatgacggcagcgatagggaggaccatcgtaacgaatttcactcccctatcggcttgacaaggccctcccccgatgaaagggaatctcctagtgtgaagaggatgagactgtcagagggctgggccacctag

SEQ ID NO: 73711 - DNA, 1422 bp, Artificial Sequence
  derived and/or modified sequence
atgggaaggaaaaagattcagattacaagaataatggatgaaagaaacaggcaggtgactttcactaagaggaaatttggcctgatgaagaaagcttatgaactgagcgtgctctgtgactgcgagattgcactgattatctttaattccaccaataaactgttccagtatgcaagtacggacatggacaaggtacttctgaagtacacggagtacaacgagccacacgagtctcggaccaactccgacatcgtggaaacactccgcaagaagggactcaatggatgcgactcgccggatcctgatgccgatgactctgtgggtcactcccctgagtctgaggacaagtatcgaaaaatcaatgaggacattgatctgatgattagtaggcagcggctgtgtgcagttcctccccctaatttcgagatgcccgtttccatacccgtttctagccacaattctctcgtgtacagtaaccccgtgtccagcctgggcaatccaaaccttctgcccttggcccaccccagcctgcagcggaatagcatgtctcctggggttacccataggccacctagtgccggaaacacaggcggactcatgggcggtgacctcacctcaggagcaggaacatcggccggtaatggatatgggaatcctagaaacagccctggtctcttagtatcccccggaaacctaaataaaaacatgcaggccaagagccccccaccaatgaacctgggaatgaacaatcgaaagcccgacctgcgggtgctgatccctccagggagcaaaaacactatgccgtctgtggtcattcagaactatatcttaaagaatcaacggattaacaactcacagtcagctcagtctctcgccacgcctgtggtttctgtggcaactcctactttacccggacagggcatgggaggatatccttccgcaatctcaactacctacggcactgaatactctctgtcatccgccgatctgagctccctcagcggttttaatacagcctcggccctgcatcttgggtcggtgactgggtggcagcagcaacacctacacaacatgcccccaagcgcactgagccagctcggagcctgtacgagtactcatctgtcccagagctccaatttgagcttacctagcacccaaagcctcaacataaaatccgaaccagtatctccacccagagatcggaccacgactccctcccgttacccccagcatacccgtcacgaagcaggcagaagtcccgtggactcccttagctcctgtagcagttcttacgatgggtccgacagagaagaccacaggaacgaatttcattcccccattggactgaccaggcctagtcccgacgaacgggaatctccttcagtcaaaaggatgcgccttagcgaggggtgggccacatag

SEQ ID NO: 73712 - DNA, 1422 bp, Artificial Sequence
  derived and/or modified sequence
atgggtaggaagaagattcaaattacacgaatcatggatgaacggaaccggcaggtgacatttaccaagcgtaagttcggcctgatgaagaaggcatacgaattgagcgttctgtgcgattgtgagatcgccctcatcatcttcaattccacaaataaacttttccagtatgcctcaaccgacatggataaagtccttttgaagtacacagaatataacgaaccacatgagagcagaacaaacagcgacattgtcgagactctcaggaagaaaggtctgaacggatgcgatagcccagatccagatgccgatgattctgtcggtcactcacccgagagtgaagataaatacagaaagatcaacgaagacattgacttaatgatctcccggcagcgactgtgtgcagtgccaccccctaattttgaaatgccagtgagcattcctgtgtctagccacaactccctggtgtatagcaatcccgtctctagtcttggcaaccccaacctcctcccccttgcccacccctcactacaaagaaactccatgagccccggagttactcaccgcccaccttcagccggaaacactgggggactaatggggggtgacctaaccagcggagcaggcacttccgcgggtaacgggtatgggaatcccagaaactccccaggtctgcttgtgagcccagggaatctgaataaaaatatgcaggctaagagcccccctccaatgaacttaggtatgaataaccgcaagcctgacctgcgtgtgctgatcccacccggatctaagaacacaatgccctctgtgtccgaagacgtggatctcctgttgaatcagcgcataaataatagtcagtcagcccaatccttggctacaccggtggtctctgttgcaacccctacactgcccggacaaggcatgggcggttaccccagcgctatctcaaccacctacggtactgaatacagtttaagctccgccgatctaagcagtctgagcggctttaatacagcctctgcgctccacttaggctctgtgacggggtggcagcaacagcacctccacaacatgcccccttctgccttatcccagctcggcgcatgcacgtcaactcatttaagtcaatcaagcaacctatcactaccctctactcagagcctaaatataaagtctgagcccgttagtcctcctcgggataggacaaccaccccatcccgctacccccaacataccaggcacgaggcgggtcgatccccggtggatagcttgtctagttgctcctcctcctatgatggctccgatagagaagaccacaggaatgaattccatagccccattggccttactagacccagccccgatgagcgagagtctcctagcgttaagaggatgagactttcagagggttgggcaacctag

SEQ ID NO: 73713 - DNA, 1422 bp, Artificial Sequence
  derived and/or modified sequence
atgggcagaaagaagatccagatcaccagaatcatggacgagagaaacagacaggtgaccttcaccaagagaaagttcggcctgatgaagaaggcctacgagctgagcgtgctgtgcgactgcgagatcgccctgatcatcttcaacagcaccaacaagctgttccagtacgccagcaccgacatggacaaggtgctgctgaagtacaccgagtacaacgagccccacgagagcagaaccaacagcgacatcgtggagaccctgagaaagaagggcctgaacggctgcgacagccccgaccccgacgccgacgacagcgtgggccacagccccgagagcgaggacaagtacagaaagatcaacgaggacatcgacctgatgatcagcagacagagactgtgcgccgtgcccccccccaacttcgagatgcccgtgagcatccccgtgagcagccacaacagcctggtgtacagcaaccccgtgagcagcctgggcaaccccaacctgctgcccctggcccaccccagcctgcagagaaacagcatgagccccggcgtgacccacagaccccccagcgccggcaacaccggcggcctgatgggcggcgacctgaccagcggcgccggcaccagcgccggcaacggctacggcaaccccagaaacagccccggcctgctggtgagccccggcaacctgaacaagaacatgcaggccaagagccccccccccatgaacctgggcatgaacaacagaaagcccgacctgagagtgctgatcccccccggcagcaagaacaccatgcccagcgtgagcgaggacgtggacctgctgctgaaccagagaatcaacaacagccagagcgcccagagcctggccacccccgtggtgagcgtggccacccccaccctgcccggccagggcatgggcggctaccccagcgccatcagcaccacctacggcaccgagtacagcctgagcagcgccgacctgagcagcctgagcggcttcaacaccgccagcgccctgcacctgggcagcgtgaccggctggcagcagcagcacctgcacaacatgccccccagcgccctgagccagctgggcgcctgcaccagcacccacctgagccagagcagcaacctgagcctgcccagcacccagagcctgaacatcaagagcgagcccgtgagcccccccagagacagaaccaccacccccagcagatacccccagcacaccagacacgaggccggcagaagccccgtggacagcctgagcagctgcagcagcagctacgacggcagcgacagagaggaccacagaaacgagttccacagccccatcggcctgaccagacccagccccgacgagagagagagccccagcgtgaagagaatgagactgagcgagggctgggccacctag

SEQ ID NO: 73714 - DNA, 1422 bp, Artificial Sequence
  derived and/or modified sequence
atgggcagaaagaagatccagatcaccagaatcatggacgagagaaacagacaggtgaccttcaccaagagaaagttcggcctgatgaagaaggcctacgagctgagcgtgctgtgcgactgcgagatcgccctgatcatcttcaacagcaccaacaagctgttccagtacgccagcaccgacatggacaaggtgctgctgaagtacaccgagtacaacgagccccacgagagcagaaccaacagcgacatcgtggagaccctgagaaagaagggcctgaacggctgcgacagccccgaccccgacgccgacgacagcgtgggccacagccccgagagcgaggacaagtacagaaagatcaacgaggacatcgacctgatgatcagcagacagagactgtgcgccgtgcccccccccaacttcgagatgcccgtgagcatccccgtgagcagccacaacagcctggtgtacagcaaccccgtgagcagcctgggcaaccccaacctgctgcccctggcccaccccagcctgcagagaaacagcatgagccccggcgtgacccacagaccccccagcgccggcaacaccggcggcctgatgggcggcgacctgaccagcggcgccggcaccagcgccggcaacggctacggcaaccccagaaacagccccggcctgctggtgagccccggcaacctgaacaagaacatgcaggccaagagccccccccccatgaacctgggcatgaacaacagaaagcccgacctgagagtgctgatcccccccggcagcaagaacaccatgcccagcgtggtgatccagaactacatcctgaagaaccagagaatcaacaacagccagagcgcccagagcctggccacccccgtggtgagcgtggccacccccaccctgcccggccagggcatgggcggctaccccagcgccatcagcaccacctacggcaccgagtacagcctgagcagcgccgacctgagcagcctgagcggcttcaacaccgccagcgccctgcacctgggcagcgtgaccggctggcagcagcagcacctgcacaacatgccccccagcgccctgagccagctgggcgcctgcaccagcacccacctgagccagagcagcaacctgagcctgcccagcacccagagcctgaacatcaagagcgagcccgtgagcccccccagagacagaaccaccacccccagcagatacccccagcacaccagacacgaggccggcagaagccccgtggacagcctgagcagctgcagcagcagctacgacggcagcgacagagaggaccacagaaacgagttccacagccccatcggcctgaccagacccagccccgacgagagagagagccccagcgtgaagagaatgagactgagcgagggctgggccacctag

SEQ ID NO: 73715 - protein, 198 aa, Artificial Sequence
  derived and/or modified sequence
  misc_feature (1)..(1): Xaa can be any naturally occurring amino acid
XPVMTYGHLEGLINEWNLELEDQEKYFLLQATQVNAWDHTLIENGEMIRILHGEVNKVKLDQKRLEQELDFILSQQQELEFLLTYLEESTRDQSGLHYLQDADEEHVEIYRLAESIDAQLKQMAQDLKDVVNHLNTFESSSDTTDPLHQICRILNAHMDSLQWIDRNSGMLRRKVEVVTRVFEDYRHEEHAHNVNTAF

SEQ ID NO: 73716 - protein, 193 aa, Artificial Sequence
  derived and/or modified sequence
MSGFNFGGTGAPTGGFTFGTAKTATTTPATGFSFSTSGTGGFNFGAPFQPATSTPSTGLFSLATQTPATQTTGFTFGTATLASGGTGFSLGIGASKLNLSNTAATPAMANPSGFGLGSSNLTNAISSTVTSSQGTAPTGFVFGPSTTSVAPATTSGGFSFTGGSTAQPSGFNIGSAGNSAQPTAPATLPFTPA

SEQ ID NO: 73717 - protein, 522 aa, Artificial Sequence
  derived and/or modified sequence
MSGFNFGGTGAPTGGFTFGTAKTATTTPATGFSFSTSGTGGFNFGAPFQPATSTPSTGLFSLATQTPATQTTGFTFGTATLASGGTGFSLGIGASKLNLSNTAATPAMANPSGFGLGSSNLTNAISSTVTSSQGTAPTGFVFGPSTTSVAPATTSGGFSFTGGSTAQPSGFNIGSAGNSAQPTAPATLPFTPATPAATTAGATQPAAPTPTATITSTGPSLFASIATAPTSSATTGLSLCTPVTTAGAPTAGTQGFSLKAPGAASGTSTTTSTAATATATTTSSSSTTGFALNLKPLAPAGIPSNTAAAVTAPPGPGAAAGAAASSAMTYAQLESLINKWSLELEDQERHFLQQATQVNAWDRTLIENGEKITSLHREVEKVKLDQKRLDQELDFILSQQKELEDLLSPLEELVKEQSGTIYLQHADEEREKTYKLAENIDAQLKRMAQDLKDIIEHLNTSGAPADTSDPLQQICKILNAHMDSLQWIDQNSALLQRKVEEVTKVCEGRRKEQERSFRITFD

SEQ ID NO: 73718 - DNA, 597 bp, Artificial Sequence
  derived and/or modified sequence
tagcccgttatgacttatggacacctcgagggcctgataaatgaatggaacttagagctggaagaccaggaaaaatatttcctgctgcaggccactcaggtgaatgcctgggatcacaccctgattgagaatggagagatgatacgcattctccacggggaggtaaacaaggtaaagctggatcagaaacgtctcgaacaagagcttgattttattttatctcaacagcaggagcttgaattccttttaacttacctcgaggagtctaccagggatcaatcaggactgcattatcttcaggatgcagatgaggagcacgtggaaatctacaggctcgccgaaagtatcgatgctcagctgaagcagatggcccaggatctgaaagacgtggtgaaccatctaaacacgtttgagtcatcttccgacaccaccgatcctctgcaccagatctgtcgtattctgaatgcccacatggattccttacaatggatcgaccggaattccgggatgctgaggcgcaaggtggaagtggttacccgagtctttgaggactacaggcacgaggagcacgcacacaacgttaacacggccttttag

SEQ ID NO: 73719 - DNA, 688 bp, Artificial Sequence
  derived and/or modified sequence
tcctgtgatgacatatggtcatctggagggtcttataaatgagtggaaccttgagctggaagatcaagagaagtactttcttctccaggccactcaggtcaatgcttgggaccatacattgattgagaatggtgagatgattcgtattttacatggagaagtgaacaaagtgaaactggatcagaaaagattggaacaagaattggattttatcctgtcacagcagcaggaactagaatttctgttgacttatttagaggagtctacgcgtgaccagagtggacttcattatctgcaggatgcagatgaggagcatgtggagatttacagattagcagaaagtatagatgctcagctgaaacaaatggcccaagatctcaaggacgttgttaatcacctgaatacatttgaaagttcttctgacactactgatccgctccaccagatctgcagaattctgaatgcccatatggactccctgcagtggattgatcggaattcaggcatgctgcgaaggaaggtagaagtggtaacacgggttttcgaggattatcgtcacgaggagcatgcacacaatgtcaacactgctttttagtgaatgaccatatcttcagcatgtcgtttctggattattacctacaaattctgatgttaaatagagtagtatttatacttaatatttcatctt

SEQ ID NO: 73720 - DNA, 597 bp, Artificial Sequence
  derived and/or modified sequence
tgacctgtgatgacctacggccacctggagggcctcatcaatgagtggaacctggagctggaggaccaggagaagtacttcctgctgcaggccacccaggtgaatgcctgggaccacaccctgattgaaaatggagagatgatccgcatcctgcacggggaggtgaacaaggtgaagctggaccagaagaggctggagcaggagctggacttcatcctgagccagcagcaggagctggagttcctgctgacctacctggaggagagcacccgggaccagagcggcctgcactacctgcaggatgctgatgaggagcacgtggagatctaccgcctggccgagagcattgatgcccagctgaagcagatggcccaggacctgaaggatgtggtgaaccacctgaacacctttgagagcagcagtgacaccacagaccccctgcaccagatctgccgcatcctgaatgcccacatggacagcctgcagtggattgacaggaacagcggcatgctgcggaggaaggtggaggtggtgaccagggtgtttgaggactacagacatgaggagcacgcccacaacgtgaacacagccttctag

SEQ ID NO: 73721 - DNA, 597 bp, Artificial Sequence
  derived and/or modified sequence
tgacccgtgatgacctacggccacctggagggcctgatcaacgagtggaatctcgagctggaagatcaagagaaatacttcttattgcaagcaacccaagtgaatgcctgggatcataccctgatcgagaacggcgaaatgataagaatccttcatggagaagtcaacaaggtgaaactggaccaaaagcgtttggagcaggagcttgacttcatcctctctcagcagcaagaattggagttcctgctcacctaccttgaagagagcacgagggatcagtctggactgcactacctgcaggatgcagacgaggaacacgtcgaaatatatcggttggcagagagtatcgacgctcagctcaaacaaatggcccaggatctaaaggacgttgtgaaccacctgaatacctttgagtcttcatccgatactaccgatcccctccatcagatctgtagaatccttaacgcacacatggattcactacagtggattgatcggaacagcggaatgcttcgccgcaaggtggaagtagtgacccgggtctttgaagactataggcatgaagagcatgcacataacgttaacaccgcattttag

SEQ ID NO: 73722 - DNA, 597 bp, Artificial Sequence
  derived and/or modified sequence
tgacccgtgatgacatacggccacctcgagggtctgatcaatgagtggaacctggagctggaagaccaagagaagtactttctgttgcaggccacacaggtaaatgcctgggatcacacactgatagagaacggagagatgattaggattctgcacggcgaggtaaataaggttaagttggatcaaaagaggttggagcaggagctcgactttatcctgtcccagcagcaagagctggaattcctgctcacgtatcttgaggagtccacaagagaccaatctggccttcattatctgcaggatgctgacgaggaacacgttgagatctatcggcttgctgaatcgattgatgcccagttgaagcagatggcccaggatctgaaagacgtggttaaccatctcaatactttcgagtcttcttccgatactaccgatcctcttcatcagatttgcagaatactcaatgctcacatggacagcttgcagtggattgaccggaattccgggatgctgagaagaaaagttgaggtcgttaccagggttttcgaggattatcgtcacgaagagcacgcccacaatgtcaacaccgcgttctag

SEQ ID NO: 73723 - DNA, 597 bp, Artificial Sequence
  derived and/or modified sequence
tgacccgtgatgacctacggccacctggagggcctgatcaacgagtggaacctggagctggaggaccaggagaagtacttcctgctgcaggccacccaggtgaacgcctgggaccacaccctgatcgagaacggcgagatgatcagaatcctgcacggcgaggtgaacaaggtgaagctggaccagaagagactggagcaggagctggacttcatcctgagccagcagcaggagctggagttcctgctgacctacctggaggagagcaccagagaccagagcggcctgcactacctgcaggacgccgacgaggagcacgtggagatctacagactggccgagagcatcgacgcccagctgaagcagatggcccaggacctgaaggacgtggtgaaccacctgaacaccttcgagagcagcagcgacaccaccgaccccctgcaccagatctgcagaatcctgaacgcccacatggacagcctgcagtggatcgacagaaacagcggcatgctgagaagaaaggtggaggtggtgaccagagtgttcgaggactacagacacgaggagcacgcccacaacgtgaacaccgccttctag

SEQ ID NO: 73724 - DNA, 582 bp, Artificial Sequence
  derived and/or modified sequence
atgagcgggtttaactttggagggacaggcgctcctaccggtggttttacattcggtaccgccaaaactgccactacaacgcccgccaccgggtttagcttttctacaagcggaacaggcgggttcaattttggggctcccttccaacccgcaacatccacaccatcgaccggactgttcagcctcgctacgcagacaccggccactcagacgactggatttacatttggaacagctaccctggcaagcggtgggacaggattcagcctgggcattggagcatccaaactgaatctctccaacacagccgctacacctgccatggcaaacccatctggcttcgggctcggctcgtccaatctcacaaatgcaatatcatccacagtaacttccagtcaggggactgctcccaccggtttcgtgttcggcccgtctactaccagtgtggccccagcaaccacttctggcggcttcagttttaccggcgggagcacagcgcagccaagcggctttaacattggaagcgcaggaaacagcgcccaacctacagctccagccacccttcctttcacgccagcgtag

SEQ ID NO: 73725 - DNA, 1569 bp, Artificial Sequence
  derived and/or modified sequence
atgtctggatttaattttggagggactggtgcacccaccggcggcttcacattcggcactgcaaagacagctactactacgcccgccacgggcttcagcttttccacctcgggaacaggcggattcaacttcggggctcccttccagcccgcaacaagcactccttccacaggccttttcagcctggctacacagaccccagcaacccagacaactgggttcacattcggcaccgccacgctagcatcaggaggaactggattctccctcggtattggggcttctaaactgaacctgagtaatacggcagcgacaccagccatggcaaaccccagtggttttggcctgggcagctctaacttaacaaacgcaatatcatccacggtgacgtcctcgcaggggactgctcccactggctttgtgtttggccctagtacgacatccgtagcacccgctacaactagtgggggattctcttttactgggggaagcacagctcagcctagcggatttaatattggaagcgccgggaactcggcacagcccacagcccccgcgacgctgcctttcacgcccgcaacacctgccgccacgaccgctggtgctacacagcccgccgcccctactcccaccgccactattacaagcacgggcccttcactgttcgcttctatcgccacagctcctacaagcagcgctaccactggactgagcctgtgcacgcctgtcaccaccgcaggcgcaccgacagccggcacgcagggctttagcctaaaggcccctggcgccgcctcgggaacatccaccactacgagtactgctgccactgctaccgctaccactactagcagctcctccacaacaggcttcgctcttaacctaaagcctctggcccccgcagggataccatcaaacaccgccgcagctgtcactgcacctcccgggcccggagccgccgcgggcgcggctgccagttctgctatgacctacgcccagctcgaaagtcttatcaacaagtggagcctcgagctggaagatcaggagaggcatttcctgcaacaagctactcaggtcaatgcctgggataggactctcattgagaacggggagaagatcacgtcactgcatagagaagttgaaaaggttaaactggaccagaaaagactggatcaggagctcgactttatattgagccagcaaaaggagctggaggatctcttgagccccctggaagagcttgtgaaggaacagtcgggaacaatttatctgcagcacgccgacgaggaacgagagaagacctacaaattggccgaaaatatagatgcccagcttaaacggatggcccaggacctgaaggacattatcgagcacctgaatacctccggggccccggcagatacatccgacccactccaacagatatgtaagattctgaacgcccacatggacagcctgcaatggatcgaccagaattccgctctgcttcaaagaaaagtagaagaagttacaaaggtatgcgagggaaggagaaaggaacaggaacgttcattccgtatcaccttcgactag

SEQ ID NO: 73726 - DNA, 1569 bp, Artificial Sequence
  derived and/or modified sequence
atgtcaggttttaatttcgggggaacaggtgcacctaccggaggattcaccttcggaacagctaagaccgctaccaccactcccgctacagggttttcgttttcaacgtccggcacgggggggtttaatttcggcgcaccgtttcaaccagccacctccaccccaagtaccgggcttttctccctggcgacacaaactcctgcaacccaaacaacgggatttacttttggaaccgcaactcttgcaagcggcgggacaggcttttctctcggaataggcgcctctaagcttaacctctccaacaccgctgccacccctgctatggccaacccttctggattcggcctgggcagctccaacctcacaaacgctattagtagcaccgtgacaagtagtcagggaactgcgcccacaggtttcgtgtttggtccgagtaccacatcagtggcaccagctacaacctctggcggattctcattcaccggcggctccacagcacagccaagtggttttaacatcggcagtgccggaaattccgcccagcctactgccccggctaccctcccatttactcccgccaccccagctgctaccactgccggggccacgcagcctgccgctccgactcctacagccaccataacatcaaccgggccgtccttgtttgctagcattgcaactgcccccacatcaagtgccactacaggtttgagcctgtgcacacccgtaaccaccgccggagcgcctaccgcggggacccagggcttctctctcaaggctcccggtgctgcaagtggaactagtacaactacgtctacagccgctacagcaactgccacaaccacaagtagctcatcaaccacaggcttcgcattgaatttgaaacccctggcaccagcaggcattcctagcaataccgctgctgccgtcactgcaccccccgggcccggcgcggccgctggagcagccgcatcgagcgcaatgacctacgctcagctggagtctttaattaacaagtggtcactcgagttggaagaccaggagcgccactttcttcaacaggcgacccaggtgaatgcttgggacaggacactgatcgagaacggcgagaagattactagcctacacagggaggtcgaaaaggttaagctggatcagaagcggttggatcaagagctggattttatcctcagccagcagaaggaactcgaagatttgctgtcaccattggaggagctcgtcaaagagcaaagcgggactatctacctgcagcatgccgatgaggagcgcgagaaaacgtacaagctggccgagaacatagacgcccagcttaaaagaatggctcaggacctgaaggatattatcgagcacctgaacaccagtggagctcccgccgacacgtccgatccactccagcaaatatgtaagattttgaacgcccacatggattccctgcagtggatagaccaaaacagcgcactcttacagaggaaggttgaagaagtgacgaaggtttgcgagggacgacgaaaagagcaggaacgcagcttccggatcacgttcgactag

SEQ ID NO: 73727 - DNA, 1569 bp, Artificial Sequence
  derived and/or modified sequence
atgtctgggttcaacttcggcggtacgggtgcccctacgggtggattcacctttggaaccgctaagactgcaacaactacacctgctaccgggttcagttttagcacgtctggcacaggcgggttcaactttggcgccccttttcagcccgccacctctactccatctaccgggctgttctcgctcgctacacaaactccagccacccaaaccaccggatttaccttcgggactgctacgctggcgagcggcggtactggcttttcacttggcataggcgcgtcaaagctaaacctgtccaacaccgccgccactcctgccatggctaatcctagcgggttcgggctcggatctagtaatttgacaaacgccataagctctactgtgacctcttcccagggtacagcccccacaggttttgtgttcggtccctcgacgaccagtgtggctccagccacaacctcgggcggcttcagttttactggcggatccacagcacagccgagtggatttaatattgggtcggccgggaattccgcacagccgacggctcctgcaactctgccctttacccccgcaaccccagcagccaccacagccggcgctacacagcccgctgctccaactcctaccgccacaatcacaagtaccggcccaagtcttttcgcctcaatcgccaccgccccgacttccagtgccactaccggcctttccttgtgcactccggtgacgactgcaggagctccaacggctgggacgcaaggatttagcctgaaagcaccaggggcagcgagtggaaccagcactacaacaagtaccgccgctaccgccacagcaaccaccactagctcctcctcaaccacagggtttgcactgaacttgaagcccctggctcccgccgggattcctagcaacacagctgcggccgtgaccgctccaccaggaccgggggccgctgctggtgcggctgcatcctctgccatgacatacgcacagctggaatccctaattaataagtggtccttggaacttgaggatcaagagcgtcactttcttcagcaggctacccaggtgaatgcctgggatcgcacattaatcgagaatggcgaaaagattactagccttcatcgtgaagtagagaaggtgaagctggaccaaaagaggctggaccaggagctggactttattcttagccagcaaaaagagctcgaggacctcctcagtccactggaagagctcgttaaagagcagtccgggaccatctatctgcagcatgccgacgaagagagagaaaaaacttacaagctggctgaaaacattgatgctcaattgaagagaatggcccaggacctcaaggacatcattgaacatctcaacactagtggtgcccccgccgatacttccgaccctctgcagcagatttgcaaaattctaaacgcccacatggacagccttcagtggatcgatcaaaattcagccctgttacaacggaaggtggaagaagttaccaaggtttgtgagggtcggcgcaaggaacaagagagatccttccgcattacatttgactag

SEQ ID NO: 73728 - DNA, 582 bp, Artificial Sequence
  derived and/or modified sequence
atgagcggcttcaactttggaggcactggagcccccactggaggcttcaccttcggcacagccaagacagccaccaccaccccagccaccggcttctccttcagcaccagcggcactggaggcttcaactttggagcccccttccagcctgccaccagcacccccagcacaggcctcttcagcctggccacccagaccccagccacccagaccaccggcttcaccttcggcacagccaccctggccagcggcggcaccggcttcagcctgggcatcggggccagcaagctgaacctgagcaacacagctgccaccccagccatggccaaccccagcggcttcggcctgggcagcagcaacctgaccaatgccatcagcagcacagtgaccagcagccagggcacagcccccaccggctttgtgtttggccccagcaccacctctgtggccccagccaccaccagcggcggcttctccttcaccggcggcagcacagcccagcccagcggcttcaacatcggcagcgctggcaacagcgcccagcccacagccccagccaccctgcccttcaccccagcctag

SEQ ID NO: 73729 - DNA, 1569 bp, Artificial Sequence
  derived and/or modified sequence
atgagcggcttcaactttggaggcactggagcccccactggaggcttcaccttcggcacagccaagacagccaccaccaccccagccaccggcttctccttcagcaccagcggcactggaggcttcaactttggagcccccttccagcctgccaccagcacccccagcacaggcctcttcagcctggccacccagaccccagccacccagaccaccggcttcaccttcggcacagccaccctggccagcggcggcaccggcttcagcctgggcatcggggccagcaagctgaacctgagcaacacagctgccaccccagccatggccaaccccagcggcttcggcctgggcagcagcaacctgaccaatgccatcagcagcacagtgaccagcagccagggcacagcccccaccggctttgtgtttggccccagcaccacctctgtggccccagccaccaccagcggcggcttctccttcaccggcggcagcacagcccagcccagcggcttcaacatcggcagcgctggcaacagcgcccagcccacagccccagccaccctgcccttcaccccagccaccccagctgccaccacagctggggccacccagcctgctgcccccacccccacagccaccatcaccagcacaggccccagcctgtttgccagcatcgccacagcccccaccagcagcgccaccaccggcctgagcctgtgcacccctgtgaccacagctggggcccccacagctggcacccagggcttcagcctgaaggcccctggagctgccagcggcaccagcaccaccaccagcacagctgccacagccacagccaccaccaccagcagcagcagcaccaccggctttgccctgaacctgaagcccctggccccagctggcatccccagcaacacagctgctgctgtgacagcccctcctggccctggagctgctgctggagctgctgccagcagcgccatgacctacgcccagctggagagcctcatcaacaagtggagcctggagctggaggaccaggagcggcacttcctgcagcaggccacccaggtgaatgcctgggacaggaccctgattgaaaatggagagaagatcaccagcctgcaccgggaggtggagaaggtgaagctggaccagaagaggctggaccaggagctggacttcatcctgagccagcagaaggagctggaggacctgctgagccccctggaggagctggtgaaggagcagagcggcaccatctacctgcagcacgcagatgaggagcgggagaagacctacaagctggccgagaacattgatgcccagctgaagaggatggcccaggacctgaaggacatcatcgagcacctgaacaccagcggggccccagctgacaccagtgaccccctgcagcagatctgcaagatcctgaatgcccacatggacagcctgcagtggattgaccagaacagcgccctgctgcagaggaaggtggaggaggtgaccaaggtgtgtgagggccgcaggaaggagcaggagaggagcttccgcatcacctttgattag

SEQ ID NO: 73730 - DNA, 582 bp, Artificial Sequence
  derived and/or modified sequence
atgagcggcttcaacttcggcggcaccggcgcccccaccggcggctttaccttcgggactgctaaaacagccacaacaacacccgctaccggcttcagcttcagtacttccggaaccggcggtttcaattttggggcaccattccagccagctacaagcacaccatctaccggcctgttttctctggccactcagacaccagcaacccaaactacggggtttacctttggcacagcaaccctggctagtgggggaaccggtttcagcctcgggatcggagccagcaagctgaacctctccaacacagctgctacccccgccatggccaatccctccggattcggcctcggtagctctaacctgaccaatgcaataagcagcacggtcacctccagccaagggaccgctcccaccggattcgtcttcggacctagcaccacatctgtggcgcctgctaccacttccggtggctttagcttcacaggcggcagtaccgcacagccaagtggctttaacattggcagcgcaggaaactcagcgcagcccacggcgccggccacactcccctttacccccgcctag

SEQ ID NO: 73731 - DNA, 1569 bp, Artificial Sequence
  derived and/or modified sequence
atgagcggcttcaacttcggcggcaccggcgcccccaccggcggcttcacattcggcaccgccaagaccgctaccactacgcctgccactggctttagcttctccacaagcggcacagggggatttaattttggcgcacccttccagccggcgacatcaacaccctccaccgggttgttctcccttgctacgcaaactcccgctacgcagacaaccggcttcacctttggcaccgcaactctagcctccggggggaccgggttttcactgggaatcggtgcgagcaagcttaatctctctaatacagcggccacaccagccatggccaacccgtctggctttggccttggctcatccaatctgaccaacgccattagcagtacagtcaccagctcccaggggaccgctcctacggggtttgtgtttggcccatctactacctcggttgccccggccaccacatcagggggcttctcattcactggcggatcaacagcccagccgagcggtttcaacattgggtccgccggcaattctgctcagcccaccgcgccagccacactgccatttacacccgccacccccgctgcgacaacagctggcgctactcagccagcagcaccaacacccacggcaaccataacctcaaccggcccgtctctgtttgcctcgatcgccaccgcgcctacatccagcgcaacaaccggtctctcactgtgtacgcctgtgaccactgcgggcgcacccacagcaggtacccagggttttagcctgaaggcccctggtgcagcaagcggcacaagcacaacaaccagtacagccgcaacggcgaccgccactacaaccagttcaagttctactaccggctttgcacttaaccttaaacctcttgcaccagcgggaatcccatctaacactgcggcagctgttactgcacctccaggtcccggagccgctgcgggcgccgcagcgtcctcagctatgacatacgctcagcttgagtcactgattaataagtggagcctggaacttgaagatcaggagcggcacttcttacagcaggccacccaggtgaatgcctgggatcgcacattgatagagaacggggagaagattacatcactgcaccgcgaagtggagaaggtgaagctcgaccagaaacggttggaccaggagcttgattttattcttagtcagcaaaaggagctcgaggatctcctctcaccactggaggagctcgtgaaagaacagtccggaacaatctatttgcagcacgcagacgaggaacgggaaaaaacgtacaagctggctgagaatatagacgcccagctgaaacgcatggctcaagacctgaaggacatcatcgagcacctgaacacctcgggggcgcccgcagacacctccgaccccttgcagcagatttgcaagatccttaacgcccacatggatagcttacagtggatagatcagaactccgcattactccagcgcaaggtcgaagaggtaacaaaggtgtgtgaagggcgacggaaggagcaggagagatcattccgaatcacctttgattag

SEQ ID NO: 73732 - DNA, 1569 bp, Artificial Sequence
  derived and/or modified sequence
atgagcggcttcaacttcggcggcaccggcgcccccaccggcggcttcaccttcgggaccgctaaaactgcaactactacaccagctacaggtttcagctttagcacgtccggcactggcggattcaacttcggcgcaccgttccagcccgccacctccactcccagtactggtttgttttccttggccactcagacacccgcgactcagacaaccggctttaccttcggaaccgccacactcgctagcggcgggacaggcttcagtctcggaatcggcgccagcaaactcaatttgagcaacacagctgctacacctgccatggcgaacccatctggatttggcctgggcagcagcaatctcaccaatgctatatccagcacagtgacatcaagccagggcactgctccgactggattcgtctttggacccagcacaacatcagtggcaccagccaccacaagtggtggtttctctttcaccggtgggagcaccgcccagccaagcggatttaacattggctcggcaggtaattccgcccagcccacggcaccagcgactctcccattcaccccggcaacccccgcagcgaccactgctggagcaactcagcctgccgccccaactcccactgcaaccattacgtctactgggccctcactgttcgcatccatcgccaccgccccaacaagttctgcaacgacagggttgtccttatgcacacccgttacaactgccggcgccccaacggccgggacacaggggttttcactgaaagcgccaggagcagccagcggtacctcaacaactactagcacagcagcgactgcaaccgcgaccacaaccagcagctcgtcaactaccggctttgctctcaacctcaagccactagcgccagcaggtatcccatccaataccgcagccgcagtgactgctccccccggaccaggtgccgctgcaggggctgcagccagcagtgccatgacttatgcccagctggagtctctcatcaacaagtggtccctggagttggaagaccaggagcggcactttctgcagcaggcaacccaggtgaacgcttgggatcgaacgctcattgagaatggtgaaaagataacctccctccacagagaggttgagaaggttaaattagatcagaagaggttagatcaagaactcgattttatactgagccagcagaaggagctggaagatctgctgtctcctttggaggagctggtgaaagaacagagcggcacaatctacctgcagcatgcagatgaggagagagaaaagacttataaattggcagagaacatcgacgcacaactgaagcgtatggcacaggacctgaaagacatcatagaacacctcaacacctcaggtgcccccgcagatactagtgaccctctgcaacagatctgcaaaattctcaacgctcacatggacagtctacagtggatcgaccaaaatagtgccctactacagcggaaggtggaagaagtcactaaagtttgcgaggggaggagaaaagaacaggaacgttcatttcgaatcacattcgattag

SEQ ID NO: 73733 - DNA, 1569 bp, Artificial Sequence
  derived and/or modified sequence
atgagcggcttcaacttcggcggcaccggcgcccccaccggcggctttacctttggcacggctaaaacagcaacaacgacaccagcgaccgggttttcattctccaccagtggaacaggcggcttcaatttcggagccccctttcagcccgcgacatcaactcctagcaccgggttattttcattggcaacccagacccccgcaacacagactaccggtttcacctttggcaccgccacattggcctccgggggtactggcttctcattagggataggcgcctcaaagttaaatcttagtaacaccgccgccacgcccgccatggcaaacccatcaggatttggactgggttccagtaatctgactaacgcgatcagctcaaccgtcacaagctcccaggggacagctccgacaggttttgtcttcggtccgtcaacaaccagcgtggctccagccactaccagtggtgggttttcttttaccgggggcagtactgctcagcccagcggcttcaatataggctcagcaggaaatagtgcccagccaacagctccagctaccctcccctttaccccggccaccccggcagctaccacagcaggcgccactcaacctgccgcccccacccccacagccacgattacatcaactggacctagcctgtttgcgagtattgctactgcgcccaccagcagtgcaactactggcctgtcactgtgtaccccagttacaacagctggagctcctacggctggtacacagggcttttccttaaaagcacccggcgccgcttccgggacatccacgactacaagtacagccgctaccgcaactgccaccaccacatctagttctagtacaacaggttttgctcttaacctcaaacctttagcccctgccggtatcccatcaaatactgcagctgccgtgaccgcccctccggggcccggagccgcggcaggtgccgccgcaagtagcgctatgacatacgcccaactggaaagtctcatcaacaagtggagtctcgagctggaagatcaggagcgacattttctccagcaggccacacaggtaaacgcatgggaccggacactgattgaaaacggcgaaaagatcacctcattgcacagagaggtggaaaaagtaaaattggatcagaagagacttgaccaggaactcgactttatcttatcgcagcagaaggaactggaggatttactgagcccattggaggaactagtaaaggaacagagtggtacaatttatctccagcacgccgacgaggagagagagaagacttataaattagcggagaatattgacgcacagttaaagagaatggctcaggacctaaaagacattattgaacaccttaacacctcaggtgctccagccgatacctccgacccccttcagcaaatttgtaagattctgaacgcacatatggactccttgcagtggatcgaccagaattcagcactgctccagaggaaggttgaggaggtgactaaagtgtgtgaggggcgccggaaagaacaggaaaggtcattccgaatcacattcgattag

SEQ ID NO: 73734 - DNA, 1961 bp, Artificial Sequence
  derived and/or modified sequence
cgctcccggcctcagcatattttattaataggaactctggggcccagtctcatttcttccttaccacttgtaagagccgcagacgttggactgtccaacacctgctgtcattcttctgtctccctcatccctctaaagtgtctgtttccagctatcctcatcttccattccaaatgatgggtgcccaggccccatcccctggcagggattcagacatcgaggccccagctgcgtccttttctccatcccttgcccttggcttcctttcaaaccgtccttcagcttccactggataggaactatctcccaaccctgccaaaaatggaagatctccgttttcgtttagtcacagggtagccatcttgccccttctcatgcactgggccctcctccaccagccgaggtggatgtccgtcttttctctgttgcagaaacccaccttgtcccatccacatcaggacatcccagctggagttcaaccttcatcccttctgtggcagttaggagactgaatcaaggtccagagaaggtggaggaatcctgatactgagcgaaatcttcccaaggctgcagacaccgacggatttgctttgggagccagagtagctgccgccaccagagtccggagccatgagcgggtttaattttggaggcactggggcccctacaggcgggttcacgtttggcactgcaaagacggcaacaaccacacctgctacagggttttctttctccacctctggcactggagggtttaattttggggctcccttccaaccagccacaagtaccccttccaccggcctgttctcacttgccacccagactccggccacacagacgacaggcttcacttttggaacagcgactcttgcttcggggggaactggattttctttggggatcggtgcttcaaagctcaacttgagcaacacagctgccaccccagccatggcaaaccccagcggctttgggctgggcagcagcaacctcactaatgccatatcgagcaccgtcacctccagccagggcacagcacccaccggctttgtgtttggcccctccaccacctctgtggctccagctaccacatctggaggcttctcattcactggtggaagcacggcccaaccctccggtttcaacattggctcagcagggaattcagcccagcccacggcacctgccacgttgcccttcactccagcctaggcaacagagactctgtctcaaaaaaaaaaaaaaaaaaaaagaaactcccaggagacagcagcctagttttcgagtgtgagcttgtgcttgtgaaagctaaccatgctaaccaccaaggcaaagcagcacagtgtgaatagaacagagcgggatcaagaatttcacagaagacaggtcagctgaggggcctgcacacacagggtgttgaggaaccacagatgggcgccgagaggcctgccttttgcctggcccaggctcacccccaccttgggcctcacctcctccaggaagccttcccagctacccgaagctcaggtggccttcttgcaggtccccgtagcaccctgagcctgtaccttgggtggcacttgttatgctatcctgtgctagccgtttgtgcctcgtctcgctgttagattgtgagttcccatgggcagagacccactgtcgttccccgtgtgtccccagcccggtccctgtcacatttgttaaatgaaagaacaatgaagcccagtgtaacgtcagtccacagaaatagccacagcttccagtggtggccgtagacttggctcggaacttagtggcaccagagtaactctagtcagttacagtaaaatccactgtgtgtggaaggcagaagctagcggttgtatcccaagcatcttttgtatttgtctttatactttgctgaattctctgaaatacctattactgtatgttgcttttctaaataaatgtattgtgaaacc

SEQ ID NO: 73735 - DNA, 3415 bp, Artificial Sequence
  derived and/or modified sequence
actacttctgcgcctgcgcgaccgtgattccccgctcgcgactccccaccccccagggctccctaaagagggccacgagctgcgaaagggcgggaaaggcagttggagaagaggtaagcggttactcactccatggctgcagcaaggagaggcggcggcggcctcggctgaagaaagaaggtgggagcggagagcgcaggcgtgccgaggtggatgtccgtcttttctctgttgcagaaacccaccttgtcccatccacatcaggacatcccagctggagttcaaccttcatcccttctgtggcagttaggagactgaatcaaggtccagagaaggtggaggaatcctgatactgagcgaaatcttcccaaggctgcagacaccgacggatttgctttgggagccagagtagctgccgccaccagagtccggagccatgagcgggtttaattttggaggcactggggcccctacaggcgggttcacgtttggcactgcaaagacggcaacaaccacacctgctacagggttttctttctccacctctggcactggagggtttaattttggggctcccttccaaccagccacaagtaccccttccaccggcctgttctcacttgccacccagactccggccacacagacgacaggcttcacttttggaacagcgactcttgcttcggggggaactggattttctttggggatcggtgcttcaaagctcaacttgagcaacacagctgccaccccagccatggcaaaccccagcggctttgggctgggcagcagcaacctcactaatgccatatcgagcaccgtcacctccagccagggcacagcacccaccggctttgtgtttggcccctccaccacctctgtggctccagctaccacatctggaggcttctcattcactggtggaagcacggcccaaccctccggtttcaacattggctcagcagggaattcagcccagcccacggcacctgccacgttgcccttcactccggccacgccagcagccaccacagcaggtgccacacagccagctgctcccacacccacagccaccatcaccagcactgggcccagcctctttgcgtcaatagcaactgctccaacctcatctgccaccactggactctccctctgtacccctgtgaccacagcgggcgcccccactgctgggacacagggcttcagcttaaaggcacctggagcagcttccggcacctccacaacaacatccaccgctgccaccgccaccgccaccaccaccagcagcagcagcaccaccggctttgccttgaatttaaaaccactggcgccagccgggatccccagcaatacagcagctgccgtgaccgctccacctggccctggcgcagctgcaggggcggctgccagctccgccatgacctacgcgcagctggagagcctgatcaacaaatggagcctggagctagaggaccaggagcggcacttcctccagcaggccacccaggtcaacgcctgggaccgcacgctgatcgagaatggagaaaagatcaccagcctgcaccgcgaggtggagaaggtgaagctggaccagaagaggctggaccaggagctcgacttcatcctgtcccagcagaaggagctggaagacctgctgagcccactggaggagttggtcaaggagcagagcgggaccatctacctgcagcacgcggatgaggagcgtgagaaaacctacaagctggctgagaacatcgatgcacagctcaagcgcatggcccaggatctcaaggacatcatcgagcacctgaacacgtccggggcccccgccgacaccagtgacccactgcagcagatctgcaagatcctcaatgcgcacatggactcactgcagtggatcgaccagaactcggccctgctgcagaggaaggtggaggaggtgaccaaggtgtgcgagggccggcgcaaggagcaggagcgcagcttccggatcacctttgactgagcgacagcagccctggggcccgcaggtccctagggagttcatgaggggaatgcgccctgttgtctgtagtttggggttgtggcaagatacttgtttgtttgtttctttctttcacatgactgcccttgacatgatcgctgtgtgctttgcgtttttccatttaggagggtattctgggccttctgcccaggcagcagcctcatgggtgtggcttctgtggctttcatttgagtatctttggccccttttcacctactgcgaccacccacctcatcctggctcagcctggtgatggagaagtgctgatggtcttggtcccagccagggtcgtgggggcagccactctctccaaagcatagtcataggtgtcatgaaaaaataccaaatgtaagagaacctccaagtcagggcgcagtggctcacccctgtaatctcagcactttgggtggccaaggcgggcagatgacttgaggtcaggagttcgagaccagcctggccaacatggtgaaaccccgtctctactaaaaatacaaaaattagtcaggtgtggtggacgcctgtgatctcaatctcagctactcgggaggctgaggcaggagaatcacttgaacccaggaggtgttgcagtgaaccaagatcacaccactgcactccagcctaggcaacagagactctgtctcaaaaaaaaaaaaaaaaaaaaagaaactcccaggagacagcagcctagttttcgagtgtgagcttgtgcttgtgaaagctaaccatgctaaccaccaaggcaaagcagcacagtgtgaatagaacagagcgggatcaagaatttcacagaagacaggtcagctgaggggcctgcacacacagggtgttgaggaaccacagatgggcgccgagaggcctgccttttgcctggcccaggctcacccccaccttgggcctcacctcctccaggaagccttcccagctacccgaagctcaggtggccttcttgcaggtccccgtagcaccctgagcctgtaccttgggtggcacttgttatgctatcctgtgctagccgtttgtgcctcgtctcgctgttagattgtgagttcccatgggcagagacccactgtcgttccccgtgtgtccccagcccggtccctgtcacatttgttaaatgaaagaacaatgaagcccagtgtaacgtcagtccacagaaatagccacagcttccagtggtggccgtagacttggctcggaacttagtggcaccagagtaactctagtcagttacagtaaaatccactgtgtgtggaaggcagaagctagcggttgtatcccaagcatcttttgtatttgtctttatactttgctgaattctctgaaatacctattactgtatgttgcttttctaaataaatgtattgtgaaacc

SEQ ID NO: 73736 - DNA, 3236 bp, Artificial Sequence
  derived and/or modified sequence
actacttctgcgcctgcgcgaccgtgattccccgctcgcgactccccaccccccagggctccctaaagagggccacgagctgcgaaagggcgggaaaggcagttggagaagaggtaagcggttactcactccatggctgcagcaaggagaggcggcggcggcctcggctgaagaaagaagaaatcttcccaaggctgcagacaccgacggatttgctttgggagccagagtagctgccgccaccagagtccggagccatgagcgggtttaattttggaggcactggggcccctacaggcgggttcacgtttggcactgcaaagacggcaacaaccacacctgctacagggttttctttctccacctctggcactggagggtttaattttggggctcccttccaaccagccacaagtaccccttccaccggcctgttctcacttgccacccagactccggccacacagacgacaggcttcacttttggaacagcgactcttgcttcggggggaactggattttctttggggatcggtgcttcaaagctcaacttgagcaacacagctgccaccccagccatggcaaaccccagcggctttgggctgggcagcagcaacctcactaatgccatatcgagcaccgtcacctccagccagggcacagcacccaccggctttgtgtttggcccctccaccacctctgtggctccagctaccacatctggaggcttctcattcactggtggaagcacggcccaaccctccggtttcaacattggctcagcagggaattcagcccagcccacggcacctgccacgttgcccttcactccggccacgccagcagccaccacagcaggtgccacacagccagctgctcccacacccacagccaccatcaccagcactgggcccagcctctttgcgtcaatagcaactgctccaacctcatctgccaccactggactctccctctgtacccctgtgaccacagcgggcgcccccactgctgggacacagggcttcagcttaaaggcacctggagcagcttccggcacctccacaacaacatccaccgctgccaccgccaccgccaccaccaccagcagcagcagcaccaccggctttgccttgaatttaaaaccactggcgccagccgggatccccagcaatacagcagctgccgtgaccgctccacctggccctggcgcagctgcaggggcggctgccagctccgccatgacctacgcgcagctggagagcctgatcaacaaatggagcctggagctagaggaccaggagcggcacttcctccagcaggccacccaggtcaacgcctgggaccgcacgctgatcgagaatggagaaaagatcaccagcctgcaccgcgaggtggagaaggtgaagctggaccagaagaggctggaccaggagctcgacttcatcctgtcccagcagaaggagctggaagacctgctgagcccactggaggagttggtcaaggagcagagcgggaccatctacctgcagcacgcggatgaggagcgtgagaaaacctacaagctggctgagaacatcgatgcacagctcaagcgcatggcccaggatctcaaggacatcatcgagcacctgaacacgtccggggcccccgccgacaccagtgacccactgcagcagatctgcaagatcctcaatgcgcacatggactcactgcagtggatcgaccagaactcggccctgctgcagaggaaggtggaggaggtgaccaaggtgtgcgagggccggcgcaaggagcaggagcgcagcttccggatcacctttgactgagcgacagcagccctggggcccgcaggtccctagggagttcatgaggggaatgcgccctgttgtctgtagtttggggttgtggcaagatacttgtttgtttgtttctttctttcacatgactgcccttgacatgatcgctgtgtgctttgcgtttttccatttaggagggtattctgggccttctgcccaggcagcagcctcatgggtgtggcttctgtggctttcatttgagtatctttggccccttttcacctactgcgaccacccacctcatcctggctcagcctggtgatggagaagtgctgatggtcttggtcccagccagggtcgtgggggcagccactctctccaaagcatagtcataggtgtcatgaaaaaataccaaatgtaagagaacctccaagtcagggcgcagtggctcacccctgtaatctcagcactttgggtggccaaggcgggcagatgacttgaggtcaggagttcgagaccagcctggccaacatggtgaaaccccgtctctactaaaaatacaaaaattagtcaggtgtggtggacgcctgtgatctcaatctcagctactcgggaggctgaggcaggagaatcacttgaacccaggaggtgttgcagtgaaccaagatcacaccactgcactccagcctaggcaacagagactctgtctcaaaaaaaaaaaaaaaaaaaaagaaactcccaggagacagcagcctagttttcgagtgtgagcttgtgcttgtgaaagctaaccatgctaaccaccaaggcaaagcagcacagtgtgaatagaacagagcgggatcaagaatttcacagaagacaggtcagctgaggggcctgcacacacagggtgttgaggaaccacagatgggcgccgagaggcctgccttttgcctggcccaggctcacccccaccttgggcctcacctcctccaggaagccttcccagctacccgaagctcaggtggccttcttgcaggtccccgtagcaccctgagcctgtaccttgggtggcacttgttatgctatcctgtgctagccgtttgtgcctcgtctcgctgttagattgtgagttcccatgggcagagacccactgtcgttccccgtgtgtccccagcccggtccctgtcacatttgttaaatgaaagaacaatgaagcccagtgtaacgtcagtccacagaaatagccacagcttccagtggtggccgtagacttggctcggaacttagtggcaccagagtaactctagtcagttacagtaaaatccactgtgtgtggaaggcagaagctagcggttgtatcccaagcatcttttgtatttgtctttatactttgctgaattctctgaaatacctattactgtatgttgcttttctaaataaatgtattgtgaaacc

SEQ ID NO: 73737 - DNA, 3260 bp, Artificial Sequence
  derived and/or modified sequence
actacttctgcgcctgcgcgaccgtgattccccgctcgcgactccccaccccccagggctccctaaagagggccacgagctgcgaaagggcgggaaaggcagttggagaagaggtaagcggttactcactccatggctgcagcaaggagaggcggcggcggcctcggctgaagaaagaaggtgggagcggagagcgcaggcgtgaaatcttcccaaggctgcagacaccgacggatttgctttgggagccagagtagctgccgccaccagagtccggagccatgagcgggtttaattttggaggcactggggcccctacaggcgggttcacgtttggcactgcaaagacggcaacaaccacacctgctacagggttttctttctccacctctggcactggagggtttaattttggggctcccttccaaccagccacaagtaccccttccaccggcctgttctcacttgccacccagactccggccacacagacgacaggcttcacttttggaacagcgactcttgcttcggggggaactggattttctttggggatcggtgcttcaaagctcaacttgagcaacacagctgccaccccagccatggcaaaccccagcggctttgggctgggcagcagcaacctcactaatgccatatcgagcaccgtcacctccagccagggcacagcacccaccggctttgtgtttggcccctccaccacctctgtggctccagctaccacatctggaggcttctcattcactggtggaagcacggcccaaccctccggtttcaacattggctcagcagggaattcagcccagcccacggcacctgccacgttgcccttcactccggccacgccagcagccaccacagcaggtgccacacagccagctgctcccacacccacagccaccatcaccagcactgggcccagcctctttgcgtcaatagcaactgctccaacctcatctgccaccactggactctccctctgtacccctgtgaccacagcgggcgcccccactgctgggacacagggcttcagcttaaaggcacctggagcagcttccggcacctccacaacaacatccaccgctgccaccgccaccgccaccaccaccagcagcagcagcaccaccggctttgccttgaatttaaaaccactggcgccagccgggatccccagcaatacagcagctgccgtgaccgctccacctggccctggcgcagctgcaggggcggctgccagctccgccatgacctacgcgcagctggagagcctgatcaacaaatggagcctggagctagaggaccaggagcggcacttcctccagcaggccacccaggtcaacgcctgggaccgcacgctgatcgagaatggagaaaagatcaccagcctgcaccgcgaggtggagaaggtgaagctggaccagaagaggctggaccaggagctcgacttcatcctgtcccagcagaaggagctggaagacctgctgagcccactggaggagttggtcaaggagcagagcgggaccatctacctgcagcacgcggatgaggagcgtgagaaaacctacaagctggctgagaacatcgatgcacagctcaagcgcatggcccaggatctcaaggacatcatcgagcacctgaacacgtccggggcccccgccgacaccagtgacccactgcagcagatctgcaagatcctcaatgcgcacatggactcactgcagtggatcgaccagaactcggccctgctgcagaggaaggtggaggaggtgaccaaggtgtgcgagggccggcgcaaggagcaggagcgcagcttccggatcacctttgactgagcgacagcagccctggggcccgcaggtccctagggagttcatgaggggaatgcgccctgttgtctgtagtttggggttgtggcaagatacttgtttgtttgtttctttctttcacatgactgcccttgacatgatcgctgtgtgctttgcgtttttccatttaggagggtattctgggccttctgcccaggcagcagcctcatgggtgtggcttctgtggctttcatttgagtatctttggccccttttcacctactgcgaccacccacctcatcctggctcagcctggtgatggagaagtgctgatggtcttggtcccagccagggtcgtgggggcagccactctctccaaagcatagtcataggtgtcatgaaaaaataccaaatgtaagagaacctccaagtcagggcgcagtggctcacccctgtaatctcagcactttgggtggccaaggcgggcagatgacttgaggtcaggagttcgagaccagcctggccaacatggtgaaaccccgtctctactaaaaatacaaaaattagtcaggtgtggtggacgcctgtgatctcaatctcagctactcgggaggctgaggcaggagaatcacttgaacccaggaggtgttgcagtgaaccaagatcacaccactgcactccagcctaggcaacagagactctgtctcaaaaaaaaaaaaaaaaaaaaagaaactcccaggagacagcagcctagttttcgagtgtgagcttgtgcttgtgaaagctaaccatgctaaccaccaaggcaaagcagcacagtgtgaatagaacagagcgggatcaagaatttcacagaagacaggtcagctgaggggcctgcacacacagggtgttgaggaaccacagatgggcgccgagaggcctgccttttgcctggcccaggctcacccccaccttgggcctcacctcctccaggaagccttcccagctacccgaagctcaggtggccttcttgcaggtccccgtagcaccctgagcctgtaccttgggtggcacttgttatgctatcctgtgctagccgtttgtgcctcgtctcgctgttagattgtgagttcccatgggcagagacccactgtcgttccccgtgtgtccccagcccggtccctgtcacatttgttaaatgaaagaacaatgaagcccagtgtaacgtcagtccacagaaatagccacagcttccagtggtggccgtagacttggctcggaacttagtggcaccagagtaactctagtcagttacagtaaaatccactgtgtgtggaaggcagaagctagcggttgtatcccaagcatcttttgtatttgtctttatactttgctgaattctctgaaatacctattactgtatgttgcttttctaaataaatgtattgtgaaacc

SEQ ID NO: 73738 - DNA, 582 bp, Artificial Sequence
  derived and/or modified sequence
atgagcggtttcaactttggaggtaccggcgcacccactgggggattcaccttcggcacggccaagactgcaacaaccacacccgctactggatttagtttcagtacctcgggcaccggagggtttaatttcggtgccccttttcagccagccacctccacaccttcaacgggccttttttctctggctacccagacccctgccacacaaacaacaggcttcacttttgggactgctacgctcgcctctggagggacaggtttcagcctcggaatcggcgcatctaaacttaatttgtcaaacactgccgcaacaccagccatggcaaacccatctggttttgggctgggcagctccaatctgacgaatgcgattagctccacagttaccagtagccagggcactgcacctaccggctttgtatttggtccttcaacaactagcgtggcacctgcgactacctccgggggattctccttcactgggggatcaactgcccaacccagcggcttcaatatcgggagcgcagggaactcggcgcaacctaccgctcccgcaactttgccgttcactccagcttag

SEQ ID NO: 73739 - DNA, 1569 bp, Artificial Sequence
  derived and/or modified sequence
atgtcgggttttaattttggcggaacaggagctcctacaggtgggttcaccttcggtacagcgaagaccgcgacaactacaccagccacaggctttagtttcagtacttctggtaccggagggtttaatttcggcgctcctttccagcccgcaaccagcacgcctagtactggactattttctctggctacacagacgcctgctactcagaccacaggcttcacatttggcacggcaacacttgcatcagggggtaccggattctcacttggtattggagccagcaaactcaatctctccaacactgccgcaacccctgctatggcaaacccctctggctttggattagggagcagcaacctgaccaacgcgattagtagcaccgtcacttcttctcagggaacagcaccaactgggttcgtgtttggtccgtccacaaccagcgttgctcctgctacaacttccggaggcttctccttcacagggggatcaaccgcacaacctagtgggtttaatattggcagcgcgggaaactctgcccagccaaccgcccctgcaaccctgccatttacccccgcaactcccgcagctaccacagcaggcgctactcaaccagctgcccctaccccaacagctaccatcacttctactggccctagcctgtttgcctccattgctacagctcctacaagtagcgctacaaccgggctatctctgtgcacacccgtgacaaccgcaggagccccaactgctggtacccagggcttttctctgaaggcgcctggggctgctagtggcacttccaccacaactagtaccgctgcaacagccaccgctaccacaacttcatcatcttcaaccacaggcttcgctctgaatttgaaaccactggcccctgccggaattccatccaacacggccgcagctgtcacagcacccccaggccctggcgcagctgccggagcagccgcatctagcgccatgacgtatgcacagttagagtctctcattaacaaatggtctcttgagctggaagatcaagagcggcatttcctgcagcaggccactcaagtcaacgcgtgggacagaacactgatcgaaaacggagagaagatcacttcgctccatcgcgaagtggaaaaggtcaaattggaccagaagagactggatcaggagcttgatttcatcctttctcagcagaaggaactggaagacctcctgtctccccttgaagagctcgtcaaagagcagagcgggacgatatatctgcagcacgctgacgaagaacgcgaaaagacatataagctcgccgaaaacattgacgctcagctgaagcggatggcccaagacttgaaggacattatcgaacacctgaacaccagcggcgctcctgctgacacttctgatcccctccagcagatctgtaagattctgaatgcccatatggactcccttcagtggattgatcagaactctgcgctgctgcagaggaaagtggaggaggtgacaaaagtctgcgaggggagaaggaaagaacaggaacgaagtttccggatcacttttgattag

SEQ ID NO: 73740 - DNA, 1569 bp, Artificial Sequence
  derived and/or modified sequence
atgagcgggtttaacttcggaggcaccggtgctccaacgggcggttttacatttggcaccgccaagacggccaccacaacacctgccactggtttctcatttagcaccagtgggacaggcggattcaatttcggtgctcccttccagcctgccacaagcacaccctccacaggcttattcagcttggctacacagaccccagcaacacagactactggcttcacctttgggactgcaaccctcgcgtcaggcggaactgggttctcactcgggattggagcctccaagttgaacttgagcaataccgccgcaacacccgctatggccaacccgagtggattcggcctggggtccagtaacttaacaaacgcgatctcatcaaccgtaactagttcccaaggaactgccccaactggctttgtgtttgggccttctacaacgtcagtggctcccgcaacaacctcagggggattcagcttcacaggcggaagcaccgcccagccgtcagggttcaatattggatcagctggcaacagcgctcaacccactgccccagctactctaccctttacccccgcaaccccagcagcgaccacggctggggctacccaacctgccgctcctactcctactgcaacgattacaagcactggtccatcgttgtttgcatcaattgctacagctcccactagctcagctaccaccggcctcagcctgtgcacccctgtgaccacggccggtgcccctactgccggtacgcagggcttttccctgaaggcacctggcgctgcatccggtacttcaacaacgacatccacagcagctaccgcaaccgccaccacgacgagtagttcgtccaccaccggttttgccctcaacctaaaaccgctagcccctgccggaatcccttcaaatacggccgcagccgtgacagcccctccaggacctggcgctgccgctggggctgctgcttcctcagcgatgacatatgcccagctggagtcccttataaacaaatggagcctggaactagaggaccaggaaaggcactttctccagcaagcaactcaggtgaacgcatgggatcgaacactgattgaaaacggggagaaaatcacttctctgcaccgagaggtagaaaaggtcaaactagatcaaaaacgtctcgatcaagaactggacttcatactgtctcagcagaaggagctcgaggatctcttgagccctctcgaagagctcgtaaaggagcaaagcggcaccatttatttgcagcatgcagacgaagaaagagagaagacgtacaagctggccgaaaacatcgacgctcagttaaagagaatggcacaggatttaaaggatatcatcgagcatctgaacaccagcggggctccagcagacacatccgaccctttgcagcagatctgcaaaattcttaatgcccacatggattccctccagtggatagaccaaaattctgctctgttgcagcgaaaagtcgaagaggtgacgaaggtctgcgagggaaggcgaaaggagcaggaacgctctttccgaattacttttgactag

SEQ ID NO: 73741 - DNA, 1569 bp, Artificial Sequence
  derived and/or modified sequence
atgtcaggcttcaactttggcggtacgggcgctcctactggcggtttcaccttcggcaccgccaaaacagccaccacgacccctgcaactgggttctcattcagtacatcgggaaccgggggttttaatttcggggcaccttttcagcctgcaacctccacaccatccacgggcctgttctctttagccacacagactcccgctacccagactacgggatttacctttgggaccgcaaccctcgctagcggcggaactggcttttctttaggaattggagccagcaagttaaatctgtccaacactgccgctactcccgctatggcaaatccgtccgggttcggacttggaagttctaatctgacgaacgccatttcctctactgtgactagttcccagggcacagcccctaccggctttgtctttggcccttccacgactagtgtcgctccggctactactagtggcggtttttctttcactggcggatcaaccgcccagccaagtggttttaatatcggctccgccggtaacagtgcgcagcccaccgctcctgccaccttacctttcacccctgccacgcctgctgcaaccactgctggtgccacccagcctgcggcacccaccccaaccgccacaatcacaagtaccggccctagcctctttgccagcatagccactgcaccaaccagctccgctactacaggactgtcgctgtgtacaccagtcacaacagctggtgccccaacagcagggactcaaggatttagcctgaaggctcctggcgcagcctccggcactagcacgacaaccagcacggctgccactgccaccgccacgaccacaagttcctcttctaccacagggttcgcactaaacttaaagccacttgctcctgccggaatcccaagcaacactgccgctgctgtgaccgccccaccgggtcctggcgctgccgcaggcgctgccgctagttcagccatgacctacgcccagttggagtccctgataaacaaatggtcgctggagctggaggaccaggagcggcacttcctgcagcaagcaactcaggttaacgcctgggaccgaactctcattgaaaatggcgagaagattactagtctccacagggaggtcgaaaaagtcaaactggatcagaagaggctggatcaagagctggattttattctgtctcaacagaaggagctggaggaccttctcagccctctcgaggaactggttaaggagcagagcggcacgatttacctgcagcacgccgacgaggagcgcgaaaaaacttataaactcgcggagaacattgacgcacaactcaagcgcatggcccaggatctaaaggacatcattgaacaccttaacacatcaggtgctcctgccgatacgtctgaccccttgcagcaaatctgtaagatccttaatgcgcacatggactccctgcaatggatcgaccagaactctgcgctcttgcagcgcaaggtcgaagaagtgactaaagtgtgcgaagggagacgaaaggagcaggagagaagcttcagaatcacctttgactag

SEQ ID NO: 73742 - DNA, 582 bp, Artificial Sequence
  derived and/or modified sequence
atgagcggcttcaacttcggcggcaccggcgcccccaccggcggcttcaccttcggcaccgccaagaccgccaccaccacccccgccaccggcttcagcttcagcaccagcggcaccggcggcttcaacttcggcgcccccttccagcccgccaccagcacccccagcaccggcctgttcagcctggccacccagacccccgccacccagaccaccggcttcaccttcggcaccgccaccctggccagcggcggcaccggcttcagcctgggcatcggcgccagcaagctgaacctgagcaacaccgccgccacccccgccatggccaaccccagcggcttcggcctgggcagcagcaacctgaccaacgccatcagcagcaccgtgaccagcagccagggcaccgcccccaccggcttcgtgttcggccccagcaccaccagcgtggcccccgccaccaccagcggcggcttcagcttcaccggcggcagcaccgcccagcccagcggcttcaacatcggcagcgccggcaacagcgcccagcccaccgcccccgccaccctgcccttcacccccgcctag

SEQ ID NO: 73743 - DNA, 1569 bp, Artificial Sequence
  derived and/or modified sequence
atgagcggcttcaacttcggcggcaccggcgcccccaccggcggcttcaccttcggcaccgccaagaccgccaccaccacccccgccaccggcttcagcttcagcaccagcggcaccggcggcttcaacttcggcgcccccttccagcccgccaccagcacccccagcaccggcctgttcagcctggccacccagacccccgccacccagaccaccggcttcaccttcggcaccgccaccctggccagcggcggcaccggcttcagcctgggcatcggcgccagcaagctgaacctgagcaacaccgccgccacccccgccatggccaaccccagcggcttcggcctgggcagcagcaacctgaccaacgccatcagcagcaccgtgaccagcagccagggcaccgcccccaccggcttcgtgttcggccccagcaccaccagcgtggcccccgccaccaccagcggcggcttcagcttcaccggcggcagcaccgcccagcccagcggcttcaacatcggcagcgccggcaacagcgcccagcccaccgcccccgccaccctgcccttcacccccgccacccccgccgccaccaccgccggcgccacccagcccgccgcccccacccccaccgccaccatcaccagcaccggccccagcctgttcgccagcatcgccaccgcccccaccagcagcgccaccaccggcctgagcctgtgcacccccgtgaccaccgccggcgcccccaccgccggcacccagggcttcagcctgaaggcccccggcgccgccagcggcaccagcaccaccaccagcaccgccgccaccgccaccgccaccaccaccagcagcagcagcaccaccggcttcgccctgaacctgaagcccctggcccccgccggcatccccagcaacaccgccgccgccgtgaccgccccccccggccccggcgccgccgccggcgccgccgccagcagcgccatgacctacgcccagctggagagcctgatcaacaagtggagcctggagctggaggaccaggagagacacttcctgcagcaggccacccaggtgaacgcctgggacagaaccctgatcgagaacggcgagaagatcaccagcctgcacagagaggtggagaaggtgaagctggaccagaagagactggaccaggagctggacttcatcctgagccagcagaaggagctggaggacctgctgagccccctggaggagctggtgaaggagcagagcggcaccatctacctgcagcacgccgacgaggagagagagaagacctacaagctggccgagaacatcgacgcccagctgaagagaatggcccaggacctgaaggacatcatcgagcacctgaacaccagcggcgcccccgccgacaccagcgaccccctgcagcagatctgcaagatcctgaacgcccacatggacagcctgcagtggatcgaccagaacagcgccctgctgcagagaaaggtggaggaggtgaccaaggtgtgcgagggcagaagaaaggagcaggagagaagcttcagaatcaccttcgactag

SEQ ID NO: 73744 - protein, 271 aa, Artificial Sequence
  derived and/or modified sequence
MSRQNLVALTVTTLLGVAVGGFVLWKGIQRRRRSKTSPVTQQPQQKVLGSRELPPPEDDQLHSSAPRSSWKERILKAKVVTVSQEAEWDQIEPLLRSELEDFPVLGIDCEWVNLEGKASPLSLLQMASPSGLCVLVRLPKLICGGKTLPRTLLDILADGTILKVGVGCSEDASKLLQDYGLVVRGCLDLRYLAMRQRNNLLCNGLSLKSLAETVLNFPLDKSLLLRCSNWDAETLTEDQVIYAARDAQISVALFLHLLGYPFSRNSPGEKR

SEQ ID NO: 73745 - protein, 621 aa, Artificial Sequence
  derived and/or modified sequence
MSRQNLVALTVTTLLGVAVGGFVLWKGIQRRRRSKTSPVTQQPQQKVLGSRELPPPEDDQLHSSAPRSSWKERILKAKVVTVSQEAEWDQIEPLLRSELEDFPVLGIDCEWVNLEGKASPLSLLQMASPSGLCVLVRLPKLICGGKTLPRTLLDILADGTILKVGVGCSEDASKLLQDYGLVVRGCLDLRYLAMRQRNNLLCNGLSLKSLAETVLNFPLDKSLLLRCSNWDAETLTEDQVIYAARDAQISVALFLHLLGYPFSRNSPGEKNDDHSSWRKVLEKCQGVVDIPFRSKGMSRLGEEVNGEATESQQKPRNKKSKMDGMVPGNHQGRDPRKHKRKPLGVGYSARKSPLYDNCFLHAPDGQPLCTCDRRKAQWYLDKGIGELVSEEPFVVKLRFEPAGRPESPGDYYLMVKENLCVVCGKRDSYIRKNVIPHEYRKHFPIEMKDHNSHDVLLLCTSCHAISNYYDNHLKQQLAKEFQAPIGSEEGLRLLEDPERRQVRSGARALLNAESLPTQRKEELLQALREFYNTDVVTEEMLQEAASLETRISNENYVPHGLKVVQCHSQGGLRSLMQLESRWRQHFLDSMQPKHLPQQWSVDHNHQKLLRKFGEDLPIQLS

SEQ ID NO: 73746 - protein, 496 aa, Artificial Sequence
  derived and/or modified sequence
MASPSGLCVLVRLPKLICGGKTLPRTLLDILADGTILKVGVGCSEDASKLLQDYGLVVRGCLDLRYLAMRQRNNLLCNGLSLKSLAETVLNFPLDKSLLLRCSNWDAETLTEDQVIYAARDAQISVALFLHLLGYPFSRNSPGEKNDDHSSWRKVLEKCQGVVDIPFRSKGMSRLGEEVNGEATESQQKPRNKKSKMDGMVPGNHQGRDPRKHKRKPLGVGYSARKSPLYDNCFLHAPDGQPLCTCDRRKAQWYLDKGIGELVSEEPFVVKLRFEPAGRPESPGDYYLMVKENLCVVCGKRDSYIRKNVIPHEYRKHFPIEMKDHNSHDVLLLCTSCHAISNYYDNHLKQQLAKEFQAPIGSEEGLRLLEDPERRQVRSGARALLNAESLPTQRKEELLQALREFYNTDVVTEEMLQEAASLETRISNENYVPHGLKVVQCHSQGGLRSLMQLESRWRQHFLDSMQPKHLPQQWSVDHNHQKLLRKFGEDLPIQLS

SEQ ID NO: 73747 - protein, 114 aa, Artificial Sequence
  derived and/or modified sequence
MASPSGLCVLVRLPKLICGGKTLPRTLLDILADGTILKVGVGCSEDASKLLQDYGLVVRGCLDLRYLAMRQRNNLLCNGLSLKSLAETVLNFPLDKSLLLRCSNWDAETLTEDQ

SEQ ID NO: 73748 - DNA, 816 bp, Artificial Sequence
  derived and/or modified sequence
atgagcagacagaacctggtggccctgaccgtgaccaccctgctgggcgtggccgtgggcggcttcgtgctgtggaagggcatccagagaagaagaagaagcaagaccagccccgtgacccagcagccccagcagaaggtgctgggcagcagagagctgcccccccccgaggacgaccagctgcacagcagcgcccccagaagcagctggaaggagagaatcctgaaggccaaggtggtgaccgtgagccaggaggccgagtgggaccagatcgagcccctgctgagaagcgagctggaggacttccccgtgctgggcatcgactgcgagtgggtgaacctggagggcaaggccagccccctgagcctgctgcagatggccagccccagcggcctgtgcgtgctggtgagactgcccaagctgatctgcggcggcaagaccctgcccagaaccctgctggacatcctggccgacggcaccatcctgaaggtgggcgtgggctgcagcgaggacgccagcaagctgctgcaggactacggcctggtggtgagaggctgcctggacctgagatacctggccatgagacagagaaacaacctgctgtgcaacggcctgagcctgaagagcctggccgagaccgtgctgaacttccccctggacaagagcctgctgctgagatgcagcaactgggacgccgagaccctgaccgaggaccaggtgatctacgccgccagagacgcccagatcagcgtggccctgttcctgcacctgctgggctaccccttcagcagaaacagccccggcgagaagagatag

SEQ ID NO: 73749 - DNA, 1866 bp, Artificial Sequence
  derived and/or modified sequence
atgagcagacagaacctggtggccctgaccgtgaccaccctgctgggcgtggccgtgggcggcttcgtgctgtggaagggcatccagagaagaagaagaagcaagaccagccccgtgacccagcagccccagcagaaggtgctgggcagcagagagctgcccccccccgaggacgaccagctgcacagcagcgcccccagaagcagctggaaggagagaatcctgaaggccaaggtggtgaccgtgagccaggaggccgagtgggaccagatcgagcccctgctgagaagcgagctggaggacttccccgtgctgggcatcgactgcgagtgggtgaacctggagggcaaggccagccccctgagcctgctgcagatggccagccccagcggcctgtgcgtgctggtgagactgcccaagctgatctgcggcggcaagaccctgcccagaaccctgctggacatcctggccgacggcaccatcctgaaggtgggcgtgggctgcagcgaggacgccagcaagctgctgcaggactacggcctggtggtgagaggctgcctggacctgagatacctggccatgagacagagaaacaacctgctgtgcaacggcctgagcctgaagagcctggccgagaccgtgctgaacttccccctggacaagagcctgctgctgagatgcagcaactgggacgccgagaccctgaccgaggaccaggtgatctacgccgccagagacgcccagatcagcgtggccctgttcctgcacctgctgggctaccccttcagcagaaacagccccggcgagaagaacgacgaccacagcagctggagaaaggtgctggagaagtgccagggcgtggtggacatccccttcagaagcaagggcatgagcagactgggcgaggaggtgaacggcgaggccaccgagagccagcagaagcccagaaacaagaagagcaagatggacggcatggtgcccggcaaccaccagggcagagaccccagaaagcacaagagaaagcccctgggcgtgggctacagcgccagaaagagccccctgtacgacaactgcttcctgcacgcccccgacggccagcccctgtgcacctgcgacagaagaaaggcccagtggtacctggacaagggcatcggcgagctggtgagcgaggagcccttcgtggtgaagctgagattcgagcccgccggcagacccgagagccccggcgactactacctgatggtgaaggagaacctgtgcgtggtgtgcggcaagagagacagctacatcagaaagaacgtgatcccccacgagtacagaaagcacttccccatcgagatgaaggaccacaacagccacgacgtgctgctgctgtgcaccagctgccacgccatcagcaactactacgacaaccacctgaagcagcagctggccaaggagttccaggcccccatcggcagcgaggagggcctgagactgctggaggaccccgagagaagacaggtgagaagcggcgccagagccctgctgaacgccgagagcctgcccacccagagaaaggaggagctgctgcaggccctgagagagttctacaacaccgacgtggtgaccgaggagatgctgcaggaggccgccagcctggagaccagaatcagcaacgagaactacgtgccccacggcctgaaggtggtgcagtgccacagccagggcggcctgagaagcctgatgcagctggagagcagatggagacagcacttcctggacagcatgcagcccaagcacctgccccagcagtggagcgtggaccacaaccaccagaagctgctgagaaagttcggcgaggacctgcccatccagctgagctag

SEQ ID NO: 73750 - DNA, 816 bp, Artificial Sequence
  derived and/or modified sequence
atgtccagacagaaccttgtcgcattgaccgtaactactctgcttggtgtagccgtgggtggctttgtactgtggaaaggcatccagcggaggcggcgcagcaagacatcccccgtcacacaacagccgcagcagaaagttctgggtagtagggaattaccgccaccggaagacgaccaattgcacagcagtgctcccaggtcctcctggaaggagaggattctcaaggctaaagtggtcacggtttcccaggaggccgagtgggatcagatcgaaccactcctgcgttcggaattggaggacttccccgtgctcggaatcgattgtgaatgggtgaacttggaagggaaggcatcccccctgagtctgctgcagatggcctccccatcaggcttatgtgtgttggtgcgtcttccaaaactgatctgtggcggaaaaacgctgcccaggaccttacttgatattcttgctgacgggaccattctgaaggttggggtagggtgctctgaagatgcaagcaagcttctccaagattatggattggttgtgcgaggatgcctggatttgaggtaccttgctatgcgtcaacggaataacttgctctgtaacggactgtccctgaagtctcttgccgagactgtgcttaattttcccctggacaagtctctgctactgagatgcagcaattgggatgctgaaaccctgactgaggaccaggtcatatatgctgcacgcgacgcccagatctcggtagctttattcctgcacctgcttggctacccctttagcaggaatagcccgggagaaaagaggtag

SEQ ID NO: 73751 - DNA, 1866 bp, Artificial Sequence
  derived and/or modified sequence
atgtcaagacagaatctcgtggcccttacggtcacaacattgctaggcgtcgctgtcggaggcttcgtactgtggaagggaatccaacggaggaggagatctaaaaccagtcccgtgacacagcagccccaacagaaggtgctggggtcgagagaactgcccccccctgaagatgaccagctgcattcttcggcccctcggtcctcatggaaggagcggatactgaaggccaaagtcgtgactgtcagtcaggaggccgagtgggaccagattgagccattactgagaagtgaactagaagatttcccagtgctgggcatcgactgcgaatgggtcaatctggaggggaaagcatcccctttatcccttctgcaaatggccagcccttctggtctgtgcgtgctggtcagactgccaaagctgatttgtggagggaaaaccctgccacggacactcctggatatactggccgacggaacaattctgaaagtgggggtcggatgttctgaggacgcatccaaactgcttcaggactatggattggtggtacgcggttgcctggatctccgctatctcgcgatgcgacagaggaacaacctcctgtgcaacggcctttctctcaagagcctcgcagagactgtgttaaacttcccacttgacaagagtcttttgttgcgttgttccaactgggatgcggagacactcaccgaggaccaggtcatttacgcagccagagatgcgcagattagcgtggcactcttcctgcatctgctgggatacccctttagtcgcaactcacctggtgagaaaaatgatgatcattcctcttggaggaaggtgctagaaaaatgtcagggggtggttgacatccccttccgcagtaaggggatgagccgactgggcgaagaggtgaacggagaggcaactgaatcgcagcagaaaccacgcaataagaagtccaaaatggatggcatggtacccggaaaccatcagggacgcgatccaaggaagcacaagagaaagccgttgggcgtcggatattcagccagaaagtctcccctgtacgataattgctttctccacgccccagacgggcagcccctctgcacatgtgataggcggaaggcacaatggtacctcgataagggcattggtgaactcgtgagtgaggagccgttcgtggttaagctgcgattcgagcctgccggtaggccagaatcacctggggattactatctgatggtaaaggagaatctgtgtgtcgtatgcggaaagagagacagctatattcgcaagaacgtgataccccatgaatatagaaagcattttcctatagagatgaaagatcataattcgcatgacgtactattattgtgtactagctgccacgcaatttctaactactacgacaatcacttgaaacagcagttggcaaaagaattccaagcccccattggttctgaggaaggactaagactcctagaagatccggaacgccgccaggtgcggtccggtgctagggcgctgctgaacgctgaatccctgccaacgcagcggaaggaagaactgctgcaggctctacgtgaattttataacacagatgtggtgacagaggaaatgcttcaggaggcggccagtctagaaacacgcatttcaaatgaaaactacgttccacacggcctgaaagtggtccaatgccactcccagggtggcctaaggagtctaatgcagctcgaaagccggtggaggcagcattttctggattcaatgcagcctaaacatctgcctcagcaatggtctgtagaccataaccaccagaaactactaagaaagttcggggaggatctccctatccaactttcatag

SEQ ID NO: 73752 - DNA, 1866 bp, Artificial Sequence
  derived and/or modified sequence
atgtcaagacaaaatttagtggctctcacagttactacacttttgggcgtagccgtcggagggttcgttctctggaagggcatacagcggcggaggcggtccaagacaagccctgttacccagcagcctcagcaaaaagtactcgggagcagagaactgccaccgcccgaggacgatcaactacacagtagcgccccccgctcatcctggaaggagcgaatcttgaaggcaaaagttgtaacggtaagccaggaggccgaatgggaccagatcgagcctctactgaggagcgagctggaagatttcccagtgctgggaatcgactgcgaatgggtgaatctggaaggcaaggcgagtccactaagtttgctgcagatggcctcgccctctggactgtgtgtgcttgtgcggctccctaaactgatatgtggcggaaaaaccctccccaggacgctccttgatatactggccgatggcaccattctgaaggtaggcgttgggtgtagcgaagacgccagcaagttgctacaggattacggactggtggtaagagggtgcctggacttgaggtacctggcaatgaggcagagaaataacctgctctgcaatggcctttcattgaagagcctcgctgagaccgtcctcaactttccactggataaaagcctccttctcaggtgctccaactgggatgcagagactctaactgaggaccaagtcatttacgctgctagagacgctcagatctcagtagcacttttcctccacctgctggggtatccattcagtcggaactctccaggcgaaaagaatgatgatcattcctcctggcgtaaggtgctagaaaagtgccagggcgtcgtggacattccattccgcagtaaaggaatgtcccgacttggcgaggaagtaaacggtgaggcaactgaaagtcagcaaaaaccaaggaacaagaagagcaaaatggatggtatggtgcccgggaatcatcagggccgggaccctaggaagcataaaagaaaacctttaggggtgggttattccgcgagaaagtcacctctgtacgataactgttttctgcatgcccctgatgggcagccgctctgtacctgcgataggcggaaagcccagtggtatctggacaaggggatcggcgagctagtgtcagaggaacccttcgtggttaagcttaggttcgagcccgctggacgtcccgagtcccccggagattactatttgatggtgaaagagaatctctgtgtggtgtgcgggaaacgggacagttacattaggaaaaacgtgatcccacacgagtataggaagcacttcccgattgagatgaaggatcacaattcccacgacgttttactgctttgtacctcatgccacgctattagcaattactatgacaatcacttaaagcagcagctggccaaggagtttcaagccccgattgggtcagaggaaggtttacgattgctggaggacccagagcgtcggcaggtgcgcagcggggcccgtgctcttttaaatgcggagagtctgcccacccagaggaaggaagaattactgcaggccctccgggaattttacaatactgacgttgtcaccgaagaaatgcttcaggaagccgcttctttggaaaccaggatctccaacgagaattatgtcccccatgggctgaaagtggtgcaatgtcactcccagggggggcttcggtcgctgatgcagctggagagccgatggaggcaacactttctcgattccatgcagccaaagcacctacctcagcagtggtcagtagatcacaatcatcagaaactgctgcgtaagttcggtgaggacttaccaattcagctgagttag

SEQ ID NO: 73753 - DNA, 3228 bp, Artificial Sequence
  derived and/or modified sequence
gcacaggttccaggtctttaacgtgagcccgctgcaggtgtgcggcccagtccgagacagcagattgtgggattagtgatatgcttttctaaagagtagaaaagtcgaagatgtctagacagaacttagtggctttgacagtgactacccttctgggtgtggctgtaggggggtttgtcctctggaaaggcatccagcgccgccgaaggagtaaaacgagtcctgtgacccaacagccacagcagaaagtgctgggcagtagagagctgccccctccagaagatgatcagctgcactccagtgcccccagatcctcgtggaaggaacggatccttaaagcaaaggtggtgacggtgtctcaggaggcagagtgggatcaaatcgagcccttgcttagaagtgaattagaagattttccagtacttggaattgactgtgagtgggtaaatttggaaggcaaagccagccctctgtcacttctacaaatggcctccccaagtggcctgtgtgtcttggttcgcctgcccaagctaatctgtggaggaaaaacactaccaagaacgttattggatattttggcagatggcaccattttgaaagttggagtgggatgctcagaagatgccagcaagcttctgcaggattatggcctcgttgttagggggtgcctggacctccgatacctagccatgcggcagagaaacaatttgctctgtaatgggcttagcctgaagtccctcgctgagactgttttgaactttccccttgacaagtcccttctacttcgttgcagcaactgggatgctgagactctcacagaggaccaggtaatttatgctgccagggatgcccagatttcagtggctctctttcttcatcttcttggataccctttctctaggaattcacctggagaaaaacgatgaccacagtagctggagaaaagtcttggaaaaatgccagggtgtggtcgacatcccatttcgaagcaaaggaatgagcagattgggagaagaggttaatggggaagcaacagaatctcagcagaagccaagaaataagaagtctaagatggatgggatggtgccaggcaaccaccaagggagagaccccagaaaacataaaagaaagcctctgggggtgggctattctgccagaaaatcacctctttatgataactgctttctccatgctcctgatggacagcccctctgcacttgtgatagaagaaaagctcagtggtacctggacaaaggcattggtgagctggtgagtgaagagccctttgtggtgaagctacggtttgaacctgcaggaaggcccgaatctcctggagactattacttgatggttaaagagaacctgtgtgtagtgtgtggcaagagagactcctacattcggaagaacgtgattccacatgagtaccggaagcacttccccatcgagatgaaggaccacaactcccacgatgtgctgctgctctgcacctcctgccatgccatttccaactactatgacaaccatctgaagcagcagctggccaaggagttccaggcccccatcggctctgaggagggcttgcgcctgctggaagatcctgagcgccggcaggtgcgttctggggccagggccctgctcaacgcggagagcctgcctactcagcgaaaggaggagctgctgcaagcactcagagagttttataacacagacgtggtcacagaggagatgcttcaagaggctgccagcctggagaccagaatctccaatgaaaactatgttcctcacgggctgaaggtggtgcagtgtcacagccagggtggcctgcgctccctcatgcagctggagagccgctggcgtcagcacttcctggactccatgcagcccaagcacctgccccagcagtggtcagtggaccacaaccatcagaagctgctccggaaattcggggaagatcttcccatccagctgtcttgatagctgctttcctcccagttaggacaagtgggaagctggagccaaggttgaagagtcacctcttcccattttagtacatcattaattgtcaaagcctgtgtgacacaactcagaatactaacctagactaatcccaggatgcttctgctggagcaaagatattgtttgaaggagagtttatggttttggattttaaacgggcagggtcttttttcctctcatttttgtggacaagagaggccttcgcctttatttttactctccctcttctgctgtccctgtgcagaggaaaaatgaagaattctcccagaagtgacttgtcaagacttaaaaaaaatgtttttaatgcatttcttccttgtctagtgcctcggtttatctctaacaggggctgtccagtatatcggtcctgttaggaggggagaaaaagttcttccaaaggctggagaagtgaacaaggagtcaaatttattttcccaattcaacttcataattatcatttctttggcttcatgctctcccgtaactcatgtggttgggatccatcccatctgggtcacttcagtctacttcacgtacttgaaaaggctttcctttacacttccaggaccaaacagcaacttcctgccacacacttccaccctatcactgggagaaatccttttctggacatgagcctttgacctgggtggggcagaaagaaccacaaactccatctcccaatagaactttgaaattcactcagcttttcctttcatgctgtttgttgcctgcttgttgcactcctcctgccccagaactgcaagatttttagcttcacccctttctgagagtaatgttatcttttatcagaatcagtatcagttcccctgtattctgtgcttcatcgaatttgcaagactgacctcttttaagcatttaattcactcccagagtcatctggtcaggttgcaatatgaggacttctctgtctcctctgaagcctgggacactgagcttacttaatacattagatgttcaaaagaggagcgttgtttcatctttcaaaatgttaggccattactttgagtataaaatcgacttattaatgattagtaatttttctaaagtattgggaaaactttcttattttataagatcttaacaagcttaaaaaagaattttatgaccagaatccaacaagagctctattttggaattgtgcccaagttggtgatgtttactctaaaattaataataaaactacttgtaagc

SEQ ID NO: 73754 - DNA, 2496 bp, Artificial Sequence
  derived and/or modified sequence
gcggttcagcacccaggtgcgcaaggagggcctcacccctgcccgcggcctcccacgccctccttgggcctctcctttcgacccccttaccctctccctgggagactctaccagaccttcgaggctgcgtgtcccagtcagctaaaaaggaggccccgcccgcggcacctggtagctcctcgggcgctgcgggttcgacgcggcaacagctgctgttttctctcctggattcgtattgtgggattagtgatatgcttttctaaagagtagaaaagtcgaagatgtctagacagaacttagtggctttgacagtgactacccttctgggtgtggctgtaggggggtttgtcctctggaaaggcatccagcgccgccgaaggagtaaaacgagtcctgtgacccaacagccacagcagaaagtgctgggcagtagagagctgccccctccagaagatgatcagctgcactccagtgcccccagatcctcgtggaaggaacggatccttaaagcaaaggtggtgacggtgtctcaggaggcagagtgggatcaaatcgagcccttgcttagaagtgaattagaagattttccagtacttggaattgactgtgagtgggtaaatttggaaggcaaagccagccctctgtcacttctacaaatggcctccccaagtggcctgtgtgtcttggttcgcctgcccaagctaatctgtggaggaaaaacactaccaagaacgttattggatattttggcagatggcaccattttgaaagttggagtgggatgctcagaagatgccagcaagcttctgcaggattatggcctcgttgttagggggtgcctggacctccgatacctagccatgcggcagagaaacaatttgctctgtaatgggcttagcctgaagtccctcgctgagactgttttgaactttccccttgacaagtcccttctacttcgttgcagcaactgggatgctgagactctcacagaggaccaggtaatttatgctgccagggatgcccagatttcagtggctctctttcttcatcttcttggataccctttctctaggaattcacctggagaaaaaaacgatgaccacagtagctggagaaaagtcttggaaaaatgccagggtgtggtcgacatcccatttcgaagcaaaggaatgagcagattgggagaagaggttaatggggaagcaacagaatctcagcagaagccaagaaataagaagtctaagatggatgggatggtgccaggcaaccaccaagggagagaccccagaaaacataaaagaaagcctctgggggtgggctattctgccagaaaatcacctctttatgataactgctttctccatgctcctgatggacagcccctctgcacttgtgatagaagaaaagctcagtggtacctggacaaaggcattggtgagctggtgagtgaagagccctttgtggtgaagctacggtttgaacctgcaggaaggcccgaatctcctggagactattacttgatggttaaagagaacctgtgtgtagtgtgtggcaagagagactcctacattcggaagaacgtgattccacatgagtaccggaagcacttccccatcgagatgaaggaccacaactcccacgatgtgctgctgctctgcacctcctgccatgccatttccaactactatgacaaccatctgaagcagcagctggccaaggagttccaggcccccatcggctctgaggagggcttgcgcctgctggaagatcctgagcgccggcaggtgcgttctggggccagggccctgctcaacgcggagagcctgcctactcagcgaaaggaggagctgctgcaagcactcagagagttttataacacagacgtggtcacagaggagatgcttcaagaggctgccagcctggagaccagaatctccaatgaaaactatgttcctcacgggctgaaggtggtgcagtgtcacagccagggtggcctgcgctccctcatgcagctggagagccgctggcgtcagcacttcctggactccatgcagcccaagcacctgccccagcagtggtcagtggaccacaaccatcagaagctgctccggaaattcggggaagatcttcccatccagctgtcttgatagctgctttcctcccagttaggacaagtgggaagctggagccaaggttgaagagtcacctcttcccattttagtacatcattaattgtcaaagcctgtgtgacacaactcagaatactaacctagactaatcccaggatgcttctgctggagcaaagatattgtttgaaggagagtttatggttttggattttaaacgggcagggtcttttttcctctcatttttgtggacaagagaggccttcgcctttatttttactctccctcttctgctgtccctgtgcagaggaaaaatgaagaattctcccagaagtgacttgtcaagacttaaaaaaaatgtttttaatgc

SEQ ID NO: 73755 - DNA, 3404 bp, Artificial Sequence
  derived and/or modified sequence
acaggttccaggtctttaacgtgagcccgctgcaggtgtgcggcccagtccgagacagcagatgaggagactgtccttcctgtttcgcagatgaggaaactgaggcttagagaagtttggcaaattggctaagttcctacagctaattgtgggattagtgatatgcttttctaaagagtagaaaagtcgaagatgtctagacagaacttagtggctttgacagtgactacccttctgggtgtggctgtaggggggtttgtcctctggaaaggcatccagcgccgccgaaggagtaaaacgagtcctgtgacccaacagccacagcagaaagtgctgggcagtagagagctgccccctccagaagatgatcagctgcactccagtgcccccagatcctcgtggaaggaacggatccttaaagcaaaggtggtgacggtgtctcaggaggcagagtgggatcaaatcgagcccttgcttagaagtgaattagaagattttccagtacttggaattgactgtgagtgggaacgtcatggtacctacctccagtggcttttctaaggattcaaatagatcacccccataaaggattcagcacagtgtgaacatatagtagtaaatttggaaggcaaagccagccctctgtcacttctacaaatggcctccccaagtggcctgtgtgtcttggttcgcctgcccaagctaatctgtggaggaaaaacactaccaagaacgttattggatattttggcagatggcaccattttgaaagttggagtgggatgctcagaagatgccagcaagcttctgcaggattatggcctcgttgttagggggtgcctggacctccgatacctagccatgcggcagagaaacaatttgctctgtaatgggcttagcctgaagtccctcgctgagactgttttgaactttccccttgacaagtcccttctacttcgttgcagcaactgggatgctgagactctcacagaggaccaggtaatttatgctgccagggatgcccagatttcagtggctctctttcttcatcttcttggataccctttctctaggaattcacctggagaaaaaaacgatgaccacagtagctggagaaaagtcttggaaaaatgccagggtgtggtcgacatcccatttcgaagcaaaggaatgagcagattgggagaagaggttaatggggaagcaacagaatctcagcagaagccaagaaataagaagtctaagatggatgggatggtgccaggcaaccaccaagggagagaccccagaaaacataaaagaaagcctctgggggtgggctattctgccagaaaatcacctctttatgataactgctttctccatgctcctgatggacagcccctctgcacttgtgatagaagaaaagctcagtggtacctggacaaaggcattggtgagctggtgagtgaagagccctttgtggtgaagctacggtttgaacctgcaggaaggcccgaatctcctggagactattacttgatggttaaagagaacctgtgtgtagtgtgtggcaagagagactcctacattcggaagaacgtgattccacatgagtaccggaagcacttccccatcgagatgaaggaccacaactcccacgatgtgctgctgctctgcacctcctgccatgccatttccaactactatgacaaccatctgaagcagcagctggccaaggagttccaggcccccatcggctctgaggagggcttgcgcctgctggaagatcctgagcgccggcaggtgcgttctggggccagggccctgctcaacgcggagagcctgcctactcagcgaaaggaggagctgctgcaagcactcagagagttttataacacagacgtggtcacagaggagatgcttcaagaggctgccagcctggagaccagaatctccaatgaaaactatgttcctcacgggctgaaggtggtgcagtgtcacagccagggtggcctgcgctccctcatgcagctggagagccgctggcgtcagcacttcctggactccatgcagcccaagcacctgccccagcagtggtcagtggaccacaaccatcagaagctgctccggaaattcggggaagatcttcccatccagctgtcttgatagctgctttcctcccagttaggacaagtgggaagctggagccaaggttgaagagtcacctcttcccattttagtacatcattaattgtcaaagcctgtgtgacacaactcagaatactaacctagactaatcccaggatgcttctgctggagcaaagatattgtttgaaggagagtttatggttttggattttaaacgggcagggtcttttttcctctcatttttgtggacaagagaggccttcgcctttatttttactctccctcttctgctgtccctgtgcagaggaaaaatgaagaattctcccagaagtgacttgtcaagacttaaaaaaaatgtttttaatgcatttcttccttgtctagtgcctcggtttatctctaacaggggctgtccagtatatcggtcctgttaggaggggagaaaaagttcttccaaaggctggagaagtgaacaaggagtcaaatttattttcccaattcaacttcataattatcatttctttggcttcatgctctcccgtaactcatgtggttgggatccatcccatctgggtcacttcagtctacttcacgtacttgaaaaggctttcctttacacttccaggaccaaacagcaacttcctgccacacacttccaccctatcactgggagaaatccttttctggacatgagcctttgacctgggtggggcagaaagaaccacaaactccatctcccaatagaactttgaaattcactcagcttttcctttcatgctgtttgttgcctgcttgttgcactcctcctgccccagaactgcaagatttttagcttcacccctttctgagagtaatgttatcttttatcagaatcagtatcagttcccctgtattctgtgcttcatcgaatttgcaagactgacctcttttaagcatttaattcactcccagagtcatctggtcaggttgcaatatgaggacttctctgtctcctctgaagcctgggacactgagcttacttaatacattagatgttcaaaagaggagcgttgtttcatctttcaaaatgttaggccattactttgagtataaaatcgacttattaatgattagtaatttttctaaagtattgggaaaactttcttattttataagatcttaacaagcttaaaaaagaattttatgaccagaatccaacaagagctctattttggaattgtgcccaagttggtgatgtttactctaaaattaataataaaactacttgtaagcac

SEQ ID NO: 73756 - DNA, 3252 bp, Artificial Sequence
  derived and/or modified sequence
gggtgcgcgcaggcggccgcacaggttccaggtctttaacgtgagcccgctgcaggtgtgcggcccagtccgagacagcagattgtgggattagtgatatgcttttctaaagagtagaaaagtcgaagatgtctagacagaacttagtggctttgacagtgactacccttctgggtgtggctgtaggggggtttgtcctctggaaaggcatccagcgccgccgaaggagtaaaacgagtcctgtgacccaacagccacagcagaaagtgctgggcagtagagagctgccccctccagaagatgatcagctgcactccagtgcccccagatcctcgtggaaggaacggatccttaaagcaaaggtggtgacggtgtctcaggaggcagagtgggatcaaatcgagcccttgcttagaagtgaattagaagattttccagtacttggaattgactgtgagtgggtaaatttggaaggcaaagccagccctctgtcacttctacaaatggcctccccaagtggcctgtgtgtcttggttcgcctgcccaagctaatctgtggaggaaaaacactaccaagaacgttattggatattttggcagatggcaccattttgaaagttggagtgggatgctcagaagatgccagcaagcttctgcaggattatggcctcgttgttagggggtgcctggacctccgatacctagccatgcggcagagaaacaatttgctctgtaatgggcttagcctgaagtccctcgctgagactgttttgaactttccccttgacaagtcccttctacttcgttgcagcaactgggatgctgagactctcacagaggaccaggtaatttatgctgccagggatgcccagatttcagtggctctctttcttcatcttcttggataccctttctctaggaattcacctggagaaaaaaacgatgaccacagtagctggagaaaagtcttggaaaaatgccagggtgtggtcgacatcccatttcgaagcaaaggaatgagcagattgggagaagaggttaatggggaagcaacagaatctcagcagaagccaagaaataagaagtctaagatggatgggatggtgccaggcaaccaccaagggagagaccccagaaaacataaaagaaagcctctgggggtgggctattctgccagaaaatcacctctttatgataactgctttctccatgctcctgatggacagcccctctgcacttgtgatagaagaaaagctcagtggtacctggacaaaggcattggtgagctggtgagtgaagagccctttgtggtgaagctacggtttgaacctgcaggaaggcccgaatctcctggagactattacttgatggttaaagagaacctgtgtgtagtgtgtggcaagagagactcctacattcggaagaacgtgattccacatgagtaccggaagcacttccccatcgagatgaaggaccacaactcccacgatgtgctgctgctctgcacctcctgccatgccatttccaactactatgacaaccatctgaagcagcagctggccaaggagttccaggcccccatcggctctgaggagggcttgcgcctgctggaagatcctgagcgccggcaggtgcgttctggggccagggccctgctcaacgcggagagcctgcctactcagcgaaaggaggagctgctgcaagcactcagagagttttataacacagacgtggtcacagaggagatgcttcaagaggctgccagcctggagaccagaatctccaatgaaaactatgttcctcacgggctgaaggtggtgcagtgtcacagccagggtggcctgcgctccctcatgcagctggagagccgctggcgtcagcacttcctggactccatgcagcccaagcacctgccccagcagtggtcagtggaccacaaccatcagaagctgctccggaaattcggggaagatcttcccatccagctgtcttgatagctgctttcctcccagttaggacaagtgggaagctggagccaaggttgaagagtcacctcttcccattttagtacatcattaattgtcaaagcctgtgtgacacaactcagaatactaacctagactaatcccaggatgcttctgctggagcaaagatattgtttgaaggagagtttatggttttggattttaaacgggcagggtcttttttcctctcatttttgtggacaagagaggccttcgcctttatttttactctccctcttctgctgtccctgtgcagaggaaaaatgaagaattctcccagaagtgacttgtcaagacttaaaaaaaatgtttttaatgcatttcttccttgtctagtgcctcggtttatctctaacaggggctgtccagtatatcggtcctgttaggaggggagaaaaagttcttccaaaggctggagaagtgaacaaggagtcaaatttattttcccaattcaacttcataattatcatttctttggcttcatgctctcccgtaactcatgtggttgggatccatcccatctgggtcacttcagtctacttcacgtacttgaaaaggctttcctttacacttccaggaccaaacagcaacttcctgccacacacttccaccctatcactgggagaaatccttttctggacatgagcctttgacctgggtggggcagaaagaaccacaaactccatctcccaatagaactttgaaattcactcagcttttcctttcatgctgtttgttgcctgcttgttgcactcctcctgccccagaactgcaagatttttagcttcacccctttctgagagtaatgttatcttttatcagaatcagtatcagttcccctgtattctgtgcttcatcgaatttgcaagactgacctcttttaagcatttaattcactcccagagtcatctggtcaggttgcaatatgaggacttctctgtctcctctgaagcctgggacactgagcttacttaatacattagatgttcaaaagaggagcgttgtttcatctttcaaaatgttaggccattactttgagtataaaatcgacttattaatgattagtaatttttctaaagtattgggaaaactttcttattttataagatcttaacaagcttaaaaaagaattttatgaccagaatccaacaagagctctattttggaattgtgcccaagttggtgatgtttactctaaaattaataataaaactacttgtaagcacaa

SEQ ID NO: 73757 - DNA, 2828 bp, Artificial Sequence
  derived and/or modified sequence
gcccgctgcaggtgtgcggcccagtccgagacagcaggtaaatttggaaggcaaagccagccctctgtcacttctacaaatggcctccccaagtggcctgtgtgtcttggttcgcctgcccaagctaatctgtggaggaaaaacactaccaagaacgttattggatattttggcagatggcaccattttgaaagttggagtgggatgctcagaagatgccagcaagcttctgcaggattatggcctcgttgttagggggtgcctggacctccgatacctagccatgcggcagagaaacaatttgctctgtaatgggcttagcctgaagtccctcgctgagactgttttgaactttccccttgacaagtcccttctacttcgttgcagcaactgggatgctgagactctcacagaggaccaggtaatttatgctgccagggatgcccagatttcagtggctctctttcttcatcttcttggataccctttctctaggaattcacctggagaaaaaaacgatgaccacagtagctggagaaaagtcttggaaaaatgccagggtgtggtcgacatcccatttcgaagcaaaggaatgagcagattgggagaagaggttaatggggaagcaacagaatctcagcagaagccaagaaataagaagtctaagatggatgggatggtgccaggcaaccaccaagggagagaccccagaaaacataaaagaaagcctctgggggtgggctattctgccagaaaatcacctctttatgataactgctttctccatgctcctgatggacagcccctctgcacttgtgatagaagaaaagctcagtggtacctggacaaaggcattggtgagctggtgagtgaagagccctttgtggtgaagctacggtttgaacctgcaggaaggcccgaatctcctggagactattacttgatggttaaagagaacctgtgtgtagtgtgtggcaagagagactcctacattcggaagaacgtgattccacatgagtaccggaagcacttccccatcgagatgaaggaccacaactcccacgatgtgctgctgctctgcacctcctgccatgccatttccaactactatgacaaccatctgaagcagcagctggccaaggagttccaggcccccatcggctctgaggagggcttgcgcctgctggaagatcctgagcgccggcaggtgcgttctggggccagggccctgctcaacgcggagagcctgcctactcagcgaaaggaggagctgctgcaagcactcagagagttttataacacagacgtggtcacagaggagatgcttcaagaggctgccagcctggagaccagaatctccaatgaaaactatgttcctcacgggctgaaggtggtgcagtgtcacagccagggtggcctgcgctccctcatgcagctggagagccgctggcgtcagcacttcctggactccatgcagcccaagcacctgccccagcagtggtcagtggaccacaaccatcagaagctgctccggaaattcggggaagatcttcccatccagctgtcttgatagctgctttcctcccagttaggacaagtgggaagctggagccaaggttgaagagtcacctcttcccattttagtacatcattaattgtcaaagcctgtgtgacacaactcagaatactaacctagactaatcccaggatgcttctgctggagcaaagatattgtttgaaggagagtttatggttttggattttaaacgggcagggtcttttttcctctcatttttgtggacaagagaggccttcgcctttatttttactctccctcttctgctgtccctgtgcagaggaaaaatgaagaattctcccagaagtgacttgtcaagacttaaaaaaaatgtttttaatgcatttcttccttgtctagtgcctcggtttatctctaacaggggctgtccagtatatcggtcctgttaggaggggagaaaaagttcttccaaaggctggagaagtgaacaaggagtcaaatttattttcccaattcaacttcataattatcatttctttggcttcatgctctcccgtaactcatgtggttgggatccatcccatctgggtcacttcagtctacttcacgtacttgaaaaggctttcctttacacttccaggaccaaacagcaacttcctgccacacacttccaccctatcactgggagaaatccttttctggacatgagcctttgacctgggtggggcagaaagaaccacaaactccatctcccaatagaactttgaaattcactcagcttttcctttcatgctgtttgttgcctgcttgttgcactcctcctgccccagaactgcaagatttttagcttcacccctttctgagagtaatgttatcttttatcagaatcagtatcagttcccctgtattctgtgcttcatcgaatttgcaagactgacctcttttaagcatttaattcactcccagagtcatctggtcaggttgcaatatgaggacttctctgtctcctctgaagcctgggacactgagcttacttaatacattagatgttcaaaagaggagcgttgtttcatctttcaaaatgttaggccattactttgagtataaaatcgacttattaatgattagtaatttttctaaagtattgggaaaactttcttattttataagatcttaacaagcttaaaaaagaattttatgaccagaatccaacaagagctctattttggaattgtgcccaagttggtgatgtttactctaaaattaataataaaactacttgtaagcacaa

SEQ ID NO: 73758 - DNA, 2688 bp, Artificial Sequence
  derived and/or modified sequence
ccctcggcgtgaccccctcgcccccgtcgcacacggcggggcggttcagcacccaggtgcgcaaggagggcctcacccctgcccgcggcctcccacgccctccttgggcctctcctttcgacccccttaccctctccctgggagactctaccagaccttcgaggctgcgtgtcccagtcagctaaaaaggaggccccgcccgcggcacctggtagctcctcgggcgctgcgggttcgacgcggcaacagctgctgttttctctcctggattcgtatgaggagactgtccttcctgtttcgcagatgaggaaactgaggcttagagaagtttggcaaattggctaagttcctacagctaattgtgggattagtgatatgcttttctaaagagtagaaaagtcgaagatgtctagacagaacttagtggctttgacagtgactacccttctgggtgtggctgtaggggggtttgtcctctggaaaggcatccagcgccgccgaaggagtaaaacgagtcctgtgacccaacagccacagcagaaagtgctgggcagtagagagctgccccctccagaagatgatcagctgcactccagtgcccccagatcctcgtggaaggaacggatccttaaagcaaaggtggtgacggtgtctcaggaggcagagtgggatcaaatcgagcccttgcttagaagtgaattagaagattttccagtacttggaattgactgtgagtgggtaaatttggaaggcaaagccagccctctgtcacttctacaaatggcctccccaagtggcctgtgtgtcttggttcgcctgcccaagctaatctgtggaggaaaaacactaccaagaacgttattggatattttggcagatggcaccattttgaaagttggagtgggatgctcagaagatgccagcaagcttctgcaggattatggcctcgttgttagggggtgcctggacctccgatacctagccatgcggcagagaaacaatttgctctgtaatgggcttagcctgaagtccctcgctgagactgttttgaactttccccttgacaagtcccttctacttcgttgcagcaactgggatgctgagactctcacagaggaccaggtaatttatgctgccagggatgcccagatttcagtggctctctttcttcatcttcttggataccctttctctaggaattcacctggagaaaaaaacgatgaccacagtagctggagaaaagtcttggaaaaatgccagggtgtggtcgacatcccatttcgaagcaaaggaatgagcagattgggagaagaggttaatggggaagcaacagaatctcagcagaagccaagaaataagaagtctaagatggatgggatggtgccaggcaaccaccaagggagagaccccagaaaacataaaagaaagcctctgggggtgggctattctgccagaaaatcacctctttatgataactgctttctccatgctcctgatggacagcccctctgcacttgtgatagaagaaaagctcagtggtacctggacaaaggcattggtgagctggtgagtgaagagccctttgtggtgaagctacggtttgaacctgcaggaaggcccgaatctcctggagactattacttgatggttaaagagaacctgtgtgtagtgtgtggcaagagagactcctacattcggaagaacgtgattccacatgagtaccggaagcacttccccatcgagatgaaggaccacaactcccacgatgtgctgctgctctgcacctcctgccatgccatttccaactactatgacaaccatctgaagcagcagctggccaaggagttccaggcccccatcggctctgaggagggcttgcgcctgctggaagatcctgagcgccggcaggtgcgttctggggccagggccctgctcaacgcggagagcctgcctactcagcgaaaggaggagctgctgcaagcactcagagagttttataacacagacgtggtcacagaggagatgcttcaagaggctgccagcctggagaccagaatctccaatgaaaactatgttcctcacgggctgaaggtggtgcagtgtcacagccagggtggcctgcgctccctcatgcagctggagagccgctggcgtcagcacttcctggactccatgcagcccaagcacctgccccagcagtggtcagtggaccacaaccatcagaagctgctccggaaattcggggaagatcttcccatccagctgtcttgatagctgctttcctcccagttaggacaagtgggaagctggagccaaggttgaagagtcacctcttcccattttagtacatcattaattgtcaaagcctgtgtgacacaactcagaatactaacctagactaatcccaggatgcttctgctggagcaaagatattgtttgaaggagagtttatggttttggattttaaacgggcagggtcttttttcctctcatttttgtggacaagagaggccttcgcctttatttttactctccctcttctgctgtccctgtgcagaggaaaaatgaagaattctcccagaagtgacttgtcaagacttaaaaaaaatgtttttaatgcatttcttccttgtctagtgcctcggtttatctctaacaggggctgtccagtatatcggtcctgttagg

SEQ ID NO: 73759 - DNA, 1143 bp, Artificial Sequence
  derived and/or modified sequence
gcctcacccctgcccgcggcctcccacgccctccttgggcctctcctttcgacccccttaccctctccctgggagactctaccagaccttcgaggctgcgtgtcccagtcagctaaaaaggaggccccgcccgcggcacctggtagctcctcgggcgctgcgggttcgacgcggcaacagctgctgttttctctcctggattcgtatgaggagactgtccttcctgtttcgcagatgaggaaactgaggcttagagaagtttggcaaattggctaagttcctacagctaattgtgggattagtgatatgcttttctaaagagtagaaaagtcgaagatgtctagacagaacttagtggctttgacagtgactacccttctgggtgtggctgtaggggggtttgtcctctggaaaggcatccagcgccgccgaaggagtaaaacgagtcctgtgacccaacagccacagcagaaagtgctgggcagtagagagctgccccctccagaagatgatcagctgcactccagtgcccccagatcctcgtggaaggaacggatccttaaagcaaaggtggtgacggtgtctcaggaggcagagtgggatcaaatcgagcccttgcttagaagtgaattagaagattttccagtacttggaattgactgtgagtgggaacgtcatggtacctacctccagtggcttttctaaggattcaaatagatcacccccataaaggattcagcacagtgtgaacatatagtagtaaatttggaaggcaaagccagccctctgtcacttctacaaatggcctccccaagtggcctgtgtgtcttggttcgcctgcccaagctaatctgtggaggaaaaacactaccaagaacgttattggatattttggcagatggcaccattttgaaagttggagtgggatgctcagaagatgccagcaagcttctgcaggattatggcctcgttgttagggggtgcctggacctccgatacctagccatgcggcagagaaacaatttgctctgtaatgggcttagcctgaagtccctcgctgagactgttttgaactttccccttgacaagtcccttctacttcgttgcagcaactgggatgctgagactctcacagaggaccag

SEQ ID NO: 73760 - DNA, 2831 bp, Artificial Sequence
  derived and/or modified sequence
tgaattagaagattttccagtacttggaattgactgtgagtgggtaaatttggaaggcaaagccagccctctgtcacttctacaaatggcctccccaagtggcctgtgtgtcttggttcgcctgcccaagctaatctgtggaggaaaaacactaccaagaacgttattggatattttggcagatggcaccattttgaaagttggagtgggatgctcagaagatgccagcaagcttctgcaggattatggcctcgttgttagggggtgcctggacctccgatacctagccatgcggcagagaaacaatttgctctgtaatgggcttagcctgaagtccctcgctgagactgttttgaactttccccttgacaagtcccttctacttcgttgcagcaactgggatgctgagactctcacagaggaccaggtaatttatgctgccagggatgcccagatttcagtggctctctttcttcatcttcttggataccctttctctaggaattcacctggagaaaaaaacgatgaccacagtagctggagaaaagtcttggaaaaatgccagggtgtggtcgacatcccatttcgaagcaaaggaatgagcagattgggagaagaggttaatggggaagcaacagaatctcagcagaagccaagaaataagaagtctaagatggatgggatggtgccaggcaaccaccaagggagagaccccagaaaacataaaagaaagcctctgggggtgggctattctgccagaaaatcacctctttatgataactgctttctccatgctcctgatggacagcccctctgcacttgtgatagaagaaaagctcagtggtacctggacaaaggcattggtgagctggtgagtgaagagccctttgtggtgaagctacggtttgaacctgcaggaaggcccgaatctcctggagactattacttgatggttaaagagaacctgtgtgtagtgtgtggcaagagagactcctacattcggaagaacgtgattccacatgagtaccggaagcacttccccatcgagatgaaggaccacaactcccacgatgtgctgctgctctgcacctcctgccatgccatttccaactactatgacaaccatctgaagcagcagctggccaaggagttccaggcccccatcggctctgaggagggcttgcgcctgctggaagatcctgagcgccggcaggtgcgttctggggccagggccctgctcaacgcggagagcctgcctactcagcgaaaggaggagctgctgcaagcactcagagagttttataacacagacgtggtcacagaggagatgcttcaagaggctgccagcctggagaccagaatctccaatgaaaactatgttcctcacgggctgaaggtggtgcagtgtcacagccagggtggcctgcgctccctcatgcagctggagagccgctggcgtcagcacttcctggactccatgcagcccaagcacctgccccagcagtggtcagtggaccacaaccatcagaagctgctccggaaattcggggaagatcttcccatccagctgtcttgatagctgctttcctcccagttaggacaagtgggaagctggagccaaggttgaagagtcacctcttcccattttagtacatcattaattgtcaaagcctgtgtgacacaactcagaatactaacctagactaatcccaggatgcttctgctggagcaaagatattgtttgaaggagagtttatggttttggattttaaacgggcagggtcttttttcctctcatttttgtggacaagagaggccttcgcctttatttttactctccctcttctgctgtccctgtgcagaggaaaaatgaagaattctcccagaagtgacttgtcaagacttaaaaaaaatgtttttaatgcatttcttccttgtctagtgcctcggtttatctctaacaggggctgtccagtatatcggtcctgttaggaggggagaaaaagttcttccaaaggctggagaagtgaacaaggagtcaaatttattttcccaattcaacttcataattatcatttctttggcttcatgctctcccgtaactcatgtggttgggatccatcccatctgggtcacttcagtctacttcacgtacttgaaaaggctttcctttacacttccaggaccaaacagcaacttcctgccacacacttccaccctatcactgggagaaatccttttctggacatgagcctttgacctgggtggggcagaaagaaccacaaactccatctcccaatagaactttgaaattcactcagcttttcctttcatgctgtttgttgcctgcttgttgcactcctcctgccccagaactgcaagatttttagcttcacccctttctgagagtaatgttatcttttatcagaatcagtatcagttcccctgtattctgtgcttcatcgaatttgcaagactgacctcttttaagcatttaattcactcccagagtcatctggtcaggttgcaatatgaggacttctctgtctcctctgaagcctgggacactgagcttacttaatacattagatgttcaaaagaggagcgttgtttcatctttcaaaatgttaggccattactttgagtataaaatcgacttattaatgattagtaatttttctaaagtattgggaaaactttcttattttataagatcttaacaagcttaaaaaagaattttatgaccagaatccaacaagagctctattttggaattgtgcccaagttggtgatgtttactctaaaattaataataaaactacttgtaagca

SEQ ID NO: 73761 - DNA, 816 bp, Artificial Sequence
  derived and/or modified sequence
atgagccggcagaacctggtggccctgactgtgaccaccctgctgggcgtggccgtgggcggctttgtgctgtggaagggcatccagaggagaagaagaagcaagaccagccctgtgacccagcagccccagcagaaggtgctgggcagccgggagctgcccccaccagaagatgaccagctgcacagcagcgcccccaggagctcctggaaggagcgcatcctgaaggccaaggtggtgacagtgtcccaggaggccgagtgggaccagatcgagcccctgctgcggtctgagctggaggacttccctgtgctgggcatcgactgtgagtgggtgaacctggagggcaaggccagccccctgagcctgctgcagatggccagccccagcggcctgtgtgtgctggtgcggctgcccaagctgatctgtggcggcaagaccctgcccaggaccctgctggacatcctggctgatggcaccatcctgaaggtgggcgtgggctgcagtgaagatgccagcaagctgctgcaggactatggcctggtggtgcggggctgcctggacctgcgctacctggccatgaggcagaggaacaacctgctgtgcaatggcctgagcctgaagagcctggccgagaccgtgctgaacttccccctggacaagagcctgctgctgcgctgcagcaactgggatgctgagaccctgacagaggaccaggtgatctatgctgccagagatgcccagatctctgtggccctcttcctgcacctgctgggctaccccttcagcaggaacagccctggagagaagaggtag

SEQ ID NO: 73762 - DNA, 1866 bp, Artificial Sequence
  derived and/or modified sequence
atgagccggcagaacctggtggccctgactgtgaccaccctgctgggcgtggccgtgggcggctttgtgctgtggaagggcatccagaggagaagaagaagcaagaccagccctgtgacccagcagccccagcagaaggtgctgggcagccgggagctgcccccaccagaagatgaccagctgcacagcagcgcccccaggagctcctggaaggagcgcatcctgaaggccaaggtggtgacagtgtcccaggaggccgagtgggaccagatcgagcccctgctgcggtctgagctggaggacttccctgtgctgggcatcgactgtgagtgggtgaacctggagggcaaggccagccccctgagcctgctgcagatggccagccccagcggcctgtgtgtgctggtgcggctgcccaagctgatctgtggcggcaagaccctgcccaggaccctgctggacatcctggctgatggcaccatcctgaaggtgggcgtgggctgcagtgaagatgccagcaagctgctgcaggactatggcctggtggtgcggggctgcctggacctgcgctacctggccatgaggcagaggaacaacctgctgtgcaatggcctgagcctgaagagcctggccgagaccgtgctgaacttccccctggacaagagcctgctgctgcgctgcagcaactgggatgctgagaccctgacagaggaccaggtgatctatgctgccagagatgcccagatctctgtggccctcttcctgcacctgctgggctaccccttcagcaggaacagccctggagagaagaatgatgaccacagctcctggaggaaggtgctggagaagtgccagggcgtggtggacatccccttccgcagcaagggcatgagccggctgggggaggaggtgaatggagaggccacagagagccagcagaagcccaggaacaagaagagcaagatggatggcatggtgcccggcaaccaccagggccgggaccccaggaagcacaagaggaagcccctgggcgtgggctacagcgccaggaagagccccctgtatgacaactgcttcctgcacgccccagatggccagcccctgtgcacctgtgacaggaggaaggcccagtggtacctggacaagggcatcggggagctggtgtctgaggagccctttgtggtgaagctgcgctttgagcccgccggccggcctgagagccctggggactactacctgatggtgaaggagaacctgtgtgtggtgtgtgggaagagggacagctacatcaggaagaatgtcatcccccatgagtacaggaagcacttccccatcgagatgaaggaccacaacagccatgatgtgctgctgctgtgcaccagctgccacgccatcagcaactactatgacaaccacctgaagcagcagctggccaaggagttccaggcccccatcggcagcgaggagggcctgcggctgctggaggaccctgagcggcggcaggtgcgcagcggggcccgggccctgctgaatgctgagagcctgcccacccagaggaaggaggagctgctgcaggccctgcgggagttctacaacacagatgtggtgacagaggagatgctgcaggaggccgccagcctggagacccgcatcagcaatgaaaactacgtgccccacggcctgaaggtggtgcagtgccacagccagggcggcctgcggagcctgatgcagctggagagccgctggaggcagcacttcctggacagcatgcagcccaagcacctgccccagcagtggagcgtggaccacaaccaccagaagctgctgaggaagtttggagaggacctgcccatccagctgtcctag

SEQ ID NO: 73763 - DNA, 816 bp, Artificial Sequence
  derived and/or modified sequence
atgagccggcagaacctggtggccctgaccgtgaccaccctgctgggagtggccgtaggagggtttgtcctttggaaggggatccagcgaaggcgccggtcaaagacgagccccgtgacacagcagccgcagcagaaggtgctgggaagtagagagctgcctcctcccgaggacgatcaactccatagctcagctccacgatccagttggaaagagaggatactgaaagcgaaggtcgtcactgtctctcaggaagccgaatgggaccagatcgaaccactgttaagaagcgagctggaagattttccggtcttaggaatcgattgcgaatgggtaaacctggagggcaaggcatcacccctatctctgcttcagatggcctccccctccgggctgtgtgtccttgtgcgacttccaaagttgatctgcggcggtaagactctccccagaacacttctggatattctcgcagatgggacaatccttaaggtaggcgtgggttgctcagaagatgcaagtaaactattacaggactacggtctcgtggtgcggggatgccttgatctgcggtatctcgccatgcgccaacgcaataatctgctgtgcaatgggctcagtctgaagagcctggccgagaccgtactgaacttcccactggacaagagcctactgctgcgttgtagcaactgggacgctgagacgctgactgaggaccaggtaatatacgctgcgcgtgacgcacaaatctccgtggccctgttcttgcacttactcggatatccattctcaaggaacagcccgggtgagaagaggtag

SEQ ID NO: 73764 - DNA, 1866 bp, Artificial Sequence
  derived and/or modified sequence
atgagccggcagaacctggtggccctgaccgtgaccaccctgctgggcgtggccgtgggcggctttgttctgtggaagggaatccagaggaggcggagatctaagactagtcccgttacccaacagcctcagcaaaaagttctaggctccagggagctccctcctcctgaagacgaccagctccatagctccgctccacggagcagctggaaggagagaatcctgaaggccaaagtcgtgaccgtcagccaagaggcagagtgggatcagattgagccactgctgagatctgagctagaggactttcccgtgcttggcatcgattgcgagtgggtgaacctggagggtaaagcctcccccttgtccctcctacagatggcctctccgtctgggctgtgcgtactcgtgagactgcccaagcttatctgtggcggcaaaacactccccaggacgctgctggacattctcgccgatggcactatacttaaagtaggtgtggggtgcagcgaggatgcgagtaagcttctgcaggattacggcctcgtggtaagaggatgcctcgacctgcgctatttggccatgaggcagaggaataacttgctgtgcaacgggctcagtctgaaatccctcgcagaaacagtactcaacttccctttggataagagcttactgctccgatgctctaattgggacgccgaaactcttacagaggaccaggttatttatgctgcacgagatgcacaaatatccgtggcactctttctgcacctcctgggttatcccttctccaggaattctccaggggagaagaatgatgatcactcatcctggcggaaggtgctggaaaagtgccaaggggtggtggacattcctttccgtagcaagggtatgtctaggcttggagaggaggtgaatggggaagctaccgaaagtcagcaaaagccaagaaacaagaaatctaagatggacgggatggttccagggaatcatcagggtcgtgacccaagaaaacacaaaagaaagcccttgggggtgggatactcagccagaaagagtcccctctatgacaattgttttcttcatgccccagacggccagccgctttgcacttgtgaccgcaggaaggcacagtggtatctggataagggaattggtgagctagtgagtgaggagccattcgtagtcaagttgcgattcgaaccggctggtagacccgagtccccaggggattactacttaatggtcaaggaaaatctgtgcgtggtgtgtggaaaaagagactcgtacattcgcaaaaatgtcattccacacgagtataggaaacacttccccatagagatgaaagatcacaatagccatgacgtgttactgctgtgcacaagctgtcatgcgatttctaactactacgacaaccacttgaagcagcagcttgcaaaggaattccaagcacctatcggctccgaggagggcctgagacttcttgaggatcccgagcggagacaggtacgcagcggggcccgcgcgttacttaatgcagaatctctgcctacccagagaaaggaagagctgctgcaggccttacgcgaattctataatactgatgtagtgacggaggagatgctgcaagaggccgctagcttggaaacccggatcagcaacgagaactacgtcccccatggcctgaaggtggttcagtgtcactcgcagggaggcctgaggtctctgatgcaactcgagtctaggtggcgtcagcacttcctagattctatgcagcccaagcatctgccccagcagtggagcgtcgatcacaaccaccagaaacttctgcgaaaatttggtgaagatctgcccatccagttaagctag

SEQ ID NO: 73765 - DNA, 1866 bp, Artificial Sequence
  derived and/or modified sequence
atgagccggcagaacctggtggccctgaccgtgaccaccctgctgggtgttgctgtaggcggctttgtgctctggaagggaattcagcggcgcagacgatctaagactagtccagtcacacagcaacctcagcagaaggttctggggtcgagggagctgcctccgccagaagatgatcagttgcactcttccgcgccacgcagtagctggaaggagaggattcttaaagccaaggtcgttaccgtgtcccaggaggccgagtgggatcaaatcgagcctttgctcagatcggaacttgaggacttccccgtgctgggcatcgattgcgagtgggtgaatctagaaggcaaggcttctccactgagtctgctgcagatggcaagtccatcaggattgtgtgtactagtccgccttcccaagctgatctgcggaggcaaaactctgccacggactcttttggacattctcgccgacgggacaatactgaaagtcggtgtgggatgctcagaggacgcgagcaagctactccaagattacgggctggtggtccgcggttgtctggatctgaggtatctggcaatgagacagcggaataatctcctttgcaatggactcagcttgaaatctctggctgagacagtgcttaatttcccactagacaagtctctgctactgcgttgttccaattgggacgcagagacgctgacggaagatcaggtgatctacgccgctcgagacgctcagatctctgttgccctcttcctgcatcttttgggctaccccttttcacgtaacagtcccggagagaaaaatgatgatcattcttcatggcggaaggtgttagagaaatgtcagggcgttgtggacattccctttagatcaaaggggatgtctcgcctgggcgaagaagtcaacggggaagcaacagaaagccaacagaagccgagaaacaaaaagagcaaaatggatggaatggttccaggtaaccatcagggcagagacccccgtaaacataagcggaagccccttggggttgggtattctgccaggaaatcccccttgtatgacaactgcttcctgcatgcgccagacggccaaccactctgcacatgtgatcgcagaaaggcccaatggtatcttgacaaaggcatcggagaattggtgagtgaggagccctttgttgtcaagctcagatttgaaccagccggcaggccagagtcaccaggggactactacctcatggtgaaggagaatttgtgcgtggtatgcgggaagcgggacagctatattagaaaaaatgttatcccccacgagtatcgcaagcacttccccattgaaatgaaggatcataatagccacgacgtgctcctcctgtgcacgtcgtgtcatgcaatctcaaactactacgacaatcatctcaaacaacagctcgctaaggagttccaggcccccattggctcagaggaggggttaagacttctggaagaccctgaacgccggcaggtacgttccggcgccagggctcttctcaatgccgaatctctcccaacgcaaaggaaagaggagcttttgcaagccctcagggaattttataatactgacgtcgtgactgaggagatgctgcaagaggcagcaagtcttgaaaccaggattagtaatgaaaattatgttccccacggcttaaaggtagtgcagtgccatagccagggggggcttagatccctgatgcagctggaaagtaggtggaggcagcacttccttgattccatgcagcccaaacaccttccccagcagtggtcggtggaccacaatcaccagaaactcctgaggaagttcggagaggatttgccaattcagttgagctag

SEQ ID NO: 73766 - DNA, 816 bp, Artificial Sequence
  derived and/or modified sequence
atgtctcgccagaatttggtggctctcaccgttacgacactgttgggtgttgctgtgggtggattcgtcctgtggaaagggatacaacgacggagaaggagcaaaacgtctcctgtgacccagcagccacagcaaaaagtgctggggagccgggaactgcctccacccgaggatgatcagctccatagttctgccccacggagcagttggaaggagcggatactaaaagctaaagtcgtgactgtgtcgcaggaggcagaatgggaccagatcgagcctctccttagatccgagctcgaggactttcctgttctgggaatcgactgcgagtgggtcaacctggagggaaaagcttctcctctctccctcctgcagatggcctccccctccggactgtgtgtgctggttagactgcccaagctaatttgcggcggaaagacgttgcctaggactctcctggatatcttggcagatggaactatcctcaaagtgggggtgggctgctctgaagatgcctcaaagctcctccaggactatggattggtcgtcaggggttgcctagatctgcgataccttgctatgagacagagaaataacttgttgtgtaacgggctgtctctgaaatcactcgccgagacagtcctgaacttccccttggataaatctctgcttctaagatgcagtaactgggatgctgagacactgacggaggatcaggtcatctatgccgcaagggacgctcagattagcgtcgcactgttcctgcatcttttaggctacccatttagcaggaactcacccggtgagaagcggtag

SEQ ID NO: 73767 - DNA, 1866 bp, Artificial Sequence
  derived and/or modified sequence
atgagtcggcaaaacctagtggccctgacagtgaccacactactaggggttgcagttggtggatttgtgctctggaaagggatacagaggcgtcgtcggagcaagaccagccctgtgactcagcagcctcagcagaaggtactcggctcacgggaattacccccacccgaagacgaccagctccactccagtgccccacggtcaagctggaaagagcgaatccttaaagcaaaagtggtgactgtcagccaagaagccgagtgggatcaaattgaacccttgctacgcagcgagctggaagattttccggtgctaggaatagactgtgaatgggttaacctcgaagggaaagcgtctcctttaagtctgctgcagatggcaagtccttctggattgtgtgtgctcgtgcgcctgccaaagctgatctgcggcggaaagaccttgcccaggacgcttctggacatcctcgccgatggcactattcttaaggtgggcgtgggatgctctgaggacgccagcaaactattacaggattacgggttggtggtccggggatgtcttgaccttcgataccttgcaatgcgccagcgtaataatttgctgtgtaatgggctgtcactgaagtccttggccgaaaccgtcctcaacttccccttagataagtccctgcttctgcggtgtagtaactgggatgccgagaccctgactgaggatcaagttatatacgctgcccgtgatgcgcagatttccgtcgcactgttcttacacctcctgggctaccccttttctcgcaattcaccaggagagaagaacgacgatcactctagttggaggaaggtactggagaagtgtcagggagtagttgacataccatttcgatccaagggcatgagccggcttggggaggaagtgaacggggaagctactgagagccagcagaagcctaggaacaagaaaagcaagatggatgggatggtccctggtaatcaccagggacgtgatccaaggaagcacaagagaaagcccctcggcgtcgggtacagcgccagaaaaagtcccctgtatgataactgttttctgcatgctcctgacggacagcccctgtgtacatgcgatcggagaaaggctcagtggtacttagataaagggatcggggaactggtgtccgaggagcccttcgtggttaaactgcgctttgagcccgctggcagaccagaatcgcccggtgattattacctgatggtgaaggagaacttgtgcgttgtgtgtggaaagagagatagctatattcgcaaaaacgtgattccccatgaatatcggaagcatttccctattgaaatgaaggatcataacagtcacgacgtgctgctactctgcacctcctgccatgctatctcgaactactacgataaccatctcaaacagcagcttgctaaagaattccaggcgccaatcggatccgaagagggcctgcgccttcttgaagacccggagcggcgtcaggtgagaagtggcgctcgcgctctgctcaatgccgaatcgctcccgacccagagaaaggaggaattattacaagccttacgcgagttttataacaccgacgttgtaacagaagaaatgttgcaggaagccgcttccctcgaaacaaggatctcgaatgaaaactatgttcctcatggcttgaaagttgtacaatgtcattctcagggaggtcttcgctccctgatgcagttggagtccagatggagacaacactttctagactcaatgcagcccaagcaccttcctcagcagtggagcgtggaccataatcatcagaagctgcttcgaaagtttggtgaagacctgccaatacaattgagctag

SEQ ID NO: 73768 - DNA, 1866 bp, Artificial Sequence
  derived and/or modified sequence
atgtctcgccagaacctggtggccctgacggtgaccacactactgggcgtggccgtggggggttttgtgctgtggaaaggtatccagcgcaggcgtagatctaaaaccagtcccgtgactcagcaaccacagcagaaggtgctgggttctagggagttaccgcctcctgaggatgatcagttgcatagtagtgcccctcggtcctcctggaaggaaaggattctcaaggcaaaggtggtgacagtctctcaggaagctgaatgggatcaaatcgaacctctcctgagaagcgagttggaggacttccctgttctgggcatagactgcgagtgggtgaatctcgagggcaaggcttcccccctgtctctgctgcagatggccagcccctcaggactgtgcgtcctggttcgtctgccaaagctgatctgcggtgggaagacactacccagaacactgctcgatatcttagctgatggtacaatcctgaaagtgggcgtcggatgctccgaagacgccagtaaactgttgcaagactatggtcttgtggttagagggtgcctcgacctaagatatctcgccatgagacagaggaacaacttattgtgtaatggcctatctctcaaatccctggcagagacagtgctcaatttccctttagataagagcttgctgcttcggtgcagcaattgggatgccgagacattaaccgaggatcaggttatctatgcagcgcgagacgcccagatttctgtggccctgtttttacacctgttgggttatccgttctcccgaaactcacctggagaaaagaacgacgatcactcttcctggcgtaaggtcctagaaaagtgccagggcgtggtagatatccccttccgttctaagggcatgtccagactcggcgaagaagtgaacggggaagccacagaatctcagcagaaaccgaggaataaaaaatccaaaatggacggcatggtaccaggtaatcaccagggccgagacccgaggaagcacaaaagaaaaccactgggggtggggtacagcgcgaggaagagtccattgtacgataattgctttcttcacgctcctgatgggcaacccctgtgcacctgcgataggagaaaagcacaatggtatctggataaaggaatcggcgagctcgtgtcagaggaaccatttgtggtcaagctgcggttcgagccagcaggtcggcctgaatcacctggagactactacctgatggtgaaagagaacttgtgtgtggtgtgtgggaaacgcgactcatacatccggaagaatgttattcctcatgaatatagaaaacacttccctatcgagatgaaagatcacaactctcacgatgttctgcttttatgtacatcctgccacgctattagcaattactatgacaatcatctcaaacagcaactcgccaaggagttccaagctcccatcgggtcagaggagggattaagactgctggaggaccctgagcgcaggcaagtccgctcaggcgctcgtgctcttctgaatgcagagtctctgcccacacaaagaaaagaagaactcttgcaggctctgagagagttttataatacggacgtggtgacagaagagatgctgcaggaagccgcttctttggagacgcgcataagcaatgagaattatgtgcctcatggccttaaagtcgttcagtgtcactcccaaggaggcctcaggtccctgatgcagctcgaatctcgctggcggcagcatttcctcgattctatgcagcccaaacacctgccccagcagtggtcagtagaccataatcaccaaaagctccttcgcaagttcggggaagacttacccattcagctctcttag

SEQ ID NO: 73769 - protein, 108 aa, Artificial Sequence
  derived and/or modified sequence
MKALCLLLLPVLGLLVSSKTLCSMEEAINERIQEVAGSLIFRAISSIGLECQSVTSRGDLATCPRGFAVTGCTCGSACGSWDVRAETTCHCQCAGMDWTGARCCRVQP

SEQ ID NO: 73770 - protein, 82 aa, Artificial Sequence
  derived and/or modified sequence
MKALCLLLLPVLGLLVSSKTLCSMEEAINERIQEVAGSLSFAVTGCTCGSACGSWDVRAETTCHCQCAGMDWTGARCCRVQP

SEQ ID NO: 73771 - DNA, 327 bp, Artificial Sequence
  derived and/or modified sequence
atgaaggccctgtgcctgctgctgctgcccgtgctgggcctgctggtgagcagcaagaccctgtgcagcatggaggaggccatcaacgagagaatccaggaggtggccggcagcctgatcttcagagccatcagcagcatcggcctggagtgccagagcgtgaccagcagaggcgacctggccacctgccccagaggcttcgccgtgaccggctgcacctgcggcagcgcctgcggcagctgggacgtgagagccgagaccacctgccactgccagtgcgccggcatggactggaccggcgccagatgctgcagagtgcagccctag

SEQ ID NO: 73772 - DNA, 327 bp, Artificial Sequence
  derived and/or modified sequence
atgaaggctctatgtctcctcctgctgcctgtccttggcttattagtctctagtaagacgctgtgtagtatggaagaagctataaatgaacgcatccaggaggtagcaggaagcctgatatttcgagccatcagctccatagggctggaatgtcaatccgtcacctcgcggggcgaccttgccacctgtcctagagggtttgcggtgacgggctgcacatgcggatctgcctgtggcagctgggacgtgcgtgcggagactacatgtcactgccagtgcgccgggatggattggaccggagcccgatgctgccgtgtccagccctag

SEQ ID NO: 73773 - DNA, 327 bp, Artificial Sequence
  derived and/or modified sequence
atgaaggccctgtgcctgctgctgctgcctgtgctgggcctgctggtgagcagcaagaccctgtgcagcatggaggaggccatcaatgaaagaatccaggaggtggccggcagcctcatcttccgggccatcagcagcatcggcctggagtgccagagcgtgaccagcagaggagacctggccacctgcccccggggctttgctgtgacaggctgcacctgtggcagcgcctgtggctcctgggatgtgcgggcagagaccacctgccactgccagtgtgccggcatggactggacaggagcccgctgctgccgggtgcagccctag

SEQ ID NO: 73774 - DNA, 327 bp, Artificial Sequence
  derived and/or modified sequence
atgaaggccctgtgcctgctgctgctgcccgtgctgggcctgctggtgagctccaaaaccctctgtagtatggaggaagctatcaatgagaggatccaggaggttgccggctcactgatcttccgcgcaatttcatcaattgggttggaatgccaatccgtgacaagccggggagacctcgcaacatgtccccggggttttgccgtgactggatgtacttgcggctccgcttgcggatcatgggatgtccgggcagaaactacctgtcactgccagtgtgctggcatggattggacgggagctcgatgctgtagagttcagccatag

SEQ ID NO: 73775 - DNA, 327 bp, Artificial Sequence
  derived and/or modified sequence
atgaaagccttatgtcttttgcttctgcctgtgttgggccttcttgtttccagcaagactttgtgctcaatggaggaggcaataaacgaaagaattcaggaggtagctggcagtctcatctttagagcgatcagcagcatcggattagaatgccagtctgtgacctctcgtggcgacctcgcaacgtgccctcggggatttgccgtgactggctgcacatgcggtagtgcttgtgggtcctgggatgtacgagctgaaacaacgtgccactgccagtgcgcaggtatggactggacaggcgcacggtgctgccgggttcagccatag

SEQ ID NO: 73776 - DNA, 249 bp, Artificial Sequence
  derived and/or modified sequence
atgaaagctctgtgtctgctgctgcttcccgtgctgggcctcttggttagcagcaagacattatgctcaatggaggaagctatcaacgaaagaattcaggaggtggctggtagcctgagctttgctgttacagggtgcacgtgtgggagcgcatgtggcagttgggacgtaagggccgagaccacttgtcattgccagtgtgcggggatggattggactggtgcccgatgctgtcgtgttcagccctag

SEQ ID NO: 73777 - DNA, 249 bp, Artificial Sequence
  derived and/or modified sequence
atgaaggccctgtgcctgctgctgctgcctgtgctgggcctgctggtgagcagcaagaccctgtgcagcatggaggaggccatcaatgaaagaatccaggaggtggccggcagcctgagctttgctgtgacaggctgcacctgtggcagcgcctgtggctcctgggatgtgcgggcagagaccacctgccactgccagtgtgccggcatggactggacaggagcccgctgctgccgggtgcagccctag

SEQ ID NO: 73778 - DNA, 249 bp, Artificial Sequence
  derived and/or modified sequence
atgaaggccctgtgcctgctgctgctgcccgtgctgggcctgctggtctcatctaaaacactctgcagtatggaagaagccatcaatgagcgtattcaggaagttgcagggagtctgagctttgctgtaaccggatgcacttgcggctcagcatgcggatcttgggatgttcgggcggaaacaacctgccactgccagtgtgctggaatggattggaccggggcacggtgctgtagggtgcagccatag

SEQ ID NO: 73779 - DNA, 249 bp, Artificial Sequence
  derived and/or modified sequence
atgaaggcgttgtgcctcctcctgctcccagtgctcggacttctagtgtcatccaagactctgtgctctatggaggaggccatcaatgagagaattcaggaggtggccggatcactctcctttgcagttacggggtgcacatgtgggagcgcctgcgggtcttgggacgtccgggcagagaccacatgccattgtcaatgcgccggaatggattggaccggtgccaggtgctgccgagttcaaccctag

SEQ ID NO: 73780 - DNA, 478 bp, Artificial Sequence
  derived and/or modified sequence
gtgtgccggatttggttagctgagcccaccgagaggcgcctgcaggatgaaagctctctgtctcctcctcctccctgtcctggggctgttggtgtctagcaagaccctgtgctccatggaagaagccatcaatgagaggatccaggaggtcgccggctccctaatatttagggcaataagcagcattggcctggagtgccagagcgtcacctccaggggggacctggctacttgcccccgaggcttcgccgtcaccggctgcacttgtggctccgcctgtggctcgtgggatgtgcgcgccgagaccacatgtcactgccagtgcgcgggcatggactggaccggagcgcgctgctgtcgtgtgcagccctgaggtcgcgcgcagcgcgtgcacagcgcgggcggaggcggctccaggtccggaggggttgcgggggagctggaaataaacctggagatgatgatgatgatgatgatg

SEQ ID NO: 73781 - DNA, 249 bp, Artificial Sequence
  derived and/or modified sequence
atgaaagctctctgtctcctcctcctccctgtcctggggctgttggtgtctagcaagaccctgtgctccatggaagaagccatcaatgagaggatccaggaggtcgccggctccctaagcttcgccgtcaccggctgcacttgtggctccgcctgtggctcgtgggatgtgcgcgccgagaccacatgtcactgccagtgcgcgggcatggactggaccggagcgcgctgctgtcgtgtgcagccctga

SEQ ID NO: 73782 - DNA, 249 bp, Artificial Sequence
  derived and/or modified sequence
atgaaggccctgtgcctgctgctgctgcccgtgctgggcctgctggtgagcagcaagaccctgtgcagcatggaggaggccatcaacgagagaatccaggaggtggccggcagcctgagcttcgccgtgaccggctgcacctgcggcagcgcctgcggcagctgggacgtgagagccgagaccacctgccactgccagtgcgccggcatggactggaccggcgccagatgctgcagagtgcagccctag

SEQ ID NO: 73783 - protein, 228 aa, Artificial Sequence
  derived and/or modified sequence
MAPKVFRQYWDIPDGTDCHRKAYSTTSIASVAGLTAAAYRVTLNPPGTFLEGVAKVGQYTFTAAAVGAVFGLTTCISAHVREKPDDPLNYFLGGCAGGLTLGARKTGSHCVVQAGLKLLASSSPHTSASQSAGIIGMSHCVQRFWVPSSSACLEVLSGESTDVHACSSTRGACNSSGSRPLPELGARASGSLRKGGHTHPAPRGAGALTPVQALIESLLNTLGSNPRT

SEQ ID NO: 73784 - DNA, 687 bp, Artificial Sequence
  derived and/or modified sequence
atggcaccaaaggtatttagacagtactgggacatcccggatggaaccgactgccataggaaggcttatagcactaccagcatcgcttctgtcgcaggcctgactgctgcagcttatcgggtcaccctgaacccccccgggactttcctggagggagttgcaaaagtcggtcagtacaccttcaccgcagccgcagtgggcgccgtgttcggactgacaacatgcattagcgctcacgtccgcgaaaaacctgacgatccgcttaattatttcctgggaggctgcgctggtggcctgacactgggcgcaagaaagactggcagccattgtgttgtacaagccgggctgaagttacttgcttcttcatccccacatacctcggcaagtcagagcgcaggcatcatcggtatgtctcattgcgttcagaggttctgggtgccatcttcctctgcctgcctcgaagtgctgtccggcgaatccaccgatgttcatgcttgctcaagtaccaggggggcctgtaattcttctggctctaggccactgccggagctgggagctcgggctagtggttcattaagaaaagggggccatactcatcctgctcctcggggagcaggtgctttgactcccgtacaggccttgatagagtccttgctgaataccctgggcagcaacccacgaacttag

SEQ ID NO: 73785 - DNA, 687 bp, Artificial Sequence
  derived and/or modified sequence
atggcccccaaggtgttccggcagtactgggacatcccagatggaacagactgccacaggaaggcctacagcaccaccagcatcgcctctgtggccggcctgacagctgctgcctacagagtgaccctgaaccccccaggcaccttcctggagggcgtggccaaggtgggccagtacaccttcaccgctgctgctgtgggcgctgtgtttggcctgaccacctgcatcagcgcccacgtgcgggagaagccagatgaccccctgaactacttcctgggcggctgtgccggcggcctgaccctgggcgccaggaagacaggcagccactgtgtggtgcaggccggcctgaagctgctggccagcagcagcccccacaccagcgccagccagagcgctggcatcatcggcatgagccactgtgtgcagcgcttctgggtgcccagcagcagcgcctgcctggaggtgctgtctggagagagcacagatgtgcacgcctgcagcagcaccaggggggcctgcaacagcagcggcagccggcccctgcctgagctgggcgcccgggccagcggcagcctgaggaagggcggccacacccacccagcccccagaggagctggggccctgacccctgtgcaggccctgattgagagcctgctgaacaccctgggcagcaaccccaggacatag

SEQ ID NO: 73786 - DNA, 747 bp, Artificial Sequence
  derived and/or modified sequence
ggctgcccttgcgcttcccgagctggcggggtccgtggtgcgggatcgagattgcgggctatggcgccgaaggtttttcgtcagtactgggatatccccgatggcaccgattgccaccgcaaagcctacagcaccaccagtattgccagcgtcgctggcctgaccgccgctgcctacagagtcacactcaatcctccgggcaccttccttgaaggagtggctaaggttggacaatacacgttcactgcagctgctgtcggggccgtgtttggcctcaccacctgcatcagcgcccatgtccgcgagaagcccgacgaccccctgaactacttcctcggtggctgcgccggaggcctgactctgggagcacgcaagacaggatctcactgtgttgtgcaggctggtctcaaactcctggcctcgagcagtcctcacacctcagcctcccagagtgctgggattataggcatgagccactgtgtacagagattctgggtcccttcttccagcgcctgcctcgaagtcctctctggagagagcacagatgtccacgcgtgttccagcacaaggggggcatgcaacagctcagggtcacgtccacttccggagctgggtgcccgggcctcgggctccctgagaaagggcggacacacccaccccgcacccagaggggcaggggccctgacacctgtccaagccctaatagagtcattgttaaacactctgggttcgaaccccagaacttga

SEQ ID NO: 73787 - DNA, 687 bp, Artificial Sequence
  derived and/or modified sequence
atggcccccaaggtgttccggcagtactgggacatccccgacggcacagactgccatagaaaggcatattctaccacttcaatagccagtgtggctgggctgactgccgccgcctaccgggtgaccctcaatcctcctggaaccttcttggaaggagtagccaaagtgggccagtatacgttcaccgctgcagcagtaggggccgtctttggccttaccacctgcatatccgcacatgtccgtgagaagcctgatgatcccttgaactattttctcggggggtgtgccggaggtcttactctgggcgcccgcaaaactgggtcccattgcgtggtgcaggctggactgaagctcctcgcctcaagtagtccacacaccagcgcttctcagagtgcaggcattatcgggatgtctcattgtgtgcagaggttttgggtgccatcgagcagtgcctgtttagaagtcctctctggcgagtctactgacgttcacgcctgcagttctacccgaggcgcttgcaattcctccggctctagacccctgcccgagctgggagcgcgcgcatcaggtagcttgcgtaaaggcggtcacacacaccctgcaccacgaggagccggagccctgacccccgtccaggcgttaatcgagtctctacttaacacgctcggctccaaccctagaacatag

SEQ ID NO: 73788 - DNA, 687 bp, Artificial Sequence
  derived and/or modified sequence
atggcaccaaaggtgttccgtcagtattgggacatccctgatggaaccgactgccacaggaaggcttactctaccacgtccatcgcctctgtagcgggtctcaccgccgcagcctaccgggtgacgctgaatcctcccggaactttcctcgagggcgtggccaaggttggacaatataccttcacagctgccgctgtgggcgctgttttcggcctgaccacctgtattagcgcacacgtgcgggagaagcccgacgacccattgaactatttcttaggaggttgtgccggaggtttgacactgggggctcggaaaaccggtagtcattgcgtggttcaggccggtctgaagcttttagctagtagcagcccgcatacatcggcctcacagtccgctgggatcattggcatgagccactgtgtgcaaagattttgggtgcctagctcttccgcctgcctggaggttctcagcggtgagtccacagatgtccacgcgtgttcaagtactcgcggagcatgtaattctagcggaagtcggcctctgcctgaactgggagctcgagcgtctggaagcctcaggaaaggaggacatacacatccggcaccaaggggggctggtgctctaactccagtgcaggcactgatcgagagccttttaaatacactgggctccaaccccagaacctag

SEQ ID NO: 73789 - DNA, 687 bp, Artificial Sequence
  derived and/or modified sequence
atggcccccaaggtgttcagacagtactgggacatccccgacggcaccgactgccacagaaaggcctacagcaccaccagcatcgccagcgtggccggcctgaccgccgccgcctacagagtgaccctgaacccccccggcaccttcctggagggcgtggccaaggtgggccagtacaccttcaccgccgccgccgtgggcgccgtgttcggcctgaccacctgcatcagcgcccacgtgagagagaagcccgacgaccccctgaactacttcctgggcggctgcgccggcggcctgaccctgggcgccagaaagaccggcagccactgcgtggtgcaggccggcctgaagctgctggccagcagcagcccccacaccagcgccagccagagcgccggcatcatcggcatgagccactgcgtgcagagattctgggtgcccagcagcagcgcctgcctggaggtgctgagcggcgagagcaccgacgtgcacgcctgcagcagcaccagaggcgcctgcaacagcagcggcagcagacccctgcccgagctgggcgccagagccagcggcagcctgagaaagggcggccacacccaccccgcccccagaggcgccggcgccctgacccccgtgcaggccctgatcgagagcctgctgaacaccctgggcagcaaccccagaacctag

SEQ ID NO: 73790 - protein, 807 aa, Artificial Sequence
  derived and/or modified sequence
MPRAPRCRAVRSLLRSHYREVLPLATFVRRLGPQGWRLVQRGDPAAFRALVAQCLVCVPWDARPPPAAPSFRQVSCLKELVARVLQRLCERGAKNVLAFGFALLDGARGGPPEAFTTSVRSYLPNTVTDALRGSGAWGLLLRRVGDDVLVHLLARCALFVLVAPSCAYQVCGPPLYQLGAATQARPPPHASGPRRRLGCERAWNHSVREAGVPLGLPAPGARRRGGSASRSLPLPKRPRRGAAPEPERTPVGQGSWAHPGRTRGPSDRGFCVVSPARPAEEATSLEGALSGTRHSHPSVGRQHHAGPPSTSRPPRPWDTPCPPVYAETKHFLYSSGDKEQLRPSFLLSSLRPSLTGARRLVETIFLGSRPWMPGTPRRLPRLPQRYWQMRPLFLELLGNHAQCPYGVLLKTHCPLRAAVTPAAGVCAREKPQGSVAAPEEEDTDPRRLVQLLRQHSSPWQVYGFVRACLRRLVPPGLWGSRHNERRFLRNTKKFISLGKHAKLSLQELTWKMSVRDCAWLRRSPGVGCVPAAEHRLREEILAKFLHWLMSVYVVELLRSFFYVTETTFQKNRLFFYRKSVWSKLQSIGIRQHLKRVQLRELSEAEVRQHREARPALLTSRLRFIPKPDGLRPIVNMDYVVGARTFRREKRAERLTSRVKALFSVLNYERARRPGLLGASVLGLDDIHRAWRTFVLRVRAQDPPPELYFVKVDVTGAYDTIPQDRLTEVIASIIKPQNTYCVRRYAVVQKAAHGHVRKAFKSHVLRPVPGDPAGLHPLHAALQPVLRRHGEQAVCGDSAGRAAPAFGG

SEQ ID NO: 73791 - protein, 1069 aa, Artificial Sequence
  derived and/or modified sequence
MPRAPRCRAVRSLLRSHYREVLPLATFVRRLGPQGWRLVQRGDPAAFRALVAQCLVCVPWDARPPPAAPSFRQVSCLKELVARVLQRLCERGAKNVLAFGFALLDGARGGPPEAFTTSVRSYLPNTVTDALRGSGAWGLLLRRVGDDVLVHLLARCALFVLVAPSCAYQVCGPPLYQLGAATQARPPPHASGPRRRLGCERAWNHSVREAGVPLGLPAPGARRRGGSASRSLPLPKRPRRGAAPEPERTPVGQGSWAHPGRTRGPSDRGFCVVSPARPAEEATSLEGALSGTRHSHPSVGRQHHAGPPSTSRPPRPWDTPCPPVYAETKHFLYSSGDKEQLRPSFLLSSLRPSLTGARRLVETIFLGSRPWMPGTPRRLPRLPQRYWQMRPLFLELLGNHAQCPYGVLLKTHCPLRAAVTPAAGVCAREKPQGSVAAPEEEDTDPRRLVQLLRQHSSPWQVYGFVRACLRRLVPPGLWGSRHNERRFLRNTKKFISLGKHAKLSLQELTWKMSVRDCAWLRRSPGVGCVPAAEHRLREEILAKFLHWLMSVYVVELLRSFFYVTETTFQKNRLFFYRKSVWSKLQSIGIRQHLKRVQLRELSEAEVRQHREARPALLTSRLRFIPKPDGLRPIVNMDYVVGARTFRREKRAERLTSRVKALFSVLNYERARRPGLLGASVLGLDDIHRAWRTFVLRVRAQDPPPELYFVKVDVTGAYDTIPQDRLTEVIASIIKPQNTYCVRRYAVVQKAAHGHVRKAFKSHVSTLTDLQPYMRQFVAHLQETSPLRDAVVIEQSSSLNEASSGLFDVFLRFMCHHAVRIRGKSYVQCQGIPQGSILSTLLCSLCYGDMENKLFAGIRRDGLLLRLVDDFLLVTPHLTHAKTFLSYARTSIRASLTFNRGFKAGRNMRRKLFGVLRLKCHSLFLDLQVNSLQTVCTNIYKILLLQAYRFHACVLQLPFHQQVWKNPTFFLRVISDTASLCYSILKAKNAGMSLGAKGAAGPLPSEAVQWLCHQAFLLKLTRHRVTYVPLLGSLRTAQTQLSRKLPGTTLTALEAAANPALPSDFKTILD

SEQ ID NO: 73792 - DNA, 2424 bp, Artificial Sequence
  derived and/or modified sequence
atgcccagagcccccagatgcagagccgtgagaagcctgctgagaagccactacagagaggtgctgcccctggccaccttcgtgagaagactgggcccccagggctggagactggtgcagagaggcgaccccgccgccttcagagccctggtggcccagtgcctggtgtgcgtgccctgggacgccagacccccccccgccgcccccagcttcagacaggtgagctgcctgaaggagctggtggccagagtgctgcagagactgtgcgagagaggcgccaagaacgtgctggccttcggcttcgccctgctggacggcgccagaggcggcccccccgaggccttcaccaccagcgtgagaagctacctgcccaacaccgtgaccgacgccctgagaggcagcggcgcctggggcctgctgctgagaagagtgggcgacgacgtgctggtgcacctgctggccagatgcgccctgttcgtgctggtggcccccagctgcgcctaccaggtgtgcggcccccccctgtaccagctgggcgccgccacccaggccagaccccccccccacgccagcggccccagaagaagactgggctgcgagagagcctggaaccacagcgtgagagaggccggcgtgcccctgggcctgcccgcccccggcgccagaagaagaggcggcagcgccagcagaagcctgcccctgcccaagagacccagaagaggcgccgcccccgagcccgagagaacccccgtgggccagggcagctgggcccaccccggcagaaccagaggccccagcgacagaggcttctgcgtggtgagccccgccagacccgccgaggaggccaccagcctggagggcgccctgagcggcaccagacacagccaccccagcgtgggcagacagcaccacgccggcccccccagcaccagcagaccccccagaccctgggacaccccctgcccccccgtgtacgccgagaccaagcacttcctgtacagcagcggcgacaaggagcagctgagacccagcttcctgctgagcagcctgagacccagcctgaccggcgccagaagactggtggagaccatcttcctgggcagcagaccctggatgcccggcacccccagaagactgcccagactgccccagagatactggcagatgagacccctgttcctggagctgctgggcaaccacgcccagtgcccctacggcgtgctgctgaagacccactgccccctgagagccgccgtgacccccgccgccggcgtgtgcgccagagagaagccccagggcagcgtggccgcccccgaggaggaggacaccgaccccagaagactggtgcagctgctgagacagcacagcagcccctggcaggtgtacggcttcgtgagagcctgcctgagaagactggtgccccccggcctgtggggcagcagacacaacgagagaagattcctgagaaacaccaagaagttcatcagcctgggcaagcacgccaagctgagcctgcaggagctgacctggaagatgagcgtgagagactgcgcctggctgagaagaagccccggcgtgggctgcgtgcccgccgccgagcacagactgagagaggagatcctggccaagttcctgcactggctgatgagcgtgtacgtggtggagctgctgagaagcttcttctacgtgaccgagaccaccttccagaagaacagactgttcttctacagaaagagcgtgtggagcaagctgcagagcatcggcatcagacagcacctgaagagagtgcagctgagagagctgagcgaggccgaggtgagacagcacagagaggccagacccgccctgctgaccagcagactgagattcatccccaagcccgacggcctgagacccatcgtgaacatggactacgtggtgggcgccagaaccttcagaagagagaagagagccgagagactgaccagcagagtgaaggccctgttcagcgtgctgaactacgagagagccagaagacccggcctgctgggcgccagcgtgctgggcctggacgacatccacagagcctggagaaccttcgtgctgagagtgagagcccaggaccccccccccgagctgtacttcgtgaaggtggacgtgaccggcgcctacgacaccatcccccaggacagactgaccgaggtgatcgccagcatcatcaagccccagaacacctactgcgtgagaagatacgccgtggtgcagaaggccgcccacggccacgtgagaaaggccttcaagagccacgtgctgagacccgtgcccggcgaccccgccggcctgcaccccctgcacgccgccctgcagcccgtgctgagaagacacggcgagcaggccgtgtgcggcgacagcgccggcagagccgcccccgccttcggcggctag

SEQ ID NO: 73793 - DNA, 3210 bp, Artificial Sequence
  derived and/or modified sequence
atgcccagagcccccagatgcagagccgtgagaagcctgctgagaagccactacagagaggtgctgcccctggccaccttcgtgagaagactgggcccccagggctggagactggtgcagagaggcgaccccgccgccttcagagccctggtggcccagtgcctggtgtgcgtgccctgggacgccagacccccccccgccgcccccagcttcagacaggtgagctgcctgaaggagctggtggccagagtgctgcagagactgtgcgagagaggcgccaagaacgtgctggccttcggcttcgccctgctggacggcgccagaggcggcccccccgaggccttcaccaccagcgtgagaagctacctgcccaacaccgtgaccgacgccctgagaggcagcggcgcctggggcctgctgctgagaagagtgggcgacgacgtgctggtgcacctgctggccagatgcgccctgttcgtgctggtggcccccagctgcgcctaccaggtgtgcggcccccccctgtaccagctgggcgccgccacccaggccagaccccccccccacgccagcggccccagaagaagactgggctgcgagagagcctggaaccacagcgtgagagaggccggcgtgcccctgggcctgcccgcccccggcgccagaagaagaggcggcagcgccagcagaagcctgcccctgcccaagagacccagaagaggcgccgcccccgagcccgagagaacccccgtgggccagggcagctgggcccaccccggcagaaccagaggccccagcgacagaggcttctgcgtggtgagccccgccagacccgccgaggaggccaccagcctggagggcgccctgagcggcaccagacacagccaccccagcgtgggcagacagcaccacgccggcccccccagcaccagcagaccccccagaccctgggacaccccctgcccccccgtgtacgccgagaccaagcacttcctgtacagcagcggcgacaaggagcagctgagacccagcttcctgctgagcagcctgagacccagcctgaccggcgccagaagactggtggagaccatcttcctgggcagcagaccctggatgcccggcacccccagaagactgcccagactgccccagagatactggcagatgagacccctgttcctggagctgctgggcaaccacgcccagtgcccctacggcgtgctgctgaagacccactgccccctgagagccgccgtgacccccgccgccggcgtgtgcgccagagagaagccccagggcagcgtggccgcccccgaggaggaggacaccgaccccagaagactggtgcagctgctgagacagcacagcagcccctggcaggtgtacggcttcgtgagagcctgcctgagaagactggtgccccccggcctgtggggcagcagacacaacgagagaagattcctgagaaacaccaagaagttcatcagcctgggcaagcacgccaagctgagcctgcaggagctgacctggaagatgagcgtgagagactgcgcctggctgagaagaagccccggcgtgggctgcgtgcccgccgccgagcacagactgagagaggagatcctggccaagttcctgcactggctgatgagcgtgtacgtggtggagctgctgagaagcttcttctacgtgaccgagaccaccttccagaagaacagactgttcttctacagaaagagcgtgtggagcaagctgcagagcatcggcatcagacagcacctgaagagagtgcagctgagagagctgagcgaggccgaggtgagacagcacagagaggccagacccgccctgctgaccagcagactgagattcatccccaagcccgacggcctgagacccatcgtgaacatggactacgtggtgggcgccagaaccttcagaagagagaagagagccgagagactgaccagcagagtgaaggccctgttcagcgtgctgaactacgagagagccagaagacccggcctgctgggcgccagcgtgctgggcctggacgacatccacagagcctggagaaccttcgtgctgagagtgagagcccaggaccccccccccgagctgtacttcgtgaaggtggacgtgaccggcgcctacgacaccatcccccaggacagactgaccgaggtgatcgccagcatcatcaagccccagaacacctactgcgtgagaagatacgccgtggtgcagaaggccgcccacggccacgtgagaaaggccttcaagagccacgtgagcaccctgaccgacctgcagccctacatgagacagttcgtggcccacctgcaggagaccagccccctgagagacgccgtggtgatcgagcagagcagcagcctgaacgaggccagcagcggcctgttcgacgtgttcctgagattcatgtgccaccacgccgtgagaatcagaggcaagagctacgtgcagtgccagggcatcccccagggcagcatcctgagcaccctgctgtgcagcctgtgctacggcgacatggagaacaagctgttcgccggcatcagaagagacggcctgctgctgagactggtggacgacttcctgctggtgaccccccacctgacccacgccaagaccttcctgagctacgccagaaccagcatcagagccagcctgaccttcaacagaggcttcaaggccggcagaaacatgagaagaaagctgttcggcgtgctgagactgaagtgccacagcctgttcctggacctgcaggtgaacagcctgcagaccgtgtgcaccaacatctacaagatcctgctgctgcaggcctacagattccacgcctgcgtgctgcagctgcccttccaccagcaggtgtggaagaaccccaccttcttcctgagagtgatcagcgacaccgccagcctgtgctacagcatcctgaaggccaagaacgccggcatgagcctgggcgccaagggcgccgccggccccctgcccagcgaggccgtgcagtggctgtgccaccaggccttcctgctgaagctgaccagacacagagtgacctacgtgcccctgctgggcagcctgagaaccgcccagacccagctgagcagaaagctgcccggcaccaccctgaccgccctggaggccgccgccaaccccgccctgcccagcgacttcaagaccatcctggactag

SEQ ID NO: 73794 - DNA, 2424 bp, Artificial Sequence
  derived and/or modified sequence
atgcctcgcgcgccaagatgccgcgcggtgaggagtctccttcgcagccactatagagaagtcctgccactggccacatttgtacggcgactcggcccacaaggatggagactcgtccagagaggcgatcccgcagcctttcgcgccctggtagctcagtgtttagtttgcgtaccctgggatgcccggcctcccccggcggcccccagctttagacaagtgtcatgcctaaaggagttggttgcacgcgtgcttcagcggctttgcgagcgaggagccaagaacgtcttggcttttggtttcgccttactggacggcgctcgcggtgggccgcccgaggctttcaccacgagcgttcggtcttacctgcccaatactgtgactgatgctctgagagggagcggcgcctgggggcttctgctgaggagagtgggcgatgatgtgctggttcacctgttagcaagatgtgcactatttgttctcgtcgccccatcatgtgcttatcaggtgtgtggtccacccctgtaccagctcggcgcagctactcaagcccgaccaccaccacacgcctccgggccgcggaggaggctgggctgtgaaagagcatggaaccattctgtcagagaggcaggggtgcctctaggcctgcctgcccccggcgctaggaggcgaggtggatctgcgtcccggagcctgcctcttccaaaacggccacgaagaggtgccgctccagagcccgagcgtacacctgtcggtcagggcagctgggcccacccaggtagaacccgcgggccttcagatcgcggtttctgtgtagtgagccctgcacgacccgccgaagaggcaacctctctggagggagctctgagcggcacccggcattcacatccctctgtgggtcgccagcaccacgcgggaccaccatctacgtctcggccccctcgcccatgggataccccttgtcctccagtttatgcggaaaccaaacactttctctactcttcaggagataaagaacaacttcgcccttcgtttcttctgagcagtctccgcccatcactcacaggcgctagaagactggtggaaacgatcttcctgggttccagaccgtggatgcctgggacccccaggcgtttacctcggttgcctcagcgttattggcaaatgagacccctgttcctcgagctgcttgggaaccacgcacagtgcccgtatggggttctgttaaagacgcactgccctctgcgggccgcagtcacccccgctgccggggtgtgtgcaagggaaaaacctcaaggtagtgtcgctgctcctgaggaagaggacaccgatcccaggcgcctggtgcaactgctccgtcagcatagctccccgtggcaggtttacgggtttgtgagggcttgtctgcggaggctggttccgcctggactttgggggtcaaggcacaatgagcgcagattcttaagaaatacaaagaaatttatttcattgggcaagcacgccaagctgtccctgcaggagttaacctggaagatgagcgtacgtgattgtgcctggctccgtcggtcccccggcgtgggatgtgtccccgccgctgaacaccgacttcgcgaagagattctagccaagtttctccactggctgatgagcgtatatgtggtcgaactgttgagatccttcttctacgtgacggagactacattccagaaaaaccgactgttcttctatagaaaatctgtctggtccaaactccagtctatcggaatccggcagcatctgaagcgggtgcaattgcgggagctctcggaggccgaggtgagacaacatcgggaagctcgacctgcattattgactagtcgcctgcgattcataccgaaacccgacggactgcggcccatcgtcaatatggattatgtggtgggtgcccggaccttccggcgagaaaagcgcgcagaaaggctcacctcacgcgtgaaggctctattctcagtcctgaactacgaaagggctaggagacccggactcctgggcgcaagcgtgttgggcctcgatgacatccaccgcgcctggaggacatttgtcctgcgagtacgagcccaggatccaccgccggaactgtacttcgttaaagtggatgtcactggtgcttatgacaccattccccaggacaggttgacagaggtcattgcatccatcatcaaaccacaaaatacatattgtgttcggaggtatgcagttgtgcaaaaggcagcgcacggacatgtgagaaaagcctttaagtcgcatgtgctgagaccagtgcctggggatcctgccggattacatccgctgcatgctgctcttcagcctgttctgagacgccacggggagcaggctgtgtgtggggactccgccgggagagccgcacctgcatttggtggatag

SEQ ID NO: 73795 - DNA, 3210 bp, Artificial Sequence
  derived and/or modified sequence
atgcctcgggccccacgatgtcgggccgtgcgtagcctgctgcgctcacactatcgtgaggtgttgccactggctaccttcgtacggagactggggcctcaggggtggaggctggtgcagcgcggagacccagcagctttccgggctcttgtagcacagtgtctcgtgtgtgtcccctgggatgccagacctccgcctgccgctccctccttccgacaggtgagctgcctcaaagagctcgttgcgagggttctgcaacggctctgcgagcgaggagcgaagaatgtattggcattcgggttcgctctcttggatggagctagggggggtcccccagaagcctttacaacgagcgtcagatcctatttacctaataccgtgaccgatgccctgaggggatcaggggcctggggtctcttactgcggcgggtcggggacgacgtcctggtccacctgctggcccggtgcgctttgtttgtcttggtcgctcctagctgtgcttatcaggtctgcggccccccactatatcagctgggtgcagcaacccaagcaaggcctcccccacatgccagcggcccacgtagaagactgggttgcgagcgggcttggaatcatagtgtgcgggaagcaggggtgccactggggcttcccgcccccggcgctaggaggcgcggcggctccgccagtcggtctttgcccctgccaaaaagaccacggaggggtgcagctccagaacccgagcggacacccgttggtcagggatcttgggcccatccgggccgcacacgcgggccttccgatcgcggcttttgtgtggtgtcaccagcgcggccagccgaggaggcgacttccctggaaggtgcactttcaggaacccggcactcccacccctcggtgggtagacagcaccacgctggacctccgtctacttcaagaccacccaggccatgggacacaccatgccctccggtctatgcagagaccaaacatttcctgtatagttcgggggacaaggagcagctgagaccttcgttcctgctgagttcattacggccctctcttactggcgccaggcggctcgtagaaactatatttctaggtagcagaccctggatgcctgggactcctaggcgcctgccaagactgcctcaaaggtactggcagatgcggccactttttttagaactgctggggaaccatgcacagtgcccttatggggtgctgcttaagactcactgtcccttaagggccgctgtgacacccgctgccggagtgtgtgctagggagaagccacagggatcggttgctgccccagaggaagaagacactgatccccgccgattagtccagctgctccggcaacattcttctccgtggcaggtgtacggctttgtcagagcgtgcctgagacgcttggtgccgccggggctttggggctcccgacataacgaacggcgatttctgcggaacactaagaagttcatttctctcggtaaacatgccaaacttagtctccaggaactcacttggaaaatgtccgtaagagactgcgcctggctccgacggagccccggggtgggctgcgtgcctgcagcagagcatcgcctgagggaggaaattctggcgaagttccttcactggttgatgtccgtgtatgttgtcgaactgctgagatcattcttctatgtgaccgagaccacctttcaaaaaaatcgcttattcttttacaggaaaagcgtttggtcaaaacttcagtcaattggcattcggcaacatctaaagcgcgtgcagttaagggaactttccgaggctgaagttcgacaacatcgggaggcacggcctgccctgctaactagccgcctgagatttatccctaaacctgatgggctccgccccattgttaatatggattacgtggtcggagcacgtaccttccgccgggagaagagggctgagcgtttaaccagtcgggtcaaggcacttttctccgtgcttaattacgagcgggctagaagaccagggcttcttggtgccagcgttctggggctggacgacatccatcgtgcctggaggacattcgtcctgcgcgtaagggcccaggaccccccacctgagctctatttcgtgaaagtagatgtcaccggggcttatgacactatcccccaggaccggcttaccgaagtgattgccagcatcattaagccacaaaacacatattgcgtccgccggtacgcagtcgtccagaaagctgcccacgggcatgttagaaaggcatttaagtctcacgtatccacgctcacagatctgcagccttacatgcggcaatttgttgcgcatcttcaggagacatcccctctgagggatgcagtcgtgattgaacagtcaagttccctcaacgaggcctcatccggactctttgatgtcttccttcgcttcatgtgccatcacgccgtgcgcatcaggggaaagtcttatgtccaatgccaggggatcccccagggatctatcctgagcactctactatgctcattgtgctacggagatatggaaaataagctgtttgcaggcattaggagagatggactgctactgcgcctcgtcgatgattttctgcttgtgaccccccacttaacccacgctaagactttcctcagttacgccaggacttcaattagggcgagcctgactttcaataggggttttaaggccggccgtaacatgcgacgtaagctgtttggcgtgctgaggttgaagtgccactctttatttttagatttgcaggtgaactctctgcaaaccgtctgcaccaacatttataagattctgctgctccaggcttacagatttcatgcatgcgtgctccagctgccttttcaccagcaggtttggaagaatccaaccttctttctccgggtgatctccgatacagcatctctttgttactccatccttaaagctaagaatgctggtatgtccctaggggccaagggagccgccggacccttgccctccgaagcagtgcaatggctgtgtcatcaggccttcctgctgaaactcacccgacatcgcgttacttatgtgccccttttggggtctctgagaactgcacagacccagctaagcaggaaattaccaggaactactctcaccgccctcgaggctgccgccaatcccgccctcccttccgacttcaagacaatccttgattag

SEQ ID NO: 73796 - DNA, 2424 bp, Artificial Sequence
  derived and/or modified sequence
atgccgcgggccccccgatgccgcgccgtccgttctctgctcaggagccattaccgggaagtccttcctctggccactttcgtcaggaggctggggcctcaaggctggcggctagtgcagcgcggcgatcctgccgctttcagggccttggtggcgcaatgtctcgtgtgcgtcccttgggatgcacgccccccccccgctgccccttccttcagacaggtgtcctgtctgaaagaactggtggccagggtcctacagagactgtgcgagcgcggagccaagaacgtactcgccttcggttttgccctcctagacggtgcccgcggcgggccacccgaagccttcacaacctccgtgcgctcttacctccccaacactgtgactgatgcgctgcggggctccggagcctggggcctgttgctgcgccgggtcggcgatgacgttctcgttcaccttcttgctaggtgcgccctgttcgtgctggtggcgccgtcgtgcgcataccaggtatgcgggccgccgctgtatcagctgggggccgccacccaggcaaggccacctccgcatgcctcaggcccacgccggaggctgggttgcgaacgtgcatggaatcattccgttagggaggctggggtcccattgggactacccgctccaggagcaaggaggcggggaggctcagcttcacggtccctcccgttgcctaagcgccccagacggggcgctgcacctgagcctgagaggacacctgtcggccagggaagctgggcccaccctggcaggactcggggcccttcagatcgtggattttgtgtggtttcccccgctagacctgccgaagaagctactagcctagagggcgctttgtctggaacccgccacagtcatccctctgtcggacgacagcaccacgcaggacccccaagcaccagccgccctccgcggccatgggatactccgtgtcctcctgtttatgccgaaaccaaacattttctctactcttcaggtgataaagagcaactgaggccatcatttctcctgagcagcctgagaccgagtttgactggggcacggcggctcgtggagactatctttctgggttcaagaccatggatgcccgggacacctcgcaggctgccacgactcccccagagatattggcaaatgcggccgctatttctggaactcctggggaaccatgcgcagtgtccatacggtgttctgctcaaaacccactgccctttacgggcagcagtaacccctgctgccggtgtatgcgccagggaaaaaccgcagggctctgttgccgccccagaggaggaggatactgacccccggcgcctcgtccagctgctgagacagcatagctccccctggcaggtttatggttttgtcagagcttgtttgcggaggctcgttccgcctggactctgggggtctcggcataacgaaagaaggttcttgcgaaacaccaagaaatttatctcactgggcaaacatgctaaactatccctgcaggagctgacatggaaaatgtcggttagagattgcgcctggttgagaaggtcccctggcgtaggctgcgtccctgcggcggagcatagactgagagaagagatcttggcgaaatttctccactggttgatgtccgtttatgtggtcgagcttctgcgctcgttcttttatgtgacagaaacaacctttcaaaagaatcgactctttttttaccggaagtcagtgtggagtaagttgcaatctatcggaatcaggcagcacctgaagcgagtccagctgcgcgagcttagcgaagccgaagtacggcagcaccgcgaggcgcggcctgcactcctgacttcaaggctgaggtttatccccaagcccgacgggctccggcccattgtgaatatggactacgtggttggagcccgcacgtttaggcgggagaagagagccgaaaggctgacatccagagtgaaggcactattctctgtactgaactacgagagggctaggcgtccagggcttctgggtgcatccgtgctagggctggacgacatacaccgtgcctggcgcaccttcgtgctgcgtgtcagagcgcaggaccctcccccggagctgtatttcgtgaaagttgacgttaccggcgcttacgacacaatcccccaggacagattgactgaggttatcgcatcgataatcaagcctcagaacacatattgtgtgcggcgctatgccgttgtgcagaaggccgctcatggccatgtccgaaaagctttcaaaagtcatgtgctgcgccccgtacccggtgacccagccggattacatccactgcacgccgctctgcagcctgttcttcgtcggcacggagagcaggcagtgtgcggagactctgctggacgcgcagcccctgccttcggcggctag

SEQ ID NO: 73797 - DNA, 2424 bp, Artificial Sequence
  derived and/or modified sequence
atgccccgggccccccgctgcagagctgtgcgcagcctgctgcggagccactaccgggaggtgctgcccctggccacctttgtgcggcggctgggcccccagggctggaggctggtgcagagaggagaccctgctgccttccgggccctggtggcccagtgcctggtgtgtgtgccctgggatgcccggcccccacctgctgcccccagcttccggcaggtgtcctgcctgaaggagctggtggcccgggtgctgcagaggctgtgtgagcggggggccaagaatgtgctggcctttggatttgccctgctggatggagcccggggcggccccccagaggccttcaccacctctgtgcgcagctacctgcccaacacagtgacagatgccctgcggggcagcggggcctggggcctgctgctgcggcgggtgggagatgatgtgctggtgcacctgctggcccgctgtgccctgtttgtgctggtggcccccagctgtgcctaccaggtgtgtggcccccccctgtaccagctgggcgccgccacccaggcccggcccccacctcatgccagcggcccccggcggcggctgggctgtgagcgggcctggaaccacagcgtgcgggaggccggcgtgcccctgggcctgcctgcccctggggccaggagaagaggaggcagcgccagccgcagcctgcccctgcccaagaggcccaggagaggagctgcccctgagcctgagaggacccctgtgggccagggctcctgggcccaccctggccgcacccggggccccagcgaccggggcttctgtgtggtgtccccagcccggcctgctgaggaggccaccagcctggagggcgccctgagcggcaccaggcacagccaccccagcgtgggccggcagcaccacgccggcccccccagcaccagcaggcctccccggccctgggacaccccctgcccccctgtgtatgcagagaccaagcacttcctgtacagcagcggggacaaggagcagctgcggcccagcttcctgctgagcagcctgcggcccagcctgactggagcccggcggctggtggagaccatcttcctgggcagccggccctggatgcctggcaccccccggcggctgccccggctgccccagcgctactggcagatgaggcccctcttcctggagctgctgggcaaccacgcccagtgcccctatggagtgctgctgaagacccactgccccctgcgggctgctgtgaccccagctgctggggtgtgtgcccgggagaagccccagggctctgtggccgcccctgaggaggaggacacagacccccggcggctggtgcagctgctgcggcagcacagcagcccctggcaggtgtatggctttgtgcgggcctgcctgcggcggctggtgcccccaggcctgtggggcagccgccacaatgaaagacgcttcctgaggaacaccaagaagttcatcagcctgggcaagcacgccaagctgagcctgcaggagctgacctggaagatgtctgtgcgggactgtgcctggctgcggcgcagccctggggtgggctgtgtgcctgctgctgagcaccggctgcgggaggagatcctggccaagttcctgcactggctgatgtctgtgtatgtggtggagctgctgcgctccttcttctacgtgacagagaccaccttccagaagaacagactcttcttctacaggaagtctgtgtggagcaagctgcagagcatcggcatccggcagcacctgaagagggtgcagctgcgggagctgtctgaggccgaggtgcggcagcaccgggaggcccggcctgccctgctgaccagccggctgcgcttcatccccaagccagatggcctgcggcccatcgtgaacatggactatgtggtgggcgcccggaccttccggcgggagaagagagctgagcggctgaccagccgggtgaaggccctcttctctgtgctgaactatgagcgggcccggcggcccggcctgctgggcgcctctgtgctgggcctggatgacatccaccgggcctggaggacctttgtgctgcgggtgcgggcccaggaccccccacctgagctgtactttgtgaaggtggatgtgactggagcctatgacaccatcccccaggaccggctgacagaggtgattgccagcatcatcaagccccagaacacctactgtgtgcggcgctatgctgtggtgcagaaggccgcccacggccacgtgaggaaggccttcaagagccacgtgctgcggcctgtgcctggggaccctgctggcctgcaccccctgcatgctgccctgcagcctgtgctgcggcggcacggggagcaggccgtgtgtggggacagcgctggccgggccgccccagcctttggaggatag

SEQ ID NO: 73798 - DNA, 3210 bp, Artificial Sequence
  derived and/or modified sequence
atgccccgggccccccgctgcagagctgtgcgcagcctgctgcggagccactaccgggaggtgctgcccctggccacctttgtgcggcggctgggcccccagggctggaggctggtgcagagaggagaccctgctgccttccgggccctggtggcccagtgcctggtgtgtgtgccctgggatgcccggcccccacctgctgcccccagcttccggcaggtgtcctgcctgaaggagctggtggcccgggtgctgcagaggctgtgtgagcggggggccaagaatgtgctggcctttggatttgccctgctggatggagcccggggcggccccccagaggccttcaccacctctgtgcgcagctacctgcccaacacagtgacagatgccctgcggggcagcggggcctggggcctgctgctgcggcgggtgggagatgatgtgctggtgcacctgctggcccgctgtgccctgtttgtgctggtggcccccagctgtgcctaccaggtgtgtggcccccccctgtaccagctgggcgccgccacccaggcccggcccccacctcatgccagcggcccccggcggcggctgggctgtgagcgggcctggaaccacagcgtgcgggaggccggcgtgcccctgggcctgcctgcccctggggccaggagaagaggaggcagcgccagccgcagcctgcccctgcccaagaggcccaggagaggagctgcccctgagcctgagaggacccctgtgggccagggctcctgggcccaccctggccgcacccggggccccagcgaccggggcttctgtgtggtgtccccagcccggcctgctgaggaggccaccagcctggagggcgccctgagcggcaccaggcacagccaccccagcgtgggccggcagcaccacgccggcccccccagcaccagcaggcctccccggccctgggacaccccctgcccccctgtgtatgcagagaccaagcacttcctgtacagcagcggggacaaggagcagctgcggcccagcttcctgctgagcagcctgcggcccagcctgactggagcccggcggctggtggagaccatcttcctgggcagccggccctggatgcctggcaccccccggcggctgccccggctgccccagcgctactggcagatgaggcccctcttcctggagctgctgggcaaccacgcccagtgcccctatggagtgctgctgaagacccactgccccctgcgggctgctgtgaccccagctgctggggtgtgtgcccgggagaagccccagggctctgtggccgcccctgaggaggaggacacagacccccggcggctggtgcagctgctgcggcagcacagcagcccctggcaggtgtatggctttgtgcgggcctgcctgcggcggctggtgcccccaggcctgtggggcagccgccacaatgaaagacgcttcctgaggaacaccaagaagttcatcagcctgggcaagcacgccaagctgagcctgcaggagctgacctggaagatgtctgtgcgggactgtgcctggctgcggcgcagccctggggtgggctgtgtgcctgctgctgagcaccggctgcgggaggagatcctggccaagttcctgcactggctgatgtctgtgtatgtggtggagctgctgcgctccttcttctacgtgacagagaccaccttccagaagaacagactcttcttctacaggaagtctgtgtggagcaagctgcagagcatcggcatccggcagcacctgaagagggtgcagctgcgggagctgtctgaggccgaggtgcggcagcaccgggaggcccggcctgccctgctgaccagccggctgcgcttcatccccaagccagatggcctgcggcccatcgtgaacatggactatgtggtgggcgcccggaccttccggcgggagaagagagctgagcggctgaccagccgggtgaaggccctcttctctgtgctgaactatgagcgggcccggcggcccggcctgctgggcgcctctgtgctgggcctggatgacatccaccgggcctggaggacctttgtgctgcgggtgcgggcccaggaccccccacctgagctgtactttgtgaaggtggatgtgactggagcctatgacaccatcccccaggaccggctgacagaggtgattgccagcatcatcaagccccagaacacctactgtgtgcggcgctatgctgtggtgcagaaggccgcccacggccacgtgaggaaggccttcaagagccacgtgtccaccctgacagacctgcagccctacatgaggcagtttgtggcccacctgcaggagaccagccccctgagagatgctgtggtgattgagcagagcagcagcctgaatgaggccagcagcggcctgtttgatgtgttcctgcgcttcatgtgccaccacgctgtgcgcatccggggcaagagctatgtgcagtgccagggcatcccccagggcagcatcctgagcaccctgctgtgcagcctgtgctacggggacatggagaacaagctgtttgctggcatcagaagagatggcctgctgctgcggctggtggatgacttcctgctggtgaccccccacctgacccacgccaagaccttcctgtcctatgcccggaccagcatccgggccagcctgaccttcaacagaggcttcaaggccggcaggaacatgaggaggaagctgtttggagtgctgcggctgaagtgccacagcctcttcctggacctgcaggtgaacagcctgcagacagtgtgcaccaacatctacaagatcctgctgctgcaggcctaccgcttccacgcctgtgtgctgcagctgcccttccaccagcaggtgtggaagaaccccaccttcttcctgcgggtcatcagtgacacagccagcctgtgctacagcatcctgaaggccaagaatgccggcatgagcctgggcgccaagggagctgctggccccctgcccagcgaggccgtgcagtggctgtgccaccaggccttcctgctgaagctgaccaggcaccgggtgacctacgtgcccctgctgggcagcctgaggacagcccagacccagctgagcaggaagctgcccggcaccaccctgacagccctggaggccgccgccaacccagccctgcccagcgacttcaagaccatcctggactag

SEQ ID NO: 73799 - DNA, 2424 bp, Artificial Sequence
  derived and/or modified sequence
atgccccgggccccccggtgccgggccgtgcggagcctgctgcggagccattaccgggaagtgctcccgctggccacattcgtgaggagactcggcccccaaggctggcggctggtgcaaaggggagatccagcggcattcagagccctggtggcccagtgtcttgtgtgtgtgccgtgggatgcacgacccccccccgctgctcctagcttcagacaagtcagctgcctgaaagagctggttgcgagggtactgcagaggctgtgtgaaagaggtgcaaagaacgttctggcattcgggttcgctctccttgacggggctcgaggcggcccaccagaggcgtttaccacatcagtgcggtcctacctccccaatacagtgacagatgctctgagagggtctggcgcgtgggggctgctgctccggcgggttggtgatgacgtgcttgtgcacctgctggctcgatgcgcccttttcgtacttgtggcaccttcctgcgcctaccaggtgtgcggcccacccctgtatcaactcggagcagcaacccaagcgaggccacctcctcacgcgtccgggcctcgcaggaggctgggctgtgaacgggcctggaaccatagtgtcagagaggctggagtgccccttggcctgcctgcacctggtgcccggcggcggggcggctcagcttccaggtccctgcccctccctaaaagacctcgcagaggcgccgctcctgagcctgagagaacccctgtgggacaagggtcgtgggcacatcctggtagaacacgcggtccttcagatcgaggattctgcgtggtgagccctgccaggcccgccgaggaagctactagcctagaaggcgctctgagtggcacacgccactctcatccctccgtgggcaggcagcaccatgcaggtccacctagtacctcaagaccacccagaccctgggacacaccctgcccgcctgtctatgccgagaccaaacacttcctgtactcttccggggataaggagcagttgcggccttcattcttgttgtcttcgctcaggccaagcctgaccggtgcgagacgactggtagagacaattttcctcgggtcacgaccctggatgcccgggacacccagaagactcccacggctgcctcagagatattggcagatgcggcctctgttcctggagctgttgggcaaccatgcccaatgcccctacggggtgttactgaagacccactgccccttgcgtgcagctgtgacgcccgccgccggggtgtgcgcgcgggaaaagccgcaagggagtgtggcagctcccgaggaggaggacaccgatccaaggagactcgtgcagctcctgcgacagcatagctccccctggcaggtttacggcttcgttcgggcctgtctgagacgattggtgccccccggactttggggatcacggcacaacgagcggcggttcctgcgaaacactaaaaaatttatctcccttggaaaacacgcgaagttgtctcttcaggagctaacatggaagatgagcgtacgtgactgtgcgtggctcaggaggtcgcccggcgtcgggtgcgtgccagctgcggaacatcgccttcgggaggaaattctcgctaaattccttcactggctaatgtctgtctatgtggttgaacttttgcgttcattcttctatgtgaccgagaccacgttccagaaaaacaggctatttttctacagaaagagtgtatggtcgaaactacagtcgatcggaatacgccagcatctcaagcgggtgcaattacgtgaactttctgaggctgaagtgcggcagcaccgagaagctaggcctgcattacttacctccagattgcgcttcattcctaagcctgatggactgcgccccattgtgaatatggactacgtcgtgggggctcgtacatttcgcagagaaaagagggccgagaggctcactagtcgggtgaaggctctgttttccgtcttaaactatgagcgtgcgcgacggccaggactgctcggggcttcagtgttggggctcgacgacatccatagagcatggagaaccttcgtactgagggttcgcgcccaagacccaccaccagagctgtattttgtcaaagttgatgtcactggggcttatgatacgatccctcaggatagacttactgaagtgatagcttctatcataaaaccacagaatacgtattgcgtgaggcgatatgcagttgtgcagaaggctgcccatggacacgtgagaaaagccttcaagagccacgtcctgaggcctgtgcccggagaccccgcgggcctgcatcccctgcatgccgctctccaacctgtgttgcgacgacacggggaacaggcagtgtgcggggacagcgctggcagagccgctcctgctttcggcggatag

SEQ ID NO: 73800 - DNA, 3210 bp, Artificial Sequence
  derived and/or modified sequence
atgccccgggccccccggtgccgggccgtgcggagcctgctgcggtctcactatcgggaagtgctgccactggcaacttttgtacgacgactggggcctcagggatggcgcttggtacagagaggcgaccccgccgccttccgcgcgctggtggctcagtgcctggtttgtgtaccttgggacgctagacctcccccagctgccccaagctttcggcaagtgagctgtctaaaggaactggtggcccgcgtgcttcagcgcttgtgtgagagaggggccaaaaacgtgctagccttcgggttcgctctgctcgacggagcccgcggtgggccacccgaagcatttacgacctcggtccgctcctacctgccaaatactgttaccgatgctttgcgaggcagtggcgcatgggggctgctactcagacgcgttggcgacgacgtgctagttcatctgcttgctcgctgcgctttgtttgtactcgtggcacccagctgcgcctaccaagtttgcggaccacccttgtaccagctgggcgcagccacccaggccaggcctcctcctcatgccagtggaccccgccgcaggttggggtgcgagagggcctggaaccacagtgttcgcgaagccggggttccattgggcttgccagcccccggcgcccggcggagaggcggatcagccagtcggtccctgcctcttcctaaacgcccccgcaggggcgcagcacccgagccagaacgtaccccggttgggcagggcagctgggcccaccccggccggacacgtgggcctagcgaccgcggcttctgtgtggtgagccctgcgcggcctgcagaggaggcaacgtccctggagggggcattgagtggcacgcgccatagccatccttccgtcgggagacagcatcacgctggaccaccgtcaactagtaggcccccacgcccgtgggacaccccgtgcccacctgtttatgcagaaaccaagcactttctctattcctctggagataaagaacagttaaggccctcctttctcctgtctagtttacgaccaagcctcacaggtgctcgtcgcttggtggaaacaatcttcctgggctcacggccttggatgccagggacgccgcggcgcctccctcgactaccccagaggtattggcagatgcggccactgttcctggaactgcttgggaatcacgcccagtgcccctatggggtgctgctcaaaacccactgtcctctccgcgccgccgtaactcctgctgcaggagtgtgtgctagagagaagccacagggttctgttgccgctccggaggaagaggacaccgacccccgccgactcgtacaactgcttcgccagcacagttccccctggcaggtctacggatttgtgcgcgcatgccttcgccgcctcgtccccccaggactgtggggtagccgacataacgagcggcggttcctgcggaacacaaaaaaatttatttcccttggaaagcatgcgaagctttctttacaggaactcacatggaaaatgagcgtgcgggactgtgcatggctgcgtcgctcccctggcgtcggttgtgtcccagccgccgagcatcggcttagagaggagatcctggcaaagtttctgcattggctgatgtccgtctacgtagtggagctgcttcgtagtttcttttacgttacagagactacttttcaaaagaacagattgttcttctaccgcaagagcgtgtggtcaaaactgcaaagtatcggtatccgacagcacctcaagcgtgtgcagctgcgcgaacttagcgaggccgaggtgcgccagcatagagaagcgcgtcctgcgctcttgacctccaggctgagatttattcccaagccagatggcctgagaccgatcgttaacatggattacgtggtcggggcacggacatttcgcagggagaagcgcgctgaacgcttgactagccgggtgaaagccctgttttccgtccttaattacgaaagggcgaggaggccgggactcttgggagctagcgtgctcggcttagatgatattcaccgcgcgtggaggacatttgtgctgcgagtccgggcccaggatcctcctcctgaactgtactttgtcaaggtggacgtgaccggagcatacgacacgatcccccaggatcgtcttaccgaggtcatcgcctccatcatcaagccgcaaaacacgtattgtgtgcgaagatatgcggttgtacagaaggctgctcatggtcacgtccgcaaggcattcaagtctcatgtcagtacactgacagatctgcaaccgtatatgagacagttcgtggcacacctccaagagacctcgcccctcagggatgcagtagtgatcgagcaaagctctagtctgaacgaagccagctccgggctattcgatgtcttcctccgctttatgtgccatcacgcagtgcggattcggggcaagagctacgtccaatgtcagggtataccccaaggctccatcctgtccactctactatgctctttgtgttacggtgacatggaaaacaaactctttgcagggattcggcgcgacggactgctgttacgactagtcgacgattttctcctggtcacgccacacctgacacatgctaaaacctttctgtcctacgcccgaacctccataagagcgagcttgaccttcaacaggggctttaaggccggcagaaatatgaggagaaagctattcggggtgctgcgcctcaagtgccacagtctgttcctggatctccaggttaactcactgcaaactgtctgcacaaacatttacaagattttgctgctgcaggcctataggttccatgcttgcgttctgcagctgccttttcatcagcaggtctggaaaaatccaaccttttttctcagagtcatttctgatactgccagtctgtgttatagcattttaaaggctaaaaatgctggcatgtcattgggggctaagggcgcggccggtcctctgccttctgaggcggtccagtggttatgtcaccaggcgtttctcttaaagctgacaagacaccgggtgacttatgtccccttgttaggctccctccgcaccgcacagacccagctgtcccgaaaactgcctggcacaactttaacagccctggaggccgccgccaatccagcactgcctagtgattttaagaccattctcgactag

SEQ ID NO: 73801 - DNA, 2424 bp, Artificial Sequence
  derived and/or modified sequence
atgccccgggccccccggtgccgggccgtgcggagcctgctgcggtcccactatcgagaggttctacctttagctacttttgtgaggcgactgggaccccagggatggcgactcgtccagagaggcgaccccgcagcgttccgggccctggtagcccagtgcttagtgtgcgtgccctgggacgcccggcccccgccagccgctccatcctttaggcaggtgtcctgcctaaaggagctggttgcccgggtcctgcagaggctgtgcgaaagaggcgccaagaatgttctggccttcggttttgccctgctggacggcgctcggggaggcccccctgaggcctttaccacgtccgtccgctcttatctcccaaatacggttactgatgcactaagagggtcgggggcctgggggctcctgcttcggcgagtgggcgacgatgttctggtgcaccttctggccaggtgtgccttgttcgtcttagtggcaccgtcgtgtgcctaccaggtatgtggccctcccctataccagctgggcgcagcgactcaggccaggccccccccccacgcctccggcccacggaggaggttggggtgtgaacgagcttggaaccacagtgtcagagaagccggcgtccctctcggcctgccagcccctggggcccggcggcggggtggaagcgcatcccgaagtcttcccctgcctaagagacctcgtagaggcgcagcaccagagccggagagaacccccgtgggacagggctcttgggcccacccagggaggactaggggtccatccgaccgcggcttttgcgtggtgtctccagcccgtcccgctgaagaagcaacgagcctagagggagccctcagtggcacacggcacagccacccatccgtaggaaggcagcaccacgccgggcccccgtctacaagcagaccaccgcgaccctgggacacaccatgcccgcctgtttacgccgaaacgaagcactttctctatagctccggagacaaggaacagcttcgacccagcttccttctgtctagcttacgaccatctctgactggggcgcgccgcctggtcgagactattttcctggggagcaggccctggatgccgggcacaccgcgacgactacctcgactgcctcaacgctattggcagatgagacctttattcctcgagctcctagggaaccacgcccagtgtccatacggagtgcttctgaagacgcactgccccttgagagcagcagttactcccgcagctggcgtatgcgctcgtgagaagccccaaggctctgtggccgcccctgaggaggaggatacagatccacggcgccttgtgcaacttctgcggcagcattcttccccttggcaggtatacggttttgtaagggcgtgcctgagacgactggtgcctccaggactttggggaagccgccacaatgaacgccgctttctgcgcaatacaaagaagttcatctccctcggtaagcacgccaaactgagtttacaggaactcacatggaagatgagtgtcagggactgcgcttggctaaggcgaagtcccggagtaggctgtgttccagcagccgaacatcggttaagggaggagatactggctaagttcctccattggctgatgagcgtgtatgtcgtcgagttgctgagatcattcttctatgtgactgagaccacctttcagaagaaccgcctgttcttttacaggaagtctgtatggagcaagctacagtccataggaatccgacaacatcttaagagagtgcagttgcgcgagctgagcgaagccgaagttaggcagcatagggaggctcggccggcccttcttacatccaggctcaggtttatacctaagccggatggtctccggcccattgttaacatggactacgtggtgggagccagaacgtttagacgggaaaaacgcgcagagagactcacatcacgggtaaaggccctgttttcagtattgaactatgagagagcccgacggccaggactccttggcgcgagcgtgctcggcctggacgacatccacagggcatggaggacatttgtgcttcgggtgcgggcccaggatcctccaccagagttatactttgtaaaagtcgatgtcactggggcttatgatacaattccacaagatcggcttaccgaggtcatcgcctccattattaagccgcagaacacatattgcgtcagacgctatgcagtggtacagaaggctgcccacggacacgttcgtaaggccttcaaatctcacgtgctacggcctgttcctggggacccagccgggctgcatcctctgcacgccgctttgcagccagttcttaggagacacggcgagcaagccgtgtgcggagatagcgccggacgggcagccccagcctttggcggatag

SEQ ID NO: 73802 - DNA, 2424 bp, Artificial Sequence
  derived and/or modified sequence
atgcccagggctcccaggtgcagggccgtgcgatcgttgctgaggagccactaccgagaggtgttgccacttgctacttttgttcgacgtctaggcccacaggggtggagacttgtccagcgcggagatccagccgcatttagggcgcttgtggcccagtgtcttgtgtgcgtcccttgggatgcacgaccacctccggcagccccaagctttagacaagtatcttgtcttaaagaactggtggccagggtcctgcagcgtctgtgcgaacggggagctaaaaacgtccttgcattcgggttcgcattgctggatggggctcgcggtggccctcctgaggcatttactactagtgtgcggtcttacttacccaacaccgtcacagacgccctgcgaggatcgggggcttggggtttactactccgcagggtgggggacgacgtgttggtgcatctactcgcccgatgtgccctttttgtgttggtggccccaagctgcgcataccaagtatgcggtcctccactgtatcagctcggagcggcaacacaagctcgcccaccgccacatgccagtggacccaggaggcgcctggggtgcgagagagcatggaatcactcagttcgcgaagcaggagtccccttgggactcccagcacctggcgcacggaggaggggaggatctgcaagtcgctctctgcctctgccaaagcgtcctcgcaggggagctgctccagaacccgaaagaacccctgtgggtcaggggagttgggcccaccctggacggactcgaggaccctccgaccgcggtttttgtgtagtatcgccggcaagacccgctgaagaggccacctccctggaaggggctctgtcggggactcggcattcgcatccttctgtcgggcgtcagcaccatgccggacctcccagcacttcaagaccacccagaccctgggataccccctgtcctcctgtgtacgccgagacaaaacatttcctctatagtagcggagataaggaacagcttcgacctagcttcttactgagttccctccggcctagcctcacaggcgctcgcaggctcgtggaaacaattttcttagggagtaggccctggatgccaggaactccaaggcggctccccagactgccacagcggtattggcagatgagaccactgttcttggagctcctaggcaatcacgctcagtgcccctatggggtcctgttaaagacacattgcccccttagggccgctgtgactccggcagctggagtgtgcgctcgtgaaaagccgcaaggttcagtggctgctccagaggaggaagacactgacccccgacgtttggtgcaacttctgcgacaacacagttctccgtggcaggtatatgggtttgtgagagcatgccttagaaggctggtccctcccggactttggggcagccggcacaacgagaggagatttttgaggaatacaaaaaagtttatttctctcggtaagcacgccaagctctctctgcaggaacttacttggaagatgtccgttcgagattgtgcgtggctgcggcgaagcccgggagtggggtgtgtgcccgctgccgaacataggctaagggaggagatccttgctaaattcctgcactggttaatgagcgtgtacgtggtggagctgttgaggagctttttctacgtcaccgagacgacctttcagaagaatcggctgtttttctacagaaagtctgtctggagcaagttgcagagtatcggtatcaggcaacatcttaaacgcgtccaactgcgggagctcagcgaagctgaggtgcggcaacatagagaagcccgacctgctcttttgactagtaggttgaggttcatcccaaaacctgatggattgcgacctattgtgaatatggattatgtggtaggcgctcgtacttttcgcagggaaaaacgagccgaaaggttgacctcacgcgtgaaggcactgttttcggtattaaattacgagcgagcccgacggcctggtctgctgggggctagcgttcttggcctggacgacatccatcgcgcttggagaacatttgtgcttcgggtcagagcacaggatccccctcccgagttgtatttcgtcaaagtggatgtgacaggagcctacgatacgatccctcaagacagacttactgaagtgattgccagtataattaaacctcagaacacttactgtgttcgaagatacgccgtcgtgcagaaggccgctcacggacatgtgagaaaggctttcaaaagtcacgtcctgcgacccgttccaggggatcctgctggtctgcatcctttacatgccgcattacagccagtcctacggagacatggcgagcaggctgtctgcggagactcagctggtcgggcagcgccagccttcggcggatag

SEQ ID NO: 73803 - DNA, 3210 bp, Artificial Sequence
  derived and/or modified sequence
atgcccagggctccgaggtgtcgggctgtccgttcacttctccgctcccactaccgggaggtcctgcctctggcaaccttcgtgagacgactgggaccgcagggctggaggctggttcagcgaggtgatcccgcagcattcagagcccttgtcgctcaatgtttagtatgcgtcccgtgggatgccagaccccctccagccgcaccaagtttcagacaagtgtcttgtctgaaggaattagtggctcgggtgctacagcgcctgtgtgagcgaggggctaaaaatgtgctcgcattcggatttgccttattagacggggcacgaggaggtccacctgaagcgtttaccaccagcgtcaggtcctatctccccaatactgtcacagatgccctgaggggctccggggcttggggactactgctcagacgcgtgggcgacgatgtcctggtgcatctgctggctcgatgcgccctgtttgtcctagtggccccatcatgcgcataccaggtgtgtggccctcccctgtaccaactgggcgctgcaacccaggctcgcccaccgccacacgctagtggccctcgtaggcgcttggggtgtgagcgtgcctggaatcatagcgtacgagaggctggcgtacctcttgggttacctgcccctggtgcccgtagacgcggtgggagcgcatctcggtcccttccactgcctaagcggcctcggagaggggctgccccagaaccggagcgaactccggtaggtcagggatcttgggctcatccgggtaggacaagaggcccatcggatagggggttctgtgtggtctcaccagcacgcccagccgaagaagccacaagtctggaaggcgctctatctggcactcggcactcacacccatccgtcggaagacagcaccatgcaggaccaccgagcacttctcgcccaccgcgaccctgggatactccgtgccctcctgtatatgctgagacaaaacacttcctgtacagcagtggcgacaaggagcagttaaggccctcctttctgctctcctccctgaggccatctctgacgggcgcaagaagattggtggaaaccatattcttaggcagccggccatggatgccagggactcctcggaggctacctcgcttgcctcagcgatactggcagatgcgcccactgttcctggaactgcttggtaatcatgcccaatgtccatatggagtgctcttaaagacacattgccctttacgggctgccgtgactccagccgcaggcgtgtgcgctcgcgaaaaaccccaggggtcagtcgccgctcccgaggaagaagacaccgacccaagacgcctggtgcagctcctgagacagcattcatctccttggcaagtctacggcttcgtcagggcctgcctgcgacgtctggtcccacccggtctctggggttcccgccacaacgagcgacggtttcttcgcaataccaagaaattcatcagcctcggcaagcacgccaagctatcactgcaggagttaacttggaaaatgagtgtccgtgactgcgcctggctgaggcgctctccaggggtgggttgcgtgccggcagcggagcaccgcctgcgggaagaaattcttgcaaagttccttcactggctgatgtccgtttatgtagtcgagttactgcgctcgtttttttatgtgacggagactaccttccagaagaaccgattatttttctacagaaaaagcgtgtggagcaagttgcagagtataggtatcaggcaacacctcaaaagagtccagttgcgagagctgagcgaagcagaggtgcgacagcatagggaggccagaccagctctgttgactagccgtttgagatttattccaaagcccgatggactgcgccctatcgtaaatatggactatgtggttggagcccgtacgtttcgcagggaaaagcgggcagagcgactaacctcccgggtgaaagctctgttttccgtgctaaactacgaaagggcccgacggcctggtctcttaggtgcgagtgttcttgggttagatgacatccatcgtgcatggcgaacgttcgtccttagggtaagagcccaggatccaccacccgaactgtactttgtgaaggtagacgtgaccggggcatatgacactattcctcaggaccgactgacagaggtgattgcctccataatcaaaccccagaacacatattgtgtgagacgttatgcggtcgtgcagaaggcagctcatggtcacgtgagaaaggccttcaaaagccacgtctctacgctgacagatcttcagccatacatgcgccaattcgttgcacacctccaggagacctcgcctttgagagacgctgtggttattgaacagtcttctagtctcaatgaagcttcaagtggtcttttcgatgtgttcttgagattcatgtgccaccacgctgtgcgcatccggggtaagagttatgttcagtgccaggggatacctcaaggcagcatactgtctaccctgctttgttctctctgttatggggatatggaaaacaaactgtttgctgggataagacgcgacggtctgctgctgagactggtcgacgactttcttctagtgaccccccacttaacacatgctaagacgtttctgtcgtacgcgaggacaagcatacgcgcatcgctcacttttaatagagggtttaaggctggacggaatatgcgcaggaaattgtttggggtgttacggctgaagtgtcactccctattcctggacttacaggtaaatagccttcagacagtgtgtacaaacatatataaaattttgctcctgcaggcctataggttccacgcctgcgttctgcagttgccttttcatcagcaagtctggaaaaacccgactttttttctgcgtgtcatctcagacaccgcatccctctgctacagcattcttaaggccaaaaacgctgggatgagtctcggcgctaaaggggcagcaggccctcttccctccgaggctgtccagtggctctgtcaccaggcctttctcctgaagcttacgagacatagggttacttatgtccccctgctcggctctctcagaaccgcgcaaacccagttaagtcggaaactccccggaacgacactgactgcactggaagcagcagccaacccagccctgccgtctgattttaaaactattttggattag

SEQ ID NO: 73804 - DNA, 2424 bp, Artificial Sequence
  derived and/or modified sequence
atgccaagagctccccgatgccgcgctgttaggtccctgttgagatcacattacagggaggtcctgcccctcgctaccttcgtccggagactgggacctcagggctggagacttgtgcagcgtggagatcctgcagcattcagagctctggtcgcacagtgcctcgtgtgcgtgccgtgggacgccagaccacccccagccgctccctcttttcggcaggtgtcatgccttaaggagctggtagcacgggtgctccagagactgtgtgaacggggtgccaagaacgtactggcatttggcttcgccctcctcgacggtgccagaggcggacctcctgaagcgttcaccacctccgtgcgtagctacttgcctaatacggttacagacgcgcttagggggagtggagcctggggtctgctcctcaggcgcgttggtgatgatgtgctcgtgcaccttttggccaggtgcgcgctgtttgtattggtggctccatcttgtgcctatcaggtgtgtggtccaccgctgtatcaacttggtgctgctacgcaggctagacccccaccacatgccagcgggcctcgcaggagactgggctgtgaacgggcttggaaccacagcgtgcgggaggcaggagtaccccttggcctgcctgccccaggcgctcggagaagaggtggctccgctagccgcagtctccctctgccaaagcggcctcggagaggtgctgcaccagagccagagagaacccccgtgggccagggaagctgggctcacccaggccgaacgcggggaccttccgatagaggcttttgtgtcgtgagcccagctcgacctgccgaggaggctaccagcttggaaggcgctctttccggcacgcgccacagccatcccagcgttgggaggcagcaccacgccggacctcccagcacaagtcggccaccacggccttgggacacgccttgtcccccagtatatgccgagacaaaacacttcctttattcatccggtgacaaagagcaactaaggccttcttttctgctgagctccctccggccatccctgactggagctagaagactggttgaaacaatcttccttggcagccgcccttggatgcctggcactcccagaaggttgccacgactcccccagcgatactggcagatgaggcccctatttctggaattgctcggcaatcacgcccagtgcccttacggcgtgctgctcaagactcattgcccgctacgggcagccgtaactccggctgccggagtgtgcgccagggagaagccgcagggctctgtggccgcacccgaagaggaagatacggatcctagaaggttagttcagttgcttcgccagcactcttcgccctggcaagtctatgggttcgtccgagcatgcctgcgaagattagtgccacccggactttggggatcaaggcataatgagcgcagattcctgcgaaacactaaaaaattcatctcgctcggcaagcacgctaaacttagccttcaggagttgacctggaagatgtctgttcgcgattgtgcatggttaaggcggtcacccggagtgggctgcgtgccggctgctgagcacagactgagagaggaaattctggcaaagttcctgcattggctgatgtcagtgtatgtggttgaattgttgcgctcatttttttacgtgacggagaccacattccagaagaaccgcctcttcttctataggaagagtgtctggtccaagttgcagagtattgggatcaggcagcaccttaaacgggtgcaattgagggagctgagcgaggccgaggttaggcaacacagggaggcaagaccggctttgcttacaagccgcctgaggtttatccctaagcctgacgggttacggccaatcgtgaatatggattacgttgttggcgctagaacctttagacgggagaagcgcgctgagcgactgacatcaagggtgaaagccctgttttccgtcctgaactatgagcgggctcgccgacctggtctcctcggcgctagcgtgctcggtcttgacgatattcatcgggcttggcgcaccttcgtcctgcgagtcagagcacaggatcccccaccggagctgtacttcgtcaaggtggacgtcacaggcgcatacgatacaatccctcaggatagattgacagaggttattgcatcaatcatcaaacctcagaacacctattgcgtcagacgctacgctgtggtacagaaagccgcacatggacatgtcagaaaggcgttcaagtcgcacgttctgcgcccagttcccggtgaccctgccggtctgcatcctctccacgccgctctgcagccggtactgagaagacatggagaacaggcagtctgtggagactctgctggccgtgctgccccagctttcggagggtag

SEQ ID NO: 73805 - DNA, 3829 bp, Artificial Sequence
  derived and/or modified sequence
caggcagcgctgcgtcctgctgcgcacgtgggaagccctggccccggccacccccgcgatgccgcgcgctccccgctgccgagccgtgcgctccctgctgcgcagccactaccgcgaggtgctgccgctggccacgttcgtgcggcgcctggggccccagggctggcggctggtgcagcgcggggacccggcggctttccgcgcgctggtggcccagtgcctggtgtgcgtgccctgggacgcacggccgccccccgccgccccctccttccgccaggtgtcctgcctgaaggagctggtggcccgagtgctgcagaggctgtgcgagcgcggcgcgaagaacgtgctggccttcggcttcgcgctgctggacggggcccgcgggggcccccccgaggccttcaccaccagcgtgcgcagctacctgcccaacacggtgaccgacgcactgcgggggagcggggcgtgggggctgctgctgcgccgcgtgggcgacgacgtgctggttcacctgctggcacgctgcgcgctctttgtgctggtggctcccagctgcgcctaccaggtgtgcgggccgccgctgtaccagctcggcgctgccactcaggcccggcccccgccacacgctagtggaccccgaaggcgtctgggatgcgaacgggcctggaaccatagcgtcagggaggccggggtccccctgggcctgccagccccgggtgcgaggaggcgcgggggcagtgccagccgaagtctgccgttgcccaagaggcccaggcgtggcgctgcccctgagccggagcggacgcccgttgggcaggggtcctgggcccacccgggcaggacgcgtggaccgagtgaccgtggtttctgtgtggtgtcacctgccagacccgccgaagaagccacctctttggagggtgcgctctctggcacgcgccactcccacccatccgtgggccgccagcaccacgcgggccccccatccacatcgcggccaccacgtccctgggacacgccttgtcccccggtgtacgccgagaccaagcacttcctctactcctcaggcgacaaggagcagctgcggccctccttcctactcagctctctgaggcccagcctgactggcgctcggaggctcgtggagaccatctttctgggttccaggccctggatgccagggactccccgcaggttgccccgcctgccccagcgctactggcaaatgcggcccctgtttctggagctgcttgggaaccacgcgcagtgcccctacggggtgctcctcaagacgcactgcccgctgcgagctgcggtcaccccagcagccggtgtctgtgcccgggagaagccccagggctctgtggcggcccccgaggaggaggacacagacccccgtcgcctggtgcagctgctccgccagcacagcagcccctggcaggtgtacggcttcgtgcgggcctgcctgcgccggctggtgcccccaggcctctggggctccaggcacaacgaacgccgcttcctcaggaacaccaagaagttcatctccctggggaagcatgccaagctctcgctgcaggagctgacgtggaagatgagcgtgcgggactgcgcttggctgcgcaggagcccaggggttggctgtgttccggccgcagagcaccgtctgcgtgaggagatcctggccaagttcctgcactggctgatgagtgtgtacgtcgtcgagctgctcaggtctttcttttatgtcacggagaccacgtttcaaaagaacaggctctttttctaccggaagagtgtctggagcaagttgcaaagcattggaatcagacagcacttgaagagggtgcagctgcgggagctgtcggaagcagaggtcaggcagcatcgggaagccaggcccgccctgctgacgtccagactccgcttcatccccaagcctgacgggctgcggccgattgtgaacatggactacgtcgtgggagccagaacgttccgcagagaaaagagggccgagcgtctcacctcgagggtgaaggcactgttcagcgtgctcaactacgagcgggcgcggcgccccggcctcctgggcgcctctgtgctgggcctggacgatatccacagggcctggcgcaccttcgtgctgcgtgtgcgggcccaggacccgccgcctgagctgtactttgtcaaggtggatgtgacgggcgcgtacgacaccatcccccaggacaggctcacggaggtcatcgccagcatcatcaaaccccagaacacgtactgcgtgcgtcggtatgccgtggtccagaaggccgcccatgggcacgtccgcaaggccttcaagagccacgtcctacgtccagtgccaggggatcccgcagggctccatcctctccacgctgctctgcagcctgtgctacggcgacatggagaacaagctgtttgcggggattcggcgggacgggctgctcctgcgtttggtggatgatttcttgttggtgacacctcacctcacccacgcgaaaaccttcctcaggaccctggtccgaggtgtccctgagtatggctgcgtggtgaacttgcggaagacagtggtgaacttccctgtagaagacgaggccctgggtggcacggcttttgttcagatgccggcccacggcctattcccctggtgcggcctgctgctggatacccggaccctggaggtgcagagcgactactccagctatgcccggacctccatcagagccagtctcaccttcaaccgcggcttcaaggctgggaggaacatgcgtcgcaaactctttggggtcttgcggctgaagtgtcacagcctgtttctggatttgcaggtgaacagcctccagacggtgtgcaccaacatctacaagatcctcctgctgcaggcgtacaggtttcacgcatgtgtgctgcagctcccatttcatcagcaagtttggaagaaccccacatttttcctgcgcgtcatctctgacacggcctccctctgctactccatcctgaaagccaagaacgcagggatgtcgctgggggccaagggcgccgccggccctctgccctccgaggccgtgcagtggctgtgccaccaagcattcctgctcaagctgactcgacaccgtgtcacctacgtgccactcctggggtcactcaggacagcccagacgcagctgagtcggaagctcccggggacgacgctgactgccctggaggccgcagccaacccggcactgccctcagacttcaagaccatcctggactgatggccacccgcccacagccaggccgagagcagacaccagcagccctgtcacgccgggctctacgtcccagggagggaggggcggcccacacccaggcccgcaccgctgggagtctgaggcctgagtgagtgtttggccgaggcctgcatgtccggctgaaggctgagtgtccggctgaggcctgagcgagtgtccagccaagggctgagtgtccagcacacctgccgtcttcacttccccacaggctggcgctcggctccaccccagggccagcttttcctcaccaggagcccggcttccactccccacataggaatagtccatccccagattcgccattgttcacccctcgccctgccctcctttgccttccacccccaccatccaggtggagaccctgagaaggaccctgggagctctgggaatttggagtgaccaaaggtgtgccctgtacacaggcgaggaccctgcacctggatgggggtccctgtgggtcaaattggggggaggtgctgtgggagtaaaatactgaatatatgagtttttcagttttg

SEQ ID NO: 73806 - DNA, 3210 bp, Artificial Sequence
  derived and/or modified sequence
atgccgcgcgctccccgctgccgagccgtgcgctccctgctgcgcagccactaccgcgaggtgctgccgctggccacgttcgtgcggcgcctggggccccagggctggcggctggtgcagcgcggggacccggcggctttccgcgcgctggtggcccagtgcctggtgtgcgtgccctgggacgcacggccgccccccgccgccccctccttccgccaggtgtcctgcctgaaggagctggtggcccgagtgctgcagaggctgtgcgagcgcggcgcgaagaacgtgctggccttcggcttcgcgctgctggacggggcccgcgggggcccccccgaggccttcaccaccagcgtgcgcagctacctgcccaacacggtgaccgacgcactgcgggggagcggggcgtgggggctgctgctgcgccgcgtgggcgacgacgtgctggttcacctgctggcacgctgcgcgctctttgtgctggtggctcccagctgcgcctaccaggtgtgcgggccgccgctgtaccagctcggcgctgccactcaggcccggcccccgccacacgctagtggaccccgaaggcgtctgggatgcgaacgggcctggaaccatagcgtcagggaggccggggtccccctgggcctgccagccccgggtgcgaggaggcgcgggggcagtgccagccgaagtctgccgttgcccaagaggcccaggcgtggcgctgcccctgagccggagcggacgcccgttgggcaggggtcctgggcccacccgggcaggacgcgtggaccgagtgaccgtggtttctgtgtggtgtcacctgccagacccgccgaagaagccacctctttggagggtgcgctctctggcacgcgccactcccacccatccgtgggccgccagcaccacgcgggccccccatccacatcgcggccaccacgtccctgggacacgccttgtcccccggtgtacgccgagaccaagcacttcctctactcctcaggcgacaaggagcagctgcggccctccttcctactcagctctctgaggcccagcctgactggcgctcggaggctcgtggagaccatctttctgggttccaggccctggatgccagggactccccgcaggttgccccgcctgccccagcgctactggcaaatgcggcccctgtttctggagctgcttgggaaccacgcgcagtgcccctacggggtgctcctcaagacgcactgcccgctgcgagctgcggtcaccccagcagccggtgtctgtgcccgggagaagccccagggctctgtggcggcccccgaggaggaggacacagacccccgtcgcctggtgcagctgctccgccagcacagcagcccctggcaggtgtacggcttcgtgcgggcctgcctgcgccggctggtgcccccaggcctctggggctccaggcacaacgaacgccgcttcctcaggaacaccaagaagttcatctccctggggaagcatgccaagctctcgctgcaggagctgacgtggaagatgagcgtgcgggactgcgcttggctgcgcaggagcccaggggttggctgtgttccggccgcagagcaccgtctgcgtgaggagatcctggccaagttcctgcactggctgatgagtgtgtacgtcgtcgagctgctcaggtctttcttttatgtcacggagaccacgtttcaaaagaacaggctctttttctaccggaagagtgtctggagcaagttgcaaagcattggaatcagacagcacttgaagagggtgcagctgcgggagctgtcggaagcagaggtcaggcagcatcgggaagccaggcccgccctgctgacgtccagactccgcttcatccccaagcctgacgggctgcggccgattgtgaacatggactacgtcgtgggagccagaacgttccgcagagaaaagagggccgagcgtctcacctcgagggtgaaggcactgttcagcgtgctcaactacgagcgggcgcggcgccccggcctcctgggcgcctctgtgctgggcctggacgatatccacagggcctggcgcaccttcgtgctgcgtgtgcgggcccaggacccgccgcctgagctgtactttgtcaaggtggatgtgacgggcgcgtacgacaccatcccccaggacaggctcacggaggtcatcgccagcatcatcaaaccccagaacacgtactgcgtgcgtcggtatgccgtggtccagaaggccgcccatgggcacgtccgcaaggccttcaagagccacgtctctaccttgacagacctccagccgtacatgcgacagttcgtggctcacctgcaggagaccagcccgctgagggatgccgtcgtcatcgagcagagctcctccctgaatgaggccagcagtggcctcttcgacgtcttcctacgcttcatgtgccaccacgccgtgcgcatcaggggcaagtcctacgtccagtgccaggggatcccgcagggctccatcctctccacgctgctctgcagcctgtgctacggcgacatggagaacaagctgtttgcggggattcggcgggacgggctgctcctgcgtttggtggatgatttcttgttggtgacacctcacctcacccacgcgaaaaccttcctcagctatgcccggacctccatcagagccagtctcaccttcaaccgcggcttcaaggctgggaggaacatgcgtcgcaaactctttggggtcttgcggctgaagtgtcacagcctgtttctggatttgcaggtgaacagcctccagacggtgtgcaccaacatctacaagatcctcctgctgcaggcgtacaggtttcacgcatgtgtgctgcagctcccatttcatcagcaagtttggaagaaccccacatttttcctgcgcgtcatctctgacacggcctccctctgctactccatcctgaaagccaagaacgcagggatgtcgctgggggccaagggcgccgccggccctctgccctccgaggccgtgcagtggctgtgccaccaagcattcctgctcaagctgactcgacaccgtgtcacctacgtgccactcctggggtcactcaggacagcccagacgcagctgagtcggaagctcccggggacgacgctgactgccctggaggccgcagccaacccggcactgccctcagacttcaagaccatcctggactga

SEQ ID NO: 73807 - DNA, 2486 bp, Artificial Sequence
  derived and/or modified sequence
atgccgcgcgctccccgctgccgagccgtgcgctccctgctgcgcagccactaccgcgaggtgctgccgctggccacgttcgtgcggcgcctggggccccagggctggcggctggtgcagcgcggggacccggcggctttccgcgcgctggtggcccagtgcctggtgtgcgtgccctgggacgcacggccgccccccgccgccccctccttccgccaggtgtcctgcctgaaggagctggtggcccgagtgctgcagaggctgtgcgagcgcggcgcgaagaacgtgctggccttcggcttcgcgctgctggacggggcccgcgggggcccccccgaggccttcaccaccagcgtgcgcagctacctgcccaacacggtgaccgacgcactgcgggggagcggggcgtgggggctgctgctgcgccgcgtgggcgacgacgtgctggttcacctgctggcacgctgcgcgctctttgtgctggtggctcccagctgcgcctaccaggtgtgcgggccgccgctgtaccagctcggcgctgccactcaggcccggcccccgccacacgctagtggaccccgaaggcgtctgggatgcgaacgggcctggaaccatagcgtcagggaggccggggtccccctgggcctgccagccccgggtgcgaggaggcgcgggggcagtgccagccgaagtctgccgttgcccaagaggcccaggcgtggcgctgcccctgagccggagcggacgcccgttgggcaggggtcctgggcccacccgggcaggacgcgtggaccgagtgaccgtggtttctgtgtggtgtcacctgccagacccgccgaagaagccacctctttggagggtgcgctctctggcacgcgccactcccacccatccgtgggccgccagcaccacgcgggccccccatccacatcgcggccaccacgtccctgggacacgccttgtcccccggtgtacgccgagaccaagcacttcctctactcctcaggcgacaaggagcagctgcggccctccttcctactcagctctctgaggcccagcctgactggcgctcggaggctcgtggagaccatctttctgggttccaggccctggatgccagggactccccgcaggttgccccgcctgccccagcgctactggcaaatgcggcccctgtttctggagctgcttgggaaccacgcgcagtgcccctacggggtgctcctcaagacgcactgcccgctgcgagctgcggtcaccccagcagccggtgtctgtgcccgggagaagccccagggctctgtggcggcccccgaggaggaggacacagacccccgtcgcctggtgcagctgctccgccagcacagcagcccctggcaggtgtacggcttcgtgcgggcctgcctgcgccggctggtgcccccaggcctctggggctccaggcacaacgaacgccgcttcctcaggaacaccaagaagttcatctccctggggaagcatgccaagctctcgctgcaggagctgacgtggaagatgagcgtgcgggactgcgcttggctgcgcaggagcccaggggttggctgtgttccggccgcagagcaccgtctgcgtgaggagatcctggccaagttcctgcactggctgatgagtgtgtacgtcgtcgagctgctcaggtctttcttttatgtcacggagaccacgtttcaaaagaacaggctctttttctaccggaagagtgtctggagcaagttgcaaagcattggaatcagacagcacttgaagagggtgcagctgcgggagctgtcggaagcagaggtcaggcagcatcgggaagccaggcccgccctgctgacgtccagactccgcttcatccccaagcctgacgggctgcggccgattgtgaacatggactacgtcgtgggagccagaacgttccgcagagaaaagagggccgagcgtctcacctcgagggtgaaggcactgttcagcgtgctcaactacgagcgggcgcggcgccccggcctcctgggcgcctctgtgctgggcctggacgatatccacagggcctggcgcaccttcgtgctgcgtgtgcgggcccaggacccgccgcctgagctgtactttgtcaaggtggatgtgacgggcgcgtacgacaccatcccccaggacaggctcacggaggtcatcgccagcatcatcaaaccccagaacacgtactgcgtgcgtcggtatgccgtggtccagaaggccgcccatgggcacgtccgcaaggccttcaagagccacgtcctacgtccagtgccaggggatcccgcagggctccatcctctccacgctgctctgcagcctgtgctacggcgacatggagaacaagctgtttgcggggattcggcgggacgggctgctcctgcgtttggtggatgatttcttgttggtgacacctcacctcacccacgcgaaaaccttcctcaggtgaggcccgtgcc

SEQ ID NO: 73808 - protein, 533 aa, Artificial Sequence
  derived and/or modified sequence
MSSPPAYPGIRISGCRALGAEGSSNAESLDRLLPPVGTGRSPRKRTTSQCKSEPPLLRTSKRTIYTAGRPPWYNEHGTQSKEAFAIGLGGGSASGKTTVARMIIEALDVPWVVLLSMDSFYKVLTEQQQEQAAHNNFNFDHPDAFDFDLIISTLKKLKQGKSVKVPIYDFTTHSRKKDWKTLYGANVIIFEGIMAFADKTLLELLDMKIFVDTDSDIRLVRRLRRDISERGRDIEGVIKQYNKFVKPSFDQYIQPTMRLADIVVPRGSGNTVAIDLIVQHVHSQLEERELSVRAALASAHQCHPLPRTLSVLKSTPQVRGMHTIIRDKETSRDEFIFYSKRLMRLLIEHALSFLPFQDCVVQTPQGQDYAGKCYAGKQITGVSILRAGETMEPALRAVCKDVRIGTILIQTNQLTGEPELHYLRLPKDISDDHVILMDCTVSTGAAAMMAVRVLLDHDVPEDKIFLLSLLMAEMGVHSVAYAFPRVRIITTAVDKRVNDLFRIIPGIGNFGDRYFGTDAVPDGSDEEEVAYTG

SEQ ID NO: 73809 - protein, 86 aa, Artificial Sequence
  derived and/or modified sequence
MSSPPAYPGIRISGCRALGAEGSSNAESLDRLLPPVGTGRSPRKRTTSQCKSEPPLLRTSKRTIYTAGRPPWYNEHGTQSKEAFAI

SEQ ID NO: 73810 - DNA, 1602 bp, Artificial Sequence
  derived and/or modified sequence
atgagcagcccccccgcctaccccggcatcagaatcagcggctgcagagccctgggcgccgagggcagcagcaacgccgagagcctggacagactgctgccccccgtgggcaccggcagaagccccagaaagagaaccaccagccagtgcaagagcgagccccccctgctgagaaccagcaagagaaccatctacaccgccggcagacccccctggtacaacgagcacggcacccagagcaaggaggccttcgccatcggcctgggcggcggcagcgccagcggcaagaccaccgtggccagaatgatcatcgaggccctggacgtgccctgggtggtgctgctgagcatggacagcttctacaaggtgctgaccgagcagcagcaggagcaggccgcccacaacaacttcaacttcgaccaccccgacgccttcgacttcgacctgatcatcagcaccctgaagaagctgaagcagggcaagagcgtgaaggtgcccatctacgacttcaccacccacagcagaaagaaggactggaagaccctgtacggcgccaacgtgatcatcttcgagggcatcatggccttcgccgacaagaccctgctggagctgctggacatgaagatcttcgtggacaccgacagcgacatcagactggtgagaagactgagaagagacatcagcgagagaggcagagacatcgagggcgtgatcaagcagtacaacaagttcgtgaagcccagcttcgaccagtacatccagcccaccatgagactggccgacatcgtggtgcccagaggcagcggcaacaccgtggccatcgacctgatcgtgcagcacgtgcacagccagctggaggagagagagctgagcgtgagagccgccctggccagcgcccaccagtgccaccccctgcccagaaccctgagcgtgctgaagagcaccccccaggtgagaggcatgcacaccatcatcagagacaaggagaccagcagagacgagttcatcttctacagcaagagactgatgagactgctgatcgagcacgccctgagcttcctgcccttccaggactgcgtggtgcagaccccccagggccaggactacgccggcaagtgctacgccggcaagcagatcaccggcgtgagcatcctgagagccggcgagaccatggagcccgccctgagagccgtgtgcaaggacgtgagaatcggcaccatcctgatccagaccaaccagctgaccggcgagcccgagctgcactacctgagactgcccaaggacatcagcgacgaccacgtgatcctgatggactgcaccgtgagcaccggcgccgccgccatgatggccgtgagagtgctgctggaccacgacgtgcccgaggacaagatcttcctgctgagcctgctgatggccgagatgggcgtgcacagcgtggcctacgccttccccagagtgagaatcatcaccaccgccgtggacaagagagtgaacgacctgttcagaatcatccccggcatcggcaacttcggcgacagatacttcggcaccgacgccgtgcccgacggcagcgacgaggaggaggtggcctacaccggctag

SEQ ID NO: 73811 - DNA, 261 bp, Artificial Sequence
  derived and/or modified sequence
atgagcagcccccccgcctaccccggcatcagaatcagcggctgcagagccctgggcgccgagggcagcagcaacgccgagagcctggacagactgctgccccccgtgggcaccggcagaagccccagaaagagaaccaccagccagtgcaagagcgagccccccctgctgagaaccagcaagagaaccatctacaccgccggcagacccccctggtacaacgagcacggcacccagagcaaggaggccttcgccatctag

SEQ ID NO: 73812 - DNA, 1602 bp, Artificial Sequence
  derived and/or modified sequence
atgtctagccctccggcgtatcccggcatccgaatctcaggatgtagagccttgggggccgaaggaagctccaacgctgaatcactggaccgactgctacctccggtgggcaccggtagatctcccagaaagaggaccaccagccagtgcaagtcagagccccctctgttgcggacctctaagagaactatatacacggcagggcggccgccctggtacaatgagcatgggacacaatcaaaagaggcatttgcaataggactggggggggggtccgcttccggaaaaacaactgtcgcaagaatgataatcgaagcgcttgatgtgccatgggtggttctcttgtcgatggactctttctataaagtcttgactgaacagcagcaggagcaggcagcccataacaacttcaacttcgaccaccccgacgcctttgatttcgatttgatcatttcaaccctcaagaaactgaaacagggcaaaagcgtcaaggttcccatctacgacttcacaactcacagtcgtaagaaggactggaaaacactgtatggcgcaaacgtgatcatatttgagggcattatggcgtttgctgacaagaccctgctggagctactcgacatgaaaatcttcgtcgacactgactccgatataagactggtgaggcggctgaggagagatatttcagagcgtggccgggatatcgagggagttattaagcagtacaataaatttgtcaagccgtcgtttgaccagtacatccaacctacgatgaggctggccgatatagtagtccctaggggatcagggaacaccgtggccattgatttgattgtacagcacgtgcactctcaactcgaggaaagggaacttagcgtaagggcagctctcgccagtgcccaccagtgtcacccgttaccaaggacactttctgtgctgaaaagcactccccaggtgcggggaatgcacactatcatacgggacaaggagaccagtagggatgagttcatcttttactcaaaacggttaatgagattgttgatcgagcatgcactctctttcctgccatttcaggattgtgtggtgcagactccgcagggccaagattacgcaggcaaatgctacgccggtaagcagatcaccggggtctccattctgagagccggcgaaactatggagcctgcgctgcgcgccgtttgcaaggatgtgcgtataggcactatactgatccagaccaatcagctcactggcgagccggagctgcattatctgcggctcccaaaagacatcagtgatgatcacgtgattttgatggattgtaccgtgagcacgggcgcggctgctatgatggccgtacgggtcctcctggatcacgatgttcctgaggataagattttcctgctttcacttctgatggcagagatgggggtacattctgttgcctacgctttccctcgagtacggataatcacaactgcagtggacaagagggtcaacgacctcttcagaattattcctggcatcgggaactttggggaccgctactttggcactgatgctgtgccagacggctcagacgaggaggaggtggcttataccggttag

SEQ ID NO: 73813 - DNA, 261 bp, Artificial Sequence
  derived and/or modified sequence
atgagcagtcccccggcataccctggaattagaataagcggctgtcgcgctctgggagcggaagggtcttccaatgccgaatctcttgataggctgttgcctcctgtcggcactggaaggagtcctcggaaaagaacaacctcgcagtgtaaatctgagcccccattgcttaggacctcaaagaggactatctacacggccgggcgacccccgtggtataacgaacacggcactcaatccaaagaggcttttgcaatctag

SEQ ID NO: 73814 - DNA, 1602 bp, Artificial Sequence
  derived and/or modified sequence
atgagcagccccccagcctacccaggcatccgcatcagcggctgccgggccctgggcgctgagggcagcagcaatgctgagagcctggaccggctgctgccccctgtgggcaccggccgcagccccaggaagaggaccaccagccagtgcaagtctgagccccccctgctgcggaccagcaagaggaccatctacacagctggccggcccccctggtacaatgagcacggcacccagagcaaggaggcctttgccatcggcctgggcggcggcagcgccagcggcaagaccaccgtggccaggatgatcatcgaggccctggatgtgccctgggtggtgctgctgtccatggacagcttctacaaggtgctgacagagcagcagcaggagcaggccgcccacaacaacttcaactttgaccacccagatgcctttgattttgacctgatcatcagcaccctgaagaagctgaagcagggcaagtctgtgaaggtgcccatctatgacttcaccacccacagcaggaagaaggactggaagaccctgtatggagccaacgtcatcatctttgagggcatcatggcctttgctgacaagaccctgctggagctgctggacatgaagatctttgtggacacagacagcgacatccggctggtgcggcggctgcggcgggacatcagcgagcggggccgggacatcgagggcgtcatcaagcagtacaacaagtttgtgaagcccagctttgaccagtacatccagcccaccatgaggctggccgacatcgtggtgccccggggcagcggcaacacagtggccatcgacctgattgtgcagcacgtgcacagccagctggaggagcgggagctgtctgtgcgggccgccctggccagcgcccaccagtgccaccccctgcccaggaccctgtctgtgctgaagagcaccccccaggtgcggggcatgcacaccatcatccgggacaaggagaccagcagagatgagttcatcttctacagcaagaggctgatgaggctgctgattgaacatgccctgtccttcctgcccttccaggactgtgtggtgcagaccccccagggccaggactatgctgggaagtgctacgccggcaagcagatcaccggggtgtccatcctgcgggccggggagaccatggagcccgccctgcgggctgtgtgcaaggatgtgcgcatcggcaccatcctgatccagaccaaccagctgactggagagcctgagctgcactacctgcggctgcccaaggacatcagtgatgaccacgtgatcctgatggactgcaccgtgtccactggagctgctgccatgatggctgtgcgggtgctgctggaccatgatgtgcctgaggacaagatcttcctgctgagcctgctgatggccgagatgggcgtgcacagcgtggcctatgccttcccccgggtgcgcatcatcaccacagctgtggacaagagggtgaatgacctcttccgcatcatccctggcatcggcaactttggagaccgctactttggaacagatgctgtgcctgatggcagtgatgaggaggaggtggcctacacaggatag

SEQ ID NO: 73815 - DNA, 261 bp, Artificial Sequence
  derived and/or modified sequence
atgagcagccccccagcctacccaggcatccgcatcagcggctgccgggccctgggcgctgagggcagcagcaatgctgagagcctggaccggctgctgccccctgtgggcaccggccgcagccccaggaagaggaccaccagccagtgcaagtctgagccccccctgctgcggaccagcaagaggaccatctacacagctggccggcccccctggtacaatgagcacggcacccagagcaaggaggcctttgccatctag

SEQ ID NO: 73816 - DNA, 1602 bp, Artificial Sequence
  derived and/or modified sequence
atgagcagcccccccgcctaccccggcatccggatcagcggctgcagggcgttaggtgcagaagggtcctccaacgcagaatccctggatcgcctcttaccccctgttggtaccggccgctcgcctagaaaacggaccacctcacagtgtaagtccgagcccccactgttgcggacgtctaaacgcaccatctacaccgccggcaggccaccctggtataacgaacatggaactcaaagcaaggaggcgttcgcaatcggacttggaggaggcagtgcctctggcaaaactacagtggcccggatgattattgaagcactcgacgttccttgggttgtactgctgtctatggacagcttctacaaagttctgaccgaacagcagcaagaacaagccgcccataacaactttaacttcgatcacccagacgctttcgatttcgacctaatcatttctaccttaaagaagctgaaacagggcaagtcagtgaaagttccgatttatgacttcactacccactccagaaaaaaggattggaagaccctgtacggcgccaacgtcatcatttttgagggcattatggcctttgcagacaaaactctgctcgaacttctcgatatgaaaatcttcgtggacaccgacagcgacatcaggttagtgcgccggctgagaagagacatctccgagaggggccgcgacatcgaaggggtgattaaacaatacaataaattcgtaaagccctctttcgaccagtacattcagccgacgatgaggctggccgatatcgtggtcccccgagggtctgggaataccgtggccattgatttgattgtgcagcacgtccacagccagctcgaggagcgagaactctctgttagggccgccttagcttcagcgcatcagtgtcacccgcttcccagaacactgtcggtgctcaagagcaccccacaagtgcgtggcatgcataccattatccgagataaggagacatcacgtgatgagttcatcttctattctaaacggttaatgaggcttctcatcgagcatgccctctcctttttgccctttcaggattgtgtggtacagacccctcaggggcaggactacgccggaaaatgctacgccgggaagcagataactggcgtgagcatactccgcgcaggcgagaccatggagccagccctcagggcggtgtgtaaagatgtgaggataggaacaatactgattcagacaaaccaactgaccggggagcccgaactccattatctaagactgccaaaggatatcagtgatgatcatgtgattcttatggactgtacagtctcaacgggggctgccgccatgatggctgtacgggtcttgttagatcacgatgtgccggaggataaaatcttccttctgtcacttctaatggcagaaatgggggtgcattctgtggcatacgcatttccgcgcgtgcggattatcactacagccgtggacaagagagtgaatgatctgttccggatcattccgggcattgggaactttggagatcgatattttggaactgacgccgtgccggacggctcggacgaagaggaggttgcgtatacaggttag

SEQ ID NO: 73817 - DNA, 261 bp, Artificial Sequence
  derived and/or modified sequence
atgagcagcccccccgcctaccccggcatccggatcagcggctgccgcgccctgggcgccgagggatcgagcaatgccgagtctctagacagactgctccctcctgtaggcaccgggcgaagcccccggaagaggaccacttcccagtgcaagtccgagccgcctctgctcagaacctccaagagaacaatctacactgccggccggccaccatggtacaacgaacatggaacccagtcgaaggaagcctttgctatctag

SEQ ID NO: 73818 - DNA, 1602 bp, Artificial Sequence
  derived and/or modified sequence
atgtcctcccccccagcatatcctggtatcaggatctccggctgcagggcactcggcgctgagggaagctctaatgccgaatctctggacaggctgctcccaccagttggtacgggtcgtagccccaggaagaggactacttcacagtgcaagtctgaaccccctctcctgagaacttctaagcgcacaatttatactgctggccgacctccttggtataacgagcacgggactcagtccaaggaagctttcgccatcggactgggagggggatctgcttcaggaaagaccaccgtggccagaatgatcattgaggctctggacgttccgtgggtggtactcctgagcatggactccttttataaagtgctgacggagcagcagcaggaacaagcagcgcacaataacttcaactttgaccacccagacgcatttgattttgatctgattatcagtacattaaagaagttgaagcagggaaaatccgtcaaagtgcccatctacgatttcacaactcatagtcggaagaaagactggaaaactttatatggggcaaacgtgatcatcttcgagggcattatggcctttgcggacaagactctgctggagctgctggatatgaaaattttcgttgacaccgacagtgacattagactggtgaggcgcctcagaagggatatttcggagagaggacgggacatcgaaggggtgatcaaacagtataataagttcgtcaagccatctttcgatcagtacatccagcctaccatgagactcgcagatattgtggttcccagggggtctgggaatacagttgccatcgacctgatcgtgcagcatgtgcacagtcaactggaggagagagaactgagcgtgagagctgcattggccagcgcgcaccaatgccaccccctgcctagaacgcttagcgtgcttaaaagtacgccccaggtgcggggtatgcacacaattatccgagacaaagagacatctcgtgacgagttcatattctattccaaacgattgatgaggctgctgattgaacacgctctcagcttcctgccatttcaagattgtgttgtgcagacccctcaagggcaggattatgcagggaagtgctatgctggcaaacagatcacaggtgtgtccatcctgcgagccggagagactatggaacccgcattacgggctgtgtgcaaggatgtgcgcatcggtacaatcttaatacagactaatcaattgactggagagcctgagcttcattacctaaggctgcccaaagatatttcggacgaccacgtcatccttatggattgtacagtctcaacaggagccgctgcaatgatggcagtgagagtgctgctcgatcacgacgtgcctgaggacaaaatatttctgcttagcctcctgatggccgaaatgggcgtccactctgttgcctacgcctttcccagagtacgcatcataaccactgcagttgataagcgcgtcaacgacctattccgtatcattcctggaattggaaattttggtgacagatactttggtaccgacgccgtccccgatggaagcgatgaggaggaggtcgcttacactggttag

SEQ ID NO: 73819 - DNA, 261 bp, Artificial Sequence
  derived and/or modified sequence
atgtcatccccacccgcatatcccggtattagaatctccggctgtagggcccttggcgctgaaggatcttccaacgctgagagtctggatagactgttgcccccagtgggaacaggacgctcccccagaaagaggacaacctcgcaatgtaagagtgagcctcccctacttaggacaagcaaaagaacaatctacaccgccggtagacccccatggtataacgaacacggaacgcagagcaaagaggcatttgctatttag

SEQ ID NO: 73820 - DNA, 1954 bp, Artificial Sequence
  derived and/or modified sequence
agtacggtggaggcttcaagggcctcctagctgctgtgcctctgctgacatttggcaggcagcttctgccagccaagggtctcaccccagccacccggctctgcacccactgtgctgcccacaggagtggtcctgcccatggaagggccagttcaggtggccggagctcctgagctgccctaggggactgctgtgggtctgaggtggtgatgtcccccacggctgcctgcgcctgagcccccacgcatccacccctggggccactctgctgttcaggagcacccacccgtgtcctcgaccatgagcagccccccagcttaccctggcatcaggatctcagggtgccgggcccttggagcagaaggcagcagcaatgcagagtccctggacaggctcctgccacctgtgggcactgggcgctctccccggaagcggaccaccagccagtgcaagtcagagcctcccctgctgcgtacaagcaagcgtaccatctacaccgccgggcggccgccctggtacaatgaacacggcacgcaatccaaagaggccttcgccatcggcttgggaggcggcagtgcctctgggaagaccactgtggccagaatgatcatcgaggccctggatgtgccctgggtggtcttgctgtccatggactccttctacaaggtgctgactgagcagcagcaggaacaggccgcacacaacaacttcaacttcgaccacccagatgcctttgacttcgacctcatcatttccaccctcaagaagctgaagcaggggaagagtgtcaaggtgcccatttatgacttcaccacgcacagccggaagaaggactggaaaacactgtatggtgcaaacgtcatcatctttgagggcatcatggcctttgctgacaagacactgttggagctcctggacatgaagatctttgtggacacagactccgacatccgcctggtacggcggctgcgccgggacatcagtgagcgcggccgggacatcgagggtgtcatcaagcagtacaacaagtttgtcaagccctccttcgaccagtacatccagcccaccatgcgcctggcagacatcgtggtccccagagggagcggcaacacggtggccatcgacctgattgtgcagcacgtgcacagccagctggaggagcgtgaactcagcgtcagggctgcgctggcctcggcacaccagtgccacccgctgccccggacgctgagcgtcctgaagagcacgccgcaggtacggggcatgcacaccatcatcagggacaaggagaccagtcgcgacgagttcatcttctactccaagagactgatgcggctgctcatcgagcacgcgctctccttcctgccctttcaggactgcgtcgtacagaccccgcaggggcaggactatgcgggcaagtgctatgcggggaagcagatcaccggtgtgtccattctgcgcgccggtgaaaccatggagcccgcgctgcgcgctgtgtgcaaagacgtgcgcatcggcaccatcctcatccagaccaaccagcttaccggggagcccgagctccactacctgaggctgcccaaggacatcagcgatgaccacgtgatcctcatggactgcaccgtgtccacgggcgcggcggccatgatggcagtgcgcgtgctcctggaccacgacgtgcctgaggacaagatctttttgctgtcgctgctcatggcagagatgggcgtgcactcagtggcctatgcatttccgcgagtgagaatcatcaccacggcggtggacaagcgggtcaatgaccttttccgcatcatcccaggcattgggaactttggcgaccgctactttgggacagacgcggtccccgatggcagtgacgaggaggaagtggcctacacgggttagctgcccagtgagccatcccgtccccaccaccctcctcctgcctcctgaccca

SEQ ID NO: 73821 - DNA, 422 bp, Artificial Sequence
  derived and/or modified sequence
catggaagggccagttcaggtggccggagctcctgagctgccctaggggactgctgtgggtctgaggtggtgatgtcccccacggctgcctgcgcctgagcccccacgcatccacccctggggccactctgctgttcaggagcacccacccgtgtcctcgaccatgagcagccccccagcttaccctggcatcaggatctcagggtgccgggcccttggagcagaaggcagcagcaatgcagagtccctggacaggctcctgccacctgtgggcactgggcgctctccccggaagcggaccaccagccagtgcaagtcagagcctcccctgctgcgtacaagcaagcgtaccatctacaccgccgggcggccgccctggtacaatgaacacggcacgcaatccaaagaggccttcgccatcg

SEQ ID NO: 73822 - protein, 533 aa, Artificial Sequence
  derived and/or modified sequence
MGSSRLAALLLPLLLIVIDLSDSAGIGFRHLPHWNTRCPLASHTDDSFTGSSAYIPCRTWWALFSTKPWCVRVWHCSRCLCQHLLSGGSGLQRGLFHLLVQKSKKSSTFKFYRRHKMPAPAQRKLLPRRHLSEKSHHISIPSPDISHKGLRSKRTQPSDPETWESLPRLDSQRHGGPEFSFDLLPEARAIRVTISSGPEVSVRLCHQWALECEELSSPYDVQKIVSGGHTVELPYEFLLPCLCIEASYLQEDTVRRKKCPFQSWPEAYGSDFWKSVHFTDYSQHTQMVMALTLRCPLKLEAALCQRHDWHTLCKDLPNATARESDGWYVLEKVDLHPQLCFKFSFGNSSHVECPHQTGSLTSWNVSMDTQAQQLILHFSSRMHATFSAAWSLPGLGQDTLVPPVYTVSQARGSSPVSLDLIIPFLRPGCCVLLHASLSSPGGEDAWLIGVGGSVPSGVAVRCPVCLEAPLVSGCLLQTPGALDPGTAGPPHPTGCCSGPHLPAPTVRPGPSAASAPPARGGLGGAAAPGGSAG

SEQ ID NO: 73823 - DNA, 1602 bp, Artificial Sequence
  derived and/or modified sequence
atgggaagttcccgattggccgcattactattgccactgttgcttatcgtaattgatctgtcagattcggccggtatcgggtttaggcatctgcctcactggaacacaagatgcccactagcgagccataccgatgatagctttactggatccagtgcgtatattccctgccggacgtggtgggcactcttcagcaccaagccttggtgcgtgcgagtgtggcactgttccagatgtctctgccagcacctgctgtccggcggatccgggctgcaacgcggactttttcacttattggtgcagaagtccaaaaaatcttccacattcaaattttatcgcagacataaaatgccggcacctgctcaacgcaaacttctccctcgccgtcacctttccgaaaaatcccaccatatctctatccctagccccgatatttcccacaaaggcttacgtagtaaacgaacacagccttctgaccctgaaacttgggaaagcctgcccagattggattctcaaaggcatggtggcccagaatttagttttgatctgctccccgaagcgcgtgccattcgagtgacgataagctctggccctgaagtgagcgtgcgactgtgccaccaatgggccttggagtgtgaagagctctcatctccctatgacgttcagaaaatcgtttctggaggacacaccgttgaattgccttatgagtttctcctgccatgcttgtgtattgaagcttcctacctgcaggaggacacggtgaggcgcaagaaatgccccttccagtcttggcccgaggcctacggaagcgacttctggaagagcgtccatttcacggactacagccaacatactcagatggtcatggcgctgacactgagatgcccactgaagttggaagctgctctctgccagaggcacgactggcacaccttatgcaaagacctccctaatgccactgccagagagtctgatggctggtatgtgctggagaaagtagacttacatccccagctgtgcttcaagtttagcttcggaaattcttcacatgtcgaatgccctcatcaaactggttctttgacttcttggaatgtgtccatggacacgcaggctcagcagttgatccttcacttctctagccgcatgcatgccacctttagtgccgcatggagtttgcctgggctgggccaggacacccttgtgccccctgtgtacacagttagccaggcaagaggaagttcacccgttagcttagatctgatcatccccttcctgaggccaggatgctgtgtcttgctccacgcaagtctgtctagccctggcggagaggacgcttggctgattggtgtgggaggatctgttcccagcggcgtggcggtccggtgccccgtgtgcctggaagccccacttgtcagcggatgcctccttcaaacacccggagcgttggacccgggtaccgctgggcctcctcacccaactggatgctgttctggccctcatctgccagctcccactgtcaggcctggaccctcagctgcatctgcacctcccgctaggggtggtctgggaggagcagcagcgccaggcggaagtgcaggctag

SEQ ID NO: 73824 - DNA, 1602 bp, Artificial Sequence
  derived and/or modified sequence
atgggcagttctcgcttggcggctcttctgctcccactgctcctgattgttatagacctgtccgactccgccggcatagggttccggcacctgccacactggaatacccgctgccctctcgccagccacacagatgactccttcacaggcagctccgcatacatcccttgccggacttggtgggcactgttctccacgaaaccatggtgtgtccgggtgtggcactgttcaagatgtctctgccaacacctcctgtctggcggctccggactgcaacgcggtctgttccatcttctggtacagaaatctaagaaatctagtacttttaaattttatagacgccacaagatgcccgccccggcccagcgcaagttattgccacgtagacatctctccgagaagtcgcatcatatcagtataccaagcccagatatctcacacaaaggtctgcggtccaagcgcacacagcctagtgaccctgagacatgggaatccttgccaaggcttgattctcagcgacatggcgggccagagttctctttcgacctgctcccagaggcacgagcgatcagggtgacaatcagtagcggccccgaggttagcgtgaggctatgccaccagtgggcgttggagtgtgaagagctgtcttctccatacgacgtgcagaaaatagtgtccggcggccacacagtcgaactgccatatgagtttttgctgccatgtctgtgcattgaagcctcatatttacaagaggacaccgttagacgtaaaaagtgcccgttccagtcctggcctgaggcctacggctctgatttttggaaaagtgttcactttacggattactcccagcacactcagatggttatggctctgacattaaggtgcccactgaagttagaggcggctctgtgccaaaggcatgattggcacaccctgtgcaaggaccttcccaacgcaactgcacgcgagtccgatggctggtacgtgctcgagaaggtcgatctacaccctcaattgtgtttcaagttttccttcggcaatagctcgcatgtcgagtgtccccaccaaaccggctcacttacatcatggaacgtgtccatggacacacaggcacagcagttgattttgcacttcagctctcggatgcacgcaacgttttctgctgcatggtcactgccaggtctgggccaggatacacttgtgcctcctgtctatactgtttcccaggcccgaggaagttcccctgtgtctctggatctgatcataccctttcttcggccagggtgctgtgtccttctccacgcctcattatctagtcccggcggtgaggacgcatggcttataggtgtgggtggaagtgtcccaagcggcgtggctgtacggtgtccagtgtgccttgaagcccccttagtctccggttgcctgctgcagacccctggggccctcgatcctggcacagccggtccaccacatcccaccgggtgctgctctggacctcatttaccagcgccaactgtaaggcctggaccctctgctgccagcgctccccctgcgagaggaggcctaggcggagccgccgcccccggcggaagcgccggctag

SEQ ID NO: 73825 - DNA, 2757 bp, Artificial Sequence
  derived and/or modified sequence
gtgttcgctgctgcacagcaaggccctgccacccaccttcaggccatgcagccatgttccgggagccctaattgcacagaagcccatggggagctccagactggcagccctgctcctgcctctcctcctcatagtcatcgacctctctgactctgctgggattggctttcgccacctgccccactggaacacccgctgtcctctggcctcccacacggatgacagtttcactggaagttctgcctatatcccttgccgcacctggtgggccctcttctccacaaagccttggtgtgtgcgagtctggcactgttcccgctgtttgtgccagcatctgctgtcaggtggctcaggtcttcaacggggcctcttccacctcctggtgcagaaatccaaaaagtcttccacattcaagttctataggagacacaagatgccagcacctgctcagaggaagctgctgcctcgtcgtcacctgtctgagaagagccatcacatttccatcccctccccagacatctcccacaagggacttcgctctaaaaggacccaaccttcggatccagagacatgggaaagtcttcccagattggactcacaaaggcatggaggacccgagttctcctttgatttgctgcctgaggcccgggctattcgggtgaccatatcttcaggccctgaggtcagcgtgcgtctttgtcaccagtgggcactggagtgtgaagagctgagcagtccctatgatgtccagaaaattgtgtctgggggccacactgtagagctgccttatgaattccttctgccctgtctgtgcatagaggcatcctacctgcaagaggacactgtgaggcgcaaaaaatgtcccttccagagctggccagaagcctatggctcggacttctggaagtcagtgcacttcactgactacagccagcacactcagatggtcatggccctgacactccgctgcccactgaagctggaagctgccctctgccagaggcacgactggcataccctttgcaaagacctcccgaatgccacagctcgagagtcagatgggtggtatgttttggagaaggtggacctgcacccccagctctgcttcaagttctcttttggaaacagcagccatgttgaatgcccccaccagactgggtctctcacatcctggaatgtaagcatggatacccaagcccagcagctgattcttcacttctcctcaagaatgcatgccaccttcagtgctgcctggagcctcccaggcttggggcaggacactttggtgccccccgtgtacactgtcagccaggcccggggctcaagcccagtgtcactagacctcatcattcccttcctgaggccagggtgctgtgtcctgctccatgcttcactcagctccccgggaggagaagatgcctggctcataggggtggggggctctgtgccctcaggtgtggcggtcagatgtccagtttgcctggaagcacctcttgtgtccggatgtctcttacagacacctggggctcttgatcctggcactgctggccctcctcaccctactgggtgttgttctggccctcacctgccggcgcccacagtcaggcccgggcccagcgcggccagtgctcctcctgcacgcggcggactcggaggcgcagcggcgcctggtgggagcgctggctgaactgctacgggcagcgctgggcggcgggcgcgacgtgatcgtggacctgtgggaggggaggcacgtggcgcgcgtgggcccgctgccgtggctctgggcggcgcggacgcgcgtagcgcgggagcagggcactgtgctgctgctgtggagcggcgccgaccttcgcccggtcagcggccccgacccccgcgccgcgcccctgctcgccctgctccacgctgccccgcgcccgctgctgctgctcgcttacttcagtcgcctctgcgccaagggcgacatccccccgccgctgcgcgccctgccgcgctaccgcctgctgcgcgacctgccgcgtctgctgcgggcgctggacgcgcggcctttcgcagaggccaccagctggggccgccttggggcgcggcagcgcaggcagagccgcctagagctgtgcagccggctcgaacgagaggccgcccgacttgcagacctaggttgagcagagctccaccgcagtcccgggtgtctgcggccgcaacgcaacggacactggctggaaccccggaatgagccttcgaccctgaaatccttggggtgcctcgaggacgactggccgaaaagccgcattccctgcctcacaggccggaagtcccagcccagtccccgcgcgcgtccctcttcctcctcatactttcccttgactgagagctcctctaacccctgttctgatgggggagggcggtcttcccacttcctctccagaactccagaaagagcagtgtgcttatgcttcagtccaggctggagaggttggggccggggtagggaggcaggagccatgtcagttctgaaggagggtgaggcggtgggggattgcagggggcggctgagagaaaacctccttgggggccagggattccctttcccactctgaggctctggccagagggagagaggactctggacctaggaaaagaggcttttggctccaggtggtcaggacagtgggggttgggggtggggtgggtgggtgctggcggtggggaccaagatccggaaagatgaataaagacaaacatgacaaactaagaaaa

SEQ ID NO: 73826 - DNA, 1602 bp, Artificial Sequence
  derived and/or modified sequence
atggggtccagtcggctggcagcattgctcctcccactgctgttgatcgttatcgacctgtctgactccgcggggatcggattccgccatctccctcactggaacacccgatgtcccctcgcctctcacaccgacgacagtttcaccggaagtagcgcttacatcccttgcaggacttggtgggccctcttttctactaagccttggtgcgttagagtatggcactgctcacgctgtctgtgtcagcacttattatcaggcggctcaggtttacaacgtggactttttcatctattagtgcaaaaaagcaagaaaagctctaccttcaagttttatagaaggcataagatgcccgcccccgcacagcgaaagcttcttcccagacggcacctaagcgagaagtcacaccacatatctatacccagtcccgacatttcacataaaggattgcgctcaaagcggacacagcccagtgaccctgaaacttgggaatcccttcccagactagactcacaaaggcatggcggccctgaatttagcttcgatctgctccccgaggctcgagccatacgagttacaatatctagcggtccagaggtttccgtcagattatgccaccagtgggccctcgaatgcgaagaactaagtagcccatacgacgtacagaagattgtgagcggtggacacacggttgagcttccttacgagtttctgctcccttgtctgtgcattgaggccagctacctccaggaggacaccgtccgccggaaaaaatgtccatttcaaagctggcccgaagcctatggctccgatttttggaaatccgtgcattttacagattattcccagcatacacaaatggtaatggctcttacattacggtgccccttgaaactggaggccgctctttgtcagcggcacgactggcatacactgtgtaaagacctccctaatgccaccgcacgcgaatctgatggctggtacgtcctggaaaaagtcgacctgcatcctcaactatgctttaaattttcattcggcaactcaagtcatgttgagtgtcctcaccagacggggtccctcacaagctggaatgtttccatggatacacaggcgcagcaactcattctgcatttctcctcgcgcatgcatgccaccttcagcgctgcctggtctcttccaggcctggggcaagacaccctggttccaccagtttataccgtctcccaggctcgcggctcttctcccgtctcccttgatctcatcataccttttctgcggcccggatgctgtgttttgctacacgccagccttagctcacccggaggagaagacgcatggctgatcggcgtggggggaagtgttcccagcggcgtggccgtccgctgccccgtctgcctggaagcccccctcgtctccggttgtctgctccagactcccggcgccctggacccaggcacagcaggtcccccgcatcctactggctgctgcagtggcccccatctgccagctccaactgtaaggcctggaccatctgcggcatcagcaccccctgcgcggggcggattggggggagcagccgcccctggaggtagcgctggttag

SEQ ID NO: 73827 - DNA, 1602 bp, Artificial Sequence
  derived and/or modified sequence
atgggcagcagcagactggccgccctgctgctgcccctgctgctgatcgtgatcgacctgagcgacagcgccggcatcggcttcagacacctgccccactggaacaccagatgccccctggccagccacaccgacgacagcttcaccggcagcagcgcctacatcccctgcagaacctggtgggccctgttcagcaccaagccctggtgcgtgagagtgtggcactgcagcagatgcctgtgccagcacctgctgagcggcggcagcggcctgcagagaggcctgttccacctgctggtgcagaagagcaagaagagcagcaccttcaagttctacagaagacacaagatgcccgcccccgcccagagaaagctgctgcccagaagacacctgagcgagaagagccaccacatcagcatccccagccccgacatcagccacaagggcctgagaagcaagagaacccagcccagcgaccccgagacctgggagagcctgcccagactggacagccagagacacggcggccccgagttcagcttcgacctgctgcccgaggccagagccatcagagtgaccatcagcagcggccccgaggtgagcgtgagactgtgccaccagtgggccctggagtgcgaggagctgagcagcccctacgacgtgcagaagatcgtgagcggcggccacaccgtggagctgccctacgagttcctgctgccctgcctgtgcatcgaggccagctacctgcaggaggacaccgtgagaagaaagaagtgccccttccagagctggcccgaggcctacggcagcgacttctggaagagcgtgcacttcaccgactacagccagcacacccagatggtgatggccctgaccctgagatgccccctgaagctggaggccgccctgtgccagagacacgactggcacaccctgtgcaaggacctgcccaacgccaccgccagagagagcgacggctggtacgtgctggagaaggtggacctgcacccccagctgtgcttcaagttcagcttcggcaacagcagccacgtggagtgcccccaccagaccggcagcctgaccagctggaacgtgagcatggacacccaggcccagcagctgatcctgcacttcagcagcagaatgcacgccaccttcagcgccgcctggagcctgcccggcctgggccaggacaccctggtgccccccgtgtacaccgtgagccaggccagaggcagcagccccgtgagcctggacctgatcatccccttcctgagacccggctgctgcgtgctgctgcacgccagcctgagcagccccggcggcgaggacgcctggctgatcggcgtgggcggcagcgtgcccagcggcgtggccgtgagatgccccgtgtgcctggaggcccccctggtgagcggctgcctgctgcagacccccggcgccctggaccccggcaccgccggccccccccaccccaccggctgctgcagcggcccccacctgcccgcccccaccgtgagacccggccccagcgccgccagcgccccccccgccagaggcggcctgggcggcgccgccgcccccggcggcagcgccggctag

SEQ ID NO: 73828 - DNA, 1602 bp, Artificial Sequence
  derived and/or modified sequence
atgggctctagtcgactggccgctctcctattgccccttcttctgattgtgattgaccttagcgactctgcagggatcgggttccgacacttacctcattggaataccaggtgtcccctcgcgtctcacacagatgattcgttcaccggctccagtgcctatatcccttgcaggacttggtgggccctgttttctacaaagccctggtgcgtgcgtgtgtggcactgctcccgctgtctctgtcaacacctcctgtcaggaggttccggcttacagaggggtctttttcaccttctggtccagaagtcgaaaaagtcttccacatttaagttctaccggagacacaagatgccagcacccgcccaaaggaaactgctgcccaggcgccacctgtcagagaaaagccatcacatctccatcccgtctcccgacataagtcataaaggcttacggagtaaacgcacccagccttccgaccctgagacatgggagtccctgccacggctggactcacagcggcatggtggacccgagttctcttttgacctgttgcccgaggcaagggccatcagagtgaccattagcagcgggccagaggtgtcagtacgtctgtgccaccagtgggcactggagtgcgaggaactgtcaagcccatacgatgtgcagaaaattgttagcggggggcatactgtagagttgccctacgagttccttctcccatgcctttgcattgaagcttcttatctgcaggaagacactgtgcgccggaaaaagtgcccctttcagtcgtggcctgaagcctatggctcagacttctggaagtcagtacacttcaccgactattcacaacatacccaaatggtcatggccctaactcttcgctgcccactgaagctggaagccgcgctttgccagcgtcatgattggcatactctgtgtaaagatctcccgaacgctaccgcacgggagagcgacgggtggtatgtgttagaaaaggtggacctccacccacagctgtgcttcaaattctctttcgggaacagtagtcacgtcgagtgtccccatcagactggatcattgacaagttggaatgtcagcatggacacacaggcacagcagctaatcctgcatttcagtagcagaatgcatgccacatttagcgcagcttggagccttcccggtctgggccaagatactctggtgcctccggtatacacagtgagtcaggcccgcggctcatcccccgtatccttagaccttatcatcccatttctgaggcctggttgctgtgtcttgctccatgctagcttgagctcacccggcggcgaagatgcgtggttgataggtgttggaggttccgtgccctccggggtggctgtcagatgtcccgtttgcctcgaggcccctctagtctccgggtgcttactacagaccccaggtgccctggaccctgggaccgcagggccaccacatccaaccgggtgttgttcaggcccccacttacctgcccccaccgtcagacctgggccttctgccgcaagcgcccctccagccaggggaggtctgggcggcgccgcagcgcccggcggtagtgcgggttag

SEQ ID NO: 73829 - DNA, 1602 bp, Artificial Sequence
  derived and/or modified sequence
atgggcagcagccggctggccgccctgctgctgcccctgctgctgattgtcatcgacctgagtgacagcgctggcatcggcttccgccacctgccccactggaacacccgctgccccctggccagccacacagatgacagcttcaccggcagcagcgcctacatcccctgcaggacctggtgggccctcttcagcaccaagccctggtgtgtgcgggtgtggcactgcagccgctgcctgtgccagcacctgctgagcggcggcagcggcctgcagaggggcctcttccacctgctggtgcagaagagcaagaagagcagcaccttcaagttctacagaagacacaagatgcctgccccagcccagaggaagctgctgccccggcggcacctgtctgagaagagccaccacatcagcatccccagcccagacatcagccacaagggcctgcggagcaagaggacccagcccagcgaccctgagacctgggagagcctgccccggctggacagccagagacatggaggccctgagttctcctttgacctgctgcctgaggcccgggccatccgggtgaccatcagcagcggccctgaggtgtctgtgcggctgtgccaccagtgggccctggagtgtgaggagctgagcagcccctatgatgtgcagaagatcgtgtctgggggccacacagtggagctgccctatgagttcctgctgccctgcctgtgcatcgaggccagctacctgcaggaggacacagtgcggaggaagaagtgccccttccagagctggccagaggcctacggcagtgacttctggaagtctgtgcacttcacagactacagccagcacacccagatggtgatggccctgaccctgcgctgccccctgaagctggaggccgccctgtgccagagacatgactggcacaccctgtgcaaggacctgcccaatgccacagcccgggagagtgatggctggtacgtgctggagaaggtggacctgcacccccagctgtgcttcaagttctcctttggaaacagcagccacgtggagtgcccccaccagacaggcagcctgacctcctggaatgtgtccatggacacccaggcccagcagctgatcctgcacttcagcagcaggatgcacgccaccttctctgctgcctggagcctgcccggcctgggccaggacaccctggtgccccctgtgtacacagtgtcccaggcccggggcagcagccctgtgtccctggacctgatcatccccttcctgcggcccggctgctgcgtgctgctgcacgccagcctgagcagccctggaggagaagatgcctggctgattggagtgggcggctctgtgcccagcggcgtggccgtgcgctgccctgtgtgcctggaggcccccctggtgtctggctgcctgctgcagacccctggggccctggaccccggcacagctggccccccccaccccaccggctgctgcagcggcccccacctgcctgcccccaccgtgcggcccggccccagcgctgccagcgcccccccagcccggggcggcctgggcggggccgccgcccctgggggcagcgctggatag

SEQ ID NO: 73830 - DNA, 1602 bp, Artificial Sequence
  derived and/or modified sequence
atgggcagcagccggctggccgccctgctgctgcccctgctgctgatcgtgattgatctgtccgattctgcggggattgggttccgccacctgccccactggaatacccgatgtcctctagcgagtcatacagatgactcctttacaggcagttccgcctacatcccttgcaggacttggtgggcactgttttccaccaagccttggtgcgtcagggtctggcactgttctcgatgcttgtgccagcacttactttccggcggatccggtctccaacggggtctgtttcatctcttggtccagaaatctaaaaagagctccacattcaagttctaccgccgacataaaatgcctgcaccagctcagaggaagctgctccccaggaggcacctgtcagagaaaagtcaccacatctccataccgagtcccgatatatcccacaaggggttaagaagtaagaggacccagccgtccgatcccgagacctgggagtcactccccagattagattctcagcggcatggcggccccgaattttcatttgatctgttacccgaggccagggccatccgagtgaccatcagctccggaccggaagtgagtgtgagattgtgtcatcagtgggcactggagtgcgaagagttgtcatctccctacgatgtgcaaaaaatagtatctggcggacacaccgtcgagttaccatatgagtttttactcccttgtctgtgcatagaggccagctatctacaagaagataccgtgcgccggaagaagtgtcctttccaaagctggcctgaagcttatggatcagacttctggaaatccgtgcatttcaccgattactcgcagcatactcagatggtgatggctttgaccttgcggtgccccttgaagctagaggcggctctgtgccagagacacgattggcacaccttgtgcaaggatctcccaaatgcaacagcccgtgaaagtgatgggtggtatgttctggagaaagtggatctccacccacagttatgctttaagttctcttttggtaactcttctcatgtggaatgtccccatcagactgggtccttaacgtcatggaatgtctctatggatacacaggcccaacagttaatcctgcacttctcttcccgtatgcacgcaaccttctctgcggcctggtcccttcccggactggggcaggatactctcgtaccaccagtatacaccgtatcacaagctagaggcagctctccagtgagtctggacttgattatcccatttctccggcccggatgctgcgtactcctgcatgcctccctcagttcacctggcggtgaggacgcatggctgatcggggtgggcggttcagtaccctccggcgtggcggtgagatgcccggtatgtctggaagcacctcttgtgagtggttgtctgttgcagacccccggcgcactcgatcccggaaccgctggcccgcctcatcctactggctgctgctcggggccacatcttccagctcccactgtccgaccaggacctagtgccgcttccgcacccccggctcgtggcggactcggtggggccgcggcacccggcggaagcgctggttag

SEQ ID NO: 73831 - RNA, 1602 nt, Artificial Sequence
  derived and/or modified sequence
augggcaguucucgcuuggcggcucuucugcucccacugcuccugauuguuauagaccuguccgacuccgccggcauaggguuccggcaccugccacacuggaauacccgcugcccucucgccagccacacagaugacuccuucacaggcagcuccgcauacaucccuugccggacuuggugggcacuguucuccacgaaaccaugguguguccggguguggcacuguucaagaugucucugccaacaccuccugucuggcggcuccggacugcaacgcggucuguuccaucuucugguacagaaaucuaagaaaucuaguacuuuuaaauuuuauagacgccacaagaugcccgccccggcccagcgcaaguuauugccacguagacaucucuccgagaagucgcaucauaucaguauaccaagcccagauaucucacacaaaggucugcgguccaagcgcacacagccuagugacccugagacaugggaauccuugccaaggcuugauucucagcgacauggcgggccagaguucucuuucgaccugcucccagaggcacgagcgaucagggugacaaucaguagcggccccgagguuagcgugaggcuaugccaccagugggcguuggagugugaagagcugucuucuccauacgacgugcagaaaauaguguccggcggccacacagucgaacugccauaugaguuuuugcugccaugucugugcauugaagccucauauuuacaagaggacaccguuagacguaaaaagugcccguuccaguccuggccugaggccuacggcucugauuuuuggaaaaguguucacuuuacggauuacucccagcacacucagaugguuauggcucugacauuaaggugcccacugaaguuagaggcggcucugugccaaaggcaugauuggcacacccugugcaaggaccuucccaacgcaacugcacgcgaguccgauggcugguacgugcucgagaaggucgaucuacacccucaauuguguuucaaguuuuccuucggcaauagcucgcaugucgaguguccccaccaaaccggcucacuuacaucauggaacguguccauggacacacaggcacagcaguugauuuugcacuucagcucucggaugcacgcaacguuuucugcugcauggucacugccaggucugggccaggauacacuugugccuccugucuauacuguuucccaggcccgaggaaguuccccugugucucuggaucugaucauacccuuucuucggccagggugcuguguccuucuccacgccucauuaucuagucccggcggugaggacgcauggcuuauagguguggguggaagugucccaagcggcguggcuguacgguguccagugugccuugaagcccccuuagucuccgguugccugcugcagaccccuggggcccucgauccuggcacagccgguccaccacaucccaccgggugcugcucuggaccucauuuaccagcgccaacuguaaggccuggacccucugcugccagcgcucccccugcgagaggaggccuaggcggagccgccgcccccggcggaagcgccggcuag

SEQ ID NO: 73832 - RNA, 1602 nt, Artificial Sequence
  derived and/or modified sequence
augggguccagucggcuggcagcauugcuccucccacugcuguugaucguuaucgaccugucugacuccgcggggaucggauuccgccaucucccucacuggaacacccgauguccccucgccucucacaccgacgacaguuucaccggaaguagcgcuuacaucccuugcaggacuuggugggcccucuuuucuacuaagccuuggugcguuagaguauggcacugcucacgcugucugugucagcacuuauuaucaggcggcucagguuuacaacguggacuuuuucaucuauuagugcaaaaaagcaagaaaagcucuaccuucaaguuuuauagaaggcauaagaugcccgcccccgcacagcgaaagcuucuucccagacggcaccuaagcgagaagucacaccacauaucuauacccagucccgacauuucacauaaaggauugcgcucaaagcggacacagcccagugacccugaaacuugggaaucccuucccagacuagacucacaaaggcauggcggcccugaauuuagcuucgaucugcuccccgaggcucgagccauacgaguuacaauaucuagcgguccagagguuuccgucagauuaugccaccagugggcccucgaaugcgaagaacuaaguagcccauacgacguacagaagauugugagcgguggacacacgguugagcuuccuuacgaguuucugcucccuugucugugcauugaggccagcuaccuccaggaggacaccguccgccggaaaaaauguccauuucaaagcuggcccgaagccuauggcuccgauuuuuggaaauccgugcauuuuacagauuauucccagcauacacaaaugguaauggcucuuacauuacggugccccuugaaacuggaggccgcucuuugucagcggcacgacuggcauacacuguguaaagaccucccuaaugccaccgcacgcgaaucugauggcugguacguccuggaaaaagucgaccugcauccucaacuaugcuuuaaauuuucauucggcaacucaagucauguugaguguccucaccagacggggucccucacaagcuggaauguuuccauggauacacaggcgcagcaacucauucugcauuucuccucgcgcaugcaugccaccuucagcgcugccuggucucuuccaggccuggggcaagacacccugguuccaccaguuuauaccgucucccaggcucgcggcucuucucccgucucccuugaucucaucauaccuuuucugcggcccggaugcuguguuuugcuacacgccagccuuagcucacccggaggagaagacgcauggcugaucggcguggggggaaguguucccagcggcguggccguccgcugccccgucugccuggaagccccccucgucuccgguugucugcuccagacucccggcgcccuggacccaggcacagcaggucccccgcauccuacuggcugcugcaguggcccccaucugccagcuccaacuguaaggccuggaccaucugcggcaucagcacccccugcgcggggcggauuggggggagcagccgccccuggagguagcgcugguuag

SEQ ID NO: 73833 - DNA, 792 bp, Artificial Sequence
  derived and/or modified sequence
atgggaaaatggaaaagaagccaggcatatgccgactatattgggttcattctcactctaaacgagggcgtgaaaggaaaaaagctgaccttcgaatatcgcgtgtccgaggccattgaaaagctagtcgctctgcttaatacacttgataggtggatcgatgagacgcctccagtcgaccagccaagcaggtttggaaataaggcctatagaacatggtacgctaagctggacgaggaagccgagaacctcgtagccaccgttgtgcctacccaccttgccgctgccgtaccagaggtcgccgtgtatctaaaagagagtgtgggcaacagtacccgcattgactatggaactggccacgaagcggcattcgcagcctttttgtgctgtctttgcaaaattggggttctgagagtggatgatcaaattgcaatcgtgttcaaggtcttcaataggtatctggaggtgatgaggaagctgcagaaaacatatcggatggaacccgctggatcccagggtgtgtgggggctcgacgatttccagttcctgccatttatctggggtagcagccagttgatcgaccacccctacctcgagcctcggcacttcgtagacgagaaagctgttaacgagaaccataaggattacatgttcctagagtgcatcctgttcattactgaaatgaaaacaggaccttttgccgaacacagcaatcagctgtggaacatctcagctgtaccatcttggtctaaagtgaatcagggcctgattagaatgtataaagccgaatag

SEQ ID NO: 73834 - DNA, 792 bp, Artificial Sequence
  derived and/or modified sequence
atgggcaagtggaagaggagccaggcctatgctgactacatcggcttcatcctgaccctgaatgaaggagtgaagggcaagaagctgacctttgagtacagagtgtctgaggccatcgagaagctggtggccctgctgaacaccctggaccgctggattgatgagaccccacctgtggaccagcccagcagatttggaaacaaggcctaccgcacctggtacgccaagctggatgaggaggccgagaacctggtggccaccgtggtgcccacccacctggccgctgctgtgcctgaggtggccgtgtacctgaaggagagcgtgggcaacagcaccagaattgattatggcaccggccacgaggccgcctttgctgccttcctgtgctgcctgtgcaagattggagtgctgcgggtggatgaccagatcgccatcgtgttcaaggtgttcaaccgctacctggaggtgatgaggaagctgcagaagacctacaggatggagcctgctggcagccagggcgtgtggggcctggatgacttccagttcctgcccttcatctggggcagcagccagctgattgaccacccctacctggagcccaggcactttgtggatgagaaggctgtgaatgaaaaccacaaggactacatgttcctggagtgcatcctcttcatcacagagatgaagacaggcccctttgctgagcacagcaaccagctgtggaacatctctgctgtgcccagctggagcaaggtgaaccagggcctcatccgcatgtacaaggccgagtag

SEQ ID NO: 73835 - DNA, 792 bp, Artificial Sequence
  derived and/or modified sequence
atgggcaagtggaagcggagccaggcctacgccgactacatcggcttcatcctcaccctgaatgagggggtcaaaggcaaaaagttaacattcgagtatcgcgtgtcagaggccatagagaaattagtcgcccttctgaacaccctggatagatggatcgatgagacccctcccgtagaccagcccagccgctttggtaacaaggcataccgaacctggtacgcgaagctggacgaggaggcggagaacttggttgccaccgtggttcccacgcacctggccgcagccgtacccgaggtggccgtttacttaaaggagtccgtgggaaattctacaaggatcgattatggaaccggacacgaagcggcattcgccgcattcttgtgctgcctgtgcaagataggcgtgctgcgggtcgatgatcaaatcgctatcgttttcaaggtcttcaatcgctatctagaggtgatgcgcaaattgcagaaaacatacagaatggagcccgcaggctcccagggagtgtggggcttagacgattttcagttcctgccttttatatggggatcctcacaactgattgatcacccatatcttgaaccccggcatttcgtggatgagaaagcggtgaatgaaaatcacaaagactacatgtttctggagtgcatcctgttcattactgaaatgaagaccggcccatttgccgaacactccaatcagctctggaacatttccgcggtacctagttggagcaaggtaaaccagggattgatcaggatgtacaaggccgagtag

SEQ ID NO: 73836 - DNA, 792 bp, Artificial Sequence
  derived and/or modified sequence
atgggcaagtggaaaaggtctcaggcttatgccgattatatcggcttcattctgactctgaacgagggggtcaaggggaaaaaactgacttttgagtaccgcgtctctgaggccatcgagaaactggtcgcgctgctgaacaccctggatcgctggattgatgaaactcctcctgtagaccaaccatctcgtttcggcaacaaagcataccggacctggtacgcaaagcttgatgaagaagccgaaaaccttgtagctaccgtggtgcctactcatttggcagcagccgtacccgaagtcgccgtctatttaaaggagtcggtgggcaattctacgaggattgattacggcacaggtcacgaagcggcatttgccgcatttttgtgctgcttatgtaagattggcgtcctcagagttgatgaccagatcgcgatcgtgttcaaagtgtttaacagatacctagaagtgatgagaaagctgcagaagacgtaccgcatggaacccgctggcagccagggcgtctggggcctggacgactttcaattcctaccgtttatctggggaagcagtcaacttattgatcacccttatttagagccccgacactttgtggatgaaaaggctgtcaatgagaatcataaggactatatgtttttggaatgcatccttttcataaccgagatgaaaactggcccattcgctgaacacagtaatcagctgtggaatatctctgccgtccccagctggagcaaagttaaccaagggctgatccgaatgtacaaagccgaatag

SEQ ID NO: 73837 - DNA, 792 bp, Artificial Sequence
  derived and/or modified sequence
atgggcaagtggaagagaagccaggcctacgccgactacatcggcttcatcctgaccctgaacgagggcgtgaagggcaagaagctgaccttcgagtacagagtgagcgaggccatcgagaagctggtggccctgctgaacaccctggacagatggatcgacgagaccccccccgtggaccagcccagcagattcggcaacaaggcctacagaacctggtacgccaagctggacgaggaggccgagaacctggtggccaccgtggtgcccacccacctggccgccgccgtgcccgaggtggccgtgtacctgaaggagagcgtgggcaacagcaccagaatcgactacggcaccggccacgaggccgccttcgccgccttcctgtgctgcctgtgcaagatcggcgtgctgagagtggacgaccagatcgccatcgtgttcaaggtgttcaacagatacctggaggtgatgagaaagctgcagaagacctacagaatggagcccgccggcagccagggcgtgtggggcctggacgacttccagttcctgcccttcatctggggcagcagccagctgatcgaccacccctacctggagcccagacacttcgtggacgagaaggccgtgaacgagaaccacaaggactacatgttcctggagtgcatcctgttcatcaccgagatgaagaccggccccttcgccgagcacagcaaccagctgtggaacatcagcgccgtgcccagctggagcaaggtgaaccagggcctgatcagaatgtacaaggccgagtag

SEQ ID NO: 73838 - protein, 383 aa, Artificial Sequence
  derived and/or modified sequence
MIDLEPTVVDEVRAGTYRQLFHPEQLITGKEDAANNYARGHYTVGKESIDLVLDRIRKLTDACSGLQGFLIFHSFGGGTGSGFTSLLMERLSLDYGKKSKLEFAIYPAPQVSTAVVEPYNSILTTHTTLEHSDCAFMVDNEAIYDICRRNLDIERPTYTNLNRLISQIVSSITASLRFDGALNVDLTEFQTNLVPYPRIHFPLVTYAPIISAEKAYHEQLSVAEITSSCFEPNSQMVKCDPRHGKYMACCMLYRGDVVPKDVNVAIAAIKTKRTIQFVDWCPTGFKVGINYQPPTVVPGGDLAKVQRAVCMLSNTTAIAEAWARLDHKFDLMYAKRAFVHWYVGEGMEEGEFSEAREDLAALEKDYEEVGTDSFEEENEGEEF

SEQ ID NO: 73839 - DNA, 228 bp, Artificial Sequence
  derived and/or modified sequence
cgcgttcgtttcgcgagctggttatggaagggtcgctcaagggcgggaagtggggcctttgtggtcatgggaaagtataattttagggactgaggtgtaggatcttcgatgcaaggcatgtgtcatgtgtgatctttgtgcggggcgcgattgtcccaaaggaaaaagcgttttctattgcagggcctcacgtggctggagggggtctcccttgatctgagaatggct

SEQ ID NO: 73840 - DNA, 1152 bp, Artificial Sequence
  derived and/or modified sequence
atgatcgacctggagcccaccgtggtggacgaggtgagagccggcacctacagacagctgttccaccccgagcagctgatcaccggcaaggaggacgccgccaacaactacgccagaggccactacaccgtgggcaaggagagcatcgacctggtgctggacagaatcagaaagctgaccgacgcctgcagcggcctgcagggcttcctgatcttccacagcttcggcggcggcaccggcagcggcttcaccagcctgctgatggagagactgagcctggactacggcaagaagagcaagctggagttcgccatctaccccgccccccaggtgagcaccgccgtggtggagccctacaacagcatcctgaccacccacaccaccctggagcacagcgactgcgccttcatggtggacaacgaggccatctacgacatctgcagaagaaacctggacatcgagagacccacctacaccaacctgaacagactgatcagccagatcgtgagcagcatcaccgccagcctgagattcgacggcgccctgaacgtggacctgaccgagttccagaccaacctggtgccctaccccagaatccacttccccctggtgacctacgcccccatcatcagcgccgagaaggcctaccacgagcagctgagcgtggccgagatcaccagcagctgcttcgagcccaacagccagatggtgaagtgcgaccccagacacggcaagtacatggcctgctgcatgctgtacagaggcgacgtggtgcccaaggacgtgaacgtggccatcgccgccatcaagaccaagagaaccatccagttcgtggactggtgccccaccggcttcaaggtgggcatcaactaccagccccccaccgtggtgcccggcggcgacctggccaaggtgcagagagccgtgtgcatgctgagcaacaccaccgccatcgccgaggcctgggccagactggaccacaagttcgacctgatgtacgccaagagagccttcgtgcactggtacgtgggcgagggcatggaggagggcgagttcagcgaggccagagaggacctggccgccctggagaaggactacgaggaggtgggcaccgacagcttcgaggaggagaacgagggcgaggagttctag

SEQ ID NO: 73841 - DNA, 1152 bp, Artificial Sequence
  derived and/or modified sequence
atgattgatttagaacctacagtcgtggatgaggttcgtgcaggaacctacagacagcttttccatccggagcagctgatcaccgggaaagaggacgctgcaaataactatgcaagaggccattacacagtgggaaaggagagcatcgatcttgtactggataggattcgaaagctcaccgacgcttgctcaggactacaggggtttctgattttccattctttcggcggtggaacagggagtggcttcacgagtttgctgatggagagactctccctggactatggaaagaaaagcaaactggaattcgctatttatcctgcaccccaggtgtcaacagccgttgtcgaaccctataactccattctaaccacacacaccactctcgagcacagtgactgcgccttcatggttgataatgaagccatctacgatatctgccgtaggaacctggacatcgagagacctacgtatacaaatctcaaccggctcataagccaaattgtgagcagtatcacagcaagtttaagattcgatggagcactaaacgtggatttaacagaattccaaacaaacctggttccgtaccctcgcattcattttcctttggttacatacgccccaatcatatccgctgagaaggcttatcatgagcagcttagcgtcgcggaaataacatctagttgtttcgagcccaattcacagatggtcaagtgtgacccccgccacggtaagtatatggcctgctgcatgctgtacaggggcgacgttgttccaaaagacgtgaacgtggctattgccgccattaagaccaagcgtaccatccagttcgtggactggtgtccaactggctttaaggtgggtataaactaccagcctcctactgttgtccccggcggagacctggcaaaagtccagcgggctgtttgcatgctgagtaacactacggcgatcgcagaggcttgggcccgcctagatcataagttcgatttaatgtatgcaaagcgcgcttttgtgcattggtacgtgggagaggggatggaagaaggcgagttcagcgaggcacgcgaagatcttgctgcactcgaaaaggattacgaggaggtcggcactgactccttcgaagaggagaacgagggcgaagaattttag

SEQ ID NO: 73842 - DNA, 1152 bp, Artificial Sequence
  derived and/or modified sequence
atgattgacctggagcccaccgtggtggatgaggtgcgggccggcacctaccggcagctgttccaccctgagcagctgatcaccgggaaggaggatgctgccaacaactatgcccggggccactacacagtgggcaaggagagcattgacctggtgctggaccgcatcaggaagctgacagatgcctgcagcggcctgcagggcttcctgatcttccacagctttggaggcggcactggaagtggcttcaccagcctgctgatggagcggctgagcctggactatggcaagaagagcaagctggagtttgccatctacccagccccccaggtgtccacagctgtggtggagccctacaacagcatcctgaccacccacaccaccctggagcacagcgactgtgccttcatggtggacaatgaggccatctatgacatctgcagaagaaacctggacatcgagcggcccacctacaccaacctgaacagactcatcagccagatcgtgagcagcatcacagccagcctgcgctttgatggagccctgaatgtggacctgacagagttccagaccaacctggtgccctacccccgcatccacttccccctggtgacctacgcccccatcatctctgctgagaaggcctaccacgagcagctgtctgtggccgagatcaccagcagctgctttgagcccaacagccagatggtgaagtgtgaccccaggcatggcaagtacatggcctgctgcatgctgtacagaggagatgtggtgcccaaggatgtgaatgtggccatcgccgccatcaagaccaagaggaccatccagtttgtggactggtgccccaccggcttcaaggtgggcatcaactaccagcccccaacagtggtgcctggaggagacctggccaaggtgcagagagctgtgtgcatgctgagcaacaccacagccatcgccgaggcctgggcccggctggaccacaagtttgacctgatgtatgccaagagggcctttgtgcactggtacgtgggggagggcatggaggagggggagttcagcgaggcccgggaggacctggccgccctggagaaggactatgaggaggtgggcacagacagctttgaggaggagaatgaaggagaggagttctag

SEQ ID NO: 73843 - DNA, 1152 bp, Artificial Sequence
  derived and/or modified sequence
atgatcgacctggagcccaccgtggtggacgaggtgcgggccggcacctatagacagttgtttcaccctgaacagttgatcacaggcaaagaagacgctgctaataactatgccagaggacattacactgtggggaaggaaagcattgacctggtgctcgacaggatcaggaagcttactgatgcctgctccggactacagggcttcttaatcttccactcatttgggggcggtacagggtctggattcacaagccttctaatggaaagactgtccctggactatggtaaaaagagcaagctcgaatttgcaatataccctgctccacaggtgtctacggccgtggtcgagccttataactccattttgaccacgcacacaaccttagaacactccgactgtgctttcatggttgacaacgaggccatttatgatatctgcaggcggaaccttgacattgagcgccccacatatacgaacctgaacagattgatctcacagatagtctcaagtattacagctagcctccgattcgatggagctctgaacgtggacctgaccgaatttcaaacaaatctcgtcccctacccacgaatccacttcccgttggtgacctatgctcctattatctccgccgagaaggcgtatcacgaacagctgtccgtggcagagatcacatcttcctgttttgaaccgaacagccaaatggtcaagtgtgatcctcgccacggtaagtatatggcttgttgcatgctgtaccgtggtgacgttgtgcctaaggacgtgaacgtcgctatcgctgcaatcaagaccaaaagaacaattcagttcgtagactggtgtcccactgggttcaaggttgggattaactaccagccacctacggtggtccccggaggcgacctggctaaggtgcagcgggcggtgtgcatgctgtctaataccaccgctattgccgaagcatgggcccgcctagaccacaagtttgatctgatgtacgccaaaagagcgttcgtgcactggtacgtgggcgaagggatggaggaaggtgagtttagcgaggctcgggaagacctcgccgcactcgaaaaagactatgaagaagtcggcacagatagttttgaagaagaaaatgagggcgaggagttctag

SEQ ID NO: 73844 - DNA, 1152 bp, Artificial Sequence
  derived and/or modified sequence
atgatcgatcttgagcctacggtagtggacgaagtgcgggctggtacctaccgccaactgtttcatcctgagcagttaataaccgggaaggaagatgctgcaaataactacgccagaggtcattatactgtgggaaaggagtctatcgatcttgtattagatcgcatccgtaaactgacagatgcctgtagcggactgcaaggatttctcatctttcacagtttcggcggtggtaccggaagcggctttaccagtctcctgatggagagactgtctctcgactacggcaaaaagagcaagctggagtttgctatataccccgctccacaggttagcacagctgttgtggaaccctacaacagcatcctcactacacacaccacactcgaacacagcgactgcgcatttatggtggataatgaagccatctacgatatctgcaggcgaaatctcgacatagagagacctacctacaccaacctgaataggctaatctcacaaattgtgtccagcatcacagccagcctgcgctttgatggggcactgaatgtggatctgaccgaattccagactaacttggtgccttatcccagaattcatttcccactggtgacctacgcccctattatatcagctgaaaaagcttaccacgaacagctgagtgtcgctgagattaccagctcatgtttcgagcccaattcacagatggttaagtgcgatcctcggcacggcaaatacatggcctgttgcatgctgtatcgcggagacgttgttcccaaggacgtgaatgtggccatcgctgccataaagaccaagcgcacaattcagttcgtcgattggtgtcccacaggattcaaggtcggcatcaactaccagccaccaacagtcgttcctggaggggatttggcaaaggttcaacgtgctgtctgcatgctatcaaacaccactgccattgcagaggcttgggcacgcctggatcacaaattcgacctgatgtatgccaagagagccttcgtccactggtatgtgggcgaagggatggaagaaggggagttctctgaagccagggaggacctagccgctttggagaaagattacgaagaagtagggacagacagtttcgaggaggagaatgagggagaagagttttag

SEQ ID NO: 73845 - DNA, 1989 bp, Artificial Sequence
  derived and/or modified sequence
atgtcacacgtggctgtggagaatgccctcggcttggaccaacaattcgcaggcctcgatctgaactcatcagacaaccagagcggaggttccaccgcgtccaaaggacggtacatccctcctcatctgaggaatagagaggctaccaagggattctacgacaaggactcctctggatggtccagtagcaaagacaaagacgcgtacagcagtttcggtagccggtccgactctaggggtaaatcctctttcttctctgatagaggctcagggagtagaggccgttttgatgatcggggccgctcagactacgatggcattggcagcaggggggataggagtggttttggaaaattcgaaaggggcggaaatagtagatggtgcgataagtctgacgaagatgactggtcaaagccactccccccaagcgagcggcttgaacaggaactgttttccgggggcaatactggaatcaattttgagaagtatgatgacatccctgtggaggctactgggaataattgtccaccccacatcgagagcttctctgacgtggagatgggggagatcatcatggggaacattgagctgacccggtatacaaggccgacacccgttcaaaagcacgctattcccatcatcaaggagaaaagggacctgatggcgtgtgcacagaccggtagcgggaaaaccgcggcgtttctattgcctatcctttctcaaatctattcagacggccccggggaagctcttagagctatgaaagagaacgggcgatacggacggcggaagcaatatcccatttctctcgtgttggcaccaacaagagagcttgcggtccagatctatgaggaagcccggaaattctcttatagatcacgagttaggccctgtgttgtttacggaggcgccgatattgggcagcagattagagatctcgagcgcggttgtcacctcctggttgctactcctgggaggcttgtggacatgatggaacgcggcaagatagggctggacttttgcaaatatctggttctagatgaggccgatagaatgcttgatatgggctttgagcctcagatccgcagaatcgtagaacaggacactatgccgcccaagggagtccggcacactatgatgttcagtgcaacgtttcctaaggagatacaaatgctcgctcgcgatttcctagatgaatatatctttcttgcagtcggtcgagtgggctctacatcagagaatatcacacagaaggttgtgtgggtggaggagagcgacaaacgctcattccttctcgacctcctgaacgccactggcaaagattccttaacactcgtgttcgtagagactaaaaagggggcagactctcttgaggatttcctgtaccacgaaggctacgcatgtactagtattcacggtgatcgcagccaaagggacagagaggaggcgttacatcagtttaggtcaggaaaatcccctatactcgtagcaacagccgtagcagcccggggcctggacatcagcaacgtaaaacatgtgataaatttcgatttgcccagtgatattgaagagtacgtgcaccgaatcgggcgtacagggagggtggggaatctgggactggccacatccttcttcaatgagcgcaacattaatatcaccaaagacctgctcgatctgctggtggaggccaaacaggaagtgccgagctggctcgaaaacatggcatacgaacatcactataaaggcagtagcagaggacgaagcaagtctagtagattctccggaggattcggagcacgggattaccggcagtcatctggggccagctcctcttcattctcgtcaagcagggcatccagctccaggagcggtgggggcggccacggcagctctcggggcttcggtggtggcgggtacggcggcttttacaactccgacggttacgggggaaattacaactcacaaggtgtcgactggtggggcaactag

SEQ ID NO: 73846 - DNA, 1989 bp, Artificial Sequence
  derived and/or modified sequence
atgagccacgtggccgtggagaatgccctgggcctggaccagcagtttgctggcctggacctgaacagcagtgacaaccagagcggcggcagcacagccagcaagggccgctacatccccccccacctgaggaaccgggaggccaccaagggcttctatgacaaggacagcagcggctggagcagcagcaaggacaaggatgcctacagcagctttggcagcagaagtgacagccggggcaagagcagcttcttcagtgaccggggcagcggcagccggggccgctttgatgaccggggccgcagtgactatgatggcatcggcagcagaggagacaggagcggctttgggaagtttgagcggggcggcaacagccgctggtgtgacaagagtgatgaagatgactggagcaagcccctgcccccatctgagcggctggagcaggagctgttcagcggcggcaacacaggcatcaactttgagaagtatgatgacatccctgtggaggccactggaaacaactgccccccccacatcgagagcttcagtgatgtggagatgggagagatcatcatgggcaacatcgagctgacccgctacacccggcccacccctgtgcagaagcacgccatccccatcatcaaggagaagagggacctgatggcctgtgcccagacaggcagcggcaagacagctgccttcctgctgcccatcctgagccagatctacagtgatggccctggagaggccctgcgggccatgaaggaaaatggccgctatggccgcaggaagcagtaccccatcagcctggtgctggcccccacccgggagctggccgtgcagatctatgaggaggccaggaagttctcctaccgcagccgggtgcggccctgtgtggtgtatggaggagctgacatcggccagcagatccgggacctggagcggggctgccacctgctggtggccaccccaggccgcctggtggacatgatggagcggggcaagattggcctggacttctgcaagtacctggtgctggatgaagctgacaggatgctggacatgggctttgagccccagatccgccgcatcgtggagcaggacaccatgccacccaagggcgtgcgccacaccatgatgttcagcgccaccttccccaaggagatccagatgctggcccgggacttcctggatgagtacatcttcctggccgtgggccgggtgggcagcaccagcgagaacatcacccagaaggtggtgtgggtggaggagagtgacaagaggagcttcctgctggacctgctgaatgccaccgggaaggacagcctgaccctggtgtttgtggagaccaagaagggagctgacagcctggaggacttcctgtaccacgagggctacgcctgcaccagcatccacggggacaggagccagagggaccgggaggaggccctgcaccagttccgcagcggcaagagccccatcctggtggccacagctgtggccgcccggggcctggacatcagcaatgtgaagcacgtgatcaactttgacctgcccagcgacatcgaggagtatgtgcacagaattggaagaacaggccgggtgggcaacctgggcctggccaccagcttcttcaatgaaagaaacatcaacatcaccaaggacctgctggacctgctggtggaggccaagcaggaggtgcccagctggctggagaacatggcctatgagcaccactacaagggcagcagccggggccgcagcaagagcagccgcttcagcggcggctttggagcccgggactaccggcagagcagcggggccagcagcagcagcttcagcagcagccgggccagcagcagccgcagcggcggcggcggccacggcagcagccggggctttggaggcggcggctatggaggcttctacaacagtgatggctacggcggcaactacaacagccagggcgtggactggtggggcaactag

SEQ ID NO: 73847 - DNA, 1989 bp, Artificial Sequence
  derived and/or modified sequence
atgagccacgtggccgtggagaacgccctgggcctggaccagcagtttgctggcctcgaccttaattcttctgataaccaatcgggggggagtactgcctcaaaaggacggtacattcccccccacttgaggaatcgcgaagccactaagggcttctacgacaaagattcctctggctggtcgtcctcaaaggataaggacgcttattcgtcttttggaagcagaagcgactcaagaggaaagtcttcatttttcagtgacagaggatccggaagtcgcggcagattcgacgaccggggccgttctgactacgatggaattggcagtcgcggagatcgctccgggtttggaaaattcgagcgagggggaaactcccggtggtgtgataagtcagatgaggacgattggagtaaacctcttccaccaagcgaacgactagagcaagagctcttctccggtggtaataccggaatcaactttgagaaatacgacgatatccctgttgaagccaccgggaataattgtccaccgcatattgagagcttttccgacgttgagatgggggaaataatcatgggtaacatcgagctgacaaggtatactagaccaacgcctgttcagaaacacgccataccaattattaaggaaaaacgggaccttatggcttgcgcacaaactggatccggcaagacagccgctttccttttacctatcctttcacagatttacagcgatgggcccggcgaggctctccgggccatgaaagagaatggacgatatgggcgcaggaagcaataccctatctcactggtcctcgcgccaaccagagagctggcagttcaaatttatgaagaggccagaaaattctcatacaggtcacgcgttagaccatgtgtcgtgtatggaggagccgacattgggcaacaaataagagatctggagcggggctgtcatctgctcgttgcgaccccaggccgtctcgtggacatgatggaaagagggaagattggtcttgatttctgcaaatacctggtgctggacgaggccgatcgcatgttggacatggggtttgaacctcaaattcggaggatcgtcgagcaggatacaatgcctccaaagggcgttcgtcacacgatgatgtttagcgccacattccccaaggagattcaaatgctcgctagggactttcttgatgaatatattttcttggccgtgggccgtgtggggtcaacttccgagaatatcactcagaaagtcgtatgggttgaggaatctgataaacggtcctttctgctggacctcttgaacgctactggcaaagactctctcacacttgtatttgtcgagactaaaaagggcgcggattccctggaagattttctatatcatgaaggctacgcttgcacgtccattcacggggatagatctcaacgcgatagagaggaggctctgcatcaattccgtagtggaaagagccccatcttggtcgcaaccgccgtggcagctcggggccttgatataagcaatgtaaaacatgtgatcaactttgatctccctagcgacattgaggaatacgttcatcgaataggccggaccggacgcgttggtaaccttggcctcgccacttccttcttcaacgagaggaacatcaatataacaaaagatctcctagatctcctcgtcgaggccaaacaagaagtgcccagctggttagagaacatggcttacgagcatcattacaaaggctcttctcgtggacgcagtaagagttctcgattttcgggagggttcggggcacgggactatagacaaagtagcggggcctcttctagttctttttccagcagccgagcgtcctcttctcgctctggaggcggggggcacggctccagccggggattcggcggaggagggtacggagggttttataacagcgacggttacggaggcaactacaattcccagggcgtggactggtggggaaactag

SEQ ID NO: 73848 - DNA, 1989 bp, Artificial Sequence
  derived and/or modified sequence
atgtctcacgtggcagtggagaatgcccttggcctggaccagcagttcgccggtctggatctgaattcatctgataatcagtctgggggaagcactgcttccaaggggagatacatcccccctcacctgcggaaccgtgaggccactaagggcttctacgataaagatagtagcgggtggtccagcagtaaggacaaggatgcttatagcagtttcggttcacgctctgactcccggggaaaaagttccttctttagcgatcgaggtagcggcagccgtggccgattcgacgacagaggacgatcagattacgacggcattggttcacgaggggataggagcggtttcgggaagtttgaacgtggagggaactccaggtggtgtgataagtccgacgaagacgactggtccaaaccactgcccccatccgagcggctagaacaggagctattttccggtggcaataccggaatcaattttgaaaaatacgatgatatccctgtcgaggctacaggaaacaattgtccaccacatatcgaatctttttctgacgtcgaaatgggcgagatcataatggggaatattgagctcactcggtatacgcgacccactcccgtgcagaagcatgctattcctataattaaagaaaaacgggatctgatggcctgtgcacagacagggtccgggaagacagcagcattcctgttacccattctttcacaaatctatagcgacggccctggggaggctctgagggcgatgaaagagaacgggagatacggaaggcggaagcagtacccaatctccctagtcctggcaccaaccagggagttggctgtccagatttacgaagaagccagaaaatttagctatagaagcagggtgcgcccttgcgtagtttatggtggcgcagacattggtcaacagatcagggacttagagcggggttgccacctgctggtcgccacccctggcaggttggtggatatgatggaacgcggtaagattgggctagatttctgcaagtacctggtgctagatgaggctgaccgtatgttagatatgggatttgagcctcagattcgtcgtattgtagaacaggataccatgccccctaagggtgttaggcataccatgatgttcagcgcaacttttcctaaagaaatccagatgctagccagggactttctggacgagtacatcttcttggccgttgggagagttggttccactagcgaaaacattacgcagaaggttgtgtgggtggaagagtcagataagcggtctttccttctggacctcctcaatgctaccggcaaggattcgttgaccttggtcttcgtggagaccaagaaaggcgctgacagcctggaagactttctgtatcatgaaggttatgcatgtacttctattcacggagaccgatctcagcgcgacagagaagaggcgctccatcagttcaggtctggaaagtctcctattctggtggccacagccgtggcagccagggggctcgacatctccaacgttaagcatgtgataaattttgatttgcctagcgatatcgaagagtacgtgcacaggatcggaagaacaggaagggtcggaaacctgggccttgcaacaagcttttttaacgagcggaacatcaacattacgaaagacctcctcgatcttctggtcgaggccaagcaagaagttccatcttggctggaaaacatggcttacgagcaccactataaggggtccagtaggggccgttctaagagttcccggttctctggaggcttcggcgcacgagattatagacagagcagtggggcttcttctagctcattttccagctctcgggcaagcagtagtaggtcagggggtggtggtcatggatcctcaagaggcttcggcggaggcggatatggcggattttataacagcgacggttacggcggaaattacaattcacagggcgtagattggtgggggaattag

SEQ ID NO: 73849 - DNA, 5334 bp, Artificial Sequence
  derived and/or modified sequence
ctttccccttactccgctcccctcttttccctccctctcctccccttccctctgttctctcctcctcttcccctcccctcccccgtccggagcactctatattcaagccaccgtttcctgcttcacaaaatggccaccgcacgcgacacctacggtcacgtggcctgccgccctctcagtttcgggaatctgcctagctcccactaaggggaggctacccgcggaagagcgagggcagattagaccggagaaatcccaccacatctccaagcccgggaactgagagaggaagaagagtgaaggccagtgttaggaaaaaaaaaacaaaaacaaaaaaaacgaaaaacgaaagctgagtgcatagagttggaaaggggagcgaatgcgtaaggttggaaaggggggcgaagaggcctaggttaacattttcaggcgtcttagccggtggaaagcgggagacgcaagttctcgcgagatctcgagaactccgaggctgagactagggttttagcggagagcacgggaagtgtagctcgagagaactgggacagcatttcgcaccctaagctccaaggcaggactgctaggggcgacaggactaagtaggaaatcccttgagcttagacctgagggagcgcgcagtagccgggcagaagtcgccgcgacagggaattgcggtgtgagagggagggcacacgttgtacgtgctgacgtagccggctttccagcgggtatattagatccgtggccgcgcggtgcgctccagagccgcagttctcccgtgagagggccttcgcggtggaacaaacactcgcttagcagcggaagactccgagttctcggtactcttcagggatgagtcatgtggcagtggaaaatgcgctcgggctggaccagcagtttgctggcctagacctgaactcttcagataatcagagtggaggaagtacagccagcaaagggcgctatattcctcctcatttaaggaaccgagaagctactaaaggtttctacgataaagacagttcagggtggagttctagcaaagataaggatgcgtatagcagttttggatctcgtagtgattcaagagggaagtctagcttcttcagtgatcgtggaagtggatcaaggggaaggtttgatgatcgtggacggagtgattacgatggcattggcagccgtggtgacagaagtggctttggcaaatttgaacgtggtggaaacagtcgctggtgtgacaaatcagatgaagatgattggtcaaaaccactcccaccaagtgaacgcttggaacaggaactcttttctggaggcaacactgggattaattttgagaaatacgatgacattccagttgaggcaacaggcaacaactgtcctccacatattgaaagtttcagtgatgttgagatgggagaaattatcatgggaaacattgagcttactcgttatactcgcccaactccagtgcaaaagcatgctattcctattatcaaagagaaaagagacttgatggcttgtgcccaaacagggtctggaaaaactgcagcatttctgttgcccatcttgagtcagatttattcagatggtccaggcgaggctttgagggccatgaaggaaaatggaaggtatgggcgccgcaaacaatacccaatctccttggtattagcaccaacgagagagttggcagtacagatctacgaggaagccagaaaattttcataccgatctagagttcgtccttgcgtggtttatggtggtgccgatattggtcagcagattcgagacttggaacgtggatgccatttgttagtagccactccaggacgtctagtggatatgatggaaagaggaaagattggattagacttttgcaaatacttggtgttagatgaagctgatcggatgttggatatggggtttgagcctcagattcgtagaatagtcgaacaagatactatgcctccaaagggtgtccgccacactatgatgtttagtgctacttttcctaaggaaatacagatgctggctcgtgatttcttagatgaatatatcttcttggctgtaggaagagttggctctacctctgaaaacatcacacagaaagtagtttgggtggaagaatcagacaaacggtcatttctgcttgacctcctaaatgcaacaggcaaggattcactgaccttagtgtttgtggagaccaaaaagggtgcagattctctggaggatttcttataccatgaaggatacgcatgtaccagcatccatggagaccgttctcagagggatagagaagaggcccttcaccagttccgctcaggaaaaagcccaattttagtggctacagcagtagcagcaagaggactggacatttcaaatgtgaaacatgttatcaattttgacttgccaagtgatattgaagaatatgtacatcgtattggtcgtacgggacgtgtaggaaaccttggcctggcaacctcattctttaacgagaggaacataaatattactaaggatttgttggatcttcttgttgaagctaaacaagaagtgccgtcttggttagaaaacatggcttatgaacaccactacaagggtagcagtcgtggacgttctaagagtagcagatttagtggagggtttggtgccagagactaccgacaaagtagcggtgccagcagttccagcttcagcagcagccgcgcaagcagcagccgcagtggcggaggtggccacggtagcagcagaggatttggtggaggtggctatggaggcttttacaacagtgatggatatggaggaaattataactcccagggggttgactggtggggtaactgagcctgctttgcagtaggtcaccctgccaaacaagctaatatggaaaccacatgtaacttagccagactataccttgtgtagcttcaagaactcgcagtacattaccagctgtgattctccactgaaattttttttttaagggagctcaaggtcacaagaagaaatgaaaggaacaatcagcagccctgttcagaaggtggtttgaagacttcattgctgtagtttggattaactcccctcccgcctacccccatcccaaactgcatttataattttgtgactgaggatcatttgtttgttaatgtactgtgcctttaactttagacaactttttattttgatgtcctgttggctcagtaatgctcaagatatcaattgttttgacaaaataaatttactgaacttgggctaaaatcaaaccttggcacacaggtgtgatacaacttaacaggaatcatcgattcatccataaataatataaggaaaaacttatgcggtagcctgcattagggctttttgatacttgcagattgggggaaaacaacaaatgtcttgaagcatattaatggaattagtttctaatgtggcaaactgtattaagttaaagttctgatttgctcactctatcctggataggtatttagaacctgatagtctttaagccattccagtcatgatgaggtgatgtatgaatacatgcatacattcaaagcactgttttcaaagttaatgcaagtaaatacagcaattcctctttcaacgtttaggcagatcattaattatgagctagccaaatgtgggcatactattacagggaaagtttaaaggtctgataacttgaaataggtttttaggagaattcatctacttagactttttaaatgcctgccataaatgaaattgaaatggtagaatggctgaccacagcaatgaccagccctcattagggccctggatgatttttggtctaataacgcatgctagtgttgatgttttttggtcaagagggtatgaacaggaagaattaaatgcagcaggctttattttaaatgccgattcacattactctgttcaagctgcgttgagatgttaaactggcttactatagacttcgtaaaaatggctccagaagagtaacaaactgaaatctttgagatcacacaggttggaaatatgtacataactgcacaaggtgtcaattctgctctacagtgcagttttagtcagttttagttgcataggtttccattgtatttatagtctgtttatgctaaatctggccaaagatgagcattgtccaccactaaaatgcctctgccactttgaattctgtgctaattttgtggccagaatgcggtgatcaaaacgctccatctttttacagtggcataggaagacggcaaaaatttcctaaagtgcaatagattttcaagtgtattgtgccttgttctaaaacttttattaagtaggtgcacttgacagtattgaggtcatttgttatggtgctatttcaattagtctaggtttaggcccttgtacattttgcccataactttttacaaagtacttcttttattgcacattcagagaattttatatatatgtcttgtgtgcgtgtccttaaacttccaatcttactttgtctcttggagattgttgaacgcagcttgtctaggaaggggatgggactagattctaaaatttatttgggaccatgggaatgatagttgggaagaaaactatttgcacacgacagatttctagatactttttgctgctagttttatgtaatatttattgaacattttgacaaatatttatttttgtaagcctaaaagtgattctttgaaagtttaaagaaacttgaccaaaagacagtacaaaaacactggcacttgaatgttgaatgtcaccgtatgcgtgaaattatatatttcggggtagtgtgagcttttaatgtttaagtcatattaaactcttaagtcaaattaagcagacccggcgttggcagtgtagccataactttctgatgttagtaaaaacaaaattggcgacttgaaattaaatcatgccaaggttttgatacacttgtcttaagatattaatgaaacacttcaaaacactgatgtgaagtgtccagattctcagatgtttgttgtgtggattttgtttagttgtgtgtttttttttttttttcagtgaatgtctggcacattgcaatcctcaaacatgtggttatctttgttgtattggcataatcagtgacttgtacattcagcaatagcatttgagcaagttttatcagcaagcaatattttcagttaataaggtttcaaaaatcatgtaaggatttaaacttgctgaatgtaaagattgaacctcaagtcactgtagctttagtaattgcttattgtattagtttagatgctagcactgcatgtgctgtgcatattctgattttattaaaataaaaagttgaactgcacagtc

SEQ ID NO: 73850 - DNA, 1989 bp, Artificial Sequence
  derived and/or modified sequence
atgagccacgtggccgtggagaacgccctgggcctggaccagcagttcgccggcctggacctgaacagcagcgacaaccagagcggcggcagcaccgccagcaagggcagatacatccccccccacctgagaaacagagaggccaccaagggcttctacgacaaggacagcagcggctggagcagcagcaaggacaaggacgcctacagcagcttcggcagcagaagcgacagcagaggcaagagcagcttcttcagcgacagaggcagcggcagcagaggcagattcgacgacagaggcagaagcgactacgacggcatcggcagcagaggcgacagaagcggcttcggcaagttcgagagaggcggcaacagcagatggtgcgacaagagcgacgaggacgactggagcaagcccctgccccccagcgagagactggagcaggagctgttcagcggcggcaacaccggcatcaacttcgagaagtacgacgacatccccgtggaggccaccggcaacaactgccccccccacatcgagagcttcagcgacgtggagatgggcgagatcatcatgggcaacatcgagctgaccagatacaccagacccacccccgtgcagaagcacgccatccccatcatcaaggagaagagagacctgatggcctgcgcccagaccggcagcggcaagaccgccgccttcctgctgcccatcctgagccagatctacagcgacggccccggcgaggccctgagagccatgaaggagaacggcagatacggcagaagaaagcagtaccccatcagcctggtgctggcccccaccagagagctggccgtgcagatctacgaggaggccagaaagttcagctacagaagcagagtgagaccctgcgtggtgtacggcggcgccgacatcggccagcagatcagagacctggagagaggctgccacctgctggtggccacccccggcagactggtggacatgatggagagaggcaagatcggcctggacttctgcaagtacctggtgctggacgaggccgacagaatgctggacatgggcttcgagccccagatcagaagaatcgtggagcaggacaccatgccccccaagggcgtgagacacaccatgatgttcagcgccaccttccccaaggagatccagatgctggccagagacttcctggacgagtacatcttcctggccgtgggcagagtgggcagcaccagcgagaacatcacccagaaggtggtgtgggtggaggagagcgacaagagaagcttcctgctggacctgctgaacgccaccggcaaggacagcctgaccctggtgttcgtggagaccaagaagggcgccgacagcctggaggacttcctgtaccacgagggctacgcctgcaccagcatccacggcgacagaagccagagagacagagaggaggccctgcaccagttcagaagcggcaagagccccatcctggtggccaccgccgtggccgccagaggcctggacatcagcaacgtgaagcacgtgatcaacttcgacctgcccagcgacatcgaggagtacgtgcacagaatcggcagaaccggcagagtgggcaacctgggcctggccaccagcttcttcaacgagagaaacatcaacatcaccaaggacctgctggacctgctggtggaggccaagcaggaggtgcccagctggctggagaacatggcctacgagcaccactacaagggcagcagcagaggcagaagcaagagcagcagattcagcggcggcttcggcgccagagactacagacagagcagcggcgccagcagcagcagcttcagcagcagcagagccagcagcagcagaagcggcggcggcggccacggcagcagcagaggcttcggcggcggcggctacggcggcttctacaacagcgacggctacggcggcaactacaacagccagggcgtggactggtggggcaactag

SEQ ID NO: 73851 - protein, 646 aa, Artificial Sequence
  derived and/or modified sequence
MSHVAVENALGLDQQFAGLDLNSSDNQSGGSTASSFYDKDSSGWSSSKDKDAYSSFGSRSDSRGKSSFFSDRGSGSRGRFDDRGRSDYDGIGSRGDRSGFGKFERGGNSRWCDKSDEDDWSKPLPPSERLEQELFSGGNTGINFEKYDDIPVEATGNNCPPHIESFSDVEMGEIIMGNIELTRYTRPTPVQKHAIPIIKEKRDLMACAQTGSGKTAAFLLPILSQIYSDGPGEALRAMKENGRYGRRKQYPISLVLAPTRELAVQIYEEARKFSYRSRVRPCVVYGGADIGQQIRDLERGCHLLVATPGRLVDMMERGKIGLDFCKYLVLDEADRMLDMGFEPQIRRIVEQDTMPPKGVRHTMMFSATFPKEIQMLARDFLDEYIFLAVGRVGSTSENITQKVVWVEESDKRSFLLDLLNATGKDSLTLVFVETKKGADSLEDFLYHEGYACTSIHGDRSQRDREEALHQFRSGKSPILVATAVAARGLDISNVKHVINFDLPSDIEEYVHRIGRTGRVGNLGLATSFFNERNINITKDLLDLLVEAKQEVPSWLENMAYEHHYKGSSRGRSKSSRFSGGFGARDYRQSSGASSSSFSSSRASSSRSGGGGHGSSRGFGGGGYGGFYNSDGYGGNYNSQGVDWWGN

SEQ ID NO: 73852 - DNA, 1941 bp, Artificial Sequence
  derived and/or modified sequence
atgagccatgtcgcagtggaaaacgcactgggtctggatcagcaatttgccggactagacctaaactcatcagacaatcagagcggcggctcgacagcttcgtccttctatgataaggatagctctggatggtcatctagcaaggataaagatgcctattcttctttcggttcccggtcggacagccggggtaaatcttcatttttttcagacaggggaagcggcagtcgcggtcgattcgatgatcgagggagatcagactatgacggcataggtagtcggggagataggagcggttttggaaagtttgagcgggggggaaatagccggtggtgcgacaagtctgatgaagacgattggagtaaacctctgccaccatctgaacgtctggagcaagagctgttctcgggggggaacaccgggatcaactttgaaaagtacgatgatataccagtggaggcgactgggaacaattgccctccccatatagagagtttcagcgacgtggaaatgggcgaaataattatgggcaatattgagctgactcgctacacccgccccacacccgtacagaagcacgccatccccataataaaggagaaacgggaccttatggcatgtgcacagacagggtcaggcaagactgctgcttttcttttgcctatcctcagtcaaatctacagcgatggccctggtgaggcacttcgcgctatgaaggagaacgggcggtatggccgtaggaaacagtatcccatttcactagtccttgcacccacaagagaactcgccgtgcagatctatgaggaagcaaggaagttctcataccggtcaagggtgcggccttgcgttgtgtatgggggcgccgacatcggtcagcagatccgcgacttagaaagggggtgtcacctccttgttgccacgccaggcagactagtagacatgatggagcgtggaaagatcggcttggacttctgtaagtatctcgtactggacgaggcagataggatgctggatatgggatttgagccccagatcagacgcatagtggagcaggatacaatgcctcctaagggcgttcggcacactatgatgttctcggcaacgttccctaaggagatccagatgctggcacgcgatttcttggacgagtatatcttcttagcagtgggtcgggtcggatcgacttctgaaaatataacacagaaagtcgtctgggtggaggaatccgacaagcgctcgtttctacttgatctgcttaacgcgacgggcaaggactctctcacgctcgtgtttgtcgaaacaaagaagggggctgatagcctggaagatttcctgtaccacgaaggatacgcgtgtacttccatacatggagacaggtcgcaaagggatagggaggaagccctgcaccaatttcggtctgggaagagccctatactggtagccacggcagtcgccgcccggggactagatatttcaaacgtcaaacacgttattaattttgacctcccgtcggatattgaagagtacgtacatcggatcggcagaacaggaagggtaggtaacctgggactggctaccagcttcttcaacgagcgaaacatcaatatcaccaaagacctgttagatctgctcgtggaagctaagcaggaagtgccatcctggctggagaacatggcatacgaacaccactacaaaggttcaagtcggggccggagcaagtcgtcaaggtttagcggggggttcggtgctcgcgattatagacaaagttccggggcctcctcatcatctttctccagcagtcgtgcatcctctagtcgtagtggaggaggtgggcatggctcttcaagaggcttcggggggggcgggtacggcggcttctacaacagtgatggctatggtggcaactataactctcagggggtggactggtggggaaattag

SEQ ID NO: 73853 - DNA, 1941 bp, Artificial Sequence
  derived and/or modified sequence
atgagccacgtggccgtggagaatgccctgggcctggaccagcagtttgctggcctggacctgaacagcagtgacaaccagagcggcggcagcacagccagcagcttctatgacaaggacagcagcggctggagcagcagcaaggacaaggatgcctacagcagctttggcagcagaagtgacagccggggcaagagcagcttcttcagtgaccggggcagcggcagccggggccgctttgatgaccggggccgcagtgactatgatggcatcggcagcagaggagacaggagcggctttgggaagtttgagcggggcggcaacagccgctggtgtgacaagagtgatgaagatgactggagcaagcccctgcccccatctgagcggctggagcaggagctgttcagcggcggcaacacaggcatcaactttgagaagtatgatgacatccctgtggaggccactggaaacaactgccccccccacatcgagagcttcagtgatgtggagatgggagagatcatcatgggcaacatcgagctgacccgctacacccggcccacccctgtgcagaagcacgccatccccatcatcaaggagaagagggacctgatggcctgtgcccagacaggcagcggcaagacagctgccttcctgctgcccatcctgagccagatctacagtgatggccctggagaggccctgcgggccatgaaggaaaatggccgctatggccgcaggaagcagtaccccatcagcctggtgctggcccccacccgggagctggccgtgcagatctatgaggaggccaggaagttctcctaccgcagccgggtgcggccctgtgtggtgtatggaggagctgacatcggccagcagatccgggacctggagcggggctgccacctgctggtggccaccccaggccgcctggtggacatgatggagcggggcaagattggcctggacttctgcaagtacctggtgctggatgaagctgacaggatgctggacatgggctttgagccccagatccgccgcatcgtggagcaggacaccatgccacccaagggcgtgcgccacaccatgatgttcagcgccaccttccccaaggagatccagatgctggcccgggacttcctggatgagtacatcttcctggccgtgggccgggtgggcagcaccagcgagaacatcacccagaaggtggtgtgggtggaggagagtgacaagaggagcttcctgctggacctgctgaatgccaccgggaaggacagcctgaccctggtgtttgtggagaccaagaagggagctgacagcctggaggacttcctgtaccacgagggctacgcctgcaccagcatccacggggacaggagccagagggaccgggaggaggccctgcaccagttccgcagcggcaagagccccatcctggtggccacagctgtggccgcccggggcctggacatcagcaatgtgaagcacgtgatcaactttgacctgcccagcgacatcgaggagtatgtgcacagaattggaagaacaggccgggtgggcaacctgggcctggccaccagcttcttcaatgaaagaaacatcaacatcaccaaggacctgctggacctgctggtggaggccaagcaggaggtgcccagctggctggagaacatggcctatgagcaccactacaagggcagcagccggggccgcagcaagagcagccgcttcagcggcggctttggagcccgggactaccggcagagcagcggggccagcagcagcagcttcagcagcagccgggccagcagcagccgcagcggcggcggcggccacggcagcagccggggctttggaggcggcggctatggaggcttctacaacagtgatggctacggcggcaactacaacagccagggcgtggactggtggggcaactag

SEQ ID NO: 73854 - DNA, 1941 bp, Artificial Sequence
  derived and/or modified sequence
atgagccacgtggccgtggagaacgccctgggcctggaccagcagttcgccggtctggatcttaattcgagtgataaccaatccggagggagtactgcttctagcttttatgacaaggatagtagcgggtggagcagctcgaaggataaagacgcctattcatcctttggaagtagatccgatagcagaggaaaatcttcgtttttctccgatagaggatcagggagccgcgggagatttgatgaccgaggccggagcgattatgatggaattgggagccgcggagaccgttcgggttttggaaaatttgaaaggggaggcaactcaaggtggtgtgacaaatccgacgaagacgactggagtaagcctctgcctccatccgaaagactggagcaggaattgttctcagggggaaacaccggaatcaatttcgagaagtacgatgatattccagtggaagcaacaggaaacaactgtccaccccatattgaatcattttctgacgtggaaatgggagaaattattatgggcaatattgaactgactcgatatactagacccacgcctgtacagaaacatgctattcccatcatcaaagaaaagagggacctgatggcctgcgcccaaactggatctggcaaaactgctgcttttctgctcccgatcttgagccagatttactccgatggaccgggtgaagcattgcgcgccatgaaagagaatggacgttatggacgtaggaagcagtaccctattagcttggtgctggctccaacgcgagaacttgcggtgcagatatacgaagaggccagaaagtttagttacaggagccgggtgaggccctgcgtggtatatgggggagctgatattggccagcagatccgtgatctagaaagagggtgccacctgctggtggccacaccaggtaggctcgtggacatgatggagcgcggaaagattggtcttgatttttgcaagtaccttgtgctggacgaggccgatcgtatgctggacatgggcttcgagccgcagatcaggaggatcgtagagcaagacaccatgcctcccaaaggggtgagacatacgatgatgtttagcgcaaccttcccaaaggaaatccagatgcttgctcgcgattttctggatgaatacatatttctggccgtaggtcgcgtggggtccacatctgagaatattacccagaaagtcgtttgggttgaagaaagtgacaagcgctctttcctgctggatctccttaacgctaccggcaaggactctctgacgctggtgtttgtcgaaactaagaagggcgcggatagcctggaagacttcctgtatcacgaggggtacgcgtgcactagcatccatggcgatcgctctcagagggacagggaagaggctctacatcagtttaggagtggcaagagtcctatcctcgtggccaccgccgtggccgctaggggcctggacatctcaaatgtgaaacacgttatcaattttgatctgccgtccgacatagaggagtatgtgcaccgtatagggaggacaggcagagtgggtaatttgggactggcaacctccttctttaatgagagaaacataaacataaccaaggacctgctggatctgctggtggaagccaagcaggaggtcccgagctggctcgaaaacatggcctacgaacatcactacaaaggatcctccagggggcgctccaaatcaagccggttctccggaggtttcggggccagagattacaggcagagtagtggagcctcttcgtcaagcttctcttccagccgtgccagtagtagccggagcggaggagggggccatggcagtagccgcggatttggcggcgggggctatgggggattctataacagcgacgggtatggcggaaattacaattcgcagggcgtggattggtggggtaattag

SEQ ID NO: 73855 - DNA, 1941 bp, Artificial Sequence
  derived and/or modified sequence
atgtcacatgttgcggttgaaaatgctctgggcctggaccagcagttcgctggtctggacttgaattctagtgataatcagagtggaggcagcacggcttcgtctttctacgataaagatagtagcgggtggagctcaagtaaggataaggacgcctactcttcttttgggtctagatccgatagtcggggtaagagttctttcttttcagacaggggttctgggagccgcggtagattcgatgaccggggaaggtcggattacgacggtatcggcagcagaggagacagatccgggttcggcaagttcgagaggggcggtaacagtaggtggtgcgataaatccgatgaagatgactggtccaagcccttaccaccgagcgagcggctggagcaagagcttttcagtggtggaaacaccgggatcaactttgaaaagtacgacgacatccctgtggaagccactggaaataattgtcctccccatatcgagtcgtttagcgatgtcgagatgggggagatcataatgggaaacatcgagttgacaagatacactcgtccgacacccgttcagaagcatgcaatccccataatcaaggagaaacgggacttgatggcctgcgctcagaccggtagcggaaaaacagctgcattcctgctgcccatactgtctcagatttacagtgatggaccgggtgaggctctgcgggcaatgaaagagaatgggagatacggcaggagaaagcagtaccccattagcctggtcttagcacccacccgcgaattggcggtgcagatttatgaggaagcaaggaagttctcctaccggagccgagtgagaccctgcgtcgtgtacggaggagccgacattggacagcagattcgcgatctggagcgaggctgccaccttctggttgcaacacctgggagactggtagatatgatggagcgaggaaagatcgggttagatttctgtaagtatctggtgctggatgaagccgataggatgctggatatgggcttcgagccacagatcaggcggatcgtcgagcaggacactatgcctcccaaaggggttaggcacaccatgatgttttctgctacatttccgaaagagatccagatgttggcgagggactttttggatgagtacatcttcctggcagtcggtagagtgggcagcacctcagaaaatattacccagaaggttgtgtgggttgaagaaagtgataaacgctcctttctcctggatctgctcaatgctacgggcaaggattctctgaccctcgtgtttgtggagacaaaaaagggagccgactcacttgaggattttctctatcacgagggctacgcttgtacttccatacatggtgatagaagccagcgcgaccgagaggaggcgttgcatcaatttagatctggaaagtccccaatcctggtggcgacagccgtagccgcaagggggctggatattagcaacgtaaagcacgtgataaacttcgaccttccatcggatatcgaagagtacgtgcaccgtatagggaggactggacgtgtgggcaacctcggtctcgcaacctctttcttcaatgaacgtaacattaatatcacaaaggatctcctggatcttctcgtagaggccaaacaagaggttcctagttggctggagaacatggcatacgaacaccactataaaggctctagtcgaggacggtctaagagtagtaggttctccgggggattcggagcaagagattaccgccagagttccggcgctagctctagctctttctcttccagccgcgcttcaagtagccgcagcggtggcggaggccacggcagctctcgcggattcggcggaggtggatacggtgggttttacaatagtgatggttacggcggaaattacaattcccagggcgtggactggtggggaaactag

SEQ ID NO: 73856 - DNA, 2349 bp, Artificial Sequence
  derived and/or modified sequence
agagccgcagttctcccgtgagagggccttcgcggtggaacaaacactcgcttagcagcggaagactccgagttctcggtactcttcagggatgagtcatgtggcagtggaaaatgcgctcgggctggaccagcagtttgctggcctagacctgaactcttcagataatcagagtggaggaagtacagccagcagtttctacgataaagacagttcagggtggagttctagcaaagataaggatgcgtatagcagttttggatctcgtagtgattcaagagggaagtctagcttcttcagtgatcgtggaagtggatcaaggggaaggtttgatgatcgtggacggagtgattacgatggcattggcagccgtggtgacagaagtggctttggcaaatttgaacgtggtggaaacagtcgctggtgtgacaaatcagatgaagatgattggtcaaaaccactcccaccaagtgaacgcttggaacaggaactcttttctggaggcaacactgggattaattttgagaaatacgatgacattccagttgaggcaacaggcaacaactgtcctccacatattgaaagtttcagtgatgttgagatgggagaaattatcatgggaaacattgagcttactcgttatactcgcccaactccagtgcaaaagcatgctattcctattatcaaagagaaaagagacttgatggcttgtgcccaaacagggtctggaaaaactgcagcatttctgttgcccatcttgagtcagatttattcagatggtccaggcgaggctttgagggccatgaaggaaaatggaaggtatgggcgccgcaaacaatacccaatctccttggtattagcaccaacgagagagttggcagtacagatctacgaggaagccagaaaattttcataccgatctagagttcgtccttgcgtggtttatggtggtgccgatattggtcagcagattcgagacttggaacgtggatgccatttgttagtagccactccaggacgtctagtggatatgatggaaagaggaaagattggattagacttttgcaaatacttggtgttagatgaagctgatcggatgttggatatggggtttgagcctcagattcgtagaatagtcgaacaagatactatgcctccaaagggtgtccgccacactatgatgtttagtgctacttttcctaaggaaatacagatgctggctcgtgatttcttagatgaatatatcttcttggctgtaggaagagttggctctacctctgaaaacatcacacagaaagtagtttgggtggaagaatcagacaaacggtcatttctgcttgacctcctaaatgcaacaggcaaggattcactgaccttagtgtttgtggagaccaaaaagggtgcagattctctggaggatttcttataccatgaaggatacgcatgtaccagcatccatggagaccgttctcagagggatagagaagaggcccttcaccagttccgctcaggaaaaagcccaattttagtggctacagcagtagcagcaagaggactggacatttcaaatgtgaaacatgttatcaattttgacttgccaagtgatattgaagaatatgtacatcgtattggtcgtacgggacgtgtaggaaaccttggcctggcaacctcattctttaacgagaggaacataaatattactaaggatttgttggatcttcttgttgaagctaaacaagaagtgccgtcttggttagaaaacatggcttatgaacaccactacaagggtagcagtcgtggacgttctaagagtagcagatttagtggagggtttggtgccagagactaccgacaaagtagcggtgccagcagttccagcttcagcagcagccgcgcaagcagcagccgcagtggcggaggtggccacggtagcagcagaggatttggtggaggtggctatggaggcttttacaacagtgatggatatggaggaaattataactcccagggggttgactggtggggtaactgagcctgctttgcagtaggtcaccctgccaaacaagctaatatggaaaccacatgtaacttagccagactataccttgtgtagcttcaagaactcgcagtacattaccagctgtgattctccactgaaattttttttttaagggagctcaaggtcacaagaagaaatgaaaggaacaatcagcagccctgttcagaaggtggtttgaagacttcattgctgtagtttggattaactcccctcccgcctacccccatcccaaactgcatttataattttgtgactgaggatcatttgtttgttaatgtactgtgccttta

SEQ ID NO: 73857 - DNA, 1941 bp, Artificial Sequence
  derived and/or modified sequence
atgagccacgtggccgtggagaacgccctgggcctggaccagcagttcgccggcctggacctgaacagcagcgacaaccagagcggcggcagcaccgccagcagcttctacgacaaggacagcagcggctggagcagcagcaaggacaaggacgcctacagcagcttcggcagcagaagcgacagcagaggcaagagcagcttcttcagcgacagaggcagcggcagcagaggcagattcgacgacagaggcagaagcgactacgacggcatcggcagcagaggcgacagaagcggcttcggcaagttcgagagaggcggcaacagcagatggtgcgacaagagcgacgaggacgactggagcaagcccctgccccccagcgagagactggagcaggagctgttcagcggcggcaacaccggcatcaacttcgagaagtacgacgacatccccgtggaggccaccggcaacaactgccccccccacatcgagagcttcagcgacgtggagatgggcgagatcatcatgggcaacatcgagctgaccagatacaccagacccacccccgtgcagaagcacgccatccccatcatcaaggagaagagagacctgatggcctgcgcccagaccggcagcggcaagaccgccgccttcctgctgcccatcctgagccagatctacagcgacggccccggcgaggccctgagagccatgaaggagaacggcagatacggcagaagaaagcagtaccccatcagcctggtgctggcccccaccagagagctggccgtgcagatctacgaggaggccagaaagttcagctacagaagcagagtgagaccctgcgtggtgtacggcggcgccgacatcggccagcagatcagagacctggagagaggctgccacctgctggtggccacccccggcagactggtggacatgatggagagaggcaagatcggcctggacttctgcaagtacctggtgctggacgaggccgacagaatgctggacatgggcttcgagccccagatcagaagaatcgtggagcaggacaccatgccccccaagggcgtgagacacaccatgatgttcagcgccaccttccccaaggagatccagatgctggccagagacttcctggacgagtacatcttcctggccgtgggcagagtgggcagcaccagcgagaacatcacccagaaggtggtgtgggtggaggagagcgacaagagaagcttcctgctggacctgctgaacgccaccggcaaggacagcctgaccctggtgttcgtggagaccaagaagggcgccgacagcctggaggacttcctgtaccacgagggctacgcctgcaccagcatccacggcgacagaagccagagagacagagaggaggccctgcaccagttcagaagcggcaagagccccatcctggtggccaccgccgtggccgccagaggcctggacatcagcaacgtgaagcacgtgatcaacttcgacctgcccagcgacatcgaggagtacgtgcacagaatcggcagaaccggcagagtgggcaacctgggcctggccaccagcttcttcaacgagagaaacatcaacatcaccaaggacctgctggacctgctggtggaggccaagcaggaggtgcccagctggctggagaacatggcctacgagcaccactacaagggcagcagcagaggcagaagcaagagcagcagattcagcggcggcttcggcgccagagactacagacagagcagcggcgccagcagcagcagcttcagcagcagcagagccagcagcagcagaagcggcggcggcggccacggcagcagcagaggcttcggcggcggcggctacggcggcttctacaacagcgacggctacggcggcaactacaacagccagggcgtggactggtggggcaactag

SEQ ID NO: 73858 - protein, 1031 aa, Artificial Sequence
  derived and/or modified sequence
MMAAALLHYTGYAQEEQLKEEEEIKEEEEEEDSGSVAQLQGGNDTGTDEELETGPEQKGCFSYQNSPGSHLSNQDAENESLLSDASDQVSDIKSVCGRDASDKKAHTHVRLPNEAHNCMDKMTAVYANILSDSYWSGLGLGFKLSNSERRNCDTRNGSNKSDFDWHQDALSKSLQQNLPSRSVSKPSLFSSVQLYRQSSKMCGTVFTGASRFRCRQCSAAYDTLVELTVHMNETGHYQDDNRKKDKLRPTSYSKPRKRAFQDMDKEDAQKVLKCMFCGDSFDSLQDLSVHMIKTKHYQKVPLKEPVPTISSKMVTPAKKRVFDVNRPCSPDSTTGSFADSFSSQKNANLQLSSNNRYGYQNGASYTWQFEACKSQILKCMECGSSHDTLQQLTTHMMVTGHFLKVTSSASKKGKQLVLDPLAVEKMQSLSEAPNSDSLAPKPSSNSASDCTASTTELKKESKKERPEETSKDEKVVKSEDYEDPLQKPLDPTIKYQYLREEDLEDGSKGGGDILKSLENTVTTAINKAQNGAPSWSAYPSIHAAYQLSEGTKPPLPMGSQVLQIRPNLTNKLRPIAPKWKVMPLVSMPTHLAPYTQVKKESEDKDEAVKECGKESPHEEASSFSHSEGDSFRKSETPPEAKKTELGPLKEEEKLMKEGSEKEKPQPLEPTSALSNGCALANHAPALPCINPLSALQSVLNNHLGKATEPLRSPSCSSPSSSTISMFHKSNLNVMDKPVLSPASTRSASVSRRYLFENSDQPIDLTKSKSKKAESSQAQSCMSPPQKHALSDIADMVKVLPKATTPKPASSSRVPPMKLEMDVRRFEDVSSEVSTLHKRKGRQSNWNPQHLLILQAQFASSLFQTSEGKYLLSDLGPQERMQISKFTGLSMTTISHWLANVKYQLRKTGGTKFLKNMDKGHPIFYCSDCASQFRTPSTYISHLESHLGFQMKDMTRLSVDQQSKVEQEISRVSSAQRSPETIAAEEDTDSKFKCKLCCRTFVSKHAVKLHLSKTHSKSPEHHSQFVTDVDEE

SEQ ID NO: 73859 - DNA, 3096 bp, Artificial Sequence
  derived and/or modified sequence
atgatggccgccgccctgctgcactacaccggctacgcccaggaggagcagctgaaggaggaggaggagatcaaggaggaggaggaggaggaggacagcggcagcgtggcccagctgcagggcggcaacgacaccggcaccgacgaggagctggagaccggccccgagcagaagggctgcttcagctaccagaacagccccggcagccacctgagcaaccaggacgccgagaacgagagcctgctgagcgacgccagcgaccaggtgagcgacatcaagagcgtgtgcggcagagacgccagcgacaagaaggcccacacccacgtgagactgcccaacgaggcccacaactgcatggacaagatgaccgccgtgtacgccaacatcctgagcgacagctactggagcggcctgggcctgggcttcaagctgagcaacagcgagagaagaaactgcgacaccagaaacggcagcaacaagagcgacttcgactggcaccaggacgccctgagcaagagcctgcagcagaacctgcccagcagaagcgtgagcaagcccagcctgttcagcagcgtgcagctgtacagacagagcagcaagatgtgcggcaccgtgttcaccggcgccagcagattcagatgcagacagtgcagcgccgcctacgacaccctggtggagctgaccgtgcacatgaacgagaccggccactaccaggacgacaacagaaagaaggacaagctgagacccaccagctacagcaagcccagaaagagagccttccaggacatggacaaggaggacgcccagaaggtgctgaagtgcatgttctgcggcgacagcttcgacagcctgcaggacctgagcgtgcacatgatcaagaccaagcactaccagaaggtgcccctgaaggagcccgtgcccaccatcagcagcaagatggtgacccccgccaagaagagagtgttcgacgtgaacagaccctgcagccccgacagcaccaccggcagcttcgccgacagcttcagcagccagaagaacgccaacctgcagctgagcagcaacaacagatacggctaccagaacggcgccagctacacctggcagttcgaggcctgcaagagccagatcctgaagtgcatggagtgcggcagcagccacgacaccctgcagcagctgaccacccacatgatggtgaccggccacttcctgaaggtgaccagcagcgccagcaagaagggcaagcagctggtgctggaccccctggccgtggagaagatgcagagcctgagcgaggcccccaacagcgacagcctggcccccaagcccagcagcaacagcgccagcgactgcaccgccagcaccaccgagctgaagaaggagagcaagaaggagagacccgaggagaccagcaaggacgagaaggtggtgaagagcgaggactacgaggaccccctgcagaagcccctggaccccaccatcaagtaccagtacctgagagaggaggacctggaggacggcagcaagggcggcggcgacatcctgaagagcctggagaacaccgtgaccaccgccatcaacaaggcccagaacggcgcccccagctggagcgcctaccccagcatccacgccgcctaccagctgagcgagggcaccaagccccccctgcccatgggcagccaggtgctgcagatcagacccaacctgaccaacaagctgagacccatcgcccccaagtggaaggtgatgcccctggtgagcatgcccacccacctggccccctacacccaggtgaagaaggagagcgaggacaaggacgaggccgtgaaggagtgcggcaaggagagcccccacgaggaggccagcagcttcagccacagcgagggcgacagcttcagaaagagcgagaccccccccgaggccaagaagaccgagctgggccccctgaaggaggaggagaagctgatgaaggagggcagcgagaaggagaagccccagcccctggagcccaccagcgccctgagcaacggctgcgccctggccaaccacgcccccgccctgccctgcatcaaccccctgagcgccctgcagagcgtgctgaacaaccacctgggcaaggccaccgagcccctgagaagccccagctgcagcagccccagcagcagcaccatcagcatgttccacaagagcaacctgaacgtgatggacaagcccgtgctgagccccgccagcaccagaagcgccagcgtgagcagaagatacctgttcgagaacagcgaccagcccatcgacctgaccaagagcaagagcaagaaggccgagagcagccaggcccagagctgcatgagccccccccagaagcacgccctgagcgacatcgccgacatggtgaaggtgctgcccaaggccaccacccccaagcccgccagcagcagcagagtgccccccatgaagctggagatggacgtgagaagattcgaggacgtgagcagcgaggtgagcaccctgcacaagagaaagggcagacagagcaactggaacccccagcacctgctgatcctgcaggcccagttcgccagcagcctgttccagaccagcgagggcaagtacctgctgagcgacctgggcccccaggagagaatgcagatcagcaagttcaccggcctgagcatgaccaccatcagccactggctggccaacgtgaagtaccagctgagaaagaccggcggcaccaagttcctgaagaacatggacaagggccaccccatcttctactgcagcgactgcgccagccagttcagaacccccagcacctacatcagccacctggagagccacctgggcttccagatgaaggacatgaccagactgagcgtggaccagcagagcaaggtggagcaggagatcagcagagtgagcagcgcccagagaagccccgagaccatcgccgccgaggaggacaccgacagcaagttcaagtgcaagctgtgctgcagaaccttcgtgagcaagcacgccgtgaagctgcacctgagcaagacccacagcaagagccccgagcaccacagccagttcgtgaccgacgtggacgaggagtag

SEQ ID NO: 73860 - DNA, 3096 bp, Artificial Sequence
  derived and/or modified sequence
atgatggcggctgccctgctgcactataccggctatgcccaggaggaacagctgaaagaggaagaggagataaaggaggaggaggaagaggaggactcaggaagtgtcgctcaactgcaagggggtaacgacactggaacggacgaggagctggagacaggccccgagcagaaaggatgcttctcttatcaaaattcccctggttcgcacctgagtaaccaagatgctgaaaatgagagcttgttatccgacgcctccgatcaagtgtctgatattaaaagcgtctgtgggcgtgacgccagcgacaaaaaagcacatactcacgtgagactccccaacgaggcacacaattgcatggacaagatgactgccgtctatgcgaacatcctctcggatagctactggtcaggattaggcctgggattcaagctctctaattccgagcgacgtaattgcgacacccggaatggatccaacaagtcagacttcgattggcatcaggatgccctatctaagtctctgcaacagaacctaccttctcggtctgtatccaaaccctctttgttttcatcagtccagttatacaggcagtcaagtaaaatgtgcggcacggtctttactggtgcctctagatttagatgtaggcagtgttcggccgcttacgacacactagtggaattgaccgtccacatgaacgagactgggcactaccaagatgacaataggaaaaaggacaagctgcgccccacctcctactcaaaacccaggaaaagggccttccaggacatggataaagaagatgcccagaaagttctcaagtgtatgttttgtggggattcattcgacagccttcaggacctgagcgtgcacatgatcaagacaaaacattatcaaaaggtcccccttaaggaacccgtgccaactattagttccaaaatggtgacgcctgccaagaagcgcgtcttcgacgtgaatcggccatgctcgcccgactccaccacaggatcatttgctgactcgttctcttcccagaaaaacgccaacctgcagctatcctctaataataggtacggctaccagaacggagcctcatatacgtggcagttcgaagcttgtaaatcacaaatacttaagtgtatggagtgtgggtcttctcacgatacgttgcagcagctgaccacacatatgatggttactggccattttttgaaggtcacgtcctctgcctctaagaaaggtaagcaactggtcctggatcccctggccgtcgagaagatgcaatctctgagtgaagcccccaattccgattctcttgcccccaagccatcctccaacagtgcaagcgattgtactgctagcactacagagcttaagaaggagtccaagaaggaaagacctgaagaaactagcaaggacgaaaaggtggtcaaatccgaggattacgaagatcccctgcagaaaccgctcgatcccactatcaagtaccaatacttaagagaagaggacttggaggatggcagtaagggcggaggggatattctcaaaagtctcgagaacactgtcacaacagctatcaacaaagctcagaacggggctccctcctggtccgcctacccttcaattcacgcagcctaccaactaagcgagggaacaaagccaccactgcctatgggtagtcaggtgcttcagataagaccaaaccttactaataaactgcgcccgatagctcccaaatggaaggtaatgccactagtctcaatgccgacccacctcgctccatacactcaggtgaaaaaggagtccgaagacaaagacgaggcggtgaaagaatgtggtaaagagtcaccccacgaagaagcctcatccttttctcacagcgaaggggactcattcagaaagagtgaaacgccgccggaggcaaaaaagacagagttggggccacttaaggaggaagaaaagctgatgaaggagggctcagagaaagagaagccccagccactggagcccacatccgcgctgagcaatggctgcgctctggccaaccacgccccagctcttccctgcatcaaccctttgtctgcgctgcagagcgtgctgaataaccatttggggaaagcaaccgaaccccttagaagtccgtcctgtagcagtcccagctcatcaacgatctcgatgtttcacaaaagtaacctgaatgtgatggacaaacctgttctaagtccggctagcacaaggtccgcgtccgttagtcggcggtatctgtttgagaactctgatcaacccatcgatctaacgaagagtaagagtaagaaagccgagagtagccaggctcagagttgcatgtctccccctcaaaagcacgccctgagtgacatcgcagacatggttaaggttttacctaaagccactactcctaaacccgccagttcctccagagtgccacctatgaaactggagatggatgtgagacgtttcgaggatgtcagtagcgaggtgtcgacgctccacaaacggaagggacgccaatcgaattggaatcctcagcacctgctcattctccaggcccagtttgcctcctcattgttccagacgtcggaaggcaagtatctgctcagcgatttgggcccccaggagcgaatgcagatcagcaagttcacgggattaagcatgactacaatttcgcactggctggccaatgtgaagtatcaattgcggaaaacagggggaacaaaattcctgaagaacatggataaggggcatccaatcttttattgttccgactgcgcttctcaattcagaacaccttccacttacatctcccacctggaatctcacctggggttccaaatgaaggatatgacccgcctgtcggttgatcagcaaagcaaagtcgaacaagagatctctcgggtgtcatcagctcagaggtcccctgagacaattgctgctgaagaagataccgacagtaaatttaagtgtaagctgtgttgtcggaccttcgtgagtaagcatgcagtcaaactgcatctgtctaagacccattccaaatcccccgaacaccacagccaatttgtcacagacgtggacgaggaatag

SEQ ID NO: 73861 - DNA, 3096 bp, Artificial Sequence
  derived and/or modified sequence
atgatggccgccgccctgctgcactacacaggctacgcccaggaggagcagctgaaggaggaggaggagatcaaggaggaggaggaggaggaggacagcggctctgtggcccagctgcagggcggcaatgacacaggaacagatgaggagctggagactggacctgagcagaagggctgcttctcctaccagaacagccctggcagccacctgagcaaccaggatgctgaaaatgaaagcctgctgagtgatgccagtgaccaggtgtctgacatcaagtctgtgtgtggcagagatgccagtgacaagaaggcccacacccacgtgcggctgcccaatgaggcccacaactgcatggacaagatgacagctgtgtatgccaacatcctgagtgacagctactggagcggcctgggcctgggcttcaagctgagcaacagcgagaggaggaactgtgacaccagaaatggcagcaacaagagtgactttgactggcaccaggatgccctgagcaagagcctgcagcagaacctgcccagccgctctgtgtccaagcccagcctcttcagctctgtgcagctgtaccggcagagcagcaagatgtgtggcaccgtcttcaccggggccagccgcttccgctgccggcagtgcagcgctgcctatgacaccctggtggagctgactgtgcacatgaatgagaccggccactaccaggatgacaacaggaagaaggacaagctgcggcccaccagctacagcaagcccaggaagagggccttccaggacatggacaaggaggatgcccagaaggtgctgaagtgcatgttctgtggggacagctttgacagcctgcaggacctgtctgtgcacatgatcaagaccaagcactaccagaaggtgcccctgaaggagcctgtgcccaccatcagcagcaagatggtgaccccagccaagaagagggtgtttgatgtgaaccggccctgcagcccagacagcaccaccggcagctttgctgacagcttcagcagccagaagaatgccaacctgcagctgagcagcaacaacagatatggctaccagaatggagccagctacacctggcagtttgaggcctgcaagagccagatcctgaagtgcatggagtgtggcagcagccatgacaccctgcagcagctgaccacccacatgatggtgacaggccacttcctgaaggtgaccagcagcgccagcaagaagggcaagcagctggtgctggaccccctggccgtggagaagatgcagagcctgtctgaggcccccaacagcgacagcctggcccccaagcccagcagcaacagcgccagtgactgcacagccagcaccacagagctgaagaaggagagcaagaaggagaggcctgaggagaccagcaaggatgagaaggtggtgaagtcagaagattatgaggaccccctgcagaagcccctggaccccaccatcaagtaccagtacctgcgggaggaggacctggaggatggcagcaagggcggcggggacatcctgaagagcctggagaacacagtgaccacagccatcaacaaggcccagaatggagcccccagctggagcgcctaccccagcatccatgctgcctaccagctgtctgagggcaccaagccacccctgcccatgggcagccaggtgctgcagatccggcccaacctgaccaacaagctgcggcccatcgcccccaagtggaaggtgatgcccctggtgtccatgcccacccacctggccccctacacccaggtgaagaaggagagcgaggacaaggatgaagctgtgaaggaatgtgggaaggagagcccccatgaggaggccagcagcttcagccacagcgagggggacagcttcaggaagtctgagaccccacctgaggccaagaagacagagctgggccccctgaaggaggaggagaagctgatgaaggagggcagcgagaaggagaagccccagcccctggagcccaccagcgccctgagcaatggctgtgccctggccaaccacgccccagccctgccctgcatcaaccccctgagcgccctgcagagcgtgctgaacaaccacctgggcaaggccacagagcccctgcggagccccagctgcagcagccccagcagcagcaccatctccatgttccacaagagcaacctgaatgtgatggacaagcctgtgctgagccctgccagcaccaggtctgcctctgtgtcccggcgctacctgtttgagaacagcgaccagcccatcgacctgaccaagagcaagagcaagaaggccgagagcagccaggcccagagctgcatgagccccccccagaagcacgccctgagtgacattgctgacatggtgaaggtgctgcccaaggccaccacccccaagccagccagcagcagccgggtgccccccatgaagctggagatggatgtgagaagatttgaagatgtgagcagcgaggtgtccaccctgcacaagaggaagggccggcagagcaactggaacccccagcacctgctgatcctgcaggcccagtttgccagcagcctcttccagaccagcgagggcaagtacctgctgagtgacctgggcccccaggagaggatgcagatcagcaagttcaccggcctgtccatgaccaccatcagccactggctggccaacgtgaagtaccagctgaggaagacaggaggcaccaagttcctgaagaacatggacaagggccaccccatcttctactgcagcgactgtgccagccagttccgcacccccagcacctacatcagccacctggagagccacctgggcttccagatgaaggacatgacccggctgtctgtggaccagcagagcaaggtggagcaggagatcagccgggtgtcctctgcccagaggagccctgagaccatcgctgctgaggaggacacagacagcaagttcaagtgcaagctgtgctgcaggacctttgtgtccaagcatgctgtgaagctgcacctgagcaagacccacagcaagagccctgagcaccacagccagtttgtgacagatgtggatgaggagtag

SEQ ID NO: 73862 - DNA, 3096 bp, Artificial Sequence
  derived and/or modified sequence
atgatggccgccgccctgctgcactacaccggctacgcccaggaggaacagctcaaggaggaagaggagatcaaggaggaagaagaggaagaggactctggttccgtggcgcagctgcaaggcggtaacgacactggcaccgatgaggagctggaaaccggccccgagcagaagggttgcttctcctaccagaacagccctggttcgcacctctccaatcaggatgccgagaatgagtcccttctctctgatgcatcggatcaagtgtcggacataaaatccgtctgcggacgagacgccagcgataaaaaggcccacactcacgtgaggctacctaacgaagcacataactgcatggataagatgactgccgtgtacgctaatatactttcagactcttactggtccgggttgggactgggctttaaattgtcaaattctgagaggaggaattgtgacaccagaaacggcagcaacaagtccgatttcgactggcatcaggacgccctgagcaaaagcctgcagcaaaacctgcctagccgctccgtatccaagccctccctgttctcaagcgtacagctctacaggcaatctagcaagatgtgcgggacagtgtttacaggcgcttctcgttttcggtgtcgtcagtgctctgctgcatacgatacactggtcgagctcacagtgcacatgaacgagacaggacactaccaggacgataatcggaaaaaggacaagctgagacccacatcttacagtaagcctaggaagcgcgcctttcaggacatggacaaggaggatgctcagaaagtgcttaaatgcatgttttgtggcgacagttttgactccttacaagatctttctgtgcatatgatcaaaactaaacactaccagaaggtgccactgaaggaacccgtgccaacaatctccagtaaaatggtgaccccagccaaaaaacgcgtgtttgacgtcaataggccgtgtagccccgattcgaccacgggatcattcgccgattcctttagctcacagaagaatgcaaaccttcagttgtccagcaacaatcgctacgggtatcagaatggagcctcttacacatggcaatttgaggcatgcaaatctcagattctgaagtgcatggaatgcggaagtagtcacgacactctccagcaattgacgacacacatgatggtcaccgggcactttctgaaagttacctcttccgcctccaaaaaaggaaagcagttagtgctggatcccctcgcagtcgagaaaatgcagtccttgagcgaagcaccaaattcggatagccttgccccaaaacccagctccaattccgcctctgactgcaccgcctccactacggaacttaagaaagaatctaaaaaagaaaggcctgaagagacatcaaaggatgagaaagtggtcaaatccgaagattacgaagatcctctgcagaaacctcttgacccaacaatcaaatatcaatatctgcgcgaggaagatctggaggacggatctaaaggtggcggagatattcttaagtcactcgaaaataccgttaccacagcgattaataaggcccagaatggcgccccatcatggtcggcctacccttctatacatgccgcctatcagctgtctgagggcactaaaccgcctctcccgatggggtcccaagtcctgcagattagacccaatctgacaaacaaactgcgacccattgcccccaagtggaaggtcatgcccctggtttccatgcctacccatttggctccatacacacaggtgaaaaaggaaagcgaagacaaggacgaagccgtgaaggagtgcgggaaggagtccccccacgaagaggctagctcattttcacattcagagggcgacagttttcggaagagtgaaaccccaccagaggcaaagaaaactgagctgggccctctgaaggaagaggagaagctgatgaaggaaggcagcgaaaaggaaaaaccccagcctctcgaaccaacctctgccctgtccaatggatgcgctctggccaatcacgctcccgctttaccttgcatcaacccactctccgccttgcagtccgtgctgaacaaccacctcggaaaagccacggagccactgcgtagtcccagctgtagtagccctagttcatctacaatctctatgtttcataagtctaacctgaatgtgatggacaaacctgtcttaagccccgcttcaactaggtcagccagtgtttcacggaggtacctgttcgagaactccgatcagcccatcgacctaacaaagtccaagtctaagaaggcagaaagttcccaggctcagtcatgtatgagtcctccgcagaagcacgccctgtccgacatcgccgacatggtaaaggtgctccctaaggctacaacacccaagcctgcctctagttcccgggtgcctcccatgaagctcgagatggatgtgcggaggttcgaagatgtttctagcgaagtgagcacactgcacaagcgtaaagggcggcagagcaactggaaccctcagcaccttcttatacttcaagcccagttcgcgtcgagtctctttcagacctcagaggggaagtacctgctctctgaccttggaccccaggagcgcatgcagataagtaagtttacgggccttagtatgaccactattagtcactggttagccaatgtgaaataccagctccggaaaacaggggggaccaagttcctgaagaatatggacaaaggtcaccccattttttattgtagcgactgcgcatcccagtttcgtaccccaagcacatatatttcacacctcgaaagccatctagggtttcagatgaaggacatgacgcggctgtctgtcgaccagcagtccaaggtggagcaagaaatcagccgcgtgtcctccgcccagaggtctccagagacgatagctgccgaggaggataccgatagtaaattcaaatgtaagctgtgttgccgcaccttcgtttcgaagcacgcagttaagctccacctcagcaagacccattctaaatcaccagagcatcatagtcagttcgtcaccgacgttgacgaagaatag

SEQ ID NO: 73863 - DNA, 3096 bp, Artificial Sequence
  derived and/or modified sequence
atgatggctgctgcgttattgcattataccggttatgcacaagaagagcagctgaaagaggaagaggaaatcaaggaggaggaggaagaggaggactctggatccgtggctcagctacaaggtgggaacgacacaggtacggatgaggaattggaaacagggccagagcaaaaaggctgtttttcgtaccagaactcacccggttcacatctgtcaaatcaggatgccgagaatgagtcactcctaagtgacgctagcgaccaggtgtcagatatcaagagcgtctgcggcagagatgcatcagacaagaaagcccacactcacgtgcgattgcctaatgaggctcacaactgtatggacaaaatgaccgccgtttatgcaaacatactgagcgattcttattggagtgggctgggcctggggtttaagctaagtaattccgagcgtagaaactgcgacacgcgcaatggcagcaacaaatccgacttcgactggcatcaggacgctctgtccaagagccttcagcaaaatcttccctcacgttctgtgtccaagccctctttatttagtagtgtccaactttaccgccaatcaagtaaaatgtgtggcactgtctttactggtgctagcagatttcgctgccgccagtgttccgccgcatatgataccctggttgagctcaccgttcacatgaatgaaacaggtcattaccaggacgataatcgcaaaaaagacaaactgaggcctacatcctatagtaagcctcgcaagcgagctttccaagacatggacaaggaagatgcccaaaaggtgctcaagtgtatgttctgcggggacagcttcgactcgttacaagatctgagcgtgcatatgataaaaaccaaacactatcagaaggtacctttgaaggagcctgtccctactatcagctcgaaaatggtcacccccgctaagaagcgggtgtttgacgtgaatcggccttgctctccggacagcacaactggctcgttcgcggacagcttctcatctcaaaagaacgcaaacctacagttgtcatccaacaaccggtacggctaccagaatggggctagttacacatggcagtttgaggcgtgcaagtcacaaatcttaaagtgcatggagtgtggaagctctcacgataccctgcagcagctgaccactcacatgatggtgacagggcacttcttgaaagttacctcctccgcctccaagaagggcaagcaactggtgctcgatcccttagcagtagaaaaaatgcagagtctgagtgaagcgcctaatagcgacagtttggcccctaaaccttccagtaactccgcttccgactgcacagctagtactacagagctaaagaaggaaagtaagaaagaacgcccagaagaaacgtccaaagacgagaaggtagtaaaatccgaggactacgaggacccactccagaagccactagaccccactataaaataccagtaccttagggaagaggaccttgaggacggatctaagggcggtggagatatccttaaatcactcgagaataccgtgaccaccgcaatcaacaaagctcagaatggtgcacctagttggtccgcctacccatctatccatgctgcctatcagctgtctgaggggactaaaccaccattgcctatgggctcccaagttcttcagatcagaccgaacttgaccaataagctacgacccatcgcacccaaatggaaagtgatgcccctggtttcaatgccgacccatctggccccttacacccaggtgaaaaaggaatctgaagataaggacgaagccgttaaggagtgcggcaaagagagtcctcatgaagaggcgagttcgttcagccactcagagggggacagctttcggaaaagcgaaactcccccagaggccaaaaaaactgaactgggaccacttaaggaagaagaaaaactaatgaaagaagggagcgaaaaggagaaacctcagcctttagagccaacttcggctctgtccaacggatgcgccttggctaaccatgcgccagcactgccatgtattaatcccctcagtgcgctccagtctgttttgaacaatcacctcggtaaggctaccgaaccccttcggagcccctcttgttcaagcccatcatcatccacaatctcaatgttccataagtccaatttgaatgtaatggataagcccgttctttcacccgcaagcacaaggagtgcctctgtatcccgccgatacctcttcgagaattccgatcagccaatcgatctcacaaaatcaaaatccaaaaaggctgagtcatcccaggcacagagctgtatgtcacctccacagaaacacgccctgtccgacattgcggacatggtcaaggtgctgcctaaggcaacaacaccaaagccagccagctcgtcaagagtacctcctatgaaactggagatggatgttagaagatttgaagatgtttctagtgaagtatcaaccctgcacaagcgtaagggtcggcaatccaactggaaccctcagcacctattgatccttcaggcccagtttgcctcttctctttttcagacaagtgaggggaagtacctgctaagtgatctgggcccacaggagagaatgcagatttctaagtttaccggactgtccatgactacaatatctcattggctagccaatgttaaataccagttgcgaaagaccggaggaactaaattcctgaaaaatatggacaagggacatcctattttttactgctctgattgcgcctcacagtttaggaccccctccacctatatttcccatcttgagagccacctcggcttccagatgaaagacatgacacgactgtctgtggaccagcagtctaaggtcgagcaggaaataagtagggtatctagcgcccagagatcccctgagaccatcgctgcggaggaggacaccgacagtaagttcaagtgcaagctctgctgccggaccttcgtgtccaagcacgctgtcaagctgcatctctctaaaacccactctaagtctccggagcaccatagtcagtttgtaactgacgtcgacgaggaatag

SEQ ID NO: 73864 - DNA, 3468 bp, Artificial Sequence
  derived and/or modified sequence
atttatttttctagaacacacccgacatgtaggctctattgcaatacatctgaaaacacaaaatctgtttgctccaaaattggtgatagcctctgacttaagatgatggtggccaggcgaggtggttcaagcctgtgattccagcactttgggaggccgaggcaggcagatcagatcatgaggtcaggagttcaagaccagcctggccaacatggtgaaacctcaggaggctgaggcaggagaattccttgaactgggacccaggaggcagaggttgcagtgagctgagatcacgccactgcactccagctggggatacagagcaagactccatctcaaaaaaagaaaaaaaagaaagaaaagatgatggctgctgcgttgctccattatacaggctacgcccaggaggaacagctgaaagaagaggaggaaataaaagaagaggaggaggaggaggacagcggttcagtagctcaactgcagggtggcaatgacacagggacggacgaggagctagaaacgggcccagagcaaaaaggctgcttcagctaccagaactctccaggaagtcatttgtccaatcaggatgccgagaacgagtctctgctgagtgacgccagtgatcaggtgtcggacatcaagagtgtctgcggcagagatgcctcagacaagaaagcacacactcacgtcaggcttccaaacgaagcacacaattgcatggataaaatgaccgctgtctacgccaacatcctgtcggattcctactggtcaggcctgggccttggcttcaagctgtccaatagtgagaggaggaactgtgacacccgaaacggcagcaacaagagtgattttgattggcaccaagacgctctgtccaaaagcctgcagcagaacttgccttctcggtccgtctcgaaacccagcctgttcagctcggtgcagttgtaccgacagagcagcaagatgtgcgggactgtgttcacaggggccagcagattccgatgccgacagtgcagcgcggcctatgacaccctagtcgagctgactgtgcacatgaatgaaacgggccactatcaagatgacaaccgcaaaaaggacaagctcagacccacgagctattcaaagcccaggaaaagggctttccaggatatggacaaagaggatgctcaaaaggttctgaaatgtatgttttgtggcgactcctttgattccctccaagatttgagcgtccacatgattaaaacaaaacattaccaaaaagtgcctttgaaggagccagtcccaaccatttcctcgaaaatggtcaccccggctaagaaacgcgtttttgatgtcaatcggccgtgttcccccgattcaaccacaggatcttttgcagattctttttcttctcagaagaacgccaacttgcagttgtcctccaacaaccgctatggctaccaaaatggagccagctacacctggcagtttgaggcctgcaagtcccagatcttaaagtgcatggagtgtgggagctcccatgacaccttgcagcagctcaccacccacatgatggtcacaggtcactttctcaaggtcaccagctctgcctccaagaaagggaagcagctggtattagacccgttagcagtggagaaaatgcagtcgttgtctgaggccccaaacagtgattctctggctcccaagccatccagtaactcagcatcagattgtacagcctctacaactgagttaaagaaagagagtaaaaaagaaaggccagaggaaaccagcaaggatgagaaagtcgtgaaaagcgaggactatgaagatcctctacaaaaacctttagaccctacaatcaaatatcaatacctaagggaggaagacttggaagatggctcaaagggtggaggggacattttgaaatctttggaaaatactgtcaccacagccatcaacaaagcccaaaacggggcccccagctggagtgcctaccccagcatccacgcagcctaccagctgtctgagggcaccaagccgcctttgcctatgggatcccaggtactgcagatccggcctaatctcaccaacaagctgaggcccattgcaccaaagtggaaagtgatgccactggtttctatgcccacacacctggccccttacactcaagtcaagaaagagtcagaagacaaagatgaagcggtgaaggagtgtgggaaagaaagtccccacgaagaggcctcatctttcagccacagtgagggcgattctttccgcaaaagtgaaacacctccagaagccaaaaagaccgagctgggtcccctgaaggaggaggagaagctgatgaaagagggcagcgagaaggagaaaccccagcccctggagcccacatctgctctgagcaatgggtgcgccctcgccaaccacgccccggccctgccatgcatcaacccactcagcgccctgcagtccgtcctgaacaatcacttgggcaaagccacggagcccttgcgctcaccttcctgctccagcccaagttcaagcacaatttccatgttccacaagtcgaatctcaatgtcatggacaagccggtcttgagtcctgcctccacaaggtcagccagcgtgtccaggcgctacctgtttgagaacagcgatcagcccattgacctgaccaagtccaaaagcaagaaagccgagtcctcgcaagcacaatcttgtatgtccccacctcagaagcacgctctgtctgacatcgccgacatggtcaaagtcctccccaaagccaccaccccaaagccagcctcctcctccagggtcccccccatgaagctggaaatggatgtcaggcgctttgaggatgtctccagtgaagtctcaactttgcataaaagaaaaggccggcagtccaactggaatcctcagcatcttctgattctacaagcccagtttgcctcgagcctcttccagacatcagagggcaaatacctgctgtctgatctgggcccacaagagcgtatgcaaatctctaagtttacgggactctcaatgaccactatcagtcactggctggccaacgtcaagtaccagcttaggaaaacgggcgggacaaaatttctgaaaaacatggacaaaggccaccccatcttttattgcagtgactgtgcctcccagttcagaaccccttctacctacatcagtcacttagaatctcacctgggtttccaaatgaaggacatgacccgcttgtcagtggaccagcaaagcaaggtggagcaagagatctcccgggtatcgtcggctcagaggtctccagaaacaatagctgccgaagaggacacagactctaaattcaagtgtaagttgtgctgtcggacatttgtgagcaaacatgcggtaaaactccacctaagcaaaacgcacagcaagtcacccgaacaccattcacagtttgtaacagacgtggatgaagaatagctctgcagg

SEQ ID NO: 73865 - protein, 410 aa, Artificial Sequence
  derived and/or modified sequence
MAAVGAEARGAWCVPCLVSLDTLQELCRKEKLTCKSIGITKRNLNNYEVEYLCDYKVVKDMEYYLVKWKGWPDSTNTWEPLQNLKCPLLLQQFSNDKHNYLSQVKKGKAITPKDNNKTLKPAIAEYIVKKAKQRIALQRWQDELNRRKNHKGMIFVENTVDLEGPPSDFYYINEYKPAPGISLVNEATFGCSCTDCFFQKCCPAEAGVLLAYNKNQQIKIPPGTPIYECNSRCQCGPDCPNRIVQKGTQYSLCIFRTSNGRGWGVKTLVKIKRMSFVMEYVGEVITSEEAERRGQFYDNKGITYLFDLDYESDEFTVDAARYGNVSHFVNHSCDPNLQVFNVFIDNLDTRLPRIALFSTRTINAGEELTFDYQMKGSGDISSDSIDHSPAKKRVRTVCKCGAVTCRGYLN

SEQ ID NO: 73866 - protein, 350 aa, Artificial Sequence
  derived and/or modified sequence
MEYYLVKWKGWPDSTNTWEPLQNLKCPLLLQQFSNDKHNYLSQVKKGKAITPKDNNKTLKPAIAEYIVKKAKQRIALQRWQDELNRRKNHKGMIFVENTVDLEGPPSDFYYINEYKPAPGISLVNEATFGCSCTDCFFQKCCPAEAGVLLAYNKNQQIKIPPGTPIYECNSRCQCGPDCPNRIVQKGTQYSLCIFRTSNGRGWGVKTLVKIKRMSFVMEYVGEVITSEEAERRGQFYDNKGITYLFDLDYESDEFTVDAARYGNVSHFVNHSCDPNLQVFNVFIDNLDTRLPRIALFSTRTINAGEELTFDYQMKGSGDISSDSIDHSPAKKRVRTVCKCGAVTCRGYLN

SEQ ID NO: 73867 - DNA, 1233 bp, Artificial Sequence
  derived and/or modified sequence
atggccgccgtgggcgccgaggccagaggcgcctggtgcgtgccctgcctggtgagcctggacaccctgcaggagctgtgcagaaaggagaagctgacctgcaagagcatcggcatcaccaagagaaacctgaacaactacgaggtggagtacctgtgcgactacaaggtggtgaaggacatggagtactacctggtgaagtggaagggctggcccgacagcaccaacacctgggagcccctgcagaacctgaagtgccccctgctgctgcagcagttcagcaacgacaagcacaactacctgagccaggtgaagaagggcaaggccatcacccccaaggacaacaacaagaccctgaagcccgccatcgccgagtacatcgtgaagaaggccaagcagagaatcgccctgcagagatggcaggacgagctgaacagaagaaagaaccacaagggcatgatcttcgtggagaacaccgtggacctggagggcccccccagcgacttctactacatcaacgagtacaagcccgcccccggcatcagcctggtgaacgaggccaccttcggctgcagctgcaccgactgcttcttccagaagtgctgccccgccgaggccggcgtgctgctggcctacaacaagaaccagcagatcaagatcccccccggcacccccatctacgagtgcaacagcagatgccagtgcggccccgactgccccaacagaatcgtgcagaagggcacccagtacagcctgtgcatcttcagaaccagcaacggcagaggctggggcgtgaagaccctggtgaagatcaagagaatgagcttcgtgatggagtacgtgggcgaggtgatcaccagcgaggaggccgagagaagaggccagttctacgacaacaagggcatcacctacctgttcgacctggactacgagagcgacgagttcaccgtggacgccgccagatacggcaacgtgagccacttcgtgaaccacagctgcgaccccaacctgcaggtgttcaacgtgttcatcgacaacctggacaccagactgcccagaatcgccctgttcagcaccagaaccatcaacgccggcgaggagctgaccttcgactaccagatgaagggcagcggcgacatcagcagcgacagcatcgaccacagccccgccaagaagagagtgagaaccgtgtgcaagtgcggcgccgtgacctgcagaggctacctgaactag

SEQ ID NO: 73868 - DNA, 1233 bp, Artificial Sequence
  derived and/or modified sequence
atggcagccgtaggagcagaagccagaggagcttggtgcgtgccctgcctggtatccctggacactttacaggagctgtgcaggaaagaaaaactgacttgcaagtcaatcggcattaccaagagaaacctcaacaattatgaggtcgaatacctgtgtgactacaaggtggtcaaagatatggaatactacctcgttaagtggaaggggtggccggacagtacaaacacatgggaacccttgcagaatctgaagtgccccctcctgctacagcagttctcgaatgataaacacaactacttatcgcaggtgaagaaagggaaggctatcactccgaaggacaacaataagacactcaaacctgcaatagccgaatatattgtaaaaaaggcaaagcagcgaattgccttacagcgctggcaggatgagctgaataggcggaagaaccacaaagggatgatttttgtggaaaacaccgtggatctggaggggcccccgtctgacttttactacatcaatgaatataaaccagccccaggtatttccctggtcaacgaggcaactttcggatgcagctgtacagattgcttcttccagaagtgctgccctgccgaagctggagtgcttttggcatacaacaaaaaccagcagatcaagatcccccccggaactcctatctatgagtgcaactcaagatgccagtgtggacccgattgccccaaccgcatcgtccagaagggaactcagtacagtctgtgcattttccgaaccagcaatggtagaggatggggagtgaaaacccttgtcaaaataaagaggatgtcctttgtcatggagtatgttggcgaagtcatcacgtcggaagaagcagagagacgaggccagttttacgataataagggtataacctatttgtttgatctggattacgagtcagatgagttcacggtggatgcagcccgttacggcaacgtgtcacactttgtgaaccatagctgcgaccctaaccttcaagtgtttaacgtgtttatagacaatttggatacccgccttccccgaatcgccctgttctctacgagaaccatcaacgcaggagaagagctgacattcgactatcagatgaaaggctcaggcgacatttcctccgactctatcgatcacagccccgccaagaagcgggtgagaaccgtttgcaagtgtggggcggtgacctgtaggggctatttgaactag

SEQ ID NO: 73869 - DNA, 1233 bp, Artificial Sequence
  derived and/or modified sequence
atggctgctgtgggcgctgaggcccggggggcctggtgtgtgccctgcctggtgtccctggacaccctgcaggagctgtgcaggaaggagaagctgacctgcaagagcatcggcatcaccaagaggaacctgaacaactatgaggtggagtacctgtgtgactacaaggtggtgaaggacatggagtactacctggtgaagtggaagggctggccagacagcaccaacacctgggagcccctgcagaacctgaagtgccccctgctgctgcagcagttcagcaatgacaagcacaactacctgagccaggtgaagaagggcaaggccatcacccccaaggacaacaacaagaccctgaagccagccatcgccgagtacatcgtgaagaaggccaagcagagaattgccctgcagcgctggcaggatgagctgaacagaaggaagaaccacaagggcatgatctttgtggagaacacagtggacctggagggccccccaagtgacttctactacatcaatgagtacaagccagcccctggcatcagcctggtgaatgaggccaccttcggctgcagctgcacagactgcttcttccagaagtgctgcccagctgaggccggcgtgctgctggcctacaacaagaaccagcagatcaagatccccccaggcacccccatctatgagtgcaacagccgctgccagtgtggccctgactgccccaacagaattgtgcagaagggcacccagtacagcctgtgcatcttccgcaccagcaatggccggggctggggcgtgaagaccctggtgaagatcaagaggatgagctttgtgatggagtatgtgggggaggtgatcaccagcgaggaggccgagcggcggggccagttctatgacaacaagggcatcacctacctgtttgacctggactatgaaagtgatgagttcaccgtggatgctgcccgctatggaaatgtgagccactttgtgaaccacagctgtgaccccaacctgcaggtgttcaacgtgttcatcgacaacctggacacccggctgccccgcatcgccctcttcagcaccaggaccatcaatgctggggaggagctgacctttgactaccagatgaagggcagcggggacatcagcagtgacagcattgaccacagccctgccaagaagagggtgaggacagtgtgcaagtgtggggctgtgacctgccggggctacctgaactag

SEQ ID NO: 73870 - DNA, 1233 bp, Artificial Sequence
  derived and/or modified sequence
atggccgccgtgggcgccgaggcccggggcgcctggtgcgtgccctgtcttgtgtcactggacacgctgcaggaactgtgtcgaaaggaaaagttaacttgcaaatcaattggaatcacaaagaggaatcttaacaattacgaggtggagtacttatgcgactataaggttgtcaaggacatggagtattatctggtgaagtggaaggggtggccggatagtacaaacacttgggaaccactacaaaacctcaagtgcccccttctgctgcagcagttctcgaacgataagcacaattacctgtcacaggtgaagaagggaaaagccatcactcccaaagacaacaataaaaccctcaaaccggctatcgccgagtatatcgttaagaaggcaaagcagcgcattgccttgcagcggtggcaggacgagttgaatcgtcgcaagaaccataaaggtatgatcttcgtcgagaacacggttgatctggagggaccccccagcgacttctactatatcaatgagtataaacctgctcctggtatctccctggtaaatgaggcaaccttcgggtgctcttgcactgactgtttcttccaaaagtgttgtcccgctgaggcaggcgtgttgctcgcatacaataagaatcaacaaattaagatccctcctggaacacccatttacgagtgtaactctaggtgccagtgcggcccggattgccctaatcggatcgtgcaaaagggtacccagtactcattgtgtattttcagaacaagtaacggtaggggctggggcgtgaaaacactcgtgaagattaagagaatgagcttcgtgatggaatacgtgggcgaggtgatcacgagtgaggaggccgaacgtagaggccagttctacgacaataagggaatcacctatctgttcgatctagactacgaaagcgacgaatttactgtcgacgccgcaaggtacggcaacgtatcccatttcgtgaaccactcctgcgaccctaacctgcaggtgttcaacgtttttatagataatctggacacacgactcccaaggatcgcactgtttagcacacggaccatcaatgcaggcgaagagctaactttcgactaccagatgaaaggctccggcgatattagttctgatagcatcgaccatagtcccgcaaaaaaaagagtcaggactgtgtgtaagtgtggggccgttacttgtaggggctatctgaattag

SEQ ID NO: 73871 - DNA, 1233 bp, Artificial Sequence
  derived and/or modified sequence
atggccgctgtgggcgctgaggctagaggagcttggtgcgtaccttgcctcgtgtcactcgataccctccaagagttgtgtcgtaaagaaaaactcacttgcaaatctatcgggatcaccaaacgaaatctgaataattacgaagttgagtatctatgtgattataaggtagtgaaggatatggagtactatcttgtgaaatggaagggctggcctgactctaccaacacctgggagccacttcagaatctgaagtgtcccctgctattacagcagttttcgaatgataagcacaattatctcagtcaagttaagaagggcaaagctatcactccaaaagataacaacaaaaccctcaagcctgccatcgccgagtacatcgttaagaaagccaagcaacggattgctctccaacgatggcaggatgagctgaacaggaggaagaaccacaaaggaatgatctttgtagagaatactgtggatctcgagggcccaccctcagacttttactatattaatgaatataaacctgcccctggtatctcactggtgaacgaggctacatttggttgctcttgtaccgattgcttttttcaaaaatgttgtccagccgaagccggagttttgttggcatacaacaaaaatcaacagatcaaaatccctccgggtactcccatctatgagtgtaactctagatgtcagtgcggacctgactgccctaatagaatagtgcaaaagggtacccaatactcactttgcatctttagaacctcaaatggcaggggctggggggtgaaaacactcgttaagataaaacggatgagctttgtaatggaatacgtgggtgaggtcatcacatctgaggaagccgagcggagaggtcagttttatgacaacaaaggcataacctacctgttcgaccttgattatgagagcgacgagtttaccgtcgatgccgcaagatatggtaacgtgagtcacttcgtcaatcactcttgcgaccctaacctccaggttttcaatgtctttatagataacctggatactaggctgccacgaatcgctctgtttagtactagaacgatcaacgctggcgaagaactgacatttgactatcagatgaaaggatctggagacatcagttccgattccatagaccactctccagccaaaaagcgagtgagaactgtttgtaagtgtggagctgtgacatgccggggttacttgaactag

SEQ ID NO: 73872 - DNA, 1233 bp, Artificial Sequence
  derived and/or modified sequence
atggcggcggtcggggccgaggcgcgaggagcttggtgtgtgccttgcctagtttcacttgatactcttcaggaattatgtagaaaagaaaagctcacatgtaaatcgattggaatcaccaaaaggaatctaaacaattatgaggtggaatacttgtgtgactacaaggtagtaaaggatatggaatattatcttgtaaaatggaaaggatggccagattctacaaatacttgggaacctttgcaaaatctgaagtgcccgttactgcttcagcaattctctaatgacaagcataattatttatctcaggtaaagaaaggcaaagcaataactccaaaagacaataacaaaactttgaaacctgccattgctgagtacattgtgaagaaggctaaacaaaggatagctctgcagagatggcaagatgaactcaacagaagaaagaatcataaaggaatgatatttgttgaaaatactgttgatttagagggcccaccttcagacttctattacattaacgaatacaaaccagctcctggaatcagcttagtcaatgaagctacctttggttgttcatgcacagattgcttctttcaaaaatgttgtcctgctgaagctggagttcttttggcttataataaaaaccaacaaattaaaatcccacctggtactcccatctatgaatgcaactcaaggtgtcagtgtggtcctgattgtcccaataggattgtacaaaaaggcacacagtattcgctttgcatctttcgaactagcaatggacgtggctggggtgtaaagacccttgtgaagattaaaagaatgagttttgtcatggaatatgttggagaggtaatcacaagtgaagaagctgaaagacgaggacagttctatgacaacaagggaatcacgtatctctttgatctggactatgagtctgatgaattcacagtggatgcggctcgatacggcaatgtgtctcattttgtgaatcacagctgtgacccaaatcttcaggtgttcaatgttttcattgataacctcgatactcgtcttccccgaatagcattgttttccacaagaaccataaatgctggagaagagctgacttttgattatcaaatgaaaggttctggagatatatcttcagattctattgaccacagcccagccaaaaagagggtcagaacagtatgtaaatgtggagctgtgacttgcagaggttacctcaactga

SEQ ID NO: 73873 - DNA, 1053 bp, Artificial Sequence
  derived and/or modified sequence
atggagtactacctggtgaagtggaagggctggcccgacagcaccaacacctgggagcccctgcagaacctgaagtgccccctgctgctgcagcagttcagcaacgacaagcacaactacctgagccaggtgaagaagggcaaggccatcacccccaaggacaacaacaagaccctgaagcccgccatcgccgagtacatcgtgaagaaggccaagcagagaatcgccctgcagagatggcaggacgagctgaacagaagaaagaaccacaagggcatgatcttcgtggagaacaccgtggacctggagggcccccccagcgacttctactacatcaacgagtacaagcccgcccccggcatcagcctggtgaacgaggccaccttcggctgcagctgcaccgactgcttcttccagaagtgctgccccgccgaggccggcgtgctgctggcctacaacaagaaccagcagatcaagatcccccccggcacccccatctacgagtgcaacagcagatgccagtgcggccccgactgccccaacagaatcgtgcagaagggcacccagtacagcctgtgcatcttcagaaccagcaacggcagaggctggggcgtgaagaccctggtgaagatcaagagaatgagcttcgtgatggagtacgtgggcgaggtgatcaccagcgaggaggccgagagaagaggccagttctacgacaacaagggcatcacctacctgttcgacctggactacgagagcgacgagttcaccgtggacgccgccagatacggcaacgtgagccacttcgtgaaccacagctgcgaccccaacctgcaggtgttcaacgtgttcatcgacaacctggacaccagactgcccagaatcgccctgttcagcaccagaaccatcaacgccggcgaggagctgaccttcgactaccagatgaagggcagcggcgacatcagcagcgacagcatcgaccacagccccgccaagaagagagtgagaaccgtgtgcaagtgcggcgccgtgacctgcagaggctacctgaactag

SEQ ID NO: 73874 - DNA, 1053 bp, Artificial Sequence
  derived and/or modified sequence
atggaatactacctggtcaagtggaagggctggcctgattctacgaacacatgggaacctctgcagaacctgaaatgcccattactgcttcagcagttctcaaacgataagcataactacctgtcccaggtgaagaagggtaaagcgatcactccaaaggataacaataagactcttaagcccgcgattgccgagtatattgtaaagaaagctaagcagcgcatcgccctgcagaggtggcaggatgaactgaacaggaggaagaaccataaagggatgatctttgtagagaacaccgtggacctggaaggccctccttccgacttctattatataaacgagtacaagcctgctcctggaattagtctcgtgaatgaggcaacattcggatgctcctgcactgactgcttcttccagaaatgttgcccagccgaagccggggtgcttctcgcatacaataaaaaccagcaaatcaaaattccccccggtacaccaatttacgaatgtaactcccgatgccagtgtggccctgattgtccaaaccgtattgtccagaaaggaactcaatactcgctgtgtatcttccgcacgagtaatggacgcggctggggcgtaaagactctggtgaagataaaaaggatgtcctttgtgatggagtacgttggcgaagtgatcacatctgaagaggcagagagacggggtcagttttatgataacaaggggattacctatctctttgaccttgattacgaaagcgatgaattcaccgttgatgccgcaaggtatggcaacgtttcgcatttcgtaaatcactcttgcgaccctaatttgcaagtcttcaatgtgtttattgacaatctggatacaagacttccacggattgccctattcagcaccagaaccatcaacgccggtgaggagcttacattcgactaccagatgaaagggtctggcgatatttcctcagatagcatcgaccactctcctgctaagaagagagtgcggacagtgtgtaagtgcggcgcagtcacatgccgcggatatcttaattag

SEQ ID NO: 73875 - DNA, 1053 bp, Artificial Sequence
  derived and/or modified sequence
atggagtactacctggtgaagtggaagggctggccagacagcaccaacacctgggagcccctgcagaacctgaagtgccccctgctgctgcagcagttcagcaatgacaagcacaactacctgagccaggtgaagaagggcaaggccatcacccccaaggacaacaacaagaccctgaagccagccatcgccgagtacatcgtgaagaaggccaagcagagaattgccctgcagcgctggcaggatgagctgaacagaaggaagaaccacaagggcatgatctttgtggagaacacagtggacctggagggccccccaagtgacttctactacatcaatgagtacaagccagcccctggcatcagcctggtgaatgaggccaccttcggctgcagctgcacagactgcttcttccagaagtgctgcccagctgaggccggcgtgctgctggcctacaacaagaaccagcagatcaagatccccccaggcacccccatctatgagtgcaacagccgctgccagtgtggccctgactgccccaacagaattgtgcagaagggcacccagtacagcctgtgcatcttccgcaccagcaatggccggggctggggcgtgaagaccctggtgaagatcaagaggatgagctttgtgatggagtatgtgggggaggtgatcaccagcgaggaggccgagcggcggggccagttctatgacaacaagggcatcacctacctgtttgacctggactatgaaagtgatgagttcaccgtggatgctgcccgctatggaaatgtgagccactttgtgaaccacagctgtgaccccaacctgcaggtgttcaacgtgttcatcgacaacctggacacccggctgccccgcatcgccctcttcagcaccaggaccatcaatgctggggaggagctgacctttgactaccagatgaagggcagcggggacatcagcagtgacagcattgaccacagccctgccaagaagagggtgaggacagtgtgcaagtgtggggctgtgacctgccggggctacctgaactag

SEQ ID NO: 73876 - DNA, 1053 bp, Artificial Sequence
  derived and/or modified sequence
atggagtactacctggtgaagtggaagggctggcccgacagcaccaacacctgggaaccattgcagaaccttaaatgcccgctcctactgcagcagttcagcaatgataagcataattacttatcccaagttaaaaagggaaaggctatcacccccaaagataataacaagactctgaagccagcaatagccgagtatatagtcaaaaaagctaaacagaggatcgcactgcagaggtggcaggacgaacttaatcggagaaagaaccataaaggtatgatttttgtagagaacacagtggatttagaggggcccccttcagacttctactacatcaatgagtacaaacccgcccctggtatatcattggtgaatgaagcaacttttgggtgctcctgcacagattgtttcttccaaaaatgctgcccagcggaggctggcgttctgctcgcctataacaaaaaccaacaaatcaagatcccccctgggaccccaatctatgagtgcaactccagatgccaatgtgggccggactgccctaaccggattgtgcagaagggaacacaatactccctatgcatctttaggacttctaacggacgtggttggggagttaaaacactcgtgaagattaaacgtatgtcattcgtcatggagtacgtaggagaggtgataacgtcggaagaagccgagcggaggggacagttctatgacaacaaaggaatcacatacctgtttgatttggattacgagtccgacgagttcactgtcgatgccgccaggtatggcaacgtcagccacttcgtcaatcattcctgtgacccgaacctgcaagtgttcaacgtctttatagacaacctggatacgagacttccaaggatcgcgctgtttagcactcggactatcaacgcgggggaagaattaaccttcgattaccagatgaagggttcaggagatatctctagtgactccattgaccattcgccagctaagaagagggtgcggacagtgtgcaagtgcggcgccgttacctgcaggggatatctcaactag

SEQ ID NO: 73877 - DNA, 1053 bp, Artificial Sequence
  derived and/or modified sequence
atggaatactacctggtcaagtggaaaggatggccagactctacaaacacttgggaaccgttgcagaacctcaagtgtcccttgttgctgcagcagttttccaacgataagcataattatttgagccaagtgaagaagggaaaggctattaccccaaaagataataacaaaactcttaagccagccatcgccgagtacatcgtgaaaaaggcaaagcagcgaattgcccttcagcgttggcaagacgagcttaaccgacgaaaaaaccataagggcatgatcttcgtcgagaatactgtagatctggaggggcctccctccgatttctactacatcaacgaatacaaacccgcacctgggatctctctggtgaacgaagcgacctttggatgctcctgcaccgactgcttcttccagaaatgttgccctgctgaggccggtgttctgctggcgtacaataaaaatcagcagatcaagattcctcccggaactcctatatacgagtgcaatagtagatgtcaatgcggcccagactgtccaaatagaatcgtgcaaaaaggaacccagtattctctctgtatcttccgcacttccaatggcagagggtggggtgtgaaaacgctggtgaaaataaagcgcatgtctttcgtaatggagtatgtcggtgaggtgatcacaagcgaggaagctgagaggagaggacagttctacgacaacaagggtattacatacctgtttgacttggattatgaatctgatgaattcacagtcgacgcagcacggtatggcaacgtatctcatttcgtcaaccattcatgtgacccgaacctccaagtgttcaatgtgttcatagataatctggacactcgccttccaagaattgcactgttctcaaccaggaccatcaacgctggtgaggagctgacatttgattatcaaatgaagggaagtggtgatatttcaagtgactcaatcgaccacagtccagccaagaagcgtgttcgaactgtgtgtaagtgcggcgctgtgacctgtagggggtacctgaactag

SEQ ID NO: 73878 - protein, 230 aa, Artificial Sequence
  derived and/or modified sequence
MAAVGAEARGAWCVPCLVSLDTLQELCRKEKLTCKSIGITKRNLNNYEVEYLCDYKVVKDMEYYLVKWKGWPDSTNTWEPLQNLKCPLLLQQFSNDKHNYLSQVITSEEAERRGQFYDNKGITYLFDLDYESDEFTVDAARYGNVSHFVNHSCDPNLQVFNVFIDNLDTRLPRIALFSTRTINAGEELTFDYQMKGSGDISSDSIDHSPAKKRVRTVCKCGAVTCRGYLN

SEQ ID NO: 73879 - protein, 152 aa, Artificial Sequence
  derived and/or modified sequence
MEYYLVKWKGWPDSTNTWEPLQNLKCPLLLQQFSNDKHNYLSQVITSEEAERRGQFYDNKGITYLFDLDYESDEFTVDAARYGNVSHFVNHSCDPNLQVFNVFIDNLDTRLPRIALFSTRTINAGEELTFDYQMKGSGDISSDSIDHSPAKK

SEQ ID NO: 73880 - DNA, 693 bp, Artificial Sequence
  derived and/or modified sequence
atggccgccgtgggcgccgaggccagaggcgcctggtgcgtgccctgcctggtgagcctggacaccctgcaggagctgtgcagaaaggagaagctgacctgcaagagcatcggcatcaccaagagaaacctgaacaactacgaggtggagtacctgtgcgactacaaggtggtgaaggacatggagtactacctggtgaagtggaagggctggcccgacagcaccaacacctgggagcccctgcagaacctgaagtgccccctgctgctgcagcagttcagcaacgacaagcacaactacctgagccaggtgatcaccagcgaggaggccgagagaagaggccagttctacgacaacaagggcatcacctacctgttcgacctggactacgagagcgacgagttcaccgtggacgccgccagatacggcaacgtgagccacttcgtgaaccacagctgcgaccccaacctgcaggtgttcaacgtgttcatcgacaacctggacaccagactgcccagaatcgccctgttcagcaccagaaccatcaacgccggcgaggagctgaccttcgactaccagatgaagggcagcggcgacatcagcagcgacagcatcgaccacagccccgccaagaagagagtgagaaccgtgtgcaagtgcggcgccgtgacctgcagaggctacctgaactag

SEQ ID NO: 73881 - DNA, 693 bp, Artificial Sequence
  derived and/or modified sequence
atggccgccgtcggggctgaagcccgaggcgcctggtgcgtgccttgcctcgtcagcctcgacaccctccaggagctctgtcgaaaagaaaagcttacctgcaaaagtatcggcatcaccaagcgcaacttgaataattatgaggtcgagtacctgtgtgactacaaggtcgtgaaggacatggaatactacttggttaagtggaaaggctggccggactcaaccaatacctgggaaccactacagaatttgaagtgccccctgttacttcagcagtttagcaacgacaaacacaattacctgtctcaggtgattacatccgaggaggctgagcgccggggacagttttatgataataagggtataacgtaccttttcgacctagactacgaaagcgacgaatttacggttgacgctgcccgatacgggaacgtgagtcattttgtcaatcatagctgtgaccccaacctgcaggtgttcaacgtgttcatcgataatcttgatacacgactaccaaggattgcactgttcagtacacggaccatcaacgcgggcgaagagctcacttttgattaccaaatgaaaggatctggagacatcagtagcgacagtatagaccacagtccggcaaaaaagcgcgtccgaaccgtatgcaaatgtggagccgtcacttgtcgcggatacttaaattag

SEQ ID NO: 73882 - DNA, 693 bp, Artificial Sequence
  derived and/or modified sequence
atggctgctgtgggcgctgaggcccggggggcctggtgtgtgccctgcctggtgtccctggacaccctgcaggagctgtgcaggaaggagaagctgacctgcaagagcatcggcatcaccaagaggaacctgaacaactatgaggtggagtacctgtgtgactacaaggtggtgaaggacatggagtactacctggtgaagtggaagggctggccagacagcaccaacacctgggagcccctgcagaacctgaagtgccccctgctgctgcagcagttcagcaatgacaagcacaactacctgagccaggtgatcaccagcgaggaggccgagcggcggggccagttctatgacaacaagggcatcacctacctgtttgacctggactatgaaagtgatgagttcaccgtggatgctgcccgctatggaaatgtgagccactttgtgaaccacagctgtgaccccaacctgcaggtgttcaacgtgttcatcgacaacctggacacccggctgccccgcatcgccctcttcagcaccaggaccatcaatgctggggaggagctgacctttgactaccagatgaagggcagcggggacatcagcagtgacagcattgaccacagccctgccaagaagagggtgaggacagtgtgcaagtgtggggctgtgacctgccggggctacctgaactag

SEQ ID NO: 73883 - DNA, 693 bp, Artificial Sequence
  derived and/or modified sequence
atggccgccgtgggcgccgaggcccggggcgcctggtgcgtgccctgtctggtgagcctggataccctgcaagaactgtgtcgcaaggagaagctgacgtgcaagtctatcggcatcacaaaacgcaacctgaataattacgaggttgaatatttgtgtgactacaaagtcgtgaaagacatggaatattaccttgtcaaatggaaaggatggcccgatagcaccaacacatgggagccacttcagaatttgaaatgcccactgttgctgcaacagttcagtaacgataagcataattatctgagtcaggttatcactagcgaggaggccgagcgcaggggtcagttctacgataacaaggggataacgtatctgttcgacttggactatgagtccgacgaatttacggtagacgccgcccggtatggcaatgtatcccattttgtgaatcatagttgcgaccccaacctgcaggtctttaacgtgtttattgacaatctggacacccgcttgccaagaatcgcactgtttagcacccggaccattaatgccggggaggaactcacttttgactaccagatgaaaggtagcggggatatttcaagtgacagtattgatcactccccggctaaaaaaagagtccgtacggtttgtaaatgtggagcagtcacatgccgggggtatttgaattag

SEQ ID NO: 73884 - DNA, 693 bp, Artificial Sequence
  derived and/or modified sequence
atggccgctgttggggctgaagcccgaggggcttggtgcgtgccttgtctggtttctttggatactctccaggagctgtgccgcaaggagaaacttacctgtaaaagcattggaataactaagcgaaatcttaataattatgaggtcgaatacttgtgcgactataaggttgtcaaagacatggagtactatcttgtgaaatggaaaggatggcctgacagcacgaatacctgggagcctctgcagaacctcaagtgcccactcctcctgcagcaatttagcaacgataaacataactatttgtcgcaagtcataacctcagaggaagccgaaagacgcggacagttttacgacaacaagggtattacgtacctctttgacctggactatgaatccgacgagtttaccgtggacgccgcacgctatggcaatgtatcgcactttgtcaatcacagttgtgatcccaaccttcaggtcttcaacgtcttcatcgacaacctcgacaccaggttgcccaggattgcgttgttcagtacccgaactataaatgccggagaagaactgacatttgactatcagatgaaaggttccggcgatataagctccgatagcatcgaccacagccctgctaaaaagcgggtgcgtaccgtgtgtaagtgcggagctgtaacatgtaggggctacctcaattag

SEQ ID NO: 73885 - DNA, 1292 bp, Artificial Sequence
  derived and/or modified sequence
gccagtttgaatgaaagctctacaagatggcggcggtcggggccgaggcgcgaggagcttggtgtgtgccttgcctagtttcacttgatactcttcaggaattatgtagaaaagaaaagctcacatgtaaatcgattggaatcaccaaaaggaatctaaacaattatgaggtggaatacttgtgtgactacaaggtagtaaaggatatggaatattatcttgtaaaatggaaaggatggccagattctacaaatacttgggaacctttgcaaaatctgaagtgcccgttactgcttcagcaattctctaatgacaagcataattatttatctcaggtaatcacaagtgaagaagctgaaagacgaggacagttctatgacaacaagggaatcacgtatctctttgatctggactatgagtctgatgaattcacagtggatgcggctcgatacggcaatgtgtctcattttgtgaatcacagctgtgacccaaatcttcaggtgttcaatgttttcattgataacctcgatactcgtcttccccgaatagcattgttttccacaagaaccataaatgctggagaagagctgacttttgattatcaaatgaaaggttctggagatatatcttcagattctattgaccacagcccagccaaaaagagggtcagaacagtatgtaaatgtggagctgtgacttgcagaggttacctcaactgaactttttcaggaaatagagctgatgattataatatttttttcctaatgttaacatttttaaaaatacatatttgggactcttattatcaaggttctacctatgttaatttacaattcatgtttcaagacatttgccaaatgtattaccgatgcctctgaaaagggggtcactgggtctcatagactgatatgaagtcgacatatttatagtgcttagagaccaaactaatggaaggcagactatttacagcttagtatatgtgtacttaagtctatgtgaacagagaaatgcctcccgtagtgtttgaaagcgttaagctgataatgtaattaacaactgctgagagatcaaagattcaacttgccatacacctcaaattcggagaaacagttaatttgggcaaatctacagttctgtttttgctactctattgtcattcctgtttaatactcactgtacttgtatttgagacaaataggtgatactgaattttatactgttttctacttttccattaaaacattggcacctcaatgataaagaaatttaaggtataaaattaaatgtaaaaa

SEQ ID NO: 73886 - DNA, 719 bp, Artificial Sequence
  derived and/or modified sequence
atcccgtcagaccgcgccagtttgaatgaaagctctacaagatggcggcggtcggggccgaggcgcgaggaggtgaggctggagcgcggccccctcgccttccctgttcccagcttggtgtgtgccttgcctagtttcacttgatactcttcaggaattatgtagaaaagaaaagctcacatgtaaatcgattggaatcaccaaaaggaatctaaacaattatgaggtggaatacttgtgtgactacaaggtagtaaaggatatggaatattatcttgtaaaatggaaaggatggccagattctacaaatacttgggaacctttgcaaaatctgaagtgcccgttactgcttcagcaattctctaatgacaagcataattatttatctcaggtaatcacaagtgaagaagctgaaagacgaggacagttctatgacaacaagggaatcacgtatctctttgatctggactatgagtctgatgaattcacagtggatgcggctcgatacggcaatgtgtctcattttgtgaatcacagctgtgacccaaatcttcaggtgttcaatgttttcattgataacctcgatactcgtcttccccgaatagcattgttttccacaagaaccataaatgctggagaagagctgacttttgattatcaaatgaaaggttctggagatatatcttcagattctattgaccacagcccagccaaaaaga

SEQ ID NO: 73887 - DNA, 459 bp, Artificial Sequence
  derived and/or modified sequence
atggagtactacctggtgaagtggaagggctggcccgacagcaccaacacctgggagcccctgcagaacctgaagtgccccctgctgctgcagcagttcagcaacgacaagcacaactacctgagccaggtgatcaccagcgaggaggccgagagaagaggccagttctacgacaacaagggcatcacctacctgttcgacctggactacgagagcgacgagttcaccgtggacgccgccagatacggcaacgtgagccacttcgtgaaccacagctgcgaccccaacctgcaggtgttcaacgtgttcatcgacaacctggacaccagactgcccagaatcgccctgttcagcaccagaaccatcaacgccggcgaggagctgaccttcgactaccagatgaagggcagcggcgacatcagcagcgacagcatcgaccacagccccgccaagaagtag

SEQ ID NO: 73888 - DNA, 459 bp, Artificial Sequence
  derived and/or modified sequence
atggagtattatttggtgaaatggaaaggctggcccgacagtactaatacatgggagcctttgcagaatctaaaatgccctctgctgctccagcagttttctaacgacaagcacaattaccttagccaggtgatcacgagtgaagaggccgagaggagaggccagttctacgataataagggcattacctatctgtttgacctggactacgaaagcgacgaatttactgttgatgcagcgcgctatgggaatgtgtctcacttcgtcaaccactcttgcgatccaaacttgcaggtgttcaacgtgttcattgacaacctggacacccgactgccacggatagccttattcagcactagaacaattaacgctggcgaggagcttacctttgattaccaaatgaagggatctggagacattagctccgattcgatcgaccattcacccgcgaagaaatag

SEQ ID NO: 73889 - DNA, 459 bp, Artificial Sequence
  derived and/or modified sequence
atggagtactacctggtgaagtggaagggctggccagacagcaccaacacctgggagcccctgcagaacctgaagtgccccctgctgctgcagcagttcagcaatgacaagcacaactacctgagccaggtgatcaccagcgaggaggccgagcggcggggccagttctatgacaacaagggcatcacctacctgtttgacctggactatgaaagtgatgagttcaccgtggatgctgcccgctatggaaatgtgagccactttgtgaaccacagctgtgaccccaacctgcaggtgttcaacgtgttcatcgacaacctggacacccggctgccccgcatcgccctcttcagcaccaggaccatcaatgctggggaggagctgacctttgactaccagatgaagggcagcggggacatcagcagtgacagcattgaccacagccctgccaagaagtag

SEQ ID NO: 73890 - DNA, 459 bp, Artificial Sequence
  derived and/or modified sequence
atggagtactacctggtgaagtggaagggctggcccgacagcaccaacacctgggaaccccttcagaacctgaagtgccctctattgctccaacagttttctaatgataagcacaattatctaagccaggttatcacgagcgaggaggccgagcgaaggggtcagttctatgacaacaagggaatcacatacttattcgaccttgactatgaatctgacgaattcacagtggacgcggctcggtatgggaacgtgtcccattttgttaaccacagttgtgatccaaacctgcaggtgttcaacgtgtttatagacaacctggatacccggctcccacgaatcgcgctgttttcaacccggactattaacgccggagaggaactcacgttcgactaccagatgaagggatctggagacatttcatcagactctatcgatcattctcccgcaaagaagtag

SEQ ID NO: 73891 - DNA, 459 bp, Artificial Sequence
  derived and/or modified sequence
atggagtactaccttgtaaaatggaaaggatggccggattccaccaatacgtgggagccactccagaatctgaagtgccccctgctcctccagcagttcagtaatgataaacacaactatttgtcccaggtgatcacaagcgaggaggcggagagacggggacagttctatgacaataaaggaatcacataccttttcgatctcgattatgaatcagacgaatttaccgtggatgccgctcggtacggcaacgtgtcccacttcgtgaaccacagctgtgatccgaatctgcaggtatttaacgtctttatcgataatctagatacaaggctccccaggatcgcccttttcagcacccggactataaatgccggagaggaactgacctttgattatcagatgaaaggcagtggtgatattagttctgatagtatcgaccattctcctgcaaagaagtag

SEQ ID NO: 73892 - protein, 882 aa, Artificial Sequence
  derived and/or modified sequence
MVVTTSARGGGGDRTPSRRRGCGLAPAGAAALLAGASCLCYGRSLQGEFVHDDVWAIVNNPDVRPGAPLRWGIFTNDFWGKGMAENTSHKSYRPLCVLTFKLNIFLTGMNPFYFHAVNIILHCLVTLVLMYTCDKTVFKNRGLAFVTALLFAVHPIHTEAVAGIVGRADVLACLLFLLAFLSYNRSLDQGCVGGSFPSTVSPFFLLLSLFLGTCAMLVKETGITVFGVCLVYDLFSLSNKQDKSSNGALCPRSPQQPGSPQPSSLPGHPHRENGKQQRFPHKGAWGGCHSPLPPEPKSSGFPVSPRAVWSMMRFLTYSYLLAFNVWLLLAPVTLCYDWQVGSIPLVETIWDMRNLATIFLAVVMALLSLHCLAAFKRLEHKEVLVGLLFLVFPFIPASNLFFRVGFVVAERVLYMPSMGYCILFVHGLSKLCTWLNRCGATTLIVSTVLLLLLFSWKTVKQNEIWLSRESLFRSGVQTLPHNAKVHYNYANFLKDQGRNKEAIYHYRTALKLYPRHASALNNLGTLTRDTAEAKMYYQRALQLHPQHNRALFNLGNLLKSQEKKEEAITLLKDSIKYGPEFADAYSSLASLLAEQERFKEAEEIYQTGIKNCPDSSDLHNNYGVFLVDTGLPEKAVAHYQQAIKLSPSHHVAMVNLGRLYRSLGENSMAEEWYKRALQVAHKAEILSPLGALYYNTGRYEEALQIYQEAAALQPSQRELRLALAQVLAVMGQTKEAEKMTNHIVSEETGCLECYRLLSAIYSKQENHDKALDAIDKALQLKPKDPKVISELFFTKGNQLREQNLLDKAFESYRVAVQLNPDQAQAWMNMGGIQHIKGKYVSARAYYERALQLVPDSKLLKENLAKLDRLEKRLQEVREKDQT

SEQ ID NO: 73893 - DNA, 2649 bp, Artificial Sequence
  derived and/or modified sequence
atggtggtgaccaccagcgccagaggcggcggcggcgacagaacccccagcagaagaagaggctgcggcctggcccccgccggcgccgccgccctgctggccggcgccagctgcctgtgctacggcagaagcctgcagggcgagttcgtgcacgacgacgtgtgggccatcgtgaacaaccccgacgtgagacccggcgcccccctgagatggggcatcttcaccaacgacttctggggcaagggcatggccgagaacaccagccacaagagctacagacccctgtgcgtgctgaccttcaagctgaacatcttcctgaccggcatgaaccccttctacttccacgccgtgaacatcatcctgcactgcctggtgaccctggtgctgatgtacacctgcgacaagaccgtgttcaagaacagaggcctggccttcgtgaccgccctgctgttcgccgtgcaccccatccacaccgaggccgtggccggcatcgtgggcagagccgacgtgctggcctgcctgctgttcctgctggccttcctgagctacaacagaagcctggaccagggctgcgtgggcggcagcttccccagcaccgtgagccccttcttcctgctgctgagcctgttcctgggcacctgcgccatgctggtgaaggagaccggcatcaccgtgttcggcgtgtgcctggtgtacgacctgttcagcctgagcaacaagcaggacaagagcagcaacggcgccctgtgccccagaagcccccagcagcccggcagcccccagcccagcagcctgcccggccacccccacagagagaacggcaagcagcagagattcccccacaagggcgcctggggcggctgccacagccccctgccccccgagcccaagagcagcggcttccccgtgagccccagagccgtgtggagcatgatgagattcctgacctacagctacctgctggccttcaacgtgtggctgctgctggcccccgtgaccctgtgctacgactggcaggtgggcagcatccccctggtggagaccatctgggacatgagaaacctggccaccatcttcctggccgtggtgatggccctgctgagcctgcactgcctggccgccttcaagagactggagcacaaggaggtgctggtgggcctgctgttcctggtgttccccttcatccccgccagcaacctgttcttcagagtgggcttcgtggtggccgagagagtgctgtacatgcccagcatgggctactgcatcctgttcgtgcacggcctgagcaagctgtgcacctggctgaacagatgcggcgccaccaccctgatcgtgagcaccgtgctgctgctgctgctgttcagctggaagaccgtgaagcagaacgagatctggctgagcagagagagcctgttcagaagcggcgtgcagaccctgccccacaacgccaaggtgcactacaactacgccaacttcctgaaggaccagggcagaaacaaggaggccatctaccactacagaaccgccctgaagctgtaccccagacacgccagcgccctgaacaacctgggcaccctgaccagagacaccgccgaggccaagatgtactaccagagagccctgcagctgcacccccagcacaacagagccctgttcaacctgggcaacctgctgaagagccaggagaagaaggaggaggccatcaccctgctgaaggacagcatcaagtacggccccgagttcgccgacgcctacagcagcctggccagcctgctggccgagcaggagagattcaaggaggccgaggagatctaccagaccggcatcaagaactgccccgacagcagcgacctgcacaacaactacggcgtgttcctggtggacaccggcctgcccgagaaggccgtggcccactaccagcaggccatcaagctgagccccagccaccacgtggccatggtgaacctgggcagactgtacagaagcctgggcgagaacagcatggccgaggagtggtacaagagagccctgcaggtggcccacaaggccgagatcctgagccccctgggcgccctgtactacaacaccggcagatacgaggaggccctgcagatctaccaggaggccgccgccctgcagcccagccagagagagctgagactggccctggcccaggtgctggccgtgatgggccagaccaaggaggccgagaagatgaccaaccacatcgtgagcgaggagaccggctgcctggagtgctacagactgctgagcgccatctacagcaagcaggagaaccacgacaaggccctggacgccatcgacaaggccctgcagctgaagcccaaggaccccaaggtgatcagcgagctgttcttcaccaagggcaaccagctgagagagcagaacctgctggacaaggccttcgagagctacagagtggccgtgcagctgaaccccgaccaggcccaggcctggatgaacatgggcggcatccagcacatcaagggcaagtacgtgagcgccagagcctactacgagagagccctgcagctggtgcccgacagcaagctgctgaaggagaacctggccaagctggacagactggagaagagactgcaggaggtgagagagaaggaccagacctag

SEQ ID NO: 73894 - DNA, 2649 bp, Artificial Sequence
  derived and/or modified sequence
atggttgttaccacctcagcaaggggcggcggcggggatagaacaccttcacgacgccgcgggtgtgggctcgcccctgctggggcagcggccctgttggctggtgcttcctgcctttgctacgggagatctcttcagggagagtttgtgcatgacgacgtctgggctatagtgaacaatccggacgttcgtcctggcgctcctctccgatggggcatcttcaccaatgacttttggggcaaaggcatggctgagaacacatcacacaagagttacaggcctttgtgtgtgcttactttcaaacttaacatcttcctaacagggatgaatcctttctacttccacgccgtgaacataattctccattgcctggtaaccctcgtgcttatgtacacatgcgataagaccgtatttaagaacagaggcctggcttttgtgaccgccctgctatttgcggtccaccctatccacactgaggctgtcgctgggattgtaggtcgcgccgatgtactcgcttgcttgctttttttactggcatttctgagttataatagaagcctggatcaggggtgcgtcgggggaagtttccccagcaccgtatctccattctttctgctgctgtccctatttcttgggacctgcgctatgctggtgaaagaaaccggtatcactgtgtttggcgtctgcctggtgtacgaccttttcagcctcagcaacaaacaagataagtctagtaatggggccctgtgcccgcgctcaccccagcagccaggctctccccagccttcttcgctgcccgggcatcctcacagagagaatggtaagcagcagaggttcccacacaagggcgcatggggaggctgtcatagtcctttaccaccggaaccgaagtcaagtggctttccagtcagccccagagctgtctggtcaatgatgcggttcctcacctactcttatctgctggcttttaatgtttggctcctgcttgctcccgtcaccctttgctacgactggcaggttggtagtatcccgctggtcgagacgatctgggatatgcgcaacctcgctaccatttttcttgctgtggtgatggcgttgcttagcttacactgtctggctgcgtttaagcggctggaacataaggaggtgctggtggggctgttattccttgtgtttcccttcatcccagcctccaacctgtttttcagagtaggcttcgtcgtcgcagaacgggtactgtacatgccgagcatgggctattgcattcttttcgtccatggcttgtccaaactgtgtacctggctgaatagatgcggggcaacaaccctgatagtttctacagtgctcctactgctactgttctcttggaagaccgtgaaacagaacgagatttggctatctagggaatctcttttccggagtggagtgcagacactgccccacaatgctaaggtacattacaattatgcaaattttcttaaagaccaaggccgcaacaaggaggccatctatcattaccgcacggcgctcaagctctaccctaggcacgcatccgccttgaataatctcggcacactgacaagagacactgccgaagccaagatgtactaccagcgcgcgctacaactccacccccaacacaatagggccttgtttaatctggggaatctcctcaagtctcaggagaaaaaggaggaggccatcaccttactgaaggattcaattaagtatggtcccgagtttgcggacgcctattcctctctcgcctccctgcttgccgagcaagagagatttaaggaggcggaagaaatctatcagacaggcattaagaattgtcccgacagcagtgatctccacaataattatggcgtgttcctggtggatacagggctgccagaaaaagccgttgcgcactatcagcaggcgatcaaactctcacctagtcaccacgtagccatggtgaacctgggcagactgtatcgatcgctcggcgagaactcaatggcggaggaatggtacaaaagagcattgcaagtcgcgcacaaagcagagattctatcccccctgggagccttgtattacaacaccggcaggtatgaggaagcccttcagatttatcaagaggctgccgctttacagccttctcaacgggaactgaggcttgcacttgcccaggtgctcgccgtgatgggccaaactaaagaggcagaaaagatgaccaatcatatcgtaagcgaagagactggttgcttggagtgttaccggttattgagcgccatttatagtaagcaggagaatcatgataaggctctggacgccatcgataaggcattgcaactgaagccaaaggacccgaaagtgataagtgagctctttttcaccaagggcaaccaactccgagagcagaacctgctggataaagcctttgagtcctacagagttgccgtgcagctgaatccagaccaggctcaggcgtggatgaatatggggggcattcaacacattaaaggtaagtacgtgagcgctagagcctattacgaaagggcccttcaactagtccctgactctaagctgctgaaggagaacctagctaagctggatagactcgagaagagactgcaggaggtgcgagagaaggaccagacatag

SEQ ID NO: 73895 - DNA, 2649 bp, Artificial Sequence
  derived and/or modified sequence
atggtggtgaccaccagcgcccggggcggcggcggggacaggacccccagcagaagaagaggctgcggcctggccccagctggagctgctgccctgctggccggggccagctgcctgtgctacggccgcagcctgcagggcgagtttgtgcatgatgatgtgtgggccatcgtgaacaacccagatgtgcggcctggggcccccctgcgctggggcatcttcaccaatgacttctggggcaagggcatggccgagaacaccagccacaagagctaccggcccctgtgtgtgctgaccttcaagctgaacatcttcctgaccggcatgaaccccttctacttccacgctgtgaacatcatcctgcactgcctggtgaccctggtgctgatgtacacctgtgacaagacagtgttcaagaacagaggcctggcctttgtgacagccctgctgtttgctgtgcaccccatccacacagaggccgtggccggcatcgtgggccgggcagatgtgctggcctgcctgctcttcctgctggccttcctgagctacaacagaagcctggaccagggctgtgtgggcggcagcttccccagcacagtgagccccttcttcctgctgctgagcctcttcctgggcacctgtgccatgctggtgaaggagaccggcatcaccgtgtttggagtgtgcctggtgtatgacctcttcagcctgagcaacaagcaggacaagagcagcaatggagccctgtgccccaggagcccccagcagcccggcagcccccagcccagcagcctgcccggccacccccaccgggagaatggcaagcagcagcgcttcccccacaagggggcctggggcggctgccacagccccctgcccccagagcccaagagcagcggcttccctgtgagccccagggctgtgtggagcatgatgaggttcctgacctacagctacctgctggccttcaacgtgtggctgctgctggcccctgtgaccctgtgctatgactggcaggtgggcagcatccccctggtggagaccatctgggacatgaggaacctggccaccatcttcctggccgtggtgatggccctgctgagcctgcactgcctggccgccttcaagaggctggagcacaaggaggtgctggtgggcctgctcttcctggtgttccccttcatcccagccagcaacctcttcttccgggtgggctttgtggtggccgagcgggtgctgtacatgcccagcatgggctactgcatcctgtttgtgcacggcctgagcaagctgtgcacctggctgaacagatgtggggccaccaccctcatcgtgtccacagtgctgctgctgctgctcttctcctggaagacagtgaagcagaatgagatctggctgagccgggagagcctcttccgcagcggcgtgcagaccctgccccacaatgccaaggtgcactacaactatgccaacttcctgaaggaccagggcaggaacaaggaggccatctaccactacagaacagccctgaagctgtaccccaggcatgccagcgccctgaacaacctgggcaccctgacccgggacacagctgaggccaagatgtactaccagagggccctgcagctgcacccccagcacaacagagccctcttcaacctgggcaacctgctgaagagccaggagaagaaggaggaggccatcaccctgctgaaggacagcatcaagtatggccctgagtttgctgatgcctacagcagcctggccagcctgctggccgagcaggagcgcttcaaggaggccgaggagatctaccagacaggcatcaagaactgcccagacagcagtgacctgcacaacaactacggcgtcttcctggtggacaccggcctgcctgagaaggctgtggcccactaccagcaggccatcaagctgagccccagccaccacgtggccatggtgaacctgggccgcctgtaccgcagcctgggagaaaattccatggccgaggagtggtacaagagggccctgcaggtggcccacaaggccgagatcctgagccccctgggcgccctgtactacaacacaggccgctatgaggaggccctgcagatctaccaggaggccgccgccctgcagcccagccagcgggagctgcggctggccctggcccaggtgctggccgtgatgggccagaccaaggaggccgagaagatgaccaaccacatcgtgtctgaggagaccggctgcctggagtgctaccgcctgctgagcgccatctacagcaagcaggagaaccacgacaaggccctggatgccatcgacaaggccctgcagctgaagcccaaggaccccaaggtgatcagcgagctgttcttcaccaagggcaaccagctgcgggagcagaacctgctggacaaggcctttgagagctacagagtggccgtgcagctgaacccagaccaggcccaggcctggatgaacatgggcggcatccagcacatcaagggcaagtatgtgtctgcccgggcctactatgaaagagccctgcagctggtgcctgacagcaagctgctgaaggagaacctggccaagctggaccggctggagaagaggctgcaggaggtgcgggagaaggaccagacctag

SEQ ID NO: 73896 - DNA, 2649 bp, Artificial Sequence
  derived and/or modified sequence
atggtggtgaccaccagcgcccggggcggcggcggcgaccggaccccatctcggaggcgggggtgtggtctcgcccctgcaggagccgccgctctcctagcaggcgcatcgtgcctttgctatggcagaagcttacaaggcgagttcgtccacgatgacgtgtgggccatcgtgaataatcctgatgtgcgcccaggtgcaccgttacggtggggaatttttacaaatgacttttggggtaaaggtatggctgaaaatacctcacataagagctaccgccccctgtgcgtgctcacatttaagctgaatatatttctcacaggaatgaatccattttactttcatgcagttaatattatacttcattgtctcgtcactctggtacttatgtatacctgtgacaaaactgtttttaaaaacagaggtttggctttcgttacagcactcctattcgcagttcatccgatccacacagaagccgtagctggaatcgttggacgcgccgatgtgctggcgtgcctcctgttcctcctcgccttcctctcatataacaggtctctggatcagggctgtgtgggaggcagcttcccgtcaacagtttctcccttcttcctgctccttagcctgtttctgggaacttgtgctatgctcgtgaaggaaacaggtattactgtgtttggcgtgtgtctggtgtatgacctcttctcgctctccaacaaacaggacaaaagtagcaacggcgcattgtgccctaggtcaccgcagcagcctggatccccgcagccatcctcactgcctggacacccccaccgcgaaaatgggaaacagcagaggttcccgcacaaaggagcttgggggggctgccactcacctttgcccccagaaccaaagtccagcgggttccctgtgagccctagagcagtctggagtatgatgagattcctgacttactcttatctgctggcttttaatgtttggctgctgttagcccccgtgacactctgctatgattggcaagtgggctcaattccattagtcgagactatctgggatatgcgcaacctcgccaccatattcctggccgttgtaatggctcttctgagcctgcattgcctcgcagctttcaaacgcctcgaacacaaggaagtgttggttggcctgctctttctcgtgttcccatttattccagcttccaatctgtttttccgcgtgggatttgtagtcgcagagcgcgtcctgtatatgccaagtatggggtattgtatcctgttcgtgcatggcctaagcaagctgtgtacctggctgaataggtgtggagctaccaccctaattgtctccaccgttctcttacttcttctgttctcttggaagacagtcaagcagaacgaaatctggctgtcaagggaatcacttttccgatccggcgtccaaacacttcctcacaacgccaaagtgcattacaattatgcaaacttcctcaaagaccagggacgaaataaggaagccatttaccattatagaaccgcactgaaactgtatcccaggcacgcctcagccttgaacaatctcggaacattgacgcgagatactgccgaggccaagatgtactaccagcgcgctctccaactccacccccagcataatcgcgcgctttttaatctcggtaacttgctgaagagccaagaaaaaaaagaggaggcaattactctgcttaaggactcaatcaaatatggtccagagttcgccgacgcatatagtagtctcgccagcttgctggccgaacaagaaaggtttaaagaggctgaggaaatttaccagactggcattaaaaattgtcctgattcctctgatttgcacaataactatggggtttttctggtcgacacaggccttcctgaaaaggccgtggcacactatcagcaggccatcaaactgagccctagtcatcatgtcgctatggtcaatttgggcaggctctatagaagccttggagagaactccatggcggaggagtggtataaacgagctcttcaggtggcccacaaggccgaaatcttaagtccactgggtgcactgtattataataccgggagatatgaggaggccctgcagatctaccaggaggctgcggccctccagccttcacagagagagctgcgactggctttagcccaggtgttggctgtaatgggccaaacaaaggaggccgaaaagatgaccaatcacattgtgtccgaggagactggctgcctggaatgttacagactcctttccgcgatctactcaaaacaggaaaaccacgacaaagctctcgatgctattgacaaagctttacagctgaaacctaaggatccaaaagttatttctgagctgttttttaccaagggtaatcagctgcgggaacaaaatcttctcgacaaggcgttcgagtcatatagggtggcagtgcaactcaacccggatcaggctcaggcatggatgaatatgggaggcatccagcatattaaaggaaagtatgtgtctgctcgtgcatactacgagcgcgcattacagctggtgcctgattccaaactgctaaaggagaacctggccaaactggatcgtctggaaaagcgattacaggaggtgcgcgaaaaggatcagacttag

SEQ ID NO: 73897 - DNA, 2649 bp, Artificial Sequence
  derived and/or modified sequence
atggtggtcactacctctgcgcgtgggggtggcggagacaggactccgtccaggcggcgtggctgtggattggcaccggcaggtgccgctgccctgctcgccggagctagctgtctgtgctacggtcggtctttgcagggcgaattcgtccatgacgacgtgtgggccatcgttaacaatccagatgtgagaccaggagcaccactcaggtggggtattttcacaaatgacttttggggaaagggcatggctgaaaataccagccataaaagctatcgacccttatgtgtgctgactttcaagctcaacatattcctgacggggatgaatccattctattttcatgccgtgaacattattctgcattgtctcgtgacactggtgcttatgtatacctgtgataagactgtgttcaagaaccgcggacttgctttcgtcacagccctactgtttgctgtgcatcccatccacaccgaggccgtagcgggtatcgtcggtagggccgacgttctcgcctgtctattgttcttactggctttcttaagctacaaccgatctctcgatcagggctgcgtgggtgggtcatttcccagcacagtaagtccattcttccttctgctgagcctctttctgggaacctgcgctatgctggtgaaggagactgggatcaccgtgtttggtgtgtgcctagtgtacgatcttttcagtctctctaataagcaggataagtcatcgaacggggctctgtgtcccaggtcgccacagcaacccggttctccacagcccagttcactccccggacatccacaccgggaaaatggcaagcagcagcgatttccccacaagggcgcatggggtggatgtcacagtccattgcccccagagcccaagagttctgggttcccagtttctccgcgagccgtgtggtccatgatgcggttcttaacttattcctatttgcttgcttttaacgtttggctgctccttgcgccagtaaccctgtgttacgattggcaggtgggatctatccccttagtcgagacaatttgggacatgcgtaaccttgctactatttttctcgctgtcgttatggctctcctgtccctacactgtctcgcagccttcaagcgcctagaacacaaagaggtacttgttggactgctgtttctggtgttccctttcattcccgcatctaacttattttttagagtgggattcgtggttgccgagagagtattgtacatgccttcaatgggttactgtatactgtttgtgcatggactgagcaagctgtgtacctggctaaacagatgtggggcaaccactctcattgtctcaactgtgttactgttgttactcttctcatggaagactgtcaaacaaaacgagatttggctcagtcgtgagagcctttttcgcagtggggtgcagacgctccctcacaacgcaaaggtgcattataactacgcaaattttttaaaggaccaaggcaggaacaaagaagccatctaccactaccgtaccgccctaaagctttacccacgccacgcgtctgcccttaataatctgggaacactgacccgcgacacagctgaggcaaaaatgtactaccagcgcgctttacagctgcatccccagcacaaccgagcgcttttcaatctgggaaatttgctgaaatctcaggaaaagaaggaggaagccattacactgcttaaggactccattaagtacggccctgagtttgccgacgcatacagctctttagctagcctgctcgctgagcaggaaaggttcaaggaggccgaagagatataccagactgggatcaaaaattgccccgactcaagcgatctacacaataactacggtgtgtttctggtggacacaggacttcctgagaaagctgtggcacattaccaacaggcaattaagctgagtcccagtcaccacgttgctatggttaatctggggcgactgtacaggagcctcggggagaacagcatggctgaagaatggtataagagggcccttcaagtagcacataaggcagagattctgtctccccttggagccctgtactacaatactggacggtatgaggaggccctgcagatatatcaggaggctgctgccctgcagccatctcagcgcgagctgcggctcgcgctcgcacaagtgttggcagtgatggggcaaacgaaggaagcggagaaaatgactaatcacatagtttctgaagagaccggatgtctggaatgttatcggctgctgagcgccatttattccaaacaagagaatcatgataaagcactcgatgctatcgacaaggcactgcagcttaagcctaaggaccccaaagttattagcgagctcttctttaccaaaggaaaccaattaagggagcagaatttactggacaaagcctttgagtcctacagagttgccgtgcagttgaatccagatcaggctcaggcctggatgaacatggggggaattcagcacattaaagggaagtatgtgtccgccagggcttattacgagcgtgccctgcagctggtgccagactccaagctgctcaaggagaatcttgcaaaacttgaccgactggaaaaaaggttgcaggaggttagagaaaaagatcagacttag

SEQ ID NO: 73898 - DNA, 8805 bp, Artificial Sequence
  derived and/or modified sequence
agatagaaaaagtagtttgcttggcatctcccaaattatcttgagcaaacaataaaataagaaatgtttcagaagacaattcggctcccaggcccaaaccaaaactcgaacctggtactttttgtaagtgcgggccaagaaaggggctgtaaagttaaagagccggtggcgcctctgaacacacccgggcagggcgagcaggatgtccttgtccagggagaccccttctcctggctttgaggaaggtgctccctatccccgcgggttcctccgccaagcgggacgccgcgccgggcgggtgagagaaagcccgggcaggagagcacagagccggcgactggacgcgagcgcggggcgggtggagagcgtctctccgggcgccgctgctgttgtcccgggtgctgaaaagccgggaacttcccgggaagcagcggcacttttctccctggaaggctaaacatatttttgactggtatgaacccattctactttcatgcagtaaatataattttacactgcttagtgactcttgtgctgatgtacacctgtgataaaactgtcttcaagaatcgtggacttgcttttgtaacggcattgctttttgctgtacatcctattcatactgaggcggtggctgggatcgttggcagagcggacgtgttagcgtgtctgctgtttctattggcctttctctcgtacaacaggagtctggatcagggctgtgttgggggaagtttcccttccacggtgtctcccttcttcttgctgctcagtttgtttctggggacctgtgcgatgctggtgaaagagacaggcatcacggtgtttggagtgtgcttggtttatgacctcttttccctttccaacaagcaagacaagtcgagcaatggggccctctgtccacgcagcccacagcagcccgggagcccccagccctcctcactgccaggccatcctcaccgggagaatgggaagcagcagcggttccctcacaaaggagcttggggtggctgccactctccactgccaccagaacccaagagcagtggattcccagtgtccccacgagctgtgtggtccatgatgagattcctcacctattcctacctcttggccttcaatgtgtggcttctgcttgcacccgtgaccctgtgctatgactggcaggtcggcagtattcctctggtagagaccatatgggacatgcggaacttagccaccatctttctggcggttgtgatggccttattgagcctgcactgcttagcagcctttaagagactggagcacaaggaggttttagtcggcttgttgttcctggtgttcccgttcattccagccagcaacctcttcttcagggtgggttttgtggtggcggagagagtcctttacatgcctagcatgggctactgcatcctttttgtgcatggactgagcaagctctgcacttggctgaatcgatgtggggccaccaccctgattgtgtccactgtgttgctgctgttgcttttctcttggaaaactgtgaaacagaatgaaatttggctgtcaagagagtccctattcaggtctggagttcaaactctgccccacaatgccaaggttcactacaactatgccaatttcctgaaggaccaaggtcggaacaaggaagcgatctaccactacagaacagctctcaagttgtatccacgccatgcaagtgcgctcaacaaccttggaacactgacgagagacacagcagaggcaaagatgtactatcagagggctctccagctccatccacagcataaccgggctcttttcaatctggggaatctcctcaagtcccaggagaaaaaggaagaagctatcaccttactgaaggattccatcaaatatggtccagagtttgcagatgcatattcaagcttagcttcgttattggctgagcaggagcggtttaaagaagctgaagaaatataccaaactggaataaagaactgtccagacagctcagatttacacaacaactatggggttttcttagttgatactggcttaccagaaaaggcagtggcccattaccagcaggccatcaaacttagccccagtcatcacgtggccatggtgaacttgggaagactctacaggtcactgggagagaacagcatggctgaagaatggtacaagcgcgccctgcaggtggcacacaaagctgagatattgtcacctttgggagcactgtattacaacactggccgatacgaagaggctttgcagatttaccaggaagctgcagcacttcagccttctcagagggagctccgcttggcactggctcaggttttggccgtgatgggtcagacaaaagaagctgaaaagatgaccaatcacattgtgtcagaggagaccggatgccttgaatgctatcgcctcttgtcagccatctatagcaagcaggagaaccacgacaaggcacttgatgctatagacaaggctctccagctgaaaccaaaggacccaaaagtcatttctgaactttttttcacaaaaggaaaccaattaagagagcagaaccttctcgacaaagcttttgagagctatagagtggctgtgcaactaaacccagaccaagcacaggcctggatgaacatgggtggcatccaacacatcaagggaaaatatgtgtctgcaagagcttattatgagagagccttacagctggttccagacagcaaactgctgaaggaaaatcttgccaaattggatcgcctagaaaaacgattacaagaagttcgagaaaaggatcaaacatagcaccaccgtctgacccaacctcataggataatgtggtgcctctgaaaggggagtgatggaagccttgctttcacatcagcaggggcacaactaatgagattttctctcattccgagttcagggtgacacattttgggacatctgctggtagcccagtgctgaaggacttgcttttccatgaagaagacgaaaacagcaaacaagggcaagaaggtctgagagggaaggagaatgacatttacacattttacagatttttgtttggtttaactccagatttctcttgatatatctctgtgcttttgagacctggagatctaattctgtttagacattttttgtcccagaaatacagaagcttgaaatgctatgaaggcagagcttctattctttatgggatgaaatatttcaaaagaggataaatcctctgtggtaagccatttggaaaatcctaccaagaattggcttatttaattttccagaaccaggaatgagtatctaatagcttttgtagaaccttccagaatatgtggggaaaaagggctattgctaagtgagctttatctaatatcctcctaagagttttactagtgcttttttgaggaattacagggaagctcctggaattgtacatggatatctttatccctagggggaaatcaaggagctgggcacccctaattctttatggaagtgtttaaaactattttaattttattacaagtattactagagtggtggttctactctaagatttcaaaagtgcatttaaaatcatacatgttcccgcctgcaaatatattgttattttggtggagaaaaaaatagtatattctacataaaaaattaaagatattaactaagagaaatgtcctactttattatcttaatgttcagacatcatgagatttattatttttttgaaaaatatattgaaccattgaggaacctttatgatgtatcacagaaatcttcatagattctaactagatggaaaaagagctctatttatttgtgttcctaggcttaatgagaattctgggcttagaacatcaacgattaatacccagaattctttgttttgagaatattatggagaatgctctaaaaatctagggtaaagatctaaattcaaattttaaatatatatttatatttaagaaataggaaaggcaaagttgaactcacaatttgacatttatttttagtgttatttatttcataacttataaaatatttaatatatacatacacactcttcttttttctctgtacaaagtggttttaatatcagctttcaaaactgatcttataaaatgtaaatctaaattgtaaaatagttaagttttaacagtccctcccaaactttgtgttgattattcacttgctaaagagatgtgaggaatcagccttcagttttttggcagtagtatattttggaagtgaagaaattggaacacctgtttctaatttggtcttcatcattagagacaaaaccaaaacactccaggcagtactgtttatagtgctgagccaggtagcacacagacatagtagcctaaaggctcacataattcgcatgctcaggccagggcagggtaaaaatagccttctgcttctttcaacccagtatcaggaagcactaccccagtgttattatttgttttgtcaaggtaagtctaaataaacaagaaaaacttcttcggaaggcatggcgaagggagtattttaaatgaaaatgattacagaatttgaattagcatgcatctctttgtgtgcaacagtaatccaagaatgtatatgttaccactacaaccatttgtttctaatagttttttcatgttatataacataaatgtatccacaaccttaattaagaactattcttcccccaaaatcatagtcctagtgtcaagaaacatactccagtgtttattgtaaaataacaaccacaccctcaaattgaaaaaagtgaatgtctaggactttattacaacttttcagaataatctgtaatgaaaactcatgcttaaaaatttaatggaaaagactgagccccaaattttgaatagtgattacgccttacttgaagtgctaataaaggtaggagagtacatttgttggaataacagaaatggtgatttcagcctaaaagtttctgagggtaaaggatcacatgaccttcaggaaactctctgcctcctgtaggtgctttcctatctcccccatccttccctaccccttttcccttttccttcctctctttttctctcactgtcactctgtctacacacactggcatcttttgaacactaaaagtaagcactgttttttaaaaaagtaattatttgttggatcagatacttttatcccaagtgaataccttcactgagatgtggccaatgcaatagtttcacagtaaaaacagtgcctataagaaaatagatcacatactatttttcaatgatattaagtgtattttgtaactattttcatttggtccttgtaacatgaaataatacatggaacttacctttataataaaaatggagtgccctggttcatcatagaggtgcatctagtttgcccttaatggaagtatacttgctgtgtggattgatagcaccttcttgaaatggaggagctcagctggcctcatggatgtgcaatttttgcagtcccacagggccttgcatacagaagcaccccgagctcagttgaatgtctgtttgattttttcttatttatttttttgagacacagttccactttgtctttttgtcacccaggatggagttcagtggcacaaacatggctcactgtagcctcgacctccctggctgaagggatcctcccacctcagcctcccaagtaaccgagactacaggcatatgccagcatgtccagctaatttttgtattttttgtagagacagggtttcaccatgttgcccaggctggtctcaaactcctgggctcaagcgatctgcccacctctgcctcccaaagtgctgggattaaaggcataagccaccatgtccaactgaaattcttaataattaataatttttgagcaagaggtccacactttcattttgcactgggttcccaaacaggtcctgggtaggaaggatggctgaggataaaacaggagttgctttggcctggctgaacatttgaaccaatgatcagagtttcattttatgattgtgttactctgaacagatttgctatttttttccagctacatttagagttcctcatgtatatatcacccctctttttccagtccatctaacctctccttttttttgtgcctagaatcagttctccttgccttcaaaatccctgataagtgtccatttctttttgtatcctttgatgtagaagccacaagaatggctttagcagcttattttaatcttatgaattattcattcaggattttttaaatgattcagatgctttcaatctgttaacagtatttataaaacatgtttcagtgatacaacataggtgaactaaaccaaagatgcaaatgccttggaggaaaagaaattgtattatagagaatcctgagatatatccttttgggttgtttaatttaaagcctatcacaaaacaaagagaattgtcgcactttaattccaacctcctgcagtacttcacaacccttagcataagattctgaaatttgtaataggtggtacctagtttgatgcagggttttgcagcagttgtgcgaatgcctctgcgcaacggcctttcagtcagactaaatgagaaaatccaaactgtcctatcaaaactgacccacaataactgtactctgaggcgaaacagagcaaatgtgggtttcctgttttcattgtaaaacattccaggttctcagattgaagagctacattcagctgatagttgacatctgttccctcacacgtagtggctctcaacacgggctgcactttggaatcacctgaggacctttcggaatcttcggttgaatcatcctggctgtcctggtgatgcttcttatgtgcagctaggctggagaaccactacagggctgacacctggaatgggagcttgtaacttttacaaaataatagatgtttatcatcttttgcaatttttacttttaagtctatactaaaatgagccaaagaagtcttaacaatgatgtatggcacaattggttggttgaggctatcattccatgattacaaataggtggttatgtggggtggttttgcacttgtggcaattggactgcaatttggccttaaaatgacacaattcctcgttctcagatggagaggaattgccttgaaatttgcatgtaccagactaagtgccagtatatatatgactgatattttcgtgactcatagaaggtgtccatggtatagagtttatgcctacatctctatctttattttgggcacacatgagcttttgttaattatttctttgtacttgttagaatctgtttttgaaaaaaaaaaaaacttttgctttgatttgtggtggattcaccttcttaaaataataaatttagaggatattaggaatgacattcaaaacaaatatagtgagaggtgattttttaaaaatttttgttcctggtttccaaattatgtttactttgatttgattatatgttggtatctcccaaatataggttaacttagctatttaaatggtatcttttgacatttaaaaagaattaagtacctgtcaaatctagcattgaggttgcagttgaataagataaaagcttaggatgtcaaaaaataatatagagaaatattataagattttatgattattcttgacgtttttgatgcaaaaggaaaatatgctgaatagttcttccaaaaaatattatttccctcaatattttatttgtagccatgtaatttaaagagaacagaaaataactgcaatcaaaagtatggtttaatatcaatcaaagtggcacaacagaattgataagatctttataacaatcaattggctgatattaaaatattgattttaattgatcttttcaattaaaatctttagggcctgtaactcataaaatcagcatccaccacaatatatggtcattattggtttgtaagcatagatcaccattgactcctacctggagagacatgtctatttctaaaaatccagtagtttctttgcattctcagtagtacacgttgtatatatatatatgtaacaaatttggtagttttcagtatgtgtgatgtcctttgggggttatttatcttgctggtccataggaggggtacactaccccaagaatcaagacatctgagttctagttctagttctagctctgccactgaagagccaccttacctggggcaagttagccattgtctcccagtcatgtttaccacccatgaaaggactcgtcggtttgatgtttccattaagctcaatgagtaactctaatagttactcttgaatctggattgaaaaacaccatgcatctgatgagataattcataaatgttgccccttttttaaatgatacaaccctaaaagtgactgaattgcccaagtgcttgaacatggcagaggtagttactcctattttgcagtttgtgcacttaaaaattcctacagtgattgttactttactggggaaaaaagatgaggtgaaacttcctcccaaggaattaaaatatctgtagaagccatggcttgcttttataatgtggaaatcatttgatttgctgtaattcacgcagatccctccttttgtcagggggaaatgatttgcatcatgttcttttttcataatgcttttacttcctgtttggatcagttgtatgtaaatgtacatttttgttactttggctgtgcccgttagaatttatcttccataaagtatttctcccattgagtctaatgatgtatactttgcctaggtctttccaaaattaaatttatgtaaatgtctattttatataaaatatgattaaaataa

SEQ ID NO: 73899 - DNA, 2758 bp, Artificial Sequence
  derived and/or modified sequence
gtaggggaggatgccagacgcccgggagaggccagggcagcagcggcggcggcggcgcgatggtggtgaccacctctgcccgaggcggcggcggggaccgcacaccctcccggcggcggggctgcgggctagcgccggccggggccgcggcgctgctggccggggcaagctgcctgtgctacggccgctccctgcagggcgagttcgtgcacgacgacgtgtgggcgatcgtgaacaaccccgacgtgcggcccggcgccccgctccgctggggcatcttcaccaacgacttctggggcaagggcatggccgagaacaccagccacaagtcctaccggccgctctgcgtcctcaccttcaagctaaacatatttttgactggtatgaacccattctactttcatgcagtaaatataattttacactgcttagtgactcttgtgctgatgtacacctgtgataaaactgtcttcaagaatcgtggacttgcttttgtaacggcattgctttttgctgtacatcctattcatactgaggcggtggctgggatcgttggcagagcggacgtgttagcgtgtctgctgtttctattggcctttctctcgtacaacaggagtctggatcagggctgtgttgggggaagtttcccttccacggtgtctcccttcttcttgctgctcagtttgtttctggggacctgtgcgatgctggtgaaagagacaggcatcacggtgtttggagtgtgcttggtttatgacctcttttccctttccaacaagcaagacaagtcgagcaatggggccctctgtccacgcagcccacagcagcccgggagcccccagccctcctcactgccaggccatcctcaccgggagaatgggaagcagcagcggttccctcacaaaggagcttggggtggctgccactctccactgccaccagaacccaagagcagtggattcccagtgtccccacgagctgtgtggtccatgatgagattcctcacctattcctacctcttggccttcaatgtgtggcttctgcttgcacccgtgaccctgtgctatgactggcaggtcggcagtattcctctggtagagaccatatgggacatgcggaacttagccaccatctttctggcggttgtgatggccttattgagcctgcactgcttagcagcctttaagagactggagcacaaggaggttttagtcggcttgttgttcctggtgttcccgttcattccagccagcaacctcttcttcagggtgggttttgtggtggcggagagagtcctttacatgcctagcatgggctactgcatcctttttgtgcatggactgagcaagctctgcacttggctgaatcgatgtggggccaccaccctgattgtgtccactgtgttgctgctgttgcttttctcttggaaaactgtgaaacagaatgaaatttggctgtcaagagagtccctattcaggtctggagttcaaactctgccccacaatgccaaggttcactacaactatgccaatttcctgaaggaccaaggtcggaacaaggaagcgatctaccactacagaacagctctcaagttgtatccacgccatgcaagtgcgctcaacaaccttggaacactgacgagagacacagcagaggcaaagatgtactatcagagggctctccagctccatccacagcataaccgggctcttttcaatctggggaatctcctcaagtcccaggagaaaaaggaagaagctatcaccttactgaaggattccatcaaatatggtccagagtttgcagatgcatattcaagcttagcttcgttattggctgagcaggagcggtttaaagaagctgaagaaatataccaaactggaataaagaactgtccagacagctcagatttacacaacaactatggggttttcttagttgatactggcttaccagaaaaggcagtggcccattaccagcaggccatcaaacttagccccagtcatcacgtggccatggtgaacttgggaagactctacaggtcactgggagagaacagcatggctgaagaatggtacaagcgcgccctgcaggtggcacacaaagctgagatattgtcacctttgggagcactgtattacaacactggccgatacgaagaggctttgcagatttaccaggaagctgcagcacttcagccttctcagagggagctccgcttggcactggctcaggttttggccgtgatgggtcagacaaaagaagctgaaaagatgaccaatcacattgtgtcagaggagaccggatgccttgaatgctatcgcctcttgtcagccatctatagcaagcaggagaaccacgacaaggcacttgatgctatagacaaggctctccagctgaaaccaaaggacccaaaagtcatttctgaactttttttcacaaaaggaaaccaattaagagagcagaaccttctcgacaaagcttttgagagctatagagtggctgtgcaactaaacccagaccaagcacaggcctggatgaacatgggtggcatccaacacatcaagggaaaatatgtgtctgcaagagcttattatgagagagccttacagctggttccagacagcaaactgctgaaggaaaatcttgccaaattggatcgcctagaaaaacgattacaagaagttcgagaaaaggatcaaacatagcaccaccgtctgacccaacctcataggataatgtggtgcctctgaaaggg

SEQ ID NO: 73900 - protein, 531 aa, Artificial Sequence
  derived and/or modified sequence
MVVNHDASSIPRLQIDVDGRKEILFYDRILCDVPCSGDGTMRKNIDVWKKWTTLNSLQLHGLQLRIATRGAEQLAEGGRMVYSTCSLNPIEDEAVIASLLEKSEGALELADVSNELPGLKWMPGITQWKVMTKDGQWFTDWDAVPHSRHTQIRPTMFPPKDPEKLQAMHLERCLRILPHHQNTGGFFVAVLVKKSSMPWNKRQPKLQGKSAETRESTQLSPADLTEGKPTDPSKLESPSFTGTGDTEIAHATEDLENNGSKKDGVCGPPPSKKMKLFGFKEDPFVFIPEDDPLFPPIEKFYALDPSFPRMNLLTRTTEGKKRQLYMVSKELRNVLLNNSEKMKVINTGIKVWCRNNSGEEFDCAFRLAQEGIYTLYPFINSRIITVSMEDVKILLTQENPFFRKLSSETYSQAKDLAKGSIVLKYEPDSANPDALQCPIVLCGWRGKASIRTFVPKNERLHYLRMMGLEVLGEKKKEGVILTNESAASTGQPDNDVTEGQRAGEPNSPDAEEANSPDVTAGCDPAGVHPPR

SEQ ID NO: 73901 - protein, 732 aa, Artificial Sequence
  derived and/or modified sequence
MGRRSRGRRLQQQQRPEDAEDGAEGGGKRGEAGWEGGYPEIVKENKLFEHYYQELKIVPEGEWGQFMDALREPLPATLRITGYKRYPEELAWHTNLSRKILRKSPHLEKFHQFLVSETESGNISRQEAVSMIPPLLLNVRPHHKILDMCAAPGSKTTQLIEMLHADMNVPFPEGFVIANDVDNKRCYLLVHQAKRLSSPCIMVVNHDASSIPRLQIDVDGRKEILFYDRILCDVPCSGDGTMRKNIDVWKKWTTLNSLQLHGLQLRIATRGAEQLAEGGRMVYSTCSLNPIEDEAVIASLLEKSEGALELADVSNELPGLKWMPGITQWKVMTKDGQWFTDWDAVPHSRHTQIRPTMFPPKDPEKLQAMHLERCLRILPHHQNTGGFFVAVLVKKSSMPWNKRQPKLQGKSAETRESTQLSPADLTEGKPTDPSKLESPSFTGTGDTEIAHATEDLENNGSKKDGVCGPPPSKKMKLFGFKEDPFVFIPEDDPLFPPIEKFYALDPSFPRMNLLTRTTEGKKRQLYMVSKELRNVLLNNSEKMKVINTGIKVWCRNNSGEEFDCAFRLAQEGIYTLYPFINSRIITVSMEDVKILLTQENPFFRKLSSETYSQAKDLAKGSIVLKYEPDSANPDALQCPIVLCGWRGKASIRTFVPKNERLHYLRMMGLEVLGEKKKEGVILTNESAASTGQPDNDVTEGQRAGEPNSPDAEEANSPDVTAGCDPAGVHPPR

SEQ ID NO: 73902 - DNA, 1596 bp, Artificial Sequence
  derived and/or modified sequence
atggtggttaaccacgatgcctcttctatccctagactgcagattgacgttgatggaagaaaggagatccttttttacgatagaatactctgtgatgtaccctgctccggcgatgggacgatgcgcaaaaatatcgatgtgtggaagaaatggaccaccctgaattccctgcagttgcacggattacagcttcgtatcgcgacaaggggggcggaacagcttgccgagggtgggcgcatggtgtatagcacctgctctcttaaccctatcgaagacgaggcagtgattgcgtcacttctcgagaaaagcgagggagccctggagctggctgacgttagcaacgagctgccaggcctcaagtggatgccgggaatcacacaatggaaagtaatgactaaagatggacaatggttcactgactgggacgcagtcccgcatagcagacacacgcagattcggcctacgatgtttcctcctaaagacccagagaaacttcaggctatgcacctcgagaggtgcctgcgcatactgccgcaccatcaaaacactgggggcttctttgtcgccgtgctggtaaagaaatctagcatgccatggaataaacgccagccaaaacttcagggtaagagcgctgaaaccagagaatcgacccagctctctcccgcagacctgacagagggcaagcccacagatccctccaaactggagtctccttcttttacgggcacgggagacacggaaatcgctcacgcaactgaggacttggaaaacaacggctctaaaaaagatggagtgtgcggcccccctccaagcaagaagatgaagctgtttggattcaaagaagacccatttgtgttcatcccggaggatgacccattatttccacccattgaaaagttctacgccctagatccttctttcccaaggatgaatctcctaacaagaaccacagaggggaagaagcgacaactctacatggtttctaaggaactcagaaacgtactccttaacaacagtgaaaaaatgaaggtgatcaatacagggattaaggtgtggtgtagaaacaatagcggcgaagagtttgactgcgccttcaggctggctcaggaagggatttacaccttgtatccgtttattaactcccgaatcattacagtgtcgatggaagacgtgaaaatcttgttaacccaggaaaatcctttcttcaggaagctttcaagcgagacttactcccaggcgaaagacctggcaaagggctcgattgtgctgaagtacgaacccgacagtgcaaatccagacgctcttcagtgtccaatcgttctctgtggttggcgtggaaaagcctcaattaggacctttgtcccaaagaacgaacgtctccactacctccgtatgatgggcctcgaggtgttaggcgaaaaaaaaaaggagggagtgattctaacaaacgagagtgccgcttccacaggccaacctgataacgatgtgaccgagggtcagcgagcgggcgaaccaaactcccctgatgcagaagaggccaactcaccagacgtcaccgctggttgcgaccccgctggcgtgcatcctcctagatag

SEQ ID NO: 73903 - DNA, 2199 bp, Artificial Sequence
  derived and/or modified sequence
atggggcgccgttcccgtggccgccggctccaacagcagcagaggcccgaggatgccgaggacggtgctgaaggaggggggaagagaggtgaggcaggctgggagggcggctacccagaaatcgtcaaagagaacaaacttttcgaacattattaccaggaattaaaaattgtgcctgaaggagaatggggacagttcatggatgctctccgtgagcctcttccagctaccctacgcatcacaggctataaacggtaccctgaggagctcgcctggcataccaatctttcccgcaagatcctcagaaaatctccacatctggagaagttccaccagtttcttgtctctgagactgagtcaggcaacatttctcgccaggaagccgtgagtatgatccctcctctactcctgaatgtacggccccatcacaagatccttgatatgtgtgccgcgccaggcagtaaaaccacccagttgattgaaatgctccacgcagatatgaatgtgccattcccggaggggtttgtgatcgcaaacgacgtggataataagcgctgctatctgctagtgcatcaggctaagcggctgtcctctccttgcataatggtggtgaatcacgacgctagcagcattccacggctgcaaatcgacgtcgacggaaggaaagagattctattttatgatcgcattttatgtgatgtaccatgttctggcgacggtacaatgaggaagaacattgacgtttggaaaaagtggaccaccctgaacagcctgcaactgcacggactacagctcaggattgccactcgcggggccgagcaacttgccgagggcgggcggatggtatattctacctgtagtctgaaccctatcgaggatgaagcagtgattgccagcctcctggaaaagtccgaaggcgcgcttgaactggccgatgtcagcaacgaactccctggcctgaaatggatgcccggaattacacagtggaaggttatgacaaaagatggtcaatggtttacagactgggacgcagtcccccactctcggcatacacaaatacgccctaccatgtttcctcctaaggaccccgagaagcttcaggcaatgcacctggaaaggtgtttgaggatcctgccccatcatcagaacactggcggcttcttcgtagcggtgcttgtgaaaaaatccagcatgccatggaacaaacgccagccaaagttgcagggcaagtctgccgaaacaagagagagcactcagcttagtccggccgatctcactgaaggtaaaccaactgacccctcaaagctggagtctccttcattcaccggcacgggagatactgagatcgcacacgcaacggaagacctggaaaataatggttccaagaaggatggtgtgtgtggacctccaccatccaagaagatgaaactgttcggattcaaagaggatccgttcgtcttcataccagaagacgatccactgttccccccaattgagaaattctatgcgctcgatccatcattcccccggatgaacctgttaacccggactactgaggggaaaaagaggcagctgtacatggtttctaaggagctcaggaacgtgctgcttaataactccgagaagatgaaggtaataaatactggcataaaagtttggtgccgcaataactcgggcgaagagtttgactgcgctttccggctcgctcaggagggaatatacaccttgtatccgtttatcaacagccgtattatcacggtctctatggaggacgtgaaaattctccttactcaggagaatccattttttcgaaaactgagcagtgaaacttacagtcaggccaaagatttggctaaaggaagtattgttctaaaatacgagccggattccgccaatccagatgccttacaatgtccgatcgtgttgtgcggatggcgtggcaaagcaagtattcgcactttcgtgcctaagaacgagcgcttgcattatctccggatgatggggcttgaagtcctgggcgagaagaagaaggaaggcgtgattctgacaaatgagagcgccgctagcacaggacaaccagataatgacgttactgagggccagagggccggagaacccaattccccagatgccgaggaagctaactcccctgacgtgaccgccggatgcgatccggccggagtccatccccctagatag

SEQ ID NO: 73904 - DNA, 1596 bp, Artificial Sequence
  derived and/or modified sequence
atggtggtgaaccatgatgccagcagcatcccccggctgcagattgatgtggatggcaggaaggagatcctcttctatgaccgcatcctgtgtgatgtgccctgcagcggagatggcaccatgaggaagaacattgatgtgtggaagaagtggaccaccctgaacagcctgcagctgcacggcctgcagctgcgcatcgccaccagaggagctgagcagctggccgagggcggccgcatggtgtacagcacctgcagcctgaaccccattgaagatgaggccgtcatcgccagcctgctggagaagtctgagggcgccctggagctggctgatgtgtccaatgagctgcccggcctgaagtggatgcctggcatcacccagtggaaggtgatgaccaaggatggccagtggttcacagactgggatgctgtgccccacagccgccacacccagatccggcccaccatgttcccccccaaggaccctgagaagctgcaggccatgcacctggagcgctgcctgcgcatcctgccccaccaccagaacacaggaggcttctttgtggccgtgctggtgaagaagagctccatgccctggaacaagaggcagcccaagctgcagggcaagtctgctgagacccgggagagcacccagctgagccctgctgacctgacagagggcaagcccacagaccccagcaagctggagagccccagcttcaccggcactggagacacagagatcgcccacgccacagaggacctggagaacaacggcagcaagaaggatggagtgtgtggccccccacccagcaagaagatgaagctgtttggcttcaaggaggacccctttgtgttcatcccagaagatgaccccctcttcccccccatcgagaagttctacgccctggaccccagcttccccaggatgaacctgctgaccaggaccacagagggcaagaagaggcagctgtacatggtgtccaaggagctgagaaatgtgctgctgaacaacagcgagaagatgaaggtgatcaacacaggcatcaaggtgtggtgcaggaacaacagcggggaggagtttgactgtgccttccggctggcccaggagggcatctacaccctgtaccccttcatcaacagccgcatcatcaccgtgtccatggaggatgtgaagatcctgctgacccaggagaaccccttcttcaggaagctgagcagcgagacctacagccaggccaaggacctggccaagggcagcatcgtgctgaagtatgagccagattctgccaacccagatgccctgcagtgccccatcgtgctgtgtggctggaggggcaaggccagcatccgcacctttgtgcccaagaatgaaaggctgcactacctgaggatgatgggcctggaggtgctgggggagaagaagaaggagggcgtcatcctgaccaatgaatctgctgccagcacaggccagcctgacaatgatgtgacagagggccagagagctggggagcccaacagcccagatgctgaggaggccaacagcccagatgtgacagctggctgtgaccctgctggggtgcaccccccaagatag

SEQ ID NO: 73905 - DNA, 2199 bp, Artificial Sequence
  derived and/or modified sequence
atgggcagaagaagccggggccggcggctgcagcagcagcagaggccagaagatgctgaagatggagctgagggcggcggcaagagaggagaggccggctgggagggcggctacccagaaattgtgaaggagaacaagctgtttgagcactactaccaggagctgaagatcgtgcctgagggggagtggggccagttcatggatgccctgcgggagcccctgcctgccaccctgcgcatcaccggctacaagcgctacccagaggagctggcctggcacaccaacctgagcaggaagatcctgaggaagagcccccacctggagaagttccaccagttcctggtgtctgaaacagagagcggcaacatcagccggcaggaggccgtgtccatgatcccccccctgctgctgaatgtgcggccccaccacaagatcctggacatgtgtgccgcccctggcagcaagaccacccagctgattgagatgctgcatgctgacatgaatgtgcccttccctgagggctttgtgattgccaatgatgtggacaacaagcgctgctacctgctggtgcaccaggccaagaggctgagcagcccctgcatcatggtggtgaaccatgatgccagcagcatcccccggctgcagattgatgtggatggcaggaaggagatcctcttctatgaccgcatcctgtgtgatgtgccctgcagcggagatggcaccatgaggaagaacattgatgtgtggaagaagtggaccaccctgaacagcctgcagctgcacggcctgcagctgagaattgccaccagaggagctgagcagctggccgagggcggccgcatggtgtacagcacctgcagcctgaaccccattgaagatgaagctgtgattgccagcctgctggagaagtctgagggcgccctggagctggctgatgtgtccaatgagctgcccggcctgaagtggatgcctggcatcacccagtggaaggtgatgaccaaggatggccagtggttcacagactgggatgctgtgccccacagccgccacacccagatccggcccaccatgtttcctcccaaggaccctgagaagctgcaggccatgcacctggagcgctgcctgcgcatcctgccccaccaccagaacacaggaggcttctttgtggccgtgctggtgaagaagagctccatgccctggaacaagaggcagcccaagctgcagggcaagtctgctgagacccgggagagcacccagctgagccctgctgacctgacagagggcaagcccacagaccccagcaagctggagagccccagcttcaccggcaccggggacacagaaattgcccacgccacagaggacctggagaacaacggcagcaagaaggatggagtgtgtggccccccacccagcaagaagatgaagctgtttggcttcaaggaggacccctttgtgttcatcccagaagatgaccccctcttcccccccatcgagaagttctacgccctggaccccagcttccccaggatgaacctgctgaccaggaccacagagggcaagaagaggcagctgtacatggtgtccaaggagctgagaaatgtgctgctgaacaacagcgagaagatgaaggtgatcaacacaggcatcaaggtgtggtgcaggaacaacagcggggaggagtttgactgtgccttccggctggcccaggagggcatctacaccctgtaccccttcatcaacagccgcatcatcaccgtgtccatggaggatgtgaagatcctgctgacccaggagaaccccttcttcaggaagctgagcagcgagacctacagccaggccaaggacctggccaagggcagcatcgtgctgaagtatgagccagacagcgccaacccagatgccctgcagtgccccatcgtgctgtgtggctggaggggcaaggccagcatccgcacctttgtgcccaagaatgaaaggctgcactacctgaggatgatgggcctggaggtgctgggggagaagaagaaggagggcgtcatcctgaccaatgaatctgctgccagcacaggccagcctgacaatgatgtgacagagggccagagagctggggagcccaacagcccagatgctgaggaggccaacagcccagatgtgacagctggctgtgaccctgctggggtgcacccccccaggtag

SEQ ID NO: 73906 - DNA, 1596 bp, Artificial Sequence
  derived and/or modified sequence
atggtggtgaaccacgacgccagcagcatcccccggctgcagatcgatgtagacggccgcaaagaaatacttttctatgaccggatcctctgtgatgtgccatgctctggcgatggaaccatgagaaagaacatcgacgtgtggaaaaaatggaccaccctcaattccttgcagttacatgggctacagcttagaatcgcaacccgcggggcagagcagctcgccgagggcggccggatggtctacagcacttgctccttgaatcccatcgaggatgaagctgttatcgccagccttctagaaaagtccgagggcgcactcgaattggccgatgtgtctaatgagttgcctggtcttaaatggatgcctggtattacccagtggaaggtgatgaccaaagatggacagtggtttacagactgggacgctgtgccccactcacggcatactcaaattcggcccaccatgttcccgcctaaggatccagaaaagcttcaggcaatgcaccttgaaaggtgtttgagaatcttaccccatcaccagaatacaggaggctttttcgtggcggtcctggttaaaaagagcagtatgccttggaacaaaagacagcccaaactacagggcaaatccgcggagactcgcgagtcgacccaactgtctccagcagacttgacagaggggaaaccaacagatccctcaaaactggagtcgccgtctttcaccggcacgggagacactgagattgcgcacgcgacagaggatttggaaaataacgggagcaaaaaggatggcgtgtgcggccctcctccttccaagaagatgaagctcttcggctttaaagaggacccattcgttttcataccagaagatgaccccctgttcccacctatagaaaaattctacgccctcgatccatcattcccccgcatgaatcttttaacccgcaccaccgagggaaagaagcgccaattgtacatggtctctaaggaattacgtaacgtcctattaaacaactctgaaaagatgaaagtgataaacaccggaattaaggtgtggtgcaggaataactctggggaggagttcgactgtgcctttaggttagcacaggagggaatatacaccttgtatcccttcattaactctcggattatcacagtatcaatggaggacgtcaagatcctccttacccaggaaaacccctttttcagaaagctgagtagcgagacctattcccaggctaaagatctggccaaggggtctatagtgctcaagtacgaacctgactccgcaaaccctgatgcccttcagtgccccatcgtgttgtgtgggtggcgcggaaaggcatccattcgaacctttgtccccaaaaacgagaggctgcattacctcaggatgatgggcctcgaggttctgggggagaaaaaaaaagaaggagtgatcctaactaatgaatccgcagcatcaaccgggcagccagataatgacgttaccgagggccaacgagccggggaaccaaactcacctgacgcagaagaggctaactccccagatgtgactgccgggtgtgatccagcaggcgtacaccctccccgctag

SEQ ID NO: 73907 - DNA, 2199 bp, Artificial Sequence
  derived and/or modified sequence
atgggccggcggagccggggccggcggctgcagcagcagcagcggcctgaggatgcagaagatggtgctgaaggcggcggtaagcggggagaggctggatgggagggaggatacccagagatcgtgaaagagaacaagctgttcgaacactattaccaggagctgaagatagtccctgagggcgagtgggggcaattcatggatgcccttcgggaacctcttccagccacactgcgcataaccggatataagagatacccagaggagttggcctggcatactaatctttccaggaagattttgaggaaatccccacatctcgagaagttccaccagttcctcgtgtctgaaactgagtccggaaatatctcgcggcaggaggcggtgtcaatgattcctcccttgctgctgaatgtacggcctcaccacaaaatcctggatatgtgtgcagcccccggtagcaagacgactcaactgatcgagatgctgcatgccgatatgaacgttccattccctgaggggttcgtcatcgccaacgatgtggataacaagcgctgttatcttctggtccatcaggcgaaaaggctttcgtccccatgtattatggtggttaatcatgatgcctcttccatccctaggctgcagattgatgtggatggcagaaaggagatattgttttatgaccgcattctctgtgatgttccgtgctccggcgacggaactatgcgcaagaatattgacgtgtggaagaaatggactacgttaaacagcctccagttgcacggcctgcaactccgtatagcaacacgcggggccgagcagttggctgaggggggtagaatggtttatagcacatgcagtttaaaccctatcgaagacgaagcggtgatcgcaagtctcctagagaaatccgaaggagccctggagctggctgacgtgtcaaacgaacttcctgggctgaagtggatgcctggaatcacccagtggaaggtgatgacgaaggatgggcagtggttcaccgactgggacgctgtacctcacagcaggcacacacaaattcgccctactatgttcccacctaaggaccccgagaagctccaggcaatgcatctcgaaagatgcttgaggatccttccccaccatcaaaacacgggaggcttctttgtcgcggtgctcgtaaagaagtcatctatgccatggaataaacggcagcccaagctgcagggaaagtctgccgagacccgggagtctacccagttaagcccggctgatctcaccgagggaaagcccacagatccttccaaactagaatcaccttcctttactggaaccggggacaccgagattgcccacgccactgaggacctagaaaacaatggatcaaagaaagacggcgtttgcgggcctccaccatcaaaaaaaatgaagctctttggctttaaagaggacccattcgtgttcattccagaagacgacccactctttccccctatcgagaaattttacgcactggacccgtcttttccaaggatgaacttactcacaaggacaactgagggcaaaaaaagacagctgtatatggtttcaaaagaactgcgaaacgtgctcctgaacaactcagagaaaatgaaagtcattaacactggcatcaaagtgtggtgtcggaataacagcggagaggagtttgattgtgcctttcgcttggctcaagaggggatttataccttataccccttcatcaattcccgcatcattacagtctccatggaggatgtaaagatactattgacccaggaaaaccctttttttcgaaaactgagctctgagacttactctcaggccaaggatctcgccaagggctccatcgtcttgaaatacgaacccgattcggccaaccctgatgcactgcagtgccccatcgtcctctgcgggtggcgtggcaaagccagtatacgaacctttgtgccgaagaacgagagacttcactatctgcgcatgatgggacttgaagtgttgggcgagaagaaaaaagagggcgtgatcctgacgaacgaatctgccgcgagcactggccagcctgataacgacgtcactgaaggccagcgagccggagagccaaacagtcccgatgctgaggaggctaactcccccgacgtcaccgcgggttgtgatcctgctggcgttcacccacctcggtag

SEQ ID NO: 73908 - DNA, 3217 bp, Artificial Sequence
  derived and/or modified sequence
aggctgtccgcggagctccttgagcccgcgtgggaaacctgggcgcttcgcgcggagacgcctttgtggctgcttcctggagcatttttttccccttagagctgttcgctgttttccctgtcacgccgcttttctgaaagacgggttgtgcgctttgggcttattcctggacggtccccaaaggtccccgaaaggaccaggcccggacacgtggggccttggtttccggccggaagtcccgggaggtgtagggctagagttctggccgtggcgggccggtttctgcgtgctgcgtgcgcggccgcgtgggctatggggcggcggtcgcggggtcggcggctccagcaacagcagcggccggaggacgcggaggatggcgccgagggtggtggaaagcgcggcgaggcgggctgggaaggaggctaccccgagatcgtcaaggagaacaagctgttcgagcactactaccaggagctcaagatcgtgcccgagggcgagtggggccagttcatggacgctctcagggagccgctcccggccactttaagaattactggttacaaaagccacgcaaaagagattctccattgcttaaagaacaaatattttaaggaattggaggacctggaggtggacggtcagaaagttgaagttccacagccactgagttggtatcctgaagaacttgcctggcacacaaatttaagtcgaaaaatcttgagaaaatcgccacacttggaaaagtttcatcagtttctagttagtgaaacagaatctggaaatattagtcgtcaagaagctgttagcatgatcccaccactgctcctcaacgtgcggcctcatcataagagggatttgttattgcgaatgatgtggacaacaagcgctgctacctgctcgtccatcaagccaagaggctgagcagcccctgcatcatggtggtcaaccatgatgcctccagcatacccaggctccagatagatgtggacggcaggaaagagatcctcttctatgatcgaattttatgtgatgtcccttgcagtggagacggcactatgagaaaaaacattgatgtttggaaaaagtggaccaccttaaatagcttgcagctacatggcttacagctgcggattgcaacacgcggggctgaacagctggctgaaggtggaaggatggtgtattccacgtgttcactaaaccctattgaggatgaagcagtcatagcatctttactggaaaaaagtgaaggtgctttggagcttgctgatgtgtctaatgaactgccagggctgaagtggatgcctggaatcacacagtggaaggtaatgacgaaagatgggcagtggtttacagactgggacgctgttcctcacagcagacacacccagatccgacctaccatgttccctccgaaggacccagaaaagctgcaggccatgcacctggagcgatgccttaggatattaccccatcatcagaatactggagggttttttgtggcagtattggtgaaaaaatcttcaatgccgtggaataaacgtcagccaaagcttcagggtaaatctgcagagaccagagaaagcacacagctgagccctgcagatctcacagaagggaaacccacagatccctctaagctggaaagtccgtcattcacaggaactggtgacacagaaatagctcatgcaactgaggatttagagaataatggcagtaagaaagatggcgtgtgtggtcctcctccatcaaagaaaatgaagttatttggatttaaagaagatccatttgtatttattcctgaagatgacccattatttccacctattgagaaattttatgctttggatccttcattcccaaggatgaatttgttaactcggactacagaagggaagaaaaggcagctctacatggtttctaaggagttgcggaatgtgctgctgaataacagtgagaagatgaaggttattaacacggggatcaaagtctggtgtagaaataacagcggtgaagagtttgactgtgctttccggctggcacaggagggaatatatacattgtatccatttattaactcaagaattattactgtatcaatggaagatgttaagatactgttgacccaggaaaatcccttttttagaaaactcagcagtgagacctacagtcaagcaaaggacctggcaaagggaagcatcgtgctgaagtatgaaccagattctgcgaatccagacgctctgcagtgtcccatcgtcttatgcggatggcggggaaaggcctccattcgaacttttgtgcccaagaatgaacggcttcattatctcaggatgatggggctggaggtattgggagaaaagaagaaggaaggggttatcctcacaaatgagagtgcagccagcaccggacagccagacaatgacgtgactgagggacagagagcaggagagcccaacagcccagatgcagaagaggccaacagtccagacgtgacagcaggctgtgacccggcgggggtccatccaccccggtgagcaggcccaaggcagcgggggcccacacccctcacacgcaaaactggcttcttctggtcactggtgtctgaaaccaaatccagagcagcctgtggcctgtaaagcatatatttctaatgactgcagactggtgggatcataggagccttctgaatgaccaggactgctttctttggagctgatgaaaatgtactcttttagcgtgttagaaatcacttgttttattttgtttctttggccaagctgggtctagtgtttcttttgctgggaatagactttcaaaagttgtacttctatcaagaaacaaaactgcccttgcagaaatttcaggtcttttgttaagcctgtattggtcttaaggtgcagtattttttaaattattatttatagaaagaatctataaattcttggggaagtgtgttataagctttaataattacattgagctgcacctcagtggtgtgtcattaacatgcagtggggttaatatctgaggcctcagatgactttgtgccttttggaataaagggtaaaataaactctcccagagtaagagctgtatcgtgaattgtcatactaattattgagggggacttatgtgcttttattgaatggagtgctttacaatttttatttttaaatggggttgggatccttggaatatttcaataaaattgataaaatat

SEQ ID NO: 73909 - DNA, 2619 bp, Artificial Sequence
  derived and/or modified sequence
agggctagagttctggccgtggcgggccggtttctgcgtgctgcgtgcgcggccgcgtgggctatggggcggcggtcgcggggtcggcggctccagcaacagcagcggccggaggacgcggaggatggcgccgagggtggtggaaagcgcggcgaggcgggctgggaaggaggctaccccgagatcgtcaaggagaacaagctgttcgagcactactaccaggagctcaagatcgtgcccgagggcgagtggggccagttcatggacgctctcagggagccgctcccggccactttaagaattactggttacaaaaggtatcctgaagaacttgcctggcacacaaatttaagtcgaaaaatcttgagaaaatcgccacacttggaaaagtttcatcagtttctagttagtgaaacagaatctggaaatattagtcgtcaagaagctgttagcatgatcccaccactgctcctcaacgtgcggcctcatcataagatcttagatatgtgtgcagcacctggctcaaagaccacacagttaattgaaatgctacatgccgacatgaatgtcccctttccagagggatttgttattgcgaatgatgtggacaacaagcgctgctacctgctcgtccatcaagccaagaggctgagcagcccctgcatcatggtggtcaaccatgatgcctccagcatacccaggctccagatagatgtggacggcaggaaagagatcctcttctatgatcgaattttatgtgatgtcccttgcagtggagacggcactatgagaaaaaacattgatgtttggaaaaagtggaccaccttaaatagcttgcagctacatggcttacagctgcggattgcaacacgcggggctgaacagctggctgaaggtggaaggatggtgtattccacgtgttcactaaaccctattgaggatgaagcagtcatagcatctttactggaaaaaagtgaaggtgctttggagcttgctgatgtgtctaatgaactgccagggctgaagtggatgcctggaatcacacagtggaaggtaatgacgaaagatgggcagtggtttacagactgggacgctgttcctcacagcagacacacccagatccgacctaccatgttccctccgaaggacccagaaaagctgcaggccatgcacctggagcgatgccttaggatattaccccatcatcagaatactggagggttttttgtggcagtattggtgaaaaaatcttcaatgccgtggaataaacgtcagccaaagcttcagggtaaatctgcagagaccagagaaagcacacagctgagccctgcagatctcacagaagggaaacccacagatccctctaagctggaaagtccgtcattcacaggaactggtgacacagaaatagctcatgcaactgaggatttagagaataatggcagtaagaaagatggcgtgtgtggtcctcctccatcaaagaaaatgaagttatttggatttaaagaagatccatttgtatttattcctgaagatgacccattatttccacctattgagaaattttatgctttggatccttcattcccaaggatgaatttgttaactcggactacagaagggaagaaaaggcagctctacatggtttctaaggagttgcggaatgtgctgctgaataacagtgagaagatgaaggttattaacacggggatcaaagtctggtgtagaaataacagcggtgaagagtttgactgtgctttccggctggcacaggagggaatatatacattgtatccatttattaactcaagaattattactgtatcaatggaagatgttaagatactgttgacccaggaaaatcccttttttagaaaactcagcagtgagacctacagtcaagcaaaggacctggcaaagggaagcatcgtgctgaagtatgaaccagattctgcgaatccagacgctctgcagtgtcccatcgtcttatgcggatggcggggaaaggcctccattcgaacttttgtgcccaagaatgaacggcttcattatctcaggatgatggggctggaggtattgggagaaaagaagaaggaaggggttatcctcacaaatgagagtgcagccagcaccggacagccagacaatgacgtgactgagggacagagagcaggagagcccaacagcccagatgcagaagaggccaacagtccagacgtgacagcaggctgtgacccggcgggggtccatccaccccggtgagcaggcccaaggcagcgggggcccacacccctcacacgcaaaactggcttcttctggtcactggtgtctgaaaccaaatccagagcagcctgtggcctgtaaagcatatatttctaatgactgcagactggtgggatcataggagccttctgaatgaccaggactgctttctttggagctgatgaaaatgtactcttttagcgtgttagaaatcacttgttttattttgtttctttggccaagctgggtctagtgtttcttttgctgggaatagactttcaaaagttgtacttctatcaagaaacaaaactgcccttgcagaaatttcaggtcttttgttaagcctgtattggtctt

SEQ ID NO: 73910 - DNA, 1596 bp, Artificial Sequence
  derived and/or modified sequence
atggtcgtgaaccatgatgcttcctctatcccacgtctacaaatcgatgtcgacggacggaaagagatactattctatgatcgcattctgtgcgatgtgccctgttccggcgacggaacaatgagaaagaacatagacgtgtggaaaaagtggacaacacttaactcacttcaacttcatggactgcagctgaggatcgccactcggggagcagagcaattggccgaaggcggacgaatggtatattctacatgcagtctcaaccctattgaagatgaagctgtcatcgccagcttactggaaaaatcggaaggagcgctggaactggcggacgtgtccaacgagcttccagggctgaaatggatgccaggaatcacccagtggaaggtcatgacaaaagatgggcagtggttcaccgactgggatgccgtcccccactccaggcacacccagatcagacccaccatgttcccacccaaggaccccgagaagctccaggcaatgcacctggaacgttgcctgaggatcctaccgcaccaccagaatactggagggttttttgtcgccgttctggtgaagaagtcatcaatgccttggaacaaacgccaacctaagctgcagggtaaaagcgccgagacgcgcgagtctactcaattgtcaccagctgatctgactgaaggcaagccgacagatcctagcaaattggaatcccccagctttacaggcaccggagatacggaaatagctcatgctaccgaagatctggagaacaacgggtcaaaaaaggacggcgtgtgtggacctccgccttcaaaaaaaatgaagcttttcggattcaaagaggatccttttgtgtttatcccagaagacgatcctctattccccccaatcgagaaattttacgcccttgacccgagcttccctcgaatgaacctgctcaccaggactaccgagggaaaaaaacgtcaattatatatggttagcaaagagttgcgtaacgttctgctcaataattctgagaagatgaaggttataaataccggaatcaaggtctggtgccgaaacaattctggagaagaattcgattgtgcatttcgtctggcccaggaggggatttataccttatatccctttataaacagtcgtataattactgtgagcatggaagacgtgaagattcttttgacacaggagaatccgttcttcagaaagctgtcttctgaaacttatagccaggctaaggacttggctaaagggagcattgttctgaagtatgagcccgattccgccaaccccgatgccctgcagtgcccaatagttttatgcggctggcgcggaaaagccagcatccggacattcgtcccaaagaacgagagactacactaccttcggatgatgggtttagaggtcttgggagagaagaagaaggagggagtcatactgacaaatgagtctgccgcaagtacgggacagccagataatgatgtgactgagggacagagggctggagagccgaacagccccgatgcagaggaagcaaacagccccgatgtgaccgccggatgcgatcccgcaggcgttcacccccctcgctag

SEQ ID NO: 73911 - DNA, 2199 bp, Artificial Sequence
  derived and/or modified sequence
atgggacgaaggagcagagggagacgcttacagcaacaacagaggcctgaggatgctgaagatggggctgagggcggaggcaagcgtggtgaggccggttgggaaggaggatacccagagatcgtcaaggagaacaagctgttcgaacactactatcaggagttgaagattgtaccagagggagaatggggacaattcatggacgcactgagagaaccattaccggctaccctgcgtatcaccggctataagcgataccccgaggaactcgcatggcacacaaacctttctcgtaagattctgcgaaagagcccacacctcgagaagttccaccagtttctggtcagtgaaactgagagcggaaacatcagtcggcaggaggccgtctctatgattcccccactgctgctgaatgtgagacctcaccacaagatcctggacatgtgcgccgctcccggaagcaagactacacagctaatagaaatgctgcacgctgacatgaatgtgccctttccagagggttttgtgattgccaatgacgtagataacaagcgctgctaccttctcgtgcatcaagcaaaacgactcagctctccttgtataatggtagtgaatcatgacgcaagctccattcccaggctgcaaattgacgtggacggccgaaaagaaatccttttttatgatcgcattttgtgtgacgtaccctgcagtggcgatggtactatgaggaaaaacatagatgtttggaagaaatggaccacactgaattctttacagctgcatggtctgcagcttcgcattgcgactaggggcgctgagcagcttgcggagggtggtaggatggtctactccacatgttcgcttaatccaattgaggatgaagctgtgattgcttcattgctggaaaagtctgagggggctctcgaactagcggatgtttctaacgaacttcccggacttaaatggatgcccggaattacccaatggaaagtgatgactaaagatggacagtggtttaccgactgggacgcagtgcctcattctagacatacacagatacgccctactatgttcccccctaaggatcccgagaagctccaagcaatgcatttagaacgctgtctgcggatattgcctcatcatcaaaacactggagggttttttgtcgccgtgctcgtcaagaagtcctccatgccctggaataaacgacagcctaagctccagggaaagtccgccgaaacccgggaaagtacacagctgagccccgcagatctgactgagggcaaaccgaccgatccaagcaagctggaaagtccatcctttaccggcacaggtgacaccgagattgctcacgccaccgaagatctcgagaataatggttctaaaaaagacggcgtgtgcgggccaccaccctccaagaaaatgaagctgttcgggttcaaggaggatcctttcgtgtttatacctgaggacgaccccctcttccctcctatcgaaaagttctatgctttggacccaagcttcccccgtatgaacctgttaacacgaactaccgaggggaagaaacgccaattgtatatggtctccaaggagctgcgcaacgttctgctgaataactctgagaaaatgaaggtgattaatacagggataaaggtgtggtgccgtaataactccggggaagaattcgactgcgcattccgcctagcccaggaaggcatttacacactctacccatttatcaactcccggatcattacagtctctatggaggatgttaaaattctgctgacacaggaaaatcccttttttcgaaaactctcctctgagacctatagtcaggcaaaggacttggccaagggtagcattgtactcaaatacgagcctgatagtgccaatccagacgccctccagtgccctattgtcctgtgcgggtggcgtggcaaagcaagcattcgtacgttcgttcctaagaatgaacggctgcactacctgcggatgatgggtctggaagtcctgggtgagaaaaagaaggagggtgtcatcctaacaaacgaatccgccgctagcaccggtcagcccgacaacgacgtcactgaagggcagcgcgctggggaacctaactcacccgatgccgaggaagcgaactcacctgatgttactgcgggatgtgatcccgctggggttcatccaccccgatag

SEQ ID NO: 73912 - DNA, 1596 bp, Artificial Sequence
  derived and/or modified sequence
atggtggtgaaccacgacgccagcagcatccccagactgcagatcgacgtggacggcagaaaggagatcctgttctacgacagaatcctgtgcgacgtgccctgcagcggcgacggcaccatgagaaagaacatcgacgtgtggaagaagtggaccaccctgaacagcctgcagctgcacggcctgcagctgagaatcgccaccagaggcgccgagcagctggccgagggcggcagaatggtgtacagcacctgcagcctgaaccccatcgaggacgaggccgtgatcgccagcctgctggagaagagcgagggcgccctggagctggccgacgtgagcaacgagctgcccggcctgaagtggatgcccggcatcacccagtggaaggtgatgaccaaggacggccagtggttcaccgactgggacgccgtgccccacagcagacacacccagatcagacccaccatgttcccccccaaggaccccgagaagctgcaggccatgcacctggagagatgcctgagaatcctgccccaccaccagaacaccggcggcttcttcgtggccgtgctggtgaagaagagcagcatgccctggaacaagagacagcccaagctgcagggcaagagcgccgagaccagagagagcacccagctgagccccgccgacctgaccgagggcaagcccaccgaccccagcaagctggagagccccagcttcaccggcaccggcgacaccgagatcgcccacgccaccgaggacctggagaacaacggcagcaagaaggacggcgtgtgcggccccccccccagcaagaagatgaagctgttcggcttcaaggaggaccccttcgtgttcatccccgaggacgaccccctgttcccccccatcgagaagttctacgccctggaccccagcttccccagaatgaacctgctgaccagaaccaccgagggcaagaagagacagctgtacatggtgagcaaggagctgagaaacgtgctgctgaacaacagcgagaagatgaaggtgatcaacaccggcatcaaggtgtggtgcagaaacaacagcggcgaggagttcgactgcgccttcagactggcccaggagggcatctacaccctgtaccccttcatcaacagcagaatcatcaccgtgagcatggaggacgtgaagatcctgctgacccaggagaaccccttcttcagaaagctgagcagcgagacctacagccaggccaaggacctggccaagggcagcatcgtgctgaagtacgagcccgacagcgccaaccccgacgccctgcagtgccccatcgtgctgtgcggctggagaggcaaggccagcatcagaaccttcgtgcccaagaacgagagactgcactacctgagaatgatgggcctggaggtgctgggcgagaagaagaaggagggcgtgatcctgaccaacgagagcgccgccagcaccggccagcccgacaacgacgtgaccgagggccagagagccggcgagcccaacagccccgacgccgaggaggccaacagccccgacgtgaccgccggctgcgaccccgccggcgtgcacccccccagatag

SEQ ID NO: 73913 - DNA, 2199 bp, Artificial Sequence
  derived and/or modified sequence
atgggcagaagaagcagaggcagaagactgcagcagcagcagagacccgaggacgccgaggacggcgccgagggcggcggcaagagaggcgaggccggctgggagggcggctaccccgagatcgtgaaggagaacaagctgttcgagcactactaccaggagctgaagatcgtgcccgagggcgagtggggccagttcatggacgccctgagagagcccctgcccgccaccctgagaatcaccggctacaagagataccccgaggagctggcctggcacaccaacctgagcagaaagatcctgagaaagagcccccacctggagaagttccaccagttcctggtgagcgagaccgagagcggcaacatcagcagacaggaggccgtgagcatgatcccccccctgctgctgaacgtgagaccccaccacaagatcctggacatgtgcgccgcccccggcagcaagaccacccagctgatcgagatgctgcacgccgacatgaacgtgcccttccccgagggcttcgtgatcgccaacgacgtggacaacaagagatgctacctgctggtgcaccaggccaagagactgagcagcccctgcatcatggtggtgaaccacgacgccagcagcatccccagactgcagatcgacgtggacggcagaaaggagatcctgttctacgacagaatcctgtgcgacgtgccctgcagcggcgacggcaccatgagaaagaacatcgacgtgtggaagaagtggaccaccctgaacagcctgcagctgcacggcctgcagctgagaatcgccaccagaggcgccgagcagctggccgagggcggcagaatggtgtacagcacctgcagcctgaaccccatcgaggacgaggccgtgatcgccagcctgctggagaagagcgagggcgccctggagctggccgacgtgagcaacgagctgcccggcctgaagtggatgcccggcatcacccagtggaaggtgatgaccaaggacggccagtggttcaccgactgggacgccgtgccccacagcagacacacccagatcagacccaccatgttcccccccaaggaccccgagaagctgcaggccatgcacctggagagatgcctgagaatcctgccccaccaccagaacaccggcggcttcttcgtggccgtgctggtgaagaagagcagcatgccctggaacaagagacagcccaagctgcagggcaagagcgccgagaccagagagagcacccagctgagccccgccgacctgaccgagggcaagcccaccgaccccagcaagctggagagccccagcttcaccggcaccggcgacaccgagatcgcccacgccaccgaggacctggagaacaacggcagcaagaaggacggcgtgtgcggccccccccccagcaagaagatgaagctgttcggcttcaaggaggaccccttcgtgttcatccccgaggacgaccccctgttcccccccatcgagaagttctacgccctggaccccagcttccccagaatgaacctgctgaccagaaccaccgagggcaagaagagacagctgtacatggtgagcaaggagctgagaaacgtgctgctgaacaacagcgagaagatgaaggtgatcaacaccggcatcaaggtgtggtgcagaaacaacagcggcgaggagttcgactgcgccttcagactggcccaggagggcatctacaccctgtaccccttcatcaacagcagaatcatcaccgtgagcatggaggacgtgaagatcctgctgacccaggagaaccccttcttcagaaagctgagcagcgagacctacagccaggccaaggacctggccaagggcagcatcgtgctgaagtacgagcccgacagcgccaaccccgacgccctgcagtgccccatcgtgctgtgcggctggagaggcaaggccagcatcagaaccttcgtgcccaagaacgagagactgcactacctgagaatgatgggcctggaggtgctgggcgagaagaagaaggagggcgtgatcctgaccaacgagagcgccgccagcaccggccagcccgacaacgacgtgaccgagggccagagagccggcgagcccaacagccccgacgccgaggaggccaacagccccgacgtgaccgccggctgcgaccccgccggcgtgcacccccccagatag

SEQ ID NO: 73914 - protein, 185 aa, Artificial Sequence
  derived and/or modified sequence
MSAFNLLHLVTKSQPVALRACGLPSGSCRDKKNCKVVFSQQELRKRLTPLQYHVTQEKGTESAFEGEYTHHKDPGIYKCVVCGTPLFKSETKFDSGSGWPSFHDVINSEAITFTDDFSYGMHRVETSCSQCGAHLGHIFDDGPRPTGKRYCINSAALSFTPADSSGTAEGGSGVASPAQADKAEL

SEQ ID NO: 73915 - protein, 164 aa, Artificial Sequence
  derived and/or modified sequence
MSAFNLLHLVTKSQPVALRACGLPSGSCRDKKNCKVVFSQQELRKRLTPLQYHVTQEKGTESAFEGEYTHHKDPGIYKCVVCGTPLFKSETKFDSGSGWPSFHDVINSEAITFTDDFSYGMHRVETSCSQCGAHLGHIFDDGPRPTGKRYCINSAALSFTPADS

SEQ ID NO: 73916 - protein, 117 aa, Artificial Sequence
  derived and/or modified sequence
MSAFNLLHLVTKSQPVALRACGLPSGSCRDKKNCKVVFSQQELRKRLTPLQYHVTQEKGTESAFEGEYTHHKDPGIYKCVVCGTPLFKSETKFDSGSGWPSFHDVINSEAITFTDDF

SEQ ID NO: 73917 - DNA, 558 bp, Artificial Sequence
  derived and/or modified sequence
atgagtgcatttaatctgctccacttagtgactaagtcccagcctgtcgccctcagggcctgcggtctcccttctgggagttgtcgggacaagaagaactgtaaagtggtgttttcccagcaggaactccgcaaacgactgacaccgttacaataccacgtgacccaggaaaagggcacagaaagtgccttcgaaggagagtatactcatcacaaagaccccggtatttataaatgtgtcgtgtgtggtaccccccttttcaagtctgaaaccaaattcgattctgggtcgggctggccatctttccacgacgtcatcaactctgaagcaatcacttttaccgatgactttagttacgggatgcaccgtgtggaaacttcctgtagtcagtgcggagcacatctgggccatattttcgatgacggtccccgccccaccggcaaacggtactgcattaatagtgccgccctgtccttcacacccgctgacagtagtgggacggctgagggcggtagcggagtggcaagcccagcgcaggccgacaaggcagagctgtag

SEQ ID NO: 73918 - DNA, 495 bp, Artificial Sequence
  derived and/or modified sequence
atgagcgcttttaatctcttgcacctggtgaccaagtcccagcctgtggccctacgggcctgcggcctcccatcagggagctgcagggacaagaagaactgtaaagtggtgttctctcagcaggaactgcggaaacggcttactccacttcaataccatgtcactcaggaaaaaggcaccgaatcagccttcgaaggtgaatacacacaccacaaggatccgggtatatataagtgcgtcgtatgtggaacacccttgttcaagagcgaaaccaaatttgactctggttcaggttggccatcttttcatgacgtgatcaacagcgaagccatcaccttcaccgacgacttttcttatgggatgcaccgggttgagaccagttgttctcaatgtggggcccatctgggacacattttcgacgatgggccacggcccacgggcaaacggtattgcatcaatagcgctgccttgtcattcactccagcagatagttag

SEQ ID NO: 73919 - DNA, 558 bp, Artificial Sequence
  derived and/or modified sequence
atgtcggcttttaatcttcttcacctggttaccaagagccagccagtcgcgttgcgagcttgtggactgccatccgggtcctgtagagacaagaaaaattgcaaggtggttttttcacagcaggaattacgtaagcgcctcacacctctgcagtaccatgtgacgcaggaaaagggaacagagtcagcattcgagggagagtacacccatcacaaggaccctggcatctataaatgcgtggtctgcggcacacccctcttcaaatccgagacaaaattcgatagcgggtcaggatggccgtccttccacgatgtcatcaacagtgaggcaatcacctttaccgatgatttctcatacggtatgcatcgtgtggagacgtcctgctctcagtgcggcgcacacctgggccatatcttcgatgatggaccacggcccacaggcaaaaggtattgcattaacagtgccgccttgtcatttacccccgctgacagcagcggcaccgctgaaggtggcagcggtgttgcttcccccgcccaggccgacaaagccgaactctag

SEQ ID NO: 73920 - DNA, 354 bp, Artificial Sequence
  derived and/or modified sequence
atgtccgcttttaatctgctgcacttagttacaaagagccagccagtcgctttgcgggcttgtggtctaccttccgggagctgccgtgacaagaagaattgtaaggtggtgttctcccaacaggagttacggaaacgtctgaccccgctccaatatcacgtgacccaggagaaaggaactgaatcagcttttgaaggcgaatatacacaccacaaggaccctggtatttacaaatgtgtggtctgtggaacccctcttttcaagagcgagaccaaatttgattccggcagtgggtggccctccttccatgatgtgattaactccgaggcgatcacttttaccgatgacttctag

SEQ ID NO: 73921 - DNA, 558 bp, Artificial Sequence
  derived and/or modified sequence
atgtctgccttcaacctgctgcacctggtgaccaagagccagcctgtggccctgcgggcctgtggcctgcccagcggcagctgccgggacaagaagaactgcaaggtggtgttcagccagcaggagctgaggaagaggctgacccccctgcagtaccacgtgacccaggagaagggcacagagagcgcctttgaaggagagtacacccaccacaaggaccccggcatctacaagtgtgtggtgtgtggcacccccctcttcaagtctgagaccaagtttgattctggcagcggctggcccagcttccatgatgtgatcaacagcgaggccatcaccttcacagatgacttctcctatggcatgcaccgggtggagaccagctgcagccagtgtggggcccacctgggccacatctttgatgatggcccccggcccaccgggaagcgctactgcatcaacagcgctgccctgtccttcaccccagctgacagcagcggcacagctgagggcggcagcggcgtggccagccctgcccaggccgacaaggccgagctgtag

SEQ ID NO: 73922 - DNA, 495 bp, Artificial Sequence
  derived and/or modified sequence
atgtctgccttcaacctgctgcacctggtgaccaagagccagcctgtggccctgcgggcctgtggcctgcccagcggcagctgccgggacaagaagaactgcaaggtggtgttcagccagcaggagctgaggaagaggctgacccccctgcagtaccacgtgacccaggagaagggcacagagagcgcctttgaaggagagtacacccaccacaaggaccccggcatctacaagtgtgtggtgtgtggcacccccctcttcaagtctgagaccaagtttgattctggcagcggctggcccagcttccatgatgtgatcaacagcgaggccatcaccttcacagatgacttctcctatggcatgcaccgggtggagaccagctgcagccagtgtggggcccacctgggccacatctttgatgatggcccccggcccaccgggaagcgctactgcatcaacagcgctgccctgtccttcaccccagctgacagctag

SEQ ID NO: 73923 - DNA, 354 bp, Artificial Sequence
  derived and/or modified sequence
atgtctgccttcaacctgctgcacctggtgaccaagagccagcctgtggccctgcgggcctgtggcctgcccagcggcagctgccgggacaagaagaactgcaaggtggtgttcagccagcaggagctgaggaagaggctgacccccctgcagtaccacgtgacccaggagaagggcacagagagcgcctttgaaggagagtacacccaccacaaggaccccggcatctacaagtgtgtggtgtgtggcacccccctcttcaagtctgagaccaagtttgattctggcagcggctggcccagcttccatgatgtgatcaacagcgaggccatcaccttcacagatgacttctag

SEQ ID NO: 73924 - DNA, 4417 bp, Artificial Sequence
  derived and/or modified sequence
atatttggactcggctgcccgtgcccaggaatttcccgtcatgcctcccgccgccccgtccgtcgcccggagccggggagggagggagcgaggttcggacaccggcggcggctgcctggcctttccatgagcccgcggcggaccctcccgcgccccctctcgctctgcctctccctctgcctctgcctctgcctggccgcggctctgggaagtgcgcagtccgctcttgcccctgttctttgcttctcgttttgttggtgaagatatcacagtgatgtctgcattcaacctgctgcatttggtgacaaagagccagccagtagcccttcgagcctgtgggcttccctcagggtcgtgtagggataaaaagaactgtaaggtggtcttttcccagcaggaactgaggaagcggctaacacccctgcagtaccatgtcactcaggagaaagggaccgaaagtgcctttgaaggagaatacacacatcacaaagatcctggaatatataaatgtgttgtttgtggaactccattgtttaagtcagaaaccaaatttgactccggttcaggttggccttcattccacgatgtgatcaattctgaggcaatcacattcacagatgacttttcctatgggatgcacagggtggaaacaagctgctctcagtgtggtgctcaccttgggcacatttttgatgatgggcctcgtccaactgggaaaagatactgcataaattcggctgccttgtcttttacacctgcggatagcagtggcaccgccgagggaggcagtggggtcgccagcccggcccaggcagacaaagcggagctctagagtaatggagagtgatggaaacaaagtgtacttaatgcacagcttattaaaaaaatcaaaattgttatcttaatagatatattttttcaaaaactataagggcagttttgtgctattgatattttttcttcttttgcttaaacagaagccctggccatccatgtattttgcaattgactagatcaagaactgtttatagctttagcaaatggagacagctttgtgaaacttcttcacaagccacttataccctttggcattcttttctttgagcacatggcttcttttgcagtttttccccctttgattcagaagcagagggttcatggtcttcaaacatgaaaatagagatctcctctgcagtgtagagaccagagctgggcagtgcagggcatggagacctgcaagacacatggccttgaggcctttgcacagacccacctaagataaggttggagtgatgttttaatgagactgttcagctttgtggaaagtttgagctaaggtcatttttttttttctcactgaaagggtgtgaaggtctaaagtctttccttatgttaaattgttgccagatccaaaggggcatactgagtgttgtggcagagaagtaaacattaccacactgttaggcctttattttattttattttccatcgaaagcattggaggcccagtgcaatggctcacgcctgtgatcccagcactttgggaggccaaggcgggtggatcacgaggtcaggagatggagaccatcctggctaacatggtgaaaccccgtctctactaaaaatacgaaaaattagccaggcgtggtggtgggcacctgtagtcccagctactcaggaggctgaggcaggagaatggcgtgaacccggaaggcggagcttgcagttagccgagatcatgccactgcactccagcctacatgacaatgtgacactccatctcaaaaaataataataataacaatataagaactagctgggcatggtggcgcatgcatgtagtcccagctactcctgaggctcagtcaggagaatcgcttgaacttgggaggcggaggttgcagtgagctgagctcataccactgcactccagcctgaacagagtgagatcctgtcaaaaaagaaaagaaaaagaaagcagcattcaaatgtaagacaactgtaaaatattgagccccacttggtctaaaattcaaaaagaagaacgcctgtccatcgcctttttataagtccttctctccacacctaaaagcagctgcagctggaagggcacaaattccactgtgtaaaataaaatattaggggcaacacacttcatcaaggcagcaggaatgagagagagcagagaagatcaaggatgaagtcttgggtactgaaaaattcagtgctgggcagaaaaactgacagggcagtacaagtaacaaacagaatccaagtggggtggcccttgtgcacagagctccaggtgacctctggagagacatgggcattcacatggaaagctaaaacggaagctcaagtttcatactcaacataatcttctgtgtgacaaaggacaagccatgtagcctctctgtgcctatttcttcatgcataaactgggactcataatatttgtaaaatgtattgatactctcagggcaaattcactatattgctatacagttgagatcagtgttgtaaaattaaactgatctggttctaattgcctcaaaggccaaagcccaggcatttgaaatggaaagaagcagagaggaggctgacttagctgattggtatggaaacagttgggccaagagccagaatttccctttgtagcaacacggctagttttactttgagaagctctgctcagctgctttataacattaagtctggcggaatggatgtcactgtgcacaataaagttttcacaagtataaacaatggtgatgtaagtcaacattgctgtagccaggtgtgaaggttgtatggtgtgtgacgaatgtacatcatgtttgtaggtttggatgctaatcttgaattgtagtttaaaaaatacgtatttttgtaactctttgaaagtttatgaagactgacagctttccttgtaagcactaagagaaaaaaaagaaagagggacatttgacaattttaaagaaacaacaagaaattagaatgaaaatctgtgacaaacagcgtcagtgtggccatgtccacattcctacatgtctctctctacaagcacctctctaagaagcctgacatcccggtggactctttatagtcatgtacacttgattccagatgagctctggtcttatctggatgctcagataagaggtttctatctgagcatccagatgttccctcaggttccaagacatttcaccccaggccctgggttcactctggaattcgtaggcttcacgtctctctagaaatgacgtgtaaaatttaagaccagacctcagccatcagcgtccagaccatcctagaagtctttcccaatctcacagagaaagccctagtatttcccagtgaccccaggattccacgttggggtggccaaagaaataggtctctcagggctttgccacagcctccagcccatccttcagaggcacacacagcacctctcggctgctccagctctgtaggatagcctcccctggggtccgtgggacgcgggccacagtgttgaggtagacaaggaggatcagtgagaggcctcttccctctccacagagactggattgtcattgttccttcatttatatcgtagggcttaacatttcactcaaaaaaaagcccctctttttctaatccttagtctttgtttcaaggaaagccagtttttcttctaccacattttccaggatcgactttaagaaaaatgcaacatctattgaaaaaaagtggggtgtatgcatgtggtttaattccagattgcttttgggtttaagtggtatcaaatttcagtatatttctgtcttatgtgaaagaaatatattactaaaacgtcagtgagcaataatgtcagctgtcaagcactagatttatttttgcaggatatggagtgcaatgaactgagtcaatatggcaaggtgtatgtgatctgtgggagttatgccatttaacataggaagtgcatgggactttccctctctgcactccagctcttactgtaccattagaagatgcagaattctgttggtgtgcaaaaagtatagccttacattcaagcagaatggatctgaagaaagcagcaatatctgttactagagaacattcccatgtgtttaaactcttcacttcttagatgcatttaaattcttaatgcaaatgacgtagcaatttgaaaacttctccgtattacttgtgtttaaaatgtcttgctttaaatacaaaacaaatggtaaaggggattatcttttgtttagatggttaaatattatttttgccttagatagctttgtaataatttttctccagacagttcaacacttttgaaaaatgacatgaattttcattaaaaacccttttcctatgtttattgtatacaagaattatgcaataaaatttctttataaaaata

SEQ ID NO: 73925 - DNA, 630 bp, Artificial Sequence
  derived and/or modified sequence
ctgcggggacagcccctgcctcagccgagaaggggagcagaagggttgcgccccgcgccagcggtgaggggccgaacggaaggagctcttgcccctgttctttgcttctcgttttgttggtgaagatatcacagtgatgtctgcattcaacctgctgcatttggtgacaaagagccagccagtagcccttcgagcctgtgggcttccctcagggtcgtgtagggataaaaagaactgtaaggtggtcttttcccagcaggaactgaggaagcggctaacacccctgcagtaccatgtcactcaggagaaagggaccgaaagtgcctttgaaggagaatacacacatcacaaagatcctggaatatataaatgtgttgtttgtggaactccattgtttaagtcagaaaccaaatttgactccggttcaggttggccttcattccacgatgtgatcaattctgaggcaatcacattcacagatgacttttcctatgggatgcacagggtggaaacaagctgctctcagtgtggtgctcaccttgggcacatttttgatgatgggcctcgtccaactgggaaaagatactgcataaattcggctgccttgtcttttacacctgcggatagcag

SEQ ID NO: 73926 - DNA, 964 bp, Artificial Sequence
  derived and/or modified sequence
caccggcggcggctgcctggcctttccatgagcccgcggcggaccctcccgcgccccctctcgctctgcctctccctctgcctctgcctctgcctggccgcggctctgggaagtgcgcagtccgagtgacatcactgcctctcttcctgtgcgctggctttgacataagccagatggccaccgtggttggtaggcgcccaggctgcctggtacaggagttgatgaaacagaataggaagacgttttatggtcagctgtggaagcacagtgagactgcagctttgctaactcttgcccctgttctttgcttctcgttttgttggtgaagatatcacagtgatgtctgcattcaacctgctgcatttggtgacaaagagccagccagtagcccttcgagcctgtgggcttccctcagggtcgtgtagggataaaaagaactgtaaggtggtcttttcccagcaggaactgaggaagcggctaacacccctgcagtaccatgtcactcaggagaaagggaccgaaagtgcctttgaaggagaatacacacatcacaaagatcctggaatatataaatgtgttgtttgtggaactccattgtttaagtcagaaaccaaatttgactccggttcaggttggccttcattccacgatgtgatcaattctgaggcaatcacattcacagatgacttttcctatgggatgcacagggtggaaacaagctgctctcagtgtggtgctcaccttgggcacatttttgatgatgggcctcgtccaactgggaaaagatactgcataaattcggctgccttgtcttttacacctgcggatagcagtggcaccgccgagggaggcagtggggtcgccagcccggcccaggcagacaaagcggagctctagagtaatggagagtgatggaaacaaagtgtacttaatgcacagcttattaaaaaaatcaaaattgtta

SEQ ID NO: 73927 - DNA, 527 bp, Artificial Sequence
  derived and/or modified sequence
acgttagggtgtgaccccgagccgggattccattctgcgcctgctgcgccccctcggccacctgcggggacagcccctgcctcagccgagaaggggagcagaagggttgcgccccgcgccagcgctcttgcccctgttctttgcttctcgttttgttggtgaagatatcacagtgatgtctgcattcaacctgctgcatttggtgacaaagagccagccagtagcccttcgagcctgtgggcttccctcagggtcgtgtagggataaaaagaactgtaaggtggtcttttcccagcaggaactgaggaagcggctaacacccctgcagtaccatgtcactcaggagaaagggaccgaaagtgcctttgaaggagaatacacacatcacaaagatcctggaatatataaatgtgttgtttgtggaactccattgtttaagtcagaaaccaaatttgactccggttcaggttggccttcattccacgatgtgatcaattctgaggcaatcacattcacagatgactttt

SEQ ID NO: 73928 - DNA, 558 bp, Artificial Sequence
  derived and/or modified sequence
atgagcgccttcaacctgctgcacctggtgaccaagagccagcccgtcgcactccgggcttgcgggctgccgtcaggctcttgtcgtgataaaaagaattgtaaggtggtcttctcccaacaggaattacgcaagcggctcacacccctccaatatcacgtgacccaagaaaagggcacggagtctgcatttgaaggtgagtatacacatcataaagatccaggaatctacaagtgcgtggtgtgcggtaccccattattcaagtctgagacgaagttcgactctggtagtggttggccaagtttccacgacgtaatcaatagcgaagcaataacttttactgatgacttctcttacggtatgcaccgagtcgagacttcctgttcccagtgtggggcccacctgggccacatttttgatgacgggcctaggccgacgggcaagagatactgcataaacagtgcagccctcagcttcacaccagcagattcgtccggcacagccgagggaggctccggcgtggctagccccgctcaggcagataaagctgagctgtag

SEQ ID NO: 73929 - DNA, 495 bp, Artificial Sequence
  derived and/or modified sequence
atgagcgccttcaacctgctgcacctggtgaccaagagccagcccgtggctctcagagcgtgcggcctgccttctggaagctgccgcgacaagaagaattgcaaggtggtctttagccagcaggagctcaggaagaggctcaccccgctgcaatatcacgtgactcaggagaagggcaccgaatccgcctttgagggggagtacacccatcacaaggaccctggcatctacaagtgcgtggtttgcggcactccgctctttaagtccgagactaagttcgactccggatctgggtggccatcctttcacgacgtgatcaactcggaggctattacattcacggacgatttctcttacggaatgcaccgggtcgagactagctgttcacaatgtggcgcccatctggggcatatttttgatgatggccctcgaccaactgggaagaggtattgtattaactcggccgcgttaagttttacaccagccgactcctag

SEQ ID NO: 73930 - DNA, 558 bp, Artificial Sequence
  derived and/or modified sequence
atgagcgccttcaacctgctgcacctggtgaccaagagccagcccgtggcgctcagggcctgcggactcccaagcggatcttgtcgcgacaaaaagaactgcaaagtcgttttttcacagcaggaactgaggaagaggttaaccccactccagtaccacgttactcaagagaaggggacagaaagcgctttcgagggagaatacacccatcacaaggaccccggaatctacaagtgcgttgtttgcggcacaccactcttcaagagcgagactaagttcgacagtggctcaggatggccgtcgttccacgacgtgattaactctgaagctataactttcaccgacgacttctcctatgggatgcatagagtggaaactagctgcagccagtgtggcgcccatcttggacacatctttgatgatgggccccgacccaccggcaagaggtactgtatcaactcggcagccctgtcctttacgccggcagacagttctggaacggcagagggcggaagtggcgtggcgtcgcccgctcaggcggacaaagctgaattgtag

SEQ ID NO: 73931 - DNA, 354 bp, Artificial Sequence
  derived and/or modified sequence
atgagcgccttcaacctgctgcacctggtgaccaagagccagcccgtggccctgcgcgcatgtggactgccatctggctcctgtcgggataaaaaaaactgcaaggtcgtgttctctcaacaagaattgagaaagcggctcacacctctccaatatcacgtcacgcaggaaaagggaaccgagtccgctttcgagggtgaatacacacaccacaaagatccaggaatttataagtgcgtcgtatgcggaactccccttttcaagtcggaaactaagtttgactctgggtctggatggccttctttccatgatgtaatcaactccgaggccattacttttacagacgatttttag

SEQ ID NO: 73932 - DNA, 558 bp, Artificial Sequence
  derived and/or modified sequence
atgtctgccttcaatctgttacacctcgtgactaagagccagccagtggcgcttcgtgcgtgtggtctgccatcgggcagctgccgggataagaaaaattgtaaggtggtcttctcccagcaagagttaagaaagcggctgaccccactacagtatcatgtgacccaggaaaaggggactgagtctgcctttgaaggcgaatatacccaccacaaggaccctggcatctacaaatgtgtggtatgtggcactcctctcttcaagtccgagactaagttcgattcaggatcaggctggccctctttccacgacgttattaacagcgaggctataactttcactgatgatttcagctatggcatgcaccgggttgaaacttcttgtagtcaatgcggcgcacatctagggcatatcttcgacgacgggccacggccaacgggaaagcggtattgtatcaactccgccgcactcagtttcacccccgctgatagctccggcaccgcagagggaggtagcggtgtggcctccccagcacaggccgataaggccgaactctag

SEQ ID NO: 73933 - DNA, 495 bp, Artificial Sequence
  derived and/or modified sequence
atgagcgcctttaacttgctgcaccttgtaaccaagagccagccggtggctctaagagcctgtggtcttccatccggatcctgccgcgacaagaaaaactgcaaggtggtgttttcacagcaggaactgcggaaacgtctcacccccctgcaataccacgttacacaggagaagggcaccgagagtgcatttgaaggcgagtacacccaccataaagaccctggtatctacaagtgcgtggtatgtgggacccccctttttaagtctgaaacaaagttcgatagcggatctgggtggccaagtttccatgatgtcatcaatagcgaagccatcacctttactgatgacttctcttacgggatgcacagggtagaaacatcttgctcacaatgtggcgctcatctgggacacatttttgatgatggacctcgcccaaccgggaaacgctattgcattaattcagctgctctgagcttcacacccgcagactcttag

SEQ ID NO: 73934 - DNA, 558 bp, Artificial Sequence
  derived and/or modified sequence
atgtcagccttcaatctgctccatctggtcaccaagtcccagccggtggcgctccgggcttgtggcctccccagcggtagctgccgtgataagaagaattgcaaagttgttttttctcagcaagaattgagaaagcgcctgaccccacttcagtatcatgttacgcaggagaagggaacggaatctgccttcgagggcgagtatacccatcataaggatcccggtatctataagtgcgtggtttgcgggacccccttgtttaagagcgagacaaagttcgactcaggctccggatggcctagtttccacgacgtcatcaactctgaagctataactttcaccgacgacttcagctacggcatgcacagggttgagacaagttgcagccaatgtggggctcacctgggacacatctttgatgacggtccccgacctactgggaagagatactgcattaattccgcagctctgtccttcaccccagcagacagttctgggactgccgaggggggatccggcgtggctagcccagcccaggcagacaaagcagaactctag

SEQ ID NO: 73935 - DNA, 354 bp, Artificial Sequence
  derived and/or modified sequence
atgagcgcttttaacctgctacacctcgtgactaaatcgcaacccgttgcactgagagcttgcggtttaccttccggtagttgcagggataagaaaaattgtaaggtggttttctcccaacaggagctgcgtaagcggctgacccccctgcagtatcatgttactcaggagaaggggactgaaagtgccttcgagggggaatacactcaccacaaggacccgggaatctacaaatgtgtcgtgtgcggcactcccctgtttaagagcgagacaaagttcgatagcggatcaggttggcccagtttccacgatgtgataaactcagaagcaataacctttacagacgatttctag

SEQ ID NO: 73936 - DNA, 558 bp, Artificial Sequence
  derived and/or modified sequence
atgagcgccttcaacctgctgcacctggtgaccaagagccagcccgtggccctgagagcctgcggcctgcccagcggcagctgcagagacaagaagaactgcaaggtggtgttcagccagcaggagctgagaaagagactgacccccctgcagtaccacgtgacccaggagaagggcaccgagagcgccttcgagggcgagtacacccaccacaaggaccccggcatctacaagtgcgtggtgtgcggcacccccctgttcaagagcgagaccaagttcgacagcggcagcggctggcccagcttccacgacgtgatcaacagcgaggccatcaccttcaccgacgacttcagctacggcatgcacagagtggagaccagctgcagccagtgcggcgcccacctgggccacatcttcgacgacggccccagacccaccggcaagagatactgcatcaacagcgccgccctgagcttcacccccgccgacagcagcggcaccgccgagggcggcagcggcgtggccagccccgcccaggccgacaaggccgagctgtag

SEQ ID NO: 73937 - DNA, 495 bp, Artificial Sequence
  derived and/or modified sequence
atgagcgccttcaacctgctgcacctggtgaccaagagccagcccgtggccctgagagcctgcggcctgcccagcggcagctgcagagacaagaagaactgcaaggtggtgttcagccagcaggagctgagaaagagactgacccccctgcagtaccacgtgacccaggagaagggcaccgagagcgccttcgagggcgagtacacccaccacaaggaccccggcatctacaagtgcgtggtgtgcggcacccccctgttcaagagcgagaccaagttcgacagcggcagcggctggcccagcttccacgacgtgatcaacagcgaggccatcaccttcaccgacgacttcagctacggcatgcacagagtggagaccagctgcagccagtgcggcgcccacctgggccacatcttcgacgacggccccagacccaccggcaagagatactgcatcaacagcgccgccctgagcttcacccccgccgacagctag

SEQ ID NO: 73938 - DNA, 354 bp, Artificial Sequence
  derived and/or modified sequence
atgagcgccttcaacctgctgcacctggtgaccaagagccagcccgtggccctgagagcctgcggcctgcccagcggcagctgcagagacaagaagaactgcaaggtggtgttcagccagcaggagctgagaaagagactgacccccctgcagtaccacgtgacccaggagaagggcaccgagagcgccttcgagggcgagtacacccaccacaaggaccccggcatctacaagtgcgtggtgtgcggcacccccctgttcaagagcgagaccaagttcgacagcggcagcggctggcccagcttccacgacgtgatcaacagcgaggccatcaccttcaccgacgacttctag

SEQ ID NO: 73939 - protein, 735 aa, Artificial Sequence
  derived and/or modified sequence
MTAGSSYPLFLAAYACTGCLAERLGWFIKSSNEATNITPKHNMKAFLDELKAENIKKFLYNFTQIPHLAGTEQNFQLAKQIQSQWKEFGLDSVELAHYDVLLSYPNKTHPNYISIINEDGNEIFNTSLFEPPPPGYENVSDIVPPFSAFSPQGMPEGDLVYVNYARTEDFFKLERDMKINCSGKIVIARYGKVFRGNKVKNAQLAGAKGVILYSDPADYFAPGVKSYPDGWNLPGGGVQRGNILNLNGAGDPLTPGYPANEYAYRRGIAEAVGLPSIPVHPIGYYDAQKLLEKMGGSAPPDSSWRGSLKVPYNVGPGFTGNFSTQKVKMHIHSTNEVTRIYNVIGTLRGAVEPDRYVILGGHRDSWVFGGIDPQSGAAVVHEIVRSFGTLKKEGWRPRRTILFASWDAEEFGLLGSTEWAEENSRLLQERGVAYINADSSIEGNYTLRVDCTPLMYSLVHNLTKELKSPDEGFEGKSLYESWTKKSPSPEFSGMPRISKLGSGNDFEVFFQRLGIASGRARYTKNWETNKFSGYPLYHSVYETYELVEKFYDPMFKYHLTVAQVRGGMVFELANSIVLPFDCRDYAVVLRKYADKIYSISMKHPQEMKTYSVSFDSLFSAVKNFTEIASKFSERLQDFDKSNPIVLRMMNDQLMFLERAFIDPLGLPDRPFYRHVIYAPSSHNKYAGESFPGIYDALFDIESKVDPSKAWGEVKRQIYVAAFTVQAAAETLSEVA

SEQ ID NO: 73940 - DNA, 2697 bp, Artificial Sequence
  derived and/or modified sequence
agatgttgcctctctctctcgctcggattggttcagtgcactctagaaacactgctgtggtggagaaactggaccccaggtctggagcgaattccagcctgcagggctgataagcgaggcattagtgagattgagagagactttaccccgccgtggtggttggagggcgcgcagtagagcagcagcacaggcgcgggtcccgggaggccggctctgctcgcgccgagatgtggaatctccttcacgaaaccgactcggctgtggccaccgcgcgccgcccgcgctggctgtgcgctggggcgctggtgctggcgggtggcttctttctcctcggcttcctcttcggttaaaagccaactgcaaggtctaatgactgcaggatctagctatccattgtttctggccgcctatgcgtgcactgggtgtctggcagagaggctggggtggtttataaaatcctccaatgaagctactaacattactccaaagcataatatgaaagcatttttggatgaattgaaagctgagaacatcaagaagttcttatataattttacacagataccacatttagcaggaacagaacaaaactttcagcttgcaaagcaaattcaatcccagtggaaagaatttggcctggattctgttgagctagcacattatgatgtcctgttgtcctacccaaataagactcatcccaactacatctcaataattaatgaagatggaaatgagattttcaacacatcattatttgaaccacctcctccaggatatgaaaatgtttcggatattgtaccacctttcagtgctttctctcctcaaggaatgccagagggcgatctagtgtatgttaactatgcacgaactgaagacttctttaaattggaacgggacatgaaaatcaattgctctgggaaaattgtaattgccagatatgggaaagttttcagaggaaataaggttaaaaatgcccagctggcaggggccaaaggagtcattctctactccgaccctgctgactactttgctcctggggtgaagtcctatccagatggttggaatcttcctggaggtggtgtccagcgtggaaatatcctaaatctgaatggtgcaggagaccctctcacaccaggttacccagcaaatgaatatgcttataggcgtggaattgcagaggctgttggtcttccaagtattcctgttcatccaattggatactatgatgcacagaagctcctagaaaaaatgggtggctcagcaccaccagatagcagctggagaggaagtctcaaagtgccctacaatgttggacctggctttactggaaacttttctacacaaaaagtcaagatgcacatccactctaccaatgaagtgacaagaatttacaatgtgataggtactctcagaggagcagtggaaccagacagatatgtcattctgggaggtcaccgggactcatgggtgtttggtggtattgaccctcagagtggagcagctgttgttcatgaaattgtgaggagctttggaacactgaaaaaggaagggtggagacctagaagaacaattttgtttgcaagctgggatgcagaagaatttggtcttcttggttctactgagtgggcagaggagaattcaagactccttcaagagcgtggcgtggcttatattaatgctgactcatctatagaaggaaactacactctgagagttgattgtacaccgctgatgtacagcttggtacacaacctaacaaaagagctgaaaagccctgatgaaggctttgaaggcaaatctctttatgaaagttggactaaaaaaagtccttccccagagttcagtggcatgcccaggataagcaaattgggatctggaaatgattttgaggtgttcttccaacgacttggaattgcttcaggcagagcacggtatactaaaaattgggaaacaaacaaattcagcggctatccactgtatcacagtgtctatgaaacatatgagttggtggaaaagttttatgatccaatgtttaaatatcacctcactgtggcccaggttcgaggagggatggtgtttgagctagccaattccatagtgctcccttttgattgtcgagattatgctgtagttttaagaaagtatgctgacaaaatctacagtatttctatgaaacatccacaggaaatgaagacatacagtgtatcatttgattcacttttttctgcagtaaagaattttacagaaattgcttccaagttcagtgagagactccaggactttgacaaaagcaacccaatagtattaagaatgatgaatgatcaactcatgtttctggaaagagcatttattgatccattagggttaccagacaggcctttttataggcatgtcatctatgctccaagcagccacaacaagtatgcaggggagtcattcccaggaatttatgatgctctgtttgatattgaaagcaaagtggacccttccaaggcctggggagaagtgaagagacagatttatgttgcagccttcacagtgcaggcagctgcagagactttgagtgaagtagcctaagaggattctttagagaatccgtattgaatttgtgtggtatgtcactcagaaagaatcgtaatgggtatattgataaattttaaaattggtatatttgaaataaagttgaatattatatat

SEQ ID NO: 73941 - DNA, 2208 bp, Artificial Sequence
  derived and/or modified sequence
atgaccgcgggctctagctacccactctttcttgcggcctacgcttgtacaggctgcctagcagaacgcttaggttggtttatcaaatcatctaacgaagcaaccaacatcacacctaagcacaacatgaaggcattcctggatgaactgaaggcggagaacattaagaaattcctgtacaattttactcagataccccacctggcaggaacggaacaaaactttcagctcgctaagcaaatccagagccagtggaaggaatttggcctggattctgtcgagttggctcactatgacgtgctgctcagctaccccaacaagacccatcccaattacatctcaattatcaatgaagatgggaatgagatcttcaacacctcgctcttcgagccaccaccacctggctacgagaatgttagtgacatcgtcccaccattttcagccttcagtcctcaaggcatgccagagggcgatctggtgtatgtgaattatgcaagaactgaagactttttcaagctagagagagatatgaaaatcaactgttcaggcaaaatcgttatagcgaggtacgggaaggtgttccgcggtaataaggtgaagaatgctcagctggccggagccaaaggtgttatcctatacagtgacccggccgattacttcgcccctggcgtgaagagttatcccgatggctggaaccttccaggagggggagtgcaacggggaaacatcctgaatctaaatggcgccggcgatcctttaacacctgggtacccggcaaatgaatatgcttacagacggggaattgctgaggcggttggactgccatcgattcccgtgcaccccattggatattacgatgcccagaagctgctggaaaaaatggggggctcagcacctcctgattcctcctggagaggctcactgaaagtgccctataatgtgggccccggctttaccggtaacttctccacacagaaggtcaagatgcatatccattctactaatgaagtcactcgtatctataacgtcattggcaccctgcgaggcgctgtggagcctgatagatacgttatcctgggcggccacagagatagctgggtgtttggggggatcgatccgcagtcaggggcagcggtggtccacgagattgtgagaagctttggtaccctcaaaaaggaaggctggaggccccgacggacaatcttatttgcatcctgggacgccgaggaatttggactcctgggcagtaccgagtgggccgaagaaaacagtcgcctgctgcaggagagaggtgtagcctatatcaacgcggactcgagtatcgagggtaattacaccttacgtgtcgactgtacgccattgatgtattccctagttcataatttaaccaaggagctgaaatcacccgatgaaggcttcgaagggaagtcgctctatgagtcttggaccaagaaaagtcccagccccgaattttctggtatgccgaggatcagcaaactcgggtctgggaacgatttcgaggtgtttttccagcgcctggggatcgcctcagggagggcgcggtacacaaaaaattgggagaccaacaaattcagtggttaccccctgtaccatagcgtctacgagacttacgagttggtggagaaattctatgatcccatgttcaaatatcacctcaccgtggcccaggttagaggcgggatggtctttgagctcgcaaactctatagtactcccatttgactgccgggactacgccgtggtcctccggaagtacgcagacaaaatatactcaatttcgatgaaacatccccaggaaatgaaaacatacagcgtctccttcgactccctattttcagctgtcaaaaatttcaccgaaatcgcaagtaagttcagcgaaagattgcaggatttcgacaagtctaaccctatcgttctgcggatgatgaacgatcagctcatgtttctggagcgagcttttatcgaccctttggggttacccgatagacctttttataggcatgtaatctatgctcccagctcacacaataaatatgctggggaaagttttcctggtatctatgatgctctgttcgatatcgagtctaaggtagacccttctaaggcttggggagaggttaagcggcagatctacgtggcggcattcactgtccaggccgctgcggaaaccttgtcggaggtggcttag

SEQ ID NO: 73942 - DNA, 2208 bp, Artificial Sequence
  derived and/or modified sequence
atgacagctggcagcagctaccccctcttcctggccgcctatgcctgcaccggctgcctggccgagcggctgggctggttcatcaagagcagcaatgaggccaccaacatcacccccaagcacaacatgaaggccttcctggatgagctgaaggccgagaacatcaagaagttcctgtacaacttcacccagatcccccacctggccggcacagagcagaacttccagctggccaagcagatccagagccagtggaaggagtttggcctggacagcgtggagctggcccactatgatgtgctgctgagctaccccaacaagacccaccccaactacatcagcatcatcaatgaagatggaaatgagatcttcaacaccagcctgtttgagcccccacctcctggctatgaaaatgtgtctgacatcgtgccccccttcagcgccttcagcccccagggcatgcctgagggggacctggtgtatgtgaactatgccaggacagaggacttcttcaagctggagcgggacatgaagatcaactgcagcggcaagatcgtgattgcccgctatggcaaggtgttccggggcaacaaggtgaagaatgcccagctggccggggccaagggcgtcatcctgtacagcgaccctgctgactactttgcccctggggtgaagagctacccagatggctggaacctgcccggcggcggcgtgcagaggggcaacatcctgaacctgaatggagctggggaccccctgaccccaggctacccagccaatgaatatgcctacagaagaggaattgctgaggccgtgggcctgcccagcatccctgtgcaccccatcggctactatgatgcccagaagctgctggagaagatgggcggcagcgcccccccagacagctcctggaggggcagcctgaaggtgccctacaacgtgggccctggcttcaccggcaacttcagcacccagaaggtgaagatgcacatccacagcaccaatgaggtgacccgcatctacaacgtcatcggcaccctgcggggagctgtggagccagaccgctacgtgatcctgggcggccaccgggacagctgggtgtttggaggcatcgacccccagagcggggctgctgtggtgcatgaaattgtgcgcagctttggcaccctgaagaaggagggctggaggcccaggaggaccatcctgtttgcctcctgggatgctgaggagtttggcctgctgggcagcacagagtgggccgaggagaacagccggctgctgcaggagcggggcgtggcctacatcaatgctgacagcagcattgagggcaactacaccctgcgggtggactgcacccccctgatgtacagcctggtgcacaacctgaccaaggagctgaagagcccagatgagggctttgagggcaagagcctgtatgaatcctggaccaagaagagccccagccctgagttcagcggcatgccccgcatcagcaagctgggcagcggaaatgactttgaggtgttcttccagaggctgggcatcgccagcggccgggcccgctacaccaagaactgggagaccaacaagttcagcggctaccccctgtaccacagcgtgtatgagacctatgagctggtggagaagttctatgaccccatgttcaagtaccacctgactgtggcccaggtgcggggcggcatggtgtttgagctggccaacagcatcgtgctgccctttgactgccgggactatgctgtggtgctgaggaaatatgctgacaagatctacagcatctccatgaagcacccccaggagatgaagacctacagcgtgtcctttgacagcctcttctctgctgtgaagaacttcacagaaattgccagcaagttcagcgagcggctgcaggactttgacaagagcaaccccatcgtgctgaggatgatgaatgaccagctgatgttcctggagcgggccttcatcgaccccctgggcctgcctgaccggcccttctaccgccacgtgatctatgcccccagcagccacaacaagtatgctggggagagcttccctggcatctatgatgccctgtttgacatcgagagcaaggtggaccccagcaaggcctggggcgaggtgaagaggcagatctacgtggccgccttcaccgtgcaggccgctgctgagaccctgtctgaggtggcctag

SEQ ID NO: 73943 - DNA, 2208 bp, Artificial Sequence
  derived and/or modified sequence
atgaccgccggcagcagctaccccctgttcctggccgcctacgcctgcacaggttgcctcgccgagagattgggatggtttatcaaatcctccaatgaagcaaccaacattactccaaagcacaacatgaaagcctttctggatgaactgaaagccgagaacataaagaaatttctgtacaatttcacacaaatccctcacctcgcaggtaccgaacagaatttccagctggcaaagcagatccagtctcagtggaaagaattcgggctggactctgtggaactagcccattatgacgtgctacttagttaccctaataagactcatcccaattacatttcaatcattaatgaggatgggaacgagatcttcaacacatccctattcgaaccaccacctccaggttacgaaaacgtgagcgatatcgtcccacctttttctgccttctcaccccagggaatgccggaaggcgatctggtgtacgtcaattatgcccgaaccgaagacttctttaaactggagcgcgacatgaagattaattgctcaggcaagatcgttatcgcacgatacggaaaagtgttccgtgggaacaaagtgaaaaatgcgcagctggccggggcgaagggagtcatattgtactccgatccagctgactacttcgctcccggcgtgaaaagctatccagatgggtggaatcttcccggtggcggcgtgcaacgaggcaacattcttaacttaaacggagccggtgatccgctgacacctggatacccagcaaacgaatacgcctaccgtcgcgggattgcagaggccgtcgggctcccatcgatccccgtacacccaataggatattacgacgcacagaaactgttagaaaaaatgggaggatctgctcccccagattcttcttggagaggaagtttgaaagtaccatataacgtggggccaggcttcactggcaatttctcaacccagaaagtcaaaatgcacatccattccaccaacgaggtaactaggatttataatgtcatcggtaccctaagaggggcagtggaacctgaccggtacgtcatcctcgggggtcatcgcgactcatgggtcttcggcgggatcgatccacagtcgggggcggccgttgtccacgaaattgtgaggtcattcggcacactcaaaaaggagggctggcggcctcggcgtaccatcctcttcgcctcatgggacgccgaagaatttggcttgctggggtccaccgaatgggctgaggagaatagccggctgctgcaggagcgaggggtggcctacataaacgcggacagcagcattgagggcaactacactcttagggtggattgtacgccactgatgtactcacttgtgcacaacctcaccaaggagctgaagagtccagatgagggatttgagggcaagagtctctacgaatcctggaccaaaaaaagccctagtccagagttttctggaatgcctcgcattagcaagctgggtagcgggaacgacttcgaggtgttcttccaaaggttaggcatcgcatcaggccgagctcgttatactaagaattgggagaccaacaagttctcaggctatccgctctatcactctgtttatgaaacttacgagcttgtcgaaaagttctacgatcccatgtttaagtaccatctgaccgtcgcccaggtgcgaggagggatggtgttcgaactcgcgaactccattgttctcccttttgattgtcgagactacgcggttgtgctcagaaaatatgccgacaagatatacagcatctccatgaagcacccacaggagatgaagacttatagcgtatcctttgatagtcttttcagtgctgttaaaaactttacggaaatcgcttccaaattttccgaaagacttcaggactttgataagagcaacccgatcgtgctacgaatgatgaatgaccaactgatgttcctcgagagggcctttatcgatcctctggggctgcctgacaggcctttttaccgacatgtgatctatgctccctcctcccataataagtatgccggcgaatcattccccgggatttatgatgccctcttcgatatcgagtctaaggtggacccatccaaagcttggggggaggtcaagcgccagatctacgttgctgcttttactgtccaggcggctgcggagaccctgtcagaggtggcctag

SEQ ID NO: 73944 - DNA, 2208 bp, Artificial Sequence
  derived and/or modified sequence
atgaccgctggtagtagctacccactgtttctggctgcgtacgcatgcaccggctgcctcgcagagaggcttggctggtttatcaagtcttccaacgaagcaaccaatatcacccccaagcataacatgaaagccttcctcgatgagctgaaggccgagaacataaagaaattcttatacaattttacgcagatcccacaccttgctggcaccgagcagaattttcagctagccaaacagatccaatctcagtggaaggagtttgggcttgatagtgtggagttagcgcactatgacgttctgctctcttaccctaataagacccaccctaactatatttctataatcaacgaagatggcaatgaaatcttcaatacaagtctttttgaacccccaccccctggttatgaaaacgttagcgatatcgtcccccctttcagcgctttctctccgcagggtatgcccgagggagatctggtgtacgtaaactacgcgaggaccgaggactttttcaaattggaacgggacatgaagatcaattgtagtgggaagattgtcattgcgagatacggtaaggtgtttcgtggcaacaaagtcaagaatgcgcaactcgcaggcgctaagggggtgattctgtattccgacccagctgattacttcgctcccggagtgaagtcataccccgatggatggaacctccccggtggtggtgttcaaagggggaacattctcaatctcaatggggcaggggaccctctgacgccgggttatccagccaatgagtatgcgtacagaagaggtatcgcagaagccgttggcctgcccagcatccccgtgcacccgattgggtactacgacgctcaaaaactgctggaaaaaatgggaggctcagctccaccagactctagttggagaggttcgctgaaggtgccatataatgtcggacctgggttcaccggcaacttcagcactcagaaagtgaagatgcatatacactctaccaacgaagtcacgcgtatatataacgttattggaacccttaggggtgccgtggagcctgatcgctacgtcatactgggcggtcatcgggactcttgggttttcggcggaattgatcctcagagcggcgcagctgtggttcatgagatagttcgaagctttggcacactgaagaaagagggatggcggccaaggagaaccatcctgtttgctagctgggatgctgaagagtttgggctactcggcagcactgagtgggctgaagagaactcacgcttactgcaggaacgaggcgtggcatatatcaatgctgacagctcaattgagggcaactacaccctccgtgtggattgcacccctctaatgtattcactggtgcacaacctgacaaaggaactgaaatcaccagacgagggcttcgaaggaaaaagcctttatgaatcctggaccaagaaatcaccatctcccgaatttagtgggatgcctcggatctcaaaactggggtccgggaacgacttcgaggttttcttccagcgcttgggcattgcttctggacgtgcccgatacactaagaactgggagacaaataagttctctggataccccctctaccactctgtttacgagacatatgaattggtggagaagttttacgatcccatgttcaagtaccatttaaccgttgcccaggttagggggggtatggtgttcgaactggccaacagtatcgtgctgcccttcgattgtagggactacgccgttgtgctcagaaaatacgctgacaaaatttactccatatccatgaagcatcctcaagagatgaaaacttatagcgtgagctttgacagccttttttctgctgtcaagaatttcacagaaattgctagtaagttctccgagcgactccaggacttcgacaagtccaatcctattgtgctgcggatgatgaatgaccagttaatgttcttggaaagagcttttatcgaccctcttggcctacctgatcggccattctatagacacgtgatttatgccccatccagtcataataaatatgccggagagtccttcccagggatttacgacgcactgtttgacatagagagtaaggttgatccctccaaagcatggggcgaagtgaagaggcagatctacgtggctgctttcacagtacaggcagccgcagagacactatccgaagtggcctag

SEQ ID NO: 73945 - DNA, 2208 bp, Artificial Sequence
  derived and/or modified sequence
atgaccgccggcagcagctaccccctgttcctggccgcctacgcctgcaccggctgcctggccgagagactgggctggttcatcaagagcagcaacgaggccaccaacatcacccccaagcacaacatgaaggccttcctggacgagctgaaggccgagaacatcaagaagttcctgtacaacttcacccagatcccccacctggccggcaccgagcagaacttccagctggccaagcagatccagagccagtggaaggagttcggcctggacagcgtggagctggcccactacgacgtgctgctgagctaccccaacaagacccaccccaactacatcagcatcatcaacgaggacggcaacgagatcttcaacaccagcctgttcgagccccccccccccggctacgagaacgtgagcgacatcgtgccccccttcagcgccttcagcccccagggcatgcccgagggcgacctggtgtacgtgaactacgccagaaccgaggacttcttcaagctggagagagacatgaagatcaactgcagcggcaagatcgtgatcgccagatacggcaaggtgttcagaggcaacaaggtgaagaacgcccagctggccggcgccaagggcgtgatcctgtacagcgaccccgccgactacttcgcccccggcgtgaagagctaccccgacggctggaacctgcccggcggcggcgtgcagagaggcaacatcctgaacctgaacggcgccggcgaccccctgacccccggctaccccgccaacgagtacgcctacagaagaggcatcgccgaggccgtgggcctgcccagcatccccgtgcaccccatcggctactacgacgcccagaagctgctggagaagatgggcggcagcgccccccccgacagcagctggagaggcagcctgaaggtgccctacaacgtgggccccggcttcaccggcaacttcagcacccagaaggtgaagatgcacatccacagcaccaacgaggtgaccagaatctacaacgtgatcggcaccctgagaggcgccgtggagcccgacagatacgtgatcctgggcggccacagagacagctgggtgttcggcggcatcgacccccagagcggcgccgccgtggtgcacgagatcgtgagaagcttcggcaccctgaagaaggagggctggagacccagaagaaccatcctgttcgccagctgggacgccgaggagttcggcctgctgggcagcaccgagtgggccgaggagaacagcagactgctgcaggagagaggcgtggcctacatcaacgccgacagcagcatcgagggcaactacaccctgagagtggactgcacccccctgatgtacagcctggtgcacaacctgaccaaggagctgaagagccccgacgagggcttcgagggcaagagcctgtacgagagctggaccaagaagagccccagccccgagttcagcggcatgcccagaatcagcaagctgggcagcggcaacgacttcgaggtgttcttccagagactgggcatcgccagcggcagagccagatacaccaagaactgggagaccaacaagttcagcggctaccccctgtaccacagcgtgtacgagacctacgagctggtggagaagttctacgaccccatgttcaagtaccacctgaccgtggcccaggtgagaggcggcatggtgttcgagctggccaacagcatcgtgctgcccttcgactgcagagactacgccgtggtgctgagaaagtacgccgacaagatctacagcatcagcatgaagcacccccaggagatgaagacctacagcgtgagcttcgacagcctgttcagcgccgtgaagaacttcaccgagatcgccagcaagttcagcgagagactgcaggacttcgacaagagcaaccccatcgtgctgagaatgatgaacgaccagctgatgttcctggagagagccttcatcgaccccctgggcctgcccgacagacccttctacagacacgtgatctacgcccccagcagccacaacaagtacgccggcgagagcttccccggcatctacgacgccctgttcgacatcgagagcaaggtggaccccagcaaggcctggggcgaggtgaagagacagatctacgtggccgccttcaccgtgcaggccgccgccgagaccctgagcgaggtggcctag

SEQ ID NO: 73946 - protein, 704 aa, Artificial Sequence
  derived and/or modified sequence
MTAGSSYPLFLAAYACTGCLAERLGWFIKSSNEATNITPKHNMKAFLDELKAENIKKFLYNFTQIPHLAGTEQNFQLAKQIQSQWKEFGLDSVELAHYDVLLSYPNKTHPNYISIINEDGNEIFNTSLFEPPPPGYENVSDIVPPFSAFSPQGMPEGDLVYVNYARTEDFFKLERDMKINCSGKIVIARYGKVFRGNKVKNAQLAGAKGVILYSDPADYFAPGVKSYPDGWNLPGGGVQRGNILNLNGAGDPLTPGYPANEYAYRRGIAEAVGLPSIPVHPIGYYDAQKLLEKMGGSAPPDSSWRGSLKVPYNVGPGFTGNFSTQKVKMHIHSTNEVTRIYNVIGTLRGAVEPDRYVILGGHRDSWVFGGIDPQSGAAVVHEIVRSFGTLKKEGWRPRRTILFASWDAEEFGLLGSTEWAEENSRLLQERGVAYINADSSIEGNYTLRVDCTPLMYSLVHNLTKELKSPDEGFEGKSLYESWTKKSPSPEFSGMPRISKLGSGNDFEVFFQRLGIASGRARYTKNWETNKFSGYPLYHSVYETYELVEKFYDPMFKYHLTVAQVRGGMVFELANSIVLPFDCRDYAVVLRKYADKIYSISMKHPQEMKTYSVSFDSLFSAVKNFTEIASKFSERLQDFDKSKHVIYAPSSHNKYAGESFPGIYDALFDIESKVDPSKAWGEVKRQIYVAAFTVQAAAETLSEVA

SEQ ID NO: 73947 - DNA, 2225 bp, Artificial Sequence
  derived and/or modified sequence
ccaccgcgcgccgcccgcgctggctgtgcgctggggcgctggtgctggcgggtggcttctttctcctcggcttcctcttcggttaaaagccaactgcaaggtctaatgactgcaggatctagctatccattgtttctggccgcctatgcgtgcactgggtgtctggcagagaggctggggtggtttataaaatcctccaatgaagctactaacattactccaaagcataatatgaaagcatttttggatgaattgaaagctgagaacatcaagaagttcttatataattttacacagataccacatttagcaggaacagaacaaaactttcagcttgcaaagcaaattcaatcccagtggaaagaatttggcctggattctgttgagctagcacattatgatgtcctgttgtcctacccaaataagactcatcccaactacatctcaataattaatgaagatggaaatgagattttcaacacatcattatttgaaccacctcctccaggatatgaaaatgtttcggatattgtaccacctttcagtgctttctctcctcaaggaatgccagagggcgatctagtgtatgttaactatgcacgaactgaagacttctttaaattggaacgggacatgaaaatcaattgctctgggaaaattgtaattgccagatatgggaaagttttcagaggaaataaggttaaaaatgcccagctggcaggggccaaaggagtcattctctactccgaccctgctgactactttgctcctggggtgaagtcctatccagatggttggaatcttcctggaggtggtgtccagcgtggaaatatcctaaatctgaatggtgcaggagaccctctcacaccaggttacccagcaaatgaatatgcttataggcgtggaattgcagaggctgttggtcttccaagtattcctgttcatccaattggatactatgatgcacagaagctcctagaaaaaatgggtggctcagcaccaccagatagcagctggagaggaagtctcaaagtgccctacaatgttggacctggctttactggaaacttttctacacaaaaagtcaagatgcacatccactctaccaatgaagtgacaagaatttacaatgtgataggtactctcagaggagcagtggaaccagacagatatgtcattctgggaggtcaccgggactcatgggtgtttggtggtattgaccctcagagtggagcagctgttgttcatgaaattgtgaggagctttggaacactgaaaaaggaagggtggagacctagaagaacaattttgtttgcaagctgggatgcagaagaatttggtcttcttggttctactgagtgggcagaggagaattcaagactccttcaagagcgtggcgtggcttatattaatgctgactcatctatagaaggaaactacactctgagagttgattgtacaccgctgatgtacagcttggtacacaacctaacaaaagagctgaaaagccctgatgaaggctttgaaggcaaatctctttatgaaagttggactaaaaaaagtccttccccagagttcagtggcatgcccaggataagcaaattgggatctggaaatgattttgaggtgttcttccaacgacttggaattgcttcaggcagagcacggtatactaaaaattgggaaacaaacaaattcagcggctatccactgtatcacagtgtctatgaaacatatgagttggtggaaaagttttatgatccaatgtttaaatatcacctcactgtggcccaggttcgaggagggatggtgtttgagctagccaattccatagtgctcccttttgattgtcgagattatgctgtagttttaagaaagtatgctgacaaaatctacagtatttctatgaaacatccacaggaaatgaagacatacagtgtatcatttgattcacttttttctgcagtaaagaattttacagaaattgcttccaagttcagtgagagactccaggactttgacaaaagcaagcatgtcatctatgctccaagcagccacaacaagtatgcaggggagtcattcccaggaatttatgatgctctgtttgatattgaaagcaaagtggacccttccaaggcctggggagaagtgaagagacagatttatgttgcagccttcacagtgcaggcagctgcagagactttgagtgaagtagcctaagagga

SEQ ID NO: 73948 - DNA, 2115 bp, Artificial Sequence
  derived and/or modified sequence
atgacggccggatctagttatccactttttctagcggcctatgcctgcactggctgtcttgccgaaaggcttggctggttcatcaaatcgtccaacgaagctaccaacattactccaaaacacaacatgaaggcgttcctggatgaactgaaggcagaaaatatcaaaaagttcctctacaactttactcagatccctcacctcgcgggcaccgagcagaatttccaactggcgaagcagattcagagtcagtggaaggagtttggacttgacagcgtggaattggcacactatgatgttttgcttagttacccgaacaagacacatccgaattacatcagtataataaatgaggatggcaacgagatatttaacacttccttgtttgaacctccccccccaggttacgagaatgtttccgatattgttccccccttcagcgcattttcaccacagggcatgcctgaaggagaccttgtgtacgtcaactacgcccgtactgaggacttctttaaactggagagggatatgaagatcaactgctcaggaaagattgtaatcgcgcgatacggcaaagtgttccgaggaaataaagtgaaaaatgcccagctcgcaggtgctaaaggcgtgatcctgtatagcgatccagctgactactttgctccgggcgttaagagctatccagatggatggaacctccctgggggcggcgttcaaagaggtaatatactaaatctgaacggcgctggggaccctctgaccccaggctatccagctaatgaatacgcctatagaagggggatagccgaagcagtggggctgccttccattccggttcacccgatcggatactacgatgcacaaaagttacttgagaagatggggggctctgctccacctgatagctcctggagggggagcctgaaagtgccctataatgttggcccagggttcacaggaaacttcagtacacagaaggttaaaatgcacatccatagcactaacgaagtgacgagaatttacaatgtgataggtacactgaggggggcagtggaaccggaccgctacgttattctgggagggcatcgcgatagctgggtcttcggcggtatagacccacagagtggagctgccgttgttcacgaaattgtgaggagtttcgggactctcaaaaaagagggttggcgacctcgacgaactatcctctttgcttcctgggacgccgaagaatttggcctactgggatctaccgagtgggccgaagagaatagtcggctgcttcaggagagaggagtggcctatattaacgccgatagttctatcgaaggcaattacacactgcgggtagactgtacccccctgatgtactctctagtgcataaccttaccaaagagttgaagagccccgacgaaggattcgaaggcaaaagcttatacgagagctggacaaagaaatcacccagccccgagtttagtggaatgccacggatatctaaactcggcagcggcaacgattttgaggtgttcttccaacgtctgggaatcgccagtgggagggcacgctacaccaagaattgggaaacaaacaaattctctggctatccactgtaccactctgtttatgaaacatacgaactcgttgaaaagttctacgaccccatgtttaagtaccacctgacagtcgcccaggtccgggggggtatggttttcgaacttgccaactctatcgtgcttccctttgattgtcgagattacgctgtcgtgctgaggaaatacgctgataagatctacagcatcagcatgaagcatccacaggagatgaagacgtattctgtgagcttcgacagcttgttctcagccgtgaagaacttcaccgaaattgcgtccaagttcagcgagagactgcaggattttgataagtccaagcacgttatttacgccccctcgagtcataataagtacgccggcgagtcctttccagggatatatgatgctctgttcgatatcgaatccaaggttgatccatccaaggcgtggggagaagtcaaaagacaaatctacgtggcggcatttaccgtgcaggctgcagccgaaacattgtcggaggtagcttag

SEQ ID NO: 73949 - DNA, 2115 bp, Artificial Sequence
  derived and/or modified sequence
atgacagctggcagcagctaccccctcttcctggccgcctatgcctgcaccggctgcctggccgagcggctgggctggttcatcaagagcagcaatgaggccaccaacatcacccccaagcacaacatgaaggccttcctggatgagctgaaggccgagaacatcaagaagttcctgtacaacttcacccagatcccccacctggccggcacagagcagaacttccagctggccaagcagatccagagccagtggaaggagtttggcctggacagcgtggagctggcccactatgatgtgctgctgagctaccccaacaagacccaccccaactacatcagcatcatcaatgaagatggaaatgagatcttcaacaccagcctgtttgagcccccacctcctggctatgaaaatgtgtctgacatcgtgccccccttcagcgccttcagcccccagggcatgcctgagggggacctggtgtatgtgaactatgccaggacagaggacttcttcaagctggagcgggacatgaagatcaactgcagcggcaagatcgtgattgcccgctatggcaaggtgttccggggcaacaaggtgaagaatgcccagctggccggggccaagggcgtcatcctgtacagcgaccctgctgactactttgcccctggggtgaagagctacccagatggctggaacctgcccggcggcggcgtgcagaggggcaacatcctgaacctgaatggagctggggaccccctgaccccaggctacccagccaatgaatatgcctacagaagaggaattgctgaggccgtgggcctgcccagcatccctgtgcaccccatcggctactatgatgcccagaagctgctggagaagatgggcggcagcgcccccccagacagctcctggaggggcagcctgaaggtgccctacaacgtgggccctggcttcaccggcaacttcagcacccagaaggtgaagatgcacatccacagcaccaatgaggtgacccgcatctacaacgtcatcggcaccctgcggggagctgtggagccagaccgctacgtgatcctgggcggccaccgggacagctgggtgtttggaggcatcgacccccagagcggggctgctgtggtgcatgaaattgtgcgcagctttggcaccctgaagaaggagggctggaggcccaggaggaccatcctgtttgcctcctgggatgctgaggagtttggcctgctgggcagcacagagtgggccgaggagaacagccggctgctgcaggagcggggcgtggcctacatcaatgctgacagcagcattgagggcaactacaccctgcgggtggactgcacccccctgatgtacagcctggtgcacaacctgaccaaggagctgaagagcccagatgagggctttgagggcaagagcctgtatgaatcctggaccaagaagagccccagccctgagttcagcggcatgccccgcatcagcaagctgggcagcggaaatgactttgaggtgttcttccagaggctgggcatcgccagcggccgggcccgctacaccaagaactgggagaccaacaagttcagcggctaccccctgtaccacagcgtgtatgagacctatgagctggtggagaagttctatgaccccatgttcaagtaccacctgactgtggcccaggtgcggggcggcatggtgtttgagctggccaacagcatcgtgctgccctttgactgccgggactatgctgtggtgctgaggaaatatgctgacaagatctacagcatctccatgaagcacccccaggagatgaagacctacagcgtgtcctttgacagcctcttctctgctgtgaagaacttcacagaaattgccagcaagttcagcgagcggctgcaggactttgacaagagcaagcacgtgatctatgcccccagcagccacaacaagtatgctggggagagcttccctggcatctatgatgccctgtttgatattgagagcaaggtggaccccagcaaggcctggggcgaggtgaagaggcagatctacgtggccgccttcaccgtgcaggccgctgctgagaccctgtctgaggtggcctag

SEQ ID NO: 73950 - DNA, 2115 bp, Artificial Sequence
  derived and/or modified sequence
atgaccgccggcagcagctaccccctgttcctggccgcctacgcctgcacgggctgtcttgcagagcgattaggctggttcattaaatcatccaacgaggctacgaacattactcccaaacacaacatgaaggctttcctggacgaacttaaagctgagaacatcaaaaaattcctttacaacttcacccagattcctcacctcgccggcacagaacagaattttcagctggccaaacagattcaatctcagtggaaagaatttggtctcgactccgtggagcttgctcactatgatgtgctgttgtcctatcctaacaagacacatcctaactacatcagtattattaacgaggacgggaatgagatttttaacacttcactctttgaacccccaccccctggctatgaaaacgtgagtgatattgtgccacccttcagtgccttctcccctcagggcatgccggagggagacttggtctacgtgaactacgcccgtaccgaagattttttcaagctagagcgggacatgaagataaactgctcagggaaaatcgtaattgcgcgctatggtaaagtctttagaggtaacaaagtcaaaaatgctcagttagctggagctaaaggagtcatcctgtactccgaccccgctgactatttcgcccctggcgtcaagtcttatcctgatggctggaaccttccggggggtggagtccagagaggaaatatactgaacctgaacggggccggagaccccctgacacccggctaccccgccaatgagtatgcctataggcgcggtattgctgaggctgtcgggctgccctccattcctgttcacccaattggctattacgacgctcaaaagctcctggagaaaatgggtggctccgctcctcctgatagtagctggcggggctctctaaaggtgccatacaatgtagggccagggttcaccgggaacttcagcacccagaaggttaagatgcatattcactcgacaaacgaggttacaaggatatataacgtgatcggcaccctgcgcggcgcggtggaaccagacagatatgttattctgggtggacaccgggattcatgggtctttggtggaatcgacccgcagtcaggtgctgccgttgtccacgagatcgtccgctcattcggtaccctgaaaaaggaaggatggcgacccaggagaacaatcctcttcgctagttgggacgctgaagagttcgggctgctgggttctaccgagtgggctgaagaaaatagccgtttgttacaagaaagaggagtcgcatacatcaatgctgatagttctatagaaggaaactataccctgcgagttgattgtaccccgctaatgtattcgctcgttcacaacttgaccaaggagctgaagagccccgatgagggatttgaggggaagtccctgtacgagagctggactaaaaagtctccctcaccagagtttagcggaatgccccggatatctaagctggggtccggtaacgacttcgaggtgttctttcaacgtctcgggatcgcctctggccgagctcgctacactaaaaactgggagaccaacaaattttcagggtatcccctctatcactcagtttacgaaacctatgagctcgtggaaaaattctacgatcctatgtttaagtatcatttgactgtggcccaggtccgcggggggatggtgttcgagctggcaaactccatagtgctgcccttcgattgcagggactatgccgtagtgttgcgaaagtatgcggacaagatttacagcatcagtatgaagcacccacaggaaatgaaaacatactcagtttcattcgattcgctgtttagtgcagtgaaaaatttcacagaaattgcatccaagtttagtgaaagactgcaggactttgacaagagtaaacatgtgatctatgcgccctcttcacacaataaatatgccggagagtccttcccaggcatttacgatgccctgttcgatattgagtctaaggttgacccaagcaaggcttggggtgaagtgaagaggcagatctacgtggctgccttcactgtgcaagctgccgcagagactctttcggaggtggcctag

SEQ ID NO: 73951 - DNA, 2115 bp, Artificial Sequence
  derived and/or modified sequence
atgaccgctggaagtagctaccccctctttctggcagcctacgcctgcacaggatgtctggctgagcgactcggttggttcataaaatcatctaacgaagccacaaacatcactcctaagcacaatatgaaagccttcctggatgagctcaaagccgagaacatcaagaagttcctttacaacttcacccagatccctcacctcgctggaaccgagcagaactttcagctagctaaacaaattcagagtcagtggaaggagttcggccttgactccgtagaactagcgcactacgatgtgctgctgtcctatcctaataagactcatcctaattacatctctatcattaacgaagacgggaacgaaatctttaatacttcactgttcgagcctcctccacctggttacgagaacgtatctgatatcgtgcctccctttagcgcattctcaccccaggggatgcctgaaggagatctcgtttacgttaactatgccagaaccgaggacttttttaaactggagcgggatatgaagatcaactgtagcgggaaaattgtgatagctaggtatggtaaagtctttaggggcaacaaagtgaaaaatgcccaacttgcaggagccaaaggggtgatcctatacagtgatcctgctgattatttcgcccctggcgtcaagagttacccggacggatggaacttgcccggtggcggtgttcagcgaggcaacatccttaacttgaacggcgctggggacccactgacgccaggctacccagccaacgaatatgcctacagaagaggcatcgcagaggctgtgggcttgccttccattccagtccatcccattggctattatgacgcgcagaagctgttagaaaaaatgggtgggtccgcgcctcccgattcatcctggaggggatcactgaaggttccttataatgtgggtccaggttttaccgggaatttcagcacccaaaaagtcaaaatgcacatccactctacgaacgaagtgacacgcatttacaacgtcattggaacattacgcggtgccgttgaaccggacaggtatgttatcctcggcggtcatagggactcctgggttttcggtggcatcgacccgcaatccggcgctgccgtggtgcacgagatcgtgcgcagcttcggcactctcaaaaaagagggatggaggcctaggagaacgattctcttcgcaagctgggatgccgaggagttcggcctgctcggatctacagagtgggcagaggagaatagtcggctattacaggaacggggagtggcctacataaatgccgactcatctattgaaggcaattacacactgcgtgtcgattgcacaccactgatgtacagcctcgttcacaatctgactaaagagctcaaatctccggacgaaggtttcgagggtaaaagcctatacgagtcctggacaaagaaatcgcctagcccggaatttagcggaatgccgagaatctcaaagctgggcagtgggaatgattttgaggttttttttcagcgcctgggcatagctagcggaagggccaggtacaccaaaaactgggagaccaacaagtttagtgggtatccactctatcactcagtctacgagacgtatgaactggtcgaaaaattttatgacccaatgtttaaatatcatctaactgtagcccaggtgaggggcggtatggtgttcgagctggcgaactccatcgtgctgcctttcgactgcagggattatgcggttgtgttgaggaagtacgcggataagatctatagcataagcatgaagcaccctcaggaaatgaagacctacagtgtcagctttgactctttattctccgcagtgaagaattttactgagattgccagcaaattttctgaaagactgcaagactttgacaagtcaaaacatgtgatttacgcgccttcatctcacaacaagtacgcaggggagagctttccagggatctacgatgcattgttcgacatcgagtcaaaggtcgaccctagcaaagcttggggggaagtcaagaggcagatttacgtggcagccttcactgttcaagccgctgctgaaaccctgtctgaggttgcctag

SEQ ID NO: 73952 - DNA, 2115 bp, Artificial Sequence
  derived and/or modified sequence
atgaccgccggcagcagctaccccctgttcctggccgcctacgcctgcaccggctgcctggccgagagactgggctggttcatcaagagcagcaacgaggccaccaacatcacccccaagcacaacatgaaggccttcctggacgagctgaaggccgagaacatcaagaagttcctgtacaacttcacccagatcccccacctggccggcaccgagcagaacttccagctggccaagcagatccagagccagtggaaggagttcggcctggacagcgtggagctggcccactacgacgtgctgctgagctaccccaacaagacccaccccaactacatcagcatcatcaacgaggacggcaacgagatcttcaacaccagcctgttcgagccccccccccccggctacgagaacgtgagcgacatcgtgccccccttcagcgccttcagcccccagggcatgcccgagggcgacctggtgtacgtgaactacgccagaaccgaggacttcttcaagctggagagagacatgaagatcaactgcagcggcaagatcgtgatcgccagatacggcaaggtgttcagaggcaacaaggtgaagaacgcccagctggccggcgccaagggcgtgatcctgtacagcgaccccgccgactacttcgcccccggcgtgaagagctaccccgacggctggaacctgcccggcggcggcgtgcagagaggcaacatcctgaacctgaacggcgccggcgaccccctgacccccggctaccccgccaacgagtacgcctacagaagaggcatcgccgaggccgtgggcctgcccagcatccccgtgcaccccatcggctactacgacgcccagaagctgctggagaagatgggcggcagcgccccccccgacagcagctggagaggcagcctgaaggtgccctacaacgtgggccccggcttcaccggcaacttcagcacccagaaggtgaagatgcacatccacagcaccaacgaggtgaccagaatctacaacgtgatcggcaccctgagaggcgccgtggagcccgacagatacgtgatcctgggcggccacagagacagctgggtgttcggcggcatcgacccccagagcggcgccgccgtggtgcacgagatcgtgagaagcttcggcaccctgaagaaggagggctggagacccagaagaaccatcctgttcgccagctgggacgccgaggagttcggcctgctgggcagcaccgagtgggccgaggagaacagcagactgctgcaggagagaggcgtggcctacatcaacgccgacagcagcatcgagggcaactacaccctgagagtggactgcacccccctgatgtacagcctggtgcacaacctgaccaaggagctgaagagccccgacgagggcttcgagggcaagagcctgtacgagagctggaccaagaagagccccagccccgagttcagcggcatgcccagaatcagcaagctgggcagcggcaacgacttcgaggtgttcttccagagactgggcatcgccagcggcagagccagatacaccaagaactgggagaccaacaagttcagcggctaccccctgtaccacagcgtgtacgagacctacgagctggtggagaagttctacgaccccatgttcaagtaccacctgaccgtggcccaggtgagaggcggcatggtgttcgagctggccaacagcatcgtgctgcccttcgactgcagagactacgccgtggtgctgagaaagtacgccgacaagatctacagcatcagcatgaagcacccccaggagatgaagacctacagcgtgagcttcgacagcctgttcagcgccgtgaagaacttcaccgagatcgccagcaagttcagcgagagactgcaggacttcgacaagagcaagcacgtgatctacgcccccagcagccacaacaagtacgccggcgagagcttccccggcatctacgacgccctgttcgacatcgagagcaaggtggaccccagcaaggcctggggcgaggtgaagagacagatctacgtggccgccttcaccgtgcaggccgccgccgagaccctgagcgaggtggcctag

SEQ ID NO: 73953 - protein, 442 aa, Artificial Sequence
  derived and/or modified sequence
MGGSAPPDSSWRGSLKVPYNVGPGFTGNFSTQKVKMHIHSTNEVTRIYNVIGTLRGAVEPDRYVILGGHRDSWVFGGIDPQSGAAVVHEIVRSFGTLKKEGWRPRRTILFASWDAEEFGLLGSTEWAEENSRLLQERGVAYINADSSIEGNYTLRVDCTPLMYSLVHNLTKELKSPDEGFEGKSLYESWTKKSPSPEFSGMPRISKLGSGNDFEVFFQRLGIASGRARYTKNWETNKFSGYPLYHSVYETYELVEKFYDPMFKYHLTVAQVRGGMVFELANSIVLPFDCRDYAVVLRKYADKIYSISMKHPQEMKTYSVSFDSLFSAVKNFTEIASKFSERLQDFDKSNPIVLRMMNDQLMFLERAFIDPLGLPDRPFYRHVIYAPSSHNKYAGESFPGIYDALFDIESKVDPSKAWGEVKRQIYVAAFTVQAAAETLSEVA

SEQ ID NO: 73954 - protein, 970 aa, Artificial Sequence
  derived and/or modified sequence
MAQLERSAISGFSSKSRRNSFAYDVKREVYNEETFQQEHKRKASSSGNMNINITTFRHHVQCRCSWHRFLRCVLTIFPFLEWMCMYRLKDWLLGDLLAGISVGLVQVPQGLTLSLLARQLIPPLNIAYAAFCSSVIYVIFGSCHQMSIGSFFLVSALLINVLKVSPFNNGQLVMGSFVKNEFSAPSYLMGYNKSLSVVATTTFLTGIIQLIMGVLGLGFIATYLPESAMSAYLAAVALHIMLSQLTFIFGIMISFHAGPISFFYDIINYCVALPKANSTSILVFLTVVVALRINKCIRISFNQYPIEFPMELFLIIGFTVIANKISMATETSQTLIDMIPYSFLLPVTPDFSLLPKIILQAFSLSLVSSFLLIFLGKKIASLHNYSVNSNQDLIAIGLCNVVSSFFRSCVFTGAIARTIIQDKSGGRQQFASLVGAGVMLLLMVKMGHFFYTLPNAVLAGIILSNVIPYLETISNLPSLWRQDQYDCALWMMTFSSSIFLGLDIGLIISVVSAFFITTVRSHRAKILLLGQIPNTNIYRSINDYREIITIPGVKIFQCCSSITFVNVYYLKHKLLKEVDMVKVPLKEEEIFSLFNSSDTNLQGGKICRCFCNCDDLEPLPRILYTERFENKLDPEASSINLIHCSHFESMNTSQTASEDQVPYTVSSVSQKNQGQQYEEVEEVWLPNNSSRNSSPGLPDVAESQGRRSLIPYSDASLLPSVHTIILDFSMVHYVDSRGLVVLRQICNAFQNANILILIAGCHSSIVRAFERNDFFDAGITKTQLFLSVHDAVLFALSRKVIGSSELSIDESETVIRETYSETDKNDNSRYKMSSSFLGSQKNVSPGFIKIQQPVEEESELDLELESEQEAGLGLDLDLDRELEPEMEPKAETETKTQTEMEPQPETEPEMEPNPKSRPRAHTFPQQRYWPMYHPSMASTQSQTQTRTWSVERRRHPMDSYSPEGNSNEDV

SEQ ID NO: 73955 - DNA, 2913 bp, Artificial Sequence
  derived and/or modified sequence
atggcccagctggagagaagcgccatcagcggcttcagcagcaagagcagaagaaacagcttcgcctacgacgtgaagagagaggtgtacaacgaggagaccttccagcaggagcacaagagaaaggccagcagcagcggcaacatgaacatcaacatcaccaccttcagacaccacgtgcagtgcagatgcagctggcacagattcctgagatgcgtgctgaccatcttccccttcctggagtggatgtgcatgtacagactgaaggactggctgctgggcgacctgctggccggcatcagcgtgggcctggtgcaggtgccccagggcctgaccctgagcctgctggccagacagctgatcccccccctgaacatcgcctacgccgccttctgcagcagcgtgatctacgtgatcttcggcagctgccaccagatgagcatcggcagcttcttcctggtgagcgccctgctgatcaacgtgctgaaggtgagccccttcaacaacggccagctggtgatgggcagcttcgtgaagaacgagttcagcgcccccagctacctgatgggctacaacaagagcctgagcgtggtggccaccaccaccttcctgaccggcatcatccagctgatcatgggcgtgctgggcctgggcttcatcgccacctacctgcccgagagcgccatgagcgcctacctggccgccgtggccctgcacatcatgctgagccagctgaccttcatcttcggcatcatgatcagcttccacgccggccccatcagcttcttctacgacatcatcaactactgcgtggccctgcccaaggccaacagcaccagcatcctggtgttcctgaccgtggtggtggccctgagaatcaacaagtgcatcagaatcagcttcaaccagtaccccatcgagttccccatggagctgttcctgatcatcggcttcaccgtgatcgccaacaagatcagcatggccaccgagaccagccagaccctgatcgacatgatcccctacagcttcctgctgcccgtgacccccgacttcagcctgctgcccaagatcatcctgcaggccttcagcctgagcctggtgagcagcttcctgctgatcttcctgggcaagaagatcgccagcctgcacaactacagcgtgaacagcaaccaggacctgatcgccatcggcctgtgcaacgtggtgagcagcttcttcagaagctgcgtgttcaccggcgccatcgccagaaccatcatccaggacaagagcggcggcagacagcagttcgccagcctggtgggcgccggcgtgatgctgctgctgatggtgaagatgggccacttcttctacaccctgcccaacgccgtgctggccggcatcatcctgagcaacgtgatcccctacctggagaccatcagcaacctgcccagcctgtggagacaggaccagtacgactgcgccctgtggatgatgaccttcagcagcagcatcttcctgggcctggacatcggcctgatcatcagcgtggtgagcgccttcttcatcaccaccgtgagaagccacagagccaagatcctgctgctgggccagatccccaacaccaacatctacagaagcatcaacgactacagagagatcatcaccatccccggcgtgaagatcttccagtgctgcagcagcatcaccttcgtgaacgtgtactacctgaagcacaagctgctgaaggaggtggacatggtgaaggtgcccctgaaggaggaggagatcttcagcctgttcaacagcagcgacaccaacctgcagggcggcaagatctgcagatgcttctgcaactgcgacgacctggagcccctgcccagaatcctgtacaccgagagattcgagaacaagctggaccccgaggccagcagcatcaacctgatccactgcagccacttcgagagcatgaacaccagccagaccgccagcgaggaccaggtgccctacaccgtgagcagcgtgagccagaagaaccagggccagcagtacgaggaggtggaggaggtgtggctgcccaacaacagcagcagaaacagcagccccggcctgcccgacgtggccgagagccagggcagaagaagcctgatcccctacagcgacgccagcctgctgcccagcgtgcacaccatcatcctggacttcagcatggtgcactacgtggacagcagaggcctggtggtgctgagacagatctgcaacgccttccagaacgccaacatcctgatcctgatcgccggctgccacagcagcatcgtgagagccttcgagagaaacgacttcttcgacgccggcatcaccaagacccagctgttcctgagcgtgcacgacgccgtgctgttcgccctgagcagaaaggtgatcggcagcagcgagctgagcatcgacgagagcgagaccgtgatcagagagacctacagcgagaccgacaagaacgacaacagcagatacaagatgagcagcagcttcctgggcagccagaagaacgtgagccccggcttcatcaagatccagcagcccgtggaggaggagagcgagctggacctggagctggagagcgagcaggaggccggcctgggcctggacctggacctggacagagagctggagcccgagatggagcccaaggccgagaccgagaccaagacccagaccgagatggagccccagcccgagaccgagcccgagatggagcccaaccccaagagcagacccagagcccacaccttcccccagcagagatactggcccatgtaccaccccagcatggccagcacccagagccagacccagaccagaacctggagcgtggagagaagaagacaccccatggacagctacagccccgagggcaacagcaacgaggacgtgtag

SEQ ID NO: 73956 - DNA, 2913 bp, Artificial Sequence
  derived and/or modified sequence
atggcccagctagaacgatccgccatttctggattcagttcaaaatctcgaagaaatagctttgcttatgacgtgaagcgcgaagtatacaacgaagagacttttcagcaggagcataaaaggaaggcctcctcatctggcaacatgaacattaacattaccactttcagacaccatgtccagtgccggtgctcttggcataggtttctacgatgcgtgctcacaatcttcccctttcttgaatggatgtgcatgtaccgacttaaagattggttgctcggtgacctcctggcagggatctcagttggactggtgcaggttcctcagggcctcacactgagtttactggcgcggcagttgataccacccctgaatattgcctacgctgccttttgtagcagtgtcatctatgtgatcttcggaagctgtcatcagatgtctatcggttcatttttcctcgtgtctgccctcctcattaacgtgctcaaagtcagcccgttcaacaatgggcaattggttatgggcagttttgtgaaaaacgaattttcagcaccctcctatttgatgggatacaacaagtcgttgagtgtcgtggctacgactacatttctaactggaataatacagctcattatgggagtgctgggcctggggtttatcgctacttacctacccgagagcgccatgagcgcatatctcgcagctgtggcgcttcacattatgctctcacagctgacgttcatctttggtattatgatttcttttcatgccggacctatatcctttttttatgatattattaattattgtgtcgcgctgcccaaggcaaacagcacctctatcttggttttcctcacagtggtagtcgccttaaggatcaacaagtgtattagaattagttttaatcagtatccaattgagtttcctatggagctgttcctgatcatcgggtttaccgttattgcaaataaaatctctatggctactgaaaccagtcagacactgatcgatatgatcccctattcattcctcttgccggttacccccgatttctctctgctgcccaaaatcatactccaggcattcagcctgagtttagtctcaagctttcttctgatcttccttggaaagaagattgcatctctgcacaattactctgtgaacagtaaccaggacctcattgcaatagggttatgtaacgtggtgtccagcttttttcgctcatgcgtgtttacaggagctatcgccagaacaattatccaagataaatcagggggaagacagcaattcgccagtttagtgggggccggcgtgatgctgctgttgatggttaaaatgggccactttttctacacactgccaaacgctgtactggctggtattatcctgtctaacgtgattccgtacctggaaacaatatccaacctccctagcctctggcgccaggaccagtacgattgcgctctctggatgatgaccttctcttcatctatcttcctaggtctcgatattggtttgattatcagcgtggtaagtgcattctttataacgacagtgcgcagccaccgggccaagattctgcttctggggcagatacctaacactaacatttatagatccataaacgactacagggagatcatcactattcctggagtgaagatctttcagtgttgtagcagtatcacatttgtaaacgtttattaccttaagcacaaactgctcaaggaagtggacatggttaaggtcccactgaaagaggaagagatcttcagtctgtttaacagtagcgacacaaatttacagggcggaaagatatgccgctgcttttgcaattgtgacgatttagagcctctgccccggattctatacacggaaaggttcgagaataagctggatccagaagcttcatcaataaacttaatacattgctctcacttcgaatctatgaacacctcccaaactgccagcgaggaccaggtgccctacacagtctcatcagtctcgcagaagaatcagggccagcagtacgaggaggtcgaagaagtatggcttcctaacaacagctccagaaacagttcccccggattgcccgatgtcgctgagagccaagggcgaagatcccttatcccctactctgacgccagcctcctcccgtctgtacatacaattattttggatttctctatggtccactatgttgatagtcgtgggctggtggtgctgcgccagatttgtaatgcctttcaaaacgctaatatattaatattaattgcaggatgtcacagctctatcgtgagggccttcgagcggaacgatttctttgatgccgggattaccaaaacgcagttattcttgagcgtccacgacgccgtcctgtttgcactcagccgaaaggtgatcggatcttcagaactatcaatcgacgagagcgaaacagttattagggagacttactcagagactgataaaaatgacaattcccggtacaaaatgtcgagctcttttttagggagccaaaagaatgtgtctccaggtttcatcaaaatacagcagccagtagaagaagagtctgagctggacctcgaacttgagtcggaacaggaggcggggctgggacttgatcttgacctggatcgggaactcgaacctgagatggagccaaaagcagagaccgagacgaaaacacagactgagatggaacctcaaccggagactgagcccgagatggaacctaatcccaaatcacggccccgggcccacacctttccgcagcagcggtactggcctatgtaccaccctagcatggcttccactcaaagccagacccaaacacgcacatggagcgtggaacgacgacgccatcctatggatagttattctccagagggcaatagtaatgaagatgtctag

SEQ ID NO: 73957 - DNA, 2913 bp, Artificial Sequence
  derived and/or modified sequence
atggcccaactggagagaagcgcaattagcggcttttcttctaagtcaaggcgcaattcatttgcctacgatgtgaagcgcgaagtatataacgaggagactttccagcaggaacataaacgaaaagcttcctccagtggaaatatgaacatcaatatcacaacctttagacaccacgtacagtgccgctgctcctggcatcgcttcctccgatgcgttctgaccatatttcctttcctcgagtggatgtgcatgtaccgcctcaaagactggctgctcggggacctcctggccggcatctctgtgggattggtgcaggtgccgcagggactgaccttgtcccttctggcgcgtcagttgattcctccgctcaatatcgcctatgccgcattctgttcgagtgtcatatatgtcatttttgggagctgccaccagatgtcaatcggaagcttcttcctcgtatctgctcttctgataaatgtcctgaaggtgtccccctttaacaacggccaactggtcatggggtccttcgttaagaacgagttctctgcaccgagctacctcatgggatataacaagtctcttagtgtcgttgctactacaaccttcttaaccggaatcatccaactgattatgggggtgttgggtttagggtttattgccacttatctccctgaatctgcaatgtctgcctaccttgccgctgtggccctgcatattatgctgagccagctgaccttcattttcgggataatgatcagtttccacgccggcccaataagctttttctatgatatcattaactactgtgtggccctgccgaaggctaatagtacctcaattctggtctttttaacagtggtcgtggccctgaggataaataaatgtattcggatttccttcaaccagtatccaattgaatttcctatggaattgtttctgatcattggcttcacggtgatagccaacaagatatccatggcaaccgagactagccaaacgctgatcgatatgataccctacagctttctcctccccgtgacccccgactttagcctcctccctaagattatcctgcaggcttttagcctgtcgctggtatccagttttctattaatcttcctcgggaagaagatcgctagtctacacaattacagtgtgaactcaaatcaggatttgatcgccatcggcttgtgcaatgtcgttagctcattttttagatcctgcgtgtttacaggtgccatcgcccgtactatcatacaggataaaagtggtgggcgacagcagttcgcctcacttgtgggtgcaggagtgatgctcttactcatggtaaagatgggccactttttctacactctcccaaacgcagttctggcaggtatcattctatcaaatgtgataccatatttggagactatcagcaatctgcctagtctttggcggcaggaccaatatgattgtgccttatggatgatgactttctcatcctctatttttctggggctcgacatcggactgattatctccgtcgtgtcggccttctttatcactaccgtgcggtcccaccgcgctaagatcctgctgttaggccagattcccaacacaaacatctaccgcagcataaatgactacagggaaatcatcactatacctggagtgaagatcttccagtgttgcagttcgatcaccttcgtgaatgtgtactaccttaagcataaactgctgaaggaggtggatatggtgaaggtgccattgaaagaagaagagattttcagtctctttaattcctctgataccaacctgcagggcggaaagatttgcaggtgcttctgcaactgcgacgacctcgaacccttgccacggatcttgtataccgaaaggttcgaaaataagctcgacccagaggccagctccatcaatctgattcactgctctcatttcgagtccatgaatactagccaaaccgctagcgaggaccaagtgccctataccgtgtccagtgtgtctcagaagaaccaaggacagcagtatgaagaggtggaggaagtgtggctgccaaataattccagccgcaattcttcaccgggactacctgacgtcgcagagagccagggtcggaggtctttaatcccatattccgacgctagtctgctgcccagcgtgcacacgattatcttggatttttctatggtgcattacgtagacagtaggggtctcgtagtgctcagacagatctgtaacgcttttcagaacgccaacattctgattctgatcgcgggatgccattcatctatcgttagagcatttgagcggaatgacttcttcgacgccgggataactaagactcaactgtttctcagcgtacacgacgctgtactattcgccttatcccgaaaagtgatcggctcttctgaactgtctatcgatgagagcgaaactgtgatcagggagacctattcagagacggacaagaatgataacagcagatacaagatgagcagttcctttctaggaagccaaaaaaatgtatcccctggattcataaaaatccagcagccggtggaagaggaaagtgaactggatctcgaactcgagtcggaacaggaggccggactgggtctcgacctggacctggatagagaactggagcctgagatggaaccaaaggcagagactgaaacaaaaacccagacggagatggagccgcagccggaaactgagcctgagatggagcccaacccaaaatccaggccccgggctcacacatttccgcagcaaaggtattggccaatgtaccacccctctatggcctccactcagtctcaaacccagactaggacctggagtgttgaaaggaggcgccaccctatggattcctactccccagaaggcaattccaacgaagacgtatag

SEQ ID NO: 73958 - DNA, 2913 bp, Artificial Sequence
  derived and/or modified sequence
atggcccagctggagaggtctgccatcagcggcttcagcagcaagagcagaagaaacagctttgcctatgatgtgaagcgggaggtgtacaatgaggagaccttccagcaggagcacaagaggaaggccagcagcagcggcaacatgaacatcaacatcaccaccttccgccaccacgtgcagtgccgctgctcctggcaccgcttcctgcgctgtgtgctgaccatcttccccttcctggagtggatgtgcatgtaccgcctgaaggactggctgctgggggacctgctggccggcatctctgtgggcctggtgcaggtgccccagggcctgaccctgagcctgctggcccggcagctgatcccccccctgaacatcgcctatgctgccttctgcagcagcgtcatctacgtgatcttcggcagctgccaccagatgagcatcggcagcttcttcctggtgtctgccctgctgatcaacgtgctgaaggtgagccccttcaacaacggccagctggtgatgggcagctttgtgaagaatgagttcagcgcccccagctacctgatgggctacaacaagagcctgtctgtggtggccaccaccaccttcctgaccggcatcatccagctgatcatgggcgtgctgggcctgggcttcatcgccacctacctgcctgagagcgccatgtctgcctacctggccgctgtggccctgcacatcatgctgagccagctgaccttcatcttcggcatcatgatctccttccacgccggccccatctccttcttctatgacatcatcaactactgtgtggccctgcccaaggccaacagcaccagcatcctggtgttcctgactgtggtggtggccctgcgcatcaacaagtgcatccgcatctccttcaaccagtaccccatcgagttccccatggagctgttcctgatcatcggcttcaccgtgattgccaacaagatctccatggccacagagaccagccagaccctgattgacatgatcccctacagcttcctgctgcctgtgaccccagacttcagcctgctgcccaagatcatcctgcaggccttcagcctgagcctggtgtcctccttcctgctgatcttcctgggcaagaagatcgccagcctgcacaactacagcgtgaacagcaaccaggacctgattgccatcggcctgtgcaatgtggtgagcagcttcttccgcagctgtgtgttcaccggggccatcgcccggaccatcatccaggacaagagcggcggccggcagcagtttgccagcctggtgggcgctggggtgatgctgctgctgatggtgaagatgggccacttcttctacaccctgcccaatgctgtgctggccggcatcatcctgagcaatgtcatcccctacctggagaccatcagcaacctgcccagcctgtggaggcaggaccagtatgactgtgccctgtggatgatgaccttcagcagcagcatcttcctgggcctggacatcggcctcatcatctctgtggtgtctgccttcttcatcaccaccgtgcgcagccaccgggccaagatcctgctgctgggccagatccccaacaccaacatctaccgcagcatcaatgactaccgggagatcatcaccatccctggggtgaagatcttccagtgctgcagcagcatcacctttgtgaatgtgtactacctgaagcacaagctgctgaaggaggtggacatggtgaaggtgcccctgaaggaggaggagatcttcagcctcttcaacagcagtgacaccaacctgcagggcggcaagatctgccgctgcttctgcaactgtgatgacctggagcccctgccccgcatcctgtacacagaaagatttgagaacaagctggaccctgaggccagcagcatcaacctgatccactgcagccactttgagagcatgaacaccagccagacagccagcgaggaccaggtgccctacacagtgtcctctgtgtcccagaagaaccagggccagcagtatgaggaggtggaggaggtgtggctgcccaacaacagcagcaggaacagcagccctggcctgcctgatgtggccgagagccagggccgccgcagcctcatcccctacagtgatgccagcctgctgcccagcgtgcacaccatcatcctggacttctccatggtgcactacgtggacagccggggcctggtggtgctgcggcagatctgcaatgccttccagaatgccaacatcctgatcctgattgctggctgccacagcagcatcgtgcgggcctttgaaagaaatgacttctttgatgctggcatcaccaagacccagctgttcctgtctgtgcatgatgctgtgctgtttgccctgagcaggaaggtgattggcagcagcgagctgagcattgatgaaagtgaaacagtcatccgggagacctacagcgagacagacaagaatgacaacagccgctacaagatgagcagcagcttcctgggcagccagaagaatgtgtccccaggcttcatcaagatccagcagcctgtggaggaggagagcgagctggacctggagctggagagcgagcaggaggccggcctgggcctggacctggacctggaccgggagctggagcctgagatggagcccaaggccgagacagagaccaagacccagacagagatggagccccagcctgagacagagcctgagatggagcccaaccccaagagccggccccgggcccacaccttcccccagcagcgctactggcccatgtaccaccccagcatggccagcacccagagccagacccagaccaggacctggagcgtggagaggagaagacaccccatggacagctacagccctgagggcaacagcaatgaagatgtgtag

SEQ ID NO: 73959 - DNA, 2913 bp, Artificial Sequence
  derived and/or modified sequence
atggcccagctggagcggagcgccatcagcggcttcagcagcaagtcacgacggaactcctttgcttatgatgtgaaacgggaggtttacaatgaggagacatttcaacaagaacacaaaaggaaggcatcttcgagcgggaacatgaacataaacattaccacttttcggcaccacgtccagtgccggtgtagctggcatagatttctccgatgcgtgctgactatatttccattcctcgagtggatgtgcatgtatcggctgaaggactggctcctaggtgatctgctggctgggatttccgtggggctggtgcaggttccacagggtttgaccctgagcctcctggccagacaactcattcccccattgaatatcgcgtatgccgctttttgttcctcagtgatttatgtcatattcggttcatgtcatcagatgtctatcggctccttttttttagtgtcagctctcctgatcaatgtgctgaaggtgagtccctttaataacggacagctggtcatgggaagttttgtgaagaacgagttcagtgcaccatcttacttaatgggctacaacaaatctctgtccgtggtggccaccacgacatttctgacaggcattattcagctgataatgggagtgttgggcctgggtttcattgcaacatacctccccgaaagtgctatgagcgcctacctggcagcggtggcattgcacataatgctgtcacaactgacctttatctttgggattatgatctcctttcacgctggccctattagtttcttctatgacatcatcaattactgcgtggccctgcctaaggccaattctacttctatcctcgtgttcctgacagttgtggttgctctccgtataaacaaatgcatcagaatttcctttaatcaatacccaatcgaatttccaatggagctttttttgatcatcggcttcaccgtcatcgcgaacaagattagcatggctaccgagacctcgcagaccctcatcgatatgattccttacagctttttattaccggtaactccggactttagcctcctgccgaagattatcttacaagcattctccctctctctggtaagctccttcctgctcatttttctcggaaaaaagatcgcctcactccataactatagtgtgaactccaaccaggatctgattgcaattggtctgtgcaatgtggtttcttctttcttccggagctgtgtgtttacaggggccattgccagaaccattattcaggacaaatccggcggaaggcagcagtttgcgtctctggtcggagccggcgtgatgttgctactgatggtgaaaatgggccatttcttttacaccctgcccaacgcagtgttagccgggatcattttgtcaaatgttatcccctacctggaaacaatctccaacctcccttcattgtggcgccaggaccagtatgattgcgcattatggatgatgactttttctagtagcatcttcctgggccttgatattgggttgatcatctcggtggtaagtgcctttttcatcaccaccgtgcgttcccaccgggctaaaattctattgcttggacagatcccaaacaccaatatttataggagtatcaacgactatagggagatcattacaattcccggggtgaagatcttccagtgttgttcctcaatcacgtttgtgaacgtgtattacctcaaacacaaacttctgaaggaggtggacatggtaaaagttccactgaaagaagaggagattttcagcctgttcaacagcagtgatacaaatctgcaagggggcaaaatttgtcgctgtttctgtaattgcgatgatttagaaccactcccaaggatactgtataccgagaggtttgagaataaactcgatccagaagcttcctcaattaacttaatacactgtagtcacttcgaatcgatgaatacgtctcagaccgccagcgaggatcaggtgccttacaccgtgtcaagcgtttctcagaagaaccagggccagcaatacgaggaggtggaggaagtgtggctgccgaataacagctcccgcaacagtagccctgggctcccggatgttgctgaaagccagggacgcaggagcctcattccttactccgatgcgtccctgctcccttcggtgcacacgatcattttagacttcagtatggtgcactacgttgactcccgcggccttgtcgtcctgcggcaaatctgtaacgcgtttcaaaatgccaatatacttattttgattgccggttgccattctagcatcgtccgtgctttcgaacgcaatgattttttcgatgccggtattaccaaaacccagctattcttgagcgttcacgatgcagtgttattcgcgcttagccgcaaggttatcggctcctctgaactttcaattgacgagtccgagactgtgatccgggagacatactcggaaactgacaaaaatgataattcccggtataagatgagttccagtttcttgggatctcagaaaaacgtaagccccgggtttataaaaatccagcagccagttgaagaggagagcgagcttgatcttgagttagagtccgagcaagaggcaggattggggctcgatctcgatcttgatcgggaactcgaacctgaaatggagcctaaggccgaaaccgaaactaaaacacagacagagatggagccccagcccgaaactgaacccgagatggagccaaaccctaagtcgcgaccccgtgctcatacatttccccagcagcgatactggcctatgtatcacccgagcatggcctcgacccaaagtcagacccagacacgcacatggtcggtcgagaggcggcgacatcctatggattcctatagcccagagggtaatagtaatgaggatgtatag

SEQ ID NO: 73960 - DNA, 2913 bp, Artificial Sequence
  derived and/or modified sequence
atggcccagctggagcggagcgccatcagcggcttcagcagcaagtcacgaagaaattcttttgcctacgacgtgaagagagaggtttacaacgaggagacgttccagcaggagcataagaggaaggcgtcgagcagcgggaatatgaacatcaacattaccacctttcggcaccacgtgcaatgccggtgctcttggcaccggtttctcaggtgcgtgttgaccatttttccttttctggaatggatgtgtatgtatagactaaaggattggttactgggcgacctcctggccggaatatccgttggcctggtacaggtgcctcagggccttacactgagcctgcttgcacgccagctgattcctcctctcaacatcgcctacgcagctttttgcagcagcgtcatctacgtgatctttgggagctgccatcaaatgtcaatcggaagcttctttctggtcagcgccctgcttataaatgttttgaaggtatccccttttaacaacgggcagctggttatgggcagctttgtgaagaatgaattttcagcaccaagttacctaatgggttataacaagtccctgagcgtggtcgctaccacaacatttcttaccgggatcattcagctgatcatgggtgtgttggggctggggtttatcgcaacttacctaccagagtctgcgatgtccgcttaccttgccgccgtggccctgcacatcatgttgtctcagctgaccttcatcttcgggatcatgatctctttccatgcggggcctatttctttcttttacgacatcattaactactgcgtcgcacttcctaaggctaatagcaccagcatcctcgttttcttgacggtggttgtggctctgcgcatcaacaagtgtattcgtatctctttcaatcagtatccaatagagttcccaatggagcttttcttaatcatcggttttacggtcatcgcaaacaagatttctatggcaactgagacctcacagaccctgatcgacatgattccatacagctttctactgccagtcaccccagactttagcctgttgcctaagataatcctacaagctttcagtctctctctcgtcagttcatttctcttaatatttttgggcaaaaagatcgcctcactgcataattactcagttaactccaatcaagacctaatagctatcgggctctgtaatgtcgtgagtagcttcttccggagctgcgtcttcacaggcgccatagcacggacgattatccaggataagtctgggggccggcaacaattcgcctcacttgtcggtgcgggagtgatgctcctgttgatggtcaaaatgggacattttttctatacactacctaatgcagtcctagccggtatcattctttccaacgtcattccatacttagaaacaattagtaacctgcctagcctgtggaggcaagaccaatatgattgcgctctgtggatgatgacattttcctcttcaatttttctgggattggatatcggcctgatcattagtgtggtgagcgcattcttcatcacaacagtcagatcacatagggctaagattctactactgggacagatccctaatactaacatttacagatccatcaacgactatcgggagatcatcacgatccctggggttaaaatatttcagtgttgctctagtatcaccttcgttaacgtgtattaccttaagcataagctcctgaaggaggtggatatggtaaaagtgcctctgaaggaagaggagattttttcactttttaacagttctgatacgaatttgcagggaggcaaaatatgccgatgcttctgtaattgcgatgacctcgagccacttcctaggatcctgtatacagagcggtttgagaacaagctggatcccgaagccagttccataaacctgattcattgctcccattttgaaagtatgaacacgtctcaaacggcaagcgaggaccaagttccatatacagtttcatctgtgagccaaaaaaaccagggccagcagtacgaggaggtagaggaagtatggctgcctaataatagcagccgcaattcaagcccaggcctgccagacgttgcagagtcacagggacgcaggtccttaattccatattccgacgccagcctgctgccttcagtccatactatcatcttggattttagcatggtgcactatgtcgatagcaggggcttggtggtgttgagacaaatctgtaatgcattccagaacgcaaatattctaatccttattgctggctgccattcttctatcgtaagggccttcgagcgaaatgacttttttgacgcagggataacaaagacccaattatttctctccgtccacgatgctgtcctttttgcattatcgcgtaaagtgatcggatcctcagagctgtctatcgacgagagcgaaacggttatccgagaaacctacagcgagactgataagaatgacaatagcaggtataaaatgtcgagctcattcctgggatcacagaagaacgtttctcctggattcatcaaaatccagcagcctgtagaggaggagtctgaactggatttggagttggaaagcgagcaggaagccggcctcggcctggacttggatttggatcgcgaactggagccagagatggaacccaaggcagagacggagaccaaaacacaaacagagatggaaccacagccagaaaccgagcccgaaatggaacctaatccgaagtcacggcctcgagcccacaccttcccccaacagaggtactggcctatgtaccacccgagcatggcctctactcaatcccagacccaaacccggacatggagtgtcgaacgcaggcggcaccctatggactcttattcccctgaggggaactcgaacgaggatgtgtag

SEQ ID NO: 73961 - DNA, 2913 bp, Artificial Sequence
  derived and/or modified sequence
atggcccagctggagcgctcagccattagtggctttagcagtaaatctcggcgaaactcctttgcctacgacgtgaagagagaagtgtacaacgaggagaccttccaacaggaacataagagaaaagcaagttcctccggaaacatgaatattaatatcactacattcaggcaccatgtccagtgcaggtgctcatggcaccgctttctgcgctgcgtcctgacgatttttccatttttggagtggatgtgcatgtacagattaaaagattggctcctgggtgatctgttggccggtatatccgtaggcctggttcaagtcccacaggggttgactctgagtttactagcccgacaacttatcccccctttgaacatcgcttacgctgccttctgttcctccgtgatctacgtgattttcgggtcatgccaccagatgtccatagggtccttcttcctggtttcggcactcctcatcaatgtgcttaaggtgtctcccttcaacaacgggcaactggttatggggagtttcgtgaagaatgagttcagcgctcccagctatttgatgggctataacaagagccttagcgtcgtggccaccactacctttcttacgggcattatacagttgatcatgggagtacttgggctgggcttcattgccacttacctgcctgagagcgctatgtccgcatacctggccgctgtcgccttacacatcatgttgagtcagttaacctttatctttgggatcatgatttcctttcacgctggcccaatttcctttttttatgacatcatcaattattgtgtcgctttaccaaaagccaattcaacttctatcctggtgttcctcactgtggttgtggccttgagaattaacaagtgcatccgcatttccttcaaccagtaccccattgagtttccaatggagctctttcttattattggctttaccgtcatcgcaaacaaaatctccatggctaccgagacgagccagacattaattgatatgatcccttattccttccttctccccgtgaccccggatttctcacttctccctaagattatactgcaagcttttagcctttcactggtatcatcatttctcctcatttttcttggcaagaaaattgcttctctccacaactacagtgtgaattctaatcaagatctaattgcgattggtctgtgtaacgtcgtgagttccttttttcgcagctgtgtgtttactggggctattgcaaggacaataatccaggataagagtggcggtaggcagcaatttgcatcactggtaggcgctggggtgatgttactgttaatggtcaagatggggcatttcttttatacgctacccaatgctgtcctcgccggtattatcctctccaatgtgatcccgtatctggagactatttctaatctccctagcctgtggcgtcaagaccagtatgattgcgctctctggatgatgactttctcaagcagtatttttctggggctagacatcgggctgattatttctgtagtttcagcattcttcattacgacggtgaggtcacaccgcgctaagatcctgctcctgggacagatacctaatactaatatctatcgctcaattaatgattacagggagatcattacaattccgggagtcaagatctttcagtgctgcagttcaattacgttcgtcaatgtgtactacctcaaacataaactgctgaaagaagtggatatggtgaaagtgcccctcaaagaagaagaaatctttagcttatttaacagttcagacaccaaccttcaagggggtaaaatctgtagatgcttctgcaattgcgacgatctcgagcctttacctagaatactttatactgaacgctttgaaaataaactcgatcctgaggccagttctataaacctgattcactgtagtcactttgaatcaatgaacacttcccagaccgcgtccgaagatcaggtcccctatacagtgtcaagcgtctcccagaaaaatcagggccagcagtacgaggaggtcgaggaggtttggctgcctaataacagctctagaaactcttcaccaggcctccccgatgtggccgagagtcagggtcggaggtccctgataccatatagcgacgcctcgctcctcccctccgttcacactattattctggatttcagcatggtccattacgtcgattcacgcggtctggtcgtgctgcgccaaatttgtaatgcattccagaatgccaatatcctcatccttatagctgggtgccatagttcaatcgtgcgtgccttcgaacgtaacgacttctttgatgccggtattaccaaaacccagctttttctttccgtgcatgacgccgtgctgttcgcactgtcccgtaaggtcattggttctagcgaactgagcatagatgaaagtgaaaccgtgattagggagacctattctgaaaccgacaagaatgacaactcccggtacaagatgagttcctcttttctcgggagccagaaaaacgtttcacctggcttcattaaaatacagcagccagtggaggaggaaagtgagctcgatctcgaacttgagagcgagcaggaggccggactgggcctggatttagacctagaccgggaattagaaccggaaatggagcccaaggccgagaccgagacaaagacccaaaccgaaatggagccacaacccgaaaccgagccagaaatggaacccaatcctaagtcgcgacccagagcacacacctttcctcaacagcggtactggccgatgtatcaccccagtatggcatcaacccagagccagactcagaccagaacctggtccgtggagcgacgcaggcaccccatggattcttacagcccggaaggtaatagtaatgaggacgtgtag

SEQ ID NO: 73962 - DNA, 2913 bp, Artificial Sequence
  derived and/or modified sequence
atggctcagttggaacgttccgcgatcagcggattttcatcgaagagccgcagaaacagttttgcatacgacgtgaagcgcgaagtgtacaacgaggagactttccagcaagaacataaacggaaagcctcatcatctggcaacatgaatataaatattacaacgtttcgccaccatgtacagtgccgttgctcctggcatagattcctgaggtgcgtgctcacgatatttccttttctggagtggatgtgcatgtaccgcctcaaagactggcttctgggtgatttactagctggcattagtgtgggccttgtgcaagtcccccagggtctgactctgagcctgctggctcgacagctgatcccaccgctgaacatagcctacgctgccttctgttccagtgtaatctatgtcatttttggaagctgccaccagatgtccataggctccttcttcttggtttcagccttgctgatcaacgtgctgaaggtaagcccattcaacaacggacaactggttatggggtcatttgtaaagaacgagtttagcgccccttcctatctgatgggttacaataagagtttgagcgttgtggcaacaactacatttctgacaggtattatccaattaattatgggggtcctgggtttaggattcatcgctacttacctgcctgagagcgccatgagcgcatatctcgccgcagtggcactgcacataatgctgtcacaactgacttttatcttcggtatcatgatttcatttcatgctgggccaatctccttcttttatgacatcatcaattactgcgtagcactgcctaaagctaacagtacaagcatcctggtatttctcaccgtcgtagtggcactgcgcataaacaaatgtatccgtattagtttcaaccagtatccaatcgagttcccgatggagctgtttctgatcattgggttcaccgtgatcgccaacaagatcagcatggctaccgagacatcccagactctgattgatatgatcccatatagttttctgctccctgtcacccccgatttttccctattgcccaagataatactgcaggccttttctctctctcttgtctcatcgtttctgctgatctttctgggcaagaaaattgcttcccttcataattacagcgttaatagcaatcaagacctcattgcgataggcctgtgcaatgtagtctcctcctttttcagatcttgcgtctttacaggcgctattgcacgaactataatccaggataaatctggcggaaggcaacagtttgcaagcctcgtgggcgcaggtgtgatgctgctgctcatggttaagatgggccattttttctataccctgcctaatgcagtgttggccggaattattctatccaacgtgatcccctacttggaaacaatctccaaccttccttctttgtggagacaggaccagtacgactgtgccctgtggatgatgacattcagttcctcaatttttcttggattggacatcggattgatcatcagcgtggtgagcgccttctttatcaccacggtacgctcccacagggctaagatcttgctgctgggtcagattccaaataccaatatttatagaagtattaacgattacagagagattattacgatacctggcgttaaaatcttccaatgctgctcctctatcactttcgtgaatgtatactacttaaaacataagctgttaaaggaggtcgacatggttaaagtccctcttaaagaagaggaaattttctccctttttaactccagtgacactaatctgcaaggtggtaagatctgcagatgcttctgtaactgtgatgacctggagcccctccctcgcatcctgtatactgagcgctttgagaataaactggatcctgaagcctccagtattaacctgattcactgtagtcacttcgagtccatgaatacatcccagaccgcttccgaagaccaggtcccctacaccgtatccagcgtctcacagaaaaatcaaggccagcaatatgaagaagtggaggaggtctggcttcccaacaacagctcacggaactcctcacccggactgccagacgtggccgaaagtcagggccgtcgctcattgatcccttacagtgacgcaagcctgctgccttcagtccatactataatcctcgacttcagcatggtgcattacgtggattcgagagggctcgtggtgctgcgtcagatctgcaacgccttccagaacgccaatatccttattctgatcgccggttgtcatagctcaattgttcgtgcttttgaacgcaatgacttctttgacgcgggtatcactaagacccaactgtttctgtccgtgcatgatgccgtactgttcgccctcagtcggaaagttataggcagctcggagttgtccatagacgagagcgaaactgtaattcgcgagacatattcagagactgataagaacgataattcacgctataaaatgtcttccagctttctcggaagtcagaagaacgtgagccctgggttcataaaaattcagcagcccgttgaagaggagtccgaacttgatctggagttggagtctgagcaggaggctggactcggactcgacctcgatcttgaccgcgaactagaaccggagatggagcctaaggcagagacggaaactaaaacccagacagagatggagccacagcctgagacagagccagaaatggagccgaatccgaaaagtcggcctcgcgctcacaccttcccacagcagcggtattggccaatgtaccacccttcaatggccagtacacaatcacagacgcaaacaaggacatggtcagttgaacgcaggcgccaccctatggatagttatagtccagaggggaactcaaacgaagacgtctag

SEQ ID NO: 73963 - DNA, 3463 bp, Artificial Sequence
  derived and/or modified sequence
ggtatccgcgtccgcagcgccgccagccaggcgagagccgtgtgggatcccagcgcccgcactcccgcccccgccaaggagccaggtgagccgctgctgggagacgcctgggcgccgggggctgcaggtcccagggcgggggctgcgtccgtcaccggcaggtacccaggaatggcacaactagagaggagcgccatctctggcttcagctctaagtccaggcgaaactcattcgcatatgatgttaagcgtgaagtatacaatgaggagacctttcaacaggaacacaaaaggaaggcctcctcttctgggaacatgaacatcaacatcaccaccttcagacaccacgtccagtgccgctgctcatggcacaggttcctacgatgcgtgcttacaatctttcccttcctagaatggatgtgtatgtatcgattaaaggattggcttctgggagacttacttgctggtataagtgttggccttgtgcaagttccccaaggcctgacacttagtttgctggcaaggcaactgattcctcctctcaacatcgcttatgcagctttctgttcttcggtaatctatgtaatttttggatcgtgtcatcaaatgtccattggttccttcttcctggtgagtgctctgctgatcaacgttctgaaagtgagcccattcaacaacggtcaactggtcatgggatctttcgtcaagaatgagttttcggccccctcctaccttatgggctataataaatccttgagtgtggtggcaaccacaacttttctgactgggattattcagctaataatgggcgtattgggtttgggcttcattgccacttaccttccggagtctgcaatgagtgcttacctggctgctgtggcacttcatatcatgctgtcccagctgactttcatctttgggattatgattagtttccatgccggtcccatctccttcttctatgacataattaattactgtgtagctctcccaaaagcgaattccaccagcattctagtatttctaactgttgttgttgctctgcgaatcaacaaatgtatcagaatttctttcaatcagtatcccattgagtttcccatggaattatttctgattattggcttcactgtgattgcaaacaagataagcatggccacagaaaccagccagacgcttattgacatgattccttatagctttctgcttcctgtaacaccagatttcagccttcttcccaagataattttacaagccttctccttatctttggtgagctcctttctgctcatatttctgggcaagaagattgccagtcttcacaattacagtgtcaattccaaccaggatttaatagccatcggcctttgcaatgtcgtcagttcatttttcagatcttgtgtgtttactggtgctattgctaggactattatccaggataaatctggaggaagacaacagtttgcatctctggtaggcgcaggtgtgatgctgctcctgatggtgaagatgggacactttttctacacactgccaaatgctgtgctggctggtattattctgagcaacgtcattccctaccttgaaaccatttctaacctacccagcctgtggaggcaggaccaatatgactgtgctctttggatgatgacattctcatcttcaattttcctgggactggacattggactaattatctcagtagtttctgctttcttcatcaccactgttcgttcacacagagctaagattcttctcctgggtcaaatccctaacaccaacatttatagaagcatcaatgattatcgggagatcatcaccattcctggggtgaaaatcttccagtgctgcagctcaattacatttgtaaatgtttactacctaaagcataagctgttaaaagaggttgatatggtaaaggtgcctcttaaagaagaagaaattttcagcttgtttaattcaagtgacaccaatctacaaggaggaaagatttgcaggtgtttctgcaactgtgatgatctggagccgctgcccaggattctttacacagagcgatttgaaaataaactggatcccgaagcatcctccattaacctgattcactgctcacattttgagagcatgaacacaagccaaactgcatccgaagaccaagtgccatacacagtatcgtccgtgtctcagaaaaatcaagggcaacagtatgaggaggtggaggaagtttggcttcctaataactcatcaagaaacagctcaccaggactgcctgatgtggcggaaagccaggggaggagatcactcatcccttactcagatgcgtctctactgcccagtgtccacaccatcatcctggatttctccatggtacactacgtggattcacgggggttagtcgtattaagacagatatgcaatgcctttcaaaacgccaacattttgatactcattgcagggtgtcactcttccatagtcagggcatttgagaggaatgatttctttgacgctggcatcaccaagacccagctgttcctcagcgttcacgacgccgtgctgtttgccttgtcaaggaaggtcataggctcctctgagttaagcatcgatgaatccgagacagtgatacgggaaacctactcagaaacagacaagaatgacaattcaagatataaaatgagcagcagttttctaggaagccaaaaaaatgtaagtccaggcttcatcaagatccaacagcctgtagaagaggagtcggagttggatttggagctggaatcagaacaagaggctgggctgggtctggacctagacctggatcgggagctggagcctgaaatggagcccaaggctgagaccgagaccaagacccagaccgagatggagccccagcctgagactgagcctgagatggagcccaaccccaaatctaggccaagagctcacacttttcctcagcagcgttactggcctatgtatcatccgtctatggcttccacccagtctcagactcagactcggacatggtcagtggagaggagacgccatcctatggattcatactcaccagagggcaacagcaatgaagatgtctaggagatgaactagaaataaggggtcagataatgctggcaaatcctcctacccaaaaaggggtcaattgtccagagacctagactggatacgaactagcagtacttccttcctgactgtgactcctactacctgccagccttcttccttgctctgcgctgggatcatactcccaaatcacattactaaatgccaacaattatctctgaattccctatccaggctcccctcatttcaccttcagcatatattctagtcatgaatttccttcttcacacaccccacatctctgggctttgtgccagaccatctctaacttaatcctctcatccctgttcccctttctccaaagagatgaagctcaaataaaatgtataactct

SEQ ID NO: 73964 - DNA, 3653 bp, Artificial Sequence
  derived and/or modified sequence
tgttcaggacacgaggcctggcaccaaataggccctcgatcaagaatagcaaaacctcggagagagaaggagccttggtatacaggtttaccaaataccaaggggatcccacgactcaggtatgaggagggcgacccaggtaccactttcctggctccctagcccagctgctcatgctcctcttcctcgtcccctcccccactctcatctcctcagcccgcccggaacgcccgcgggctaggccacaacggctcgggaaccgccgccggtatccgcgtccgcagcgccgccagccaggcgagagccgtgtgggatcccagcgcccgcactcccgcccccgccaaggagccaggaatggcacaactagagaggagcgccatctctggcttcagctctaagtccaggcgaaactcattcgcatatgatgttaagcgtgaagtatacaatgaggagacctttcaacaggaacacaaaaggaaggcctcctcttctgggaacatgaacatcaacatcaccaccttcagacaccacgtccagtgccgctgctcatggcacaggttcctacgatgcgtgcttacaatctttcccttcctagaatggatgtgtatgtatcgattaaaggattggcttctgggagacttacttgctggtataagtgttggccttgtgcaagttccccaaggcctgacacttagtttgctggcaaggcaactgattcctcctctcaacatcgcttatgcagctttctgttcttcggtaatctatgtaatttttggatcgtgtcatcaaatgtccattggttccttcttcctggtgagtgctctgctgatcaacgttctgaaagtgagcccattcaacaacggtcaactggtcatgggatctttcgtcaagaatgagttttcggccccctcctaccttatgggctataataaatccttgagtgtggtggcaaccacaacttttctgactgggattattcagctaataatgggcgtattgggtttgggcttcattgccacttaccttccggagtctgcaatgagtgcttacctggctgctgtggcacttcatatcatgctgtcccagctgactttcatctttgggattatgattagtttccatgccggtcccatctccttcttctatgacataattaattactgtgtagctctcccaaaagcgaattccaccagcattctagtatttctaactgttgttgttgctctgcgaatcaacaaatgtatcagaatttctttcaatcagtatcccattgagtttcccatggaattatttctgattattggcttcactgtgattgcaaacaagataagcatggccacagaaaccagccagacgcttattgacatgattccttatagctttctgcttcctgtaacaccagatttcagccttcttcccaagataattttacaagccttctccttatctttggtgagctcctttctgctcatatttctgggcaagaagattgccagtcttcacaattacagtgtcaattccaaccaggatttaatagccatcggcctttgcaatgtcgtcagttcatttttcagatcttgtgtgtttactggtgctattgctaggactattatccaggataaatctggaggaagacaacagtttgcatctctggtaggcgcaggtgtgatgctgctcctgatggtgaagatgggacactttttctacacactgccaaatgctgtgctggctggtattattctgagcaacgtcattccctaccttgaaaccatttctaacctacccagcctgtggaggcaggaccaatatgactgtgctctttggatgatgacattctcatcttcaattttcctgggactggacattggactaattatctcagtagtttctgctttcttcatcaccactgttcgttcacacagagctaagattcttctcctgggtcaaatccctaacaccaacatttatagaagcatcaatgattatcgggagatcatcaccattcctggggtgaaaatcttccagtgctgcagctcaattacatttgtaaatgtttactacctaaagcataagctgttaaaagaggttgatatggtaaaggtgcctcttaaagaagaagaaattttcagcttgtttaattcaagtgacaccaatctacaaggaggaaagatttgcaggtgtttctgcaactgtgatgatctggagccgctgcccaggattctttacacagagcgatttgaaaataaactggatcccgaagcatcctccattaacctgattcactgctcacattttgagagcatgaacacaagccaaactgcatccgaagaccaagtgccatacacagtatcgtccgtgtctcagaaaaatcaagggcaacagtatgaggaggtggaggaagtttggcttcctaataactcatcaagaaacagctcaccaggactgcctgatgtggcggaaagccaggggaggagatcactcatcccttactcagatgcgtctctactgcccagtgtccacaccatcatcctggatttctccatggtacactacgtggattcacgggggttagtcgtattaagacagatatgcaatgcctttcaaaacgccaacattttgatactcattgcagggtgtcactcttccatagtcagggcatttgagaggaatgatttctttgacgctggcatcaccaagacccagctgttcctcagcgttcacgacgccgtgctgtttgccttgtcaaggaaggtcataggctcctctgagttaagcatcgatgaatccgagacagtgatacgggaaacctactcagaaacagacaagaatgacaattcaagatataaaatgagcagcagttttctaggaagccaaaaaaatgtaagtccaggcttcatcaagatccaacagcctgtagaagaggagtcggagttggatttggagctggaatcagaacaagaggctgggctgggtctggacctagacctggatcgggagctggagcctgaaatggagcccaaggctgagaccgagaccaagacccagaccgagatggagccccagcctgagactgagcctgagatggagcccaaccccaaatctaggccaagagctcacacttttcctcagcagcgttactggcctatgtatcatccgtctatggcttccacccagtctcagactcagactcggacatggtcagtggagaggagacgccatcctatggattcatactcaccagagggcaacagcaatgaagatgtctaggagatgaactagaaataaggggtcagataatgctggcaaatcctcctacccaaaaaggggtcaattgtccagagacctagactggatacgaactagcagtacttccttcctgactgtgactcctactacctgccagccttcttccttgctctgcgctgggatcatactcccaaatcacattactaaatgccaacaattatctctgaattccctatccaggctcccctcatttcaccttcagcatatattctagtcatgaatttccttcttcacacaccccacatctctgggctttgtgccagaccatctctaacttaatcctctcatccctgttcccctttctccaaagagatgaagctcaaataaaatgtataactctagtaaca

SEQ ID NO: 73965 - protein, 153 aa, Artificial Sequence
  derived and/or modified sequence
MKEAGQMQNLESARAGRSVSTQTGSMTGQIPRLSKVNLFTLLSLWMELFPAEAQRQKSQKNEEGKHGPLGDNEERTRVSTDKRQVKRTGLVVVKNMKIVGLHCSSEDLHAGQIALIKHGSRLKNCDLYFSRKPCSACLKMIVNGLLEAAKMPR

SEQ ID NO: 73966 - DNA, 462 bp, Artificial Sequence
  derived and/or modified sequence
atgaaggaggccggccagatgcagaacctggagagcgccagagccggcagaagcgtgagcacccagaccggcagcatgaccggccagatccccagactgagcaaggtgaacctgttcaccctgctgagcctgtggatggagctgttccccgccgaggcccagagacagaagagccagaagaacgaggagggcaagcacggccccctgggcgacaacgaggagagaaccagagtgagcaccgacaagagacaggtgaagagaaccggcctggtggtggtgaagaacatgaagatcgtgggcctgcactgcagcagcgaggacctgcacgccggccagatcgccctgatcaagcacggcagcagactgaagaactgcgacctgtacttcagcagaaagccctgcagcgcctgcctgaagatgatcgtgaacggcctgctggaggccgccaagatgcccagatag

SEQ ID NO: 73967 - DNA, 589 bp, Artificial Sequence
  derived and/or modified sequence
atctggctgcgcctagtgggccgttgccttacagttgctgagaggaggcgagaggcgggggcgctagggccgagatcatgtctgactgggagaggtttccttggcagcagaggacgctaggtttgggatgaaagaagctgggcagatgcaaaatctggagagcgcgagggccgggcggtcagtcagcacccagactggcagcatgaccggtcagataccaaggctttctaaagtcaaccttttcactctgctcagcctctggatggagctctttccagcagaagcccagcggcaaaaatctcagaaaaatgaagagggaaagcatggacccttaggagataatgaagagaggaccagagtatctactgacaaaagacaggtaaagagaactggtcttgtggtggtgaaaaacatgaaaattgttggtctccactgttctagtgaagatttacatgccgggcagattgctcttattaaacatgggtcaaggctgaaaaactgtgatctttatttttccagaaaaccatgttctgcttgtttgaaaatgattgtaaatggattactggaagcagctaagatgcctagatga

SEQ ID NO: 73968 - DNA, 462 bp, Artificial Sequence
  derived and/or modified sequence
atgaaggaagccggacaaatgcagaatcttgagtccgcacgggccggcagatccgtctccactcagaccggctccatgacaggacaaatacctcggctgtcgaaagtgaacctgtttaccttgctgtctctctggatggagctcttccccgccgaggcacagcgacagaaatcccaaaagaatgaggagggtaaacacggacccctaggagataatgaagagagaacacgggtgagcaccgataaacgccaggttaagcggacaggtttggtggttgtcaaaaatatgaaaatcgtcggtctgcactgttcttctgaggacttgcacgccgggcagatcgctctgatcaagcatggtagcagactaaaaaactgcgacctatacttttcaagaaagccctgcagtgcttgcctgaaaatgatagtgaacggactgctggaagccgccaaaatgccaagatag

SEQ ID NO: 73969 - DNA, 462 bp, Artificial Sequence
  derived and/or modified sequence
atgaaggaggccggccagatgcagaacctggagagcgcccgggccggccgctctgtgtccacccagacaggctccatgacaggccagatcccccggctgagcaaggtgaacctcttcaccctgctgagcctgtggatggagctgtttcctgctgaggcccagaggcagaagagccagaagaatgaggagggcaagcacggccccctgggggacaatgaggagaggaccagggtgtccacagacaagaggcaggtgaagaggacaggcctggtggtggtgaagaacatgaagatcgtgggcctgcactgcagcagcgaggacctgcacgccggccagatcgccctgatcaagcacggcagccggctgaagaactgtgacctgtacttcagcaggaagccctgcagcgcctgcctgaagatgattgtgaatggcctgctggaggccgccaagatgcccaggtag

SEQ ID NO: 73970 - DNA, 462 bp, Artificial Sequence
  derived and/or modified sequence
atgaaggaggccggccagatgcagaacctggagagcgcccgggccggcaggagcgtctctacccagaccggctccatgaccggtcaaattcctagactatctaaagtgaatctgtttacgctcctgagcctttggatggagttgtttcctgctgaggcacaacgacaaaagtcacagaagaatgaggaggggaagcatggccccctgggcgataatgaggagaggacgcgagtctccacggataaacgccaagttaaacggaccggcctggttgtggttaagaatatgaagatcgtaggcttacactgctcatctgaggatctgcatgcgggccaaattgctctcatcaaacacggaagtcggctgaaaaattgtgatctgtacttcagcagaaagccctgctctgcctgtttgaaaatgatcgtaaacggccttttggaggccgcaaaaatgccccgctag

SEQ ID NO: 73971 - DNA, 462 bp, Artificial Sequence
  derived and/or modified sequence
atgaaagaggcgggtcagatgcaaaatctggagagtgcccgtgcaggaagaagtgttagcactcagacaggaagtatgacgggccagattcctcgcctttctaaggttaatctttttactttgctgtcactgtggatggaactctttccagccgaggctcagcggcaaaagtcccagaaaaatgaggaaggtaaacacggccctttaggcgataatgaggagagaacccgcgtcagtaccgataaaagacaggtaaagcggaccggacttgtcgtggtgaaaaatatgaaaatcgtggggctgcattgtagctcagaggatctgcacgcgggacaaattgccctcataaagcatgggagccgcctgaaaaactgcgacctctatttttccagaaaaccctgcagcgcctgcctgaagatgattgtgaatggattactcgaggctgctaagatgccaaggtag

SEQ ID NO: 73972 - protein, 329 aa, Artificial Sequence
  derived and/or modified sequence
MTCNMANALASATCERCKGGFAPAEKIVNSNGELYHEQCFVCAQCFQQFPEGLFYEFEGRKYCEHDFQMLFAPCCHQCGEFIIGRVIKAMNNSWHPECFRCDLCQEVLADIGFVKNAGRHLCRPCHNREKARGLGKYICQKCHAIIDEQPLIFKNDPYHPDHFNCANCGKELTADARELKGELYCLPCHDKMGVPICGACRRPIEGRVVNAMGKQWHVEHFVCAKCEKPFLGHRHYERKGLAYCETHYNQLFGDVCFHCNRVIEGDVVSALNKAWCVNCFACSTCNTKLTLKNKFVEFDMKPVCKKCYEKFPLELKKRLKKLAETLGRK

SEQ ID NO: 73973 - DNA, 990 bp, Artificial Sequence
  derived and/or modified sequence
atgacctgcaacatggccaacgccctggccagcgccacctgcgagagatgcaagggcggcttcgcccccgccgagaagatcgtgaacagcaacggcgagctgtaccacgagcagtgcttcgtgtgcgcccagtgcttccagcagttccccgagggcctgttctacgagttcgagggcagaaagtactgcgagcacgacttccagatgctgttcgccccctgctgccaccagtgcggcgagttcatcatcggcagagtgatcaaggccatgaacaacagctggcaccccgagtgcttcagatgcgacctgtgccaggaggtgctggccgacatcggcttcgtgaagaacgccggcagacacctgtgcagaccctgccacaacagagagaaggccagaggcctgggcaagtacatctgccagaagtgccacgccatcatcgacgagcagcccctgatcttcaagaacgacccctaccaccccgaccacttcaactgcgccaactgcggcaaggagctgaccgccgacgccagagagctgaagggcgagctgtactgcctgccctgccacgacaagatgggcgtgcccatctgcggcgcctgcagaagacccatcgagggcagagtggtgaacgccatgggcaagcagtggcacgtggagcacttcgtgtgcgccaagtgcgagaagcccttcctgggccacagacactacgagagaaagggcctggcctactgcgagacccactacaaccagctgttcggcgacgtgtgcttccactgcaacagagtgatcgagggcgacgtggtgagcgccctgaacaaggcctggtgcgtgaactgcttcgcctgcagcacctgcaacaccaagctgaccctgaagaacaagttcgtggagttcgacatgaagcccgtgtgcaagaagtgctacgagaagttccccctggagctgaagaagagactgaagaagctggccgagaccctgggcagaaagtag

SEQ ID NO: 73974 - DNA, 990 bp, Artificial Sequence
  derived and/or modified sequence
atgacctgcaatatggctaatgccttagcatctgccacatgcgagcgctgtaagggagggttcgcaccggctgagaaaattgtaaatagtaacggtgagctatatcatgagcagtgcttcgtgtgtgcgcagtgcttccagcagttccccgagggacttttttacgaatttgaaggaagaaaatactgcgagcacgattttcagatgcttttcgcgccatgttgccatcagtgtggggagttcatcatcgggcgagtcatcaaagcaatgaacaattcatggcatcccgagtgttttaggtgtgacctctgccaagaggtcttggccgatatcgggtttgtgaagaatgcaggcaggcacctatgtcgaccttgccacaatcgggagaaagccagaggtctagggaaatatatctgtcagaagtgtcatgccattatcgacgaacagccactgatctttaagaacgatccatatcatccagaccacttcaattgcgcaaactgcggtaaagagttgaccgctgatgccagagaactgaaaggcgaattatattgtttgccatgtcatgacaagatgggagtgccaatatgtggtgcctgtcgtcgacccatcgaggggagagtggtcaacgcaatgggaaaacaatggcatgtcgagcacttcgtgtgcgccaagtgtgaaaagccgtttctgggtcatcgccactacgaaaggaagggtttagcttactgtgagacacactacaaccaactctttggtgacgtgtgcttccattgcaatcgcgttatcgagggggacgttgtgagtgcactaaataaagcctggtgcgtgaattgcttcgcgtgcagtacttgtaatacaaaattgaccctgaagaataagtttgttgagttcgacatgaaacctgtttgtaagaaatgttacgaaaaattccccctggagctgaagaagcgactgaaaaaactggctgaaactcttggaagaaagtag

SEQ ID NO: 73975 - DNA, 4392 bp, Artificial Sequence
  derived and/or modified sequence
actcttgaattaagagaaggggagctggaggtggctcaggtagagtgcgtaggtttgcagaactgggcctgtgtgtgtaaagtgactaaggcaaaggagtggaagtttgagagaagtttaagagaagaaatggacatgattgcctaaatcagccaaacacaggcaacatggccaacgccctggccagcgccacttgcgagcgctgcaagggcggctttgcgcccgctgagaagatcgtgaacagtaatggggagctgtaccatgagcagtgtttcgtgtgcgctcagtgcttccagcagttcccagaaggactcttctatgagtttgaaggaagaaagtactgtgaacatgactttcagatgctctttgccccttgctgtcatcagtgtggtgaattcatcattggccgagttatcaaagccatgaataacagctggcatccggagtgcttccgctgtgacctctgccaggaagttctggcagatatcgggtttgtcaagaatgctgggagacacctgtgtcgcccctgtcataatcgtgagaaagccagaggccttgggaaatacatctgccagaaatgccatgctatcatcgatgagcagcctctgatattcaagaacgacccctaccatccagaccatttcaactgcgccaactgcgggaaggagctgactgccgatgcacgggagctgaaaggggagctatactgcctcccatgccatgataaaatgggggtccccatctgtggtgcttgccgacggcccatcgaagggcgcgtggtgaacgctatgggcaagcagtggcatgtggagcattttgtttgtgccaagtgtgagaaaccctttcttggacatcgccattatgagaggaaaggcctggcatattgtgaaactcactataaccagctatttggtgatgtttgcttccactgcaatcgtgttatagaaggtgatgtggtctctgctcttaataaggcctggtgcgtgaactgctttgcctgttctacctgcaacactaaattaacactcaagaataagtttgtggagtttgacatgaagccagtctgtaagaagtgctatgagaaatttccattggagctgaagaaaagacttaagaaactagctgagaccttaggaaggaaataagttcctttattttttcttttctatgcaagataagagattaccaacattacttgtcttgatctacccatatttaaagctatatctcaaagcagttgagagaagaggacctatatgaatggttttatgtcatttttttaattaaaaaagaaaaattcatataatcgtgtttaaaacacaaatgaagtcagtatttgcctttgttaacccttatccatttgttgacatgtagactgtttacaaaaaaaaaacacatggttaaatgttaaattttaattaaggcccccaaaaattaaatataactttttaaaatgaaaggagtcaccttttacatgactcaggtgaaaaaacagtataaacattaatttactttgtgttcaaaagaaaattccaactgctgttggggaaggacacagaaaagaaaaataaccacccaagaaaaacaaaaacaagaaaaacaaatcttatacaatcttagtatatttatcaaactagtagctagaaagtgaatatgcacattactaagacaaaaaacaagtgtaattcagaactacttgattttttttagttaaatgcaataattattatgcttagttttataacctgctctccttgtgaattcttccttcaaatgattacttaacgcagtagtaatagctagctgtaggatgtcctttaaatttttgtgcaaaaaaaaatttataccaggtatttggaaatatactttacaatattggaaaatgaagtatttttaatgtattacagcaattatgtttctaagcttaatgttaagcatgtagtcttagaataggacatgaaattaaattgtatgtagcttggaatatattgcttcagaaaactgaatgtgtatgtcggtcatattgcctttataaccatgctaatatctatgctttatacatactcaaacttgccttgccttaaaaacatacatactacatacttaaatcaggaattctagccatctcacagaataccaactaaaactaagtgcattgagatctgagattggtaaacccagattcatttaccacagctgtaattaagtttttagaaactattctctttttggggaaatccattgaagttaatttctgttatcttattagaagaaaatgatgttgatatgtgtttcagattttccatttgaaatcttataattaatttgatttatttactgtaagtaggaggtataaatgacactcttaaattggaaggaggggtgttttagtgtctgttttaggtcaaaattagtgattctatttttatcaaaagttttatcctgaagtttcaggaccactcttccttaataaacttgttaatggaaagcgagctttatgaacatttaaaaatgttgctgctgctttgttgcttaaaaagaaagttgccaagagagacttcttagggaaaatatttgggttttttttccaaaaattgctgaaatattgttttgccatttttaaaaagtctcaggttattaccactctgccattaaatatttgtatgcctgcatttttaaaaattctgtgcatgtactttatggagtacattctatttttgttttcagataccctacaaccaattttttttagtaatcttttagaattgaaattatcataaatgatcgagaataatcatcacatagtttaagattgtatatgttgagtagtttaaaacaatctttgcattttacagtaagaatcaaagtcccttcagtgtgcctttgtcagctaatatgtgaccagcaatgacaaccttgggagtatttattaaatattatgctatgaatataggcaacacagaacagggtttgcagtatagcgtcttgatgctaaattctcatatacctctacacgagaaatatggaggagaaaaacaagcatttacatatattcttcgtcactttgaagatgcatggcctgaactcgactgcttgtgtttgtttacatatcaggcatacccaggcatctcctgcagccagaggttccattgctgtctttgctcagtcctcttttaaaatatgaattagtggacaggcacggtgcctcacacctgtaatcccagcactttgggaggtcgaggcaggtggatcacgaggtcaggagatcaagaccatcctggctaccactgaaaccccatctctactacaaaaaaattagccgggcgtggtggcgggcacctgcagtcccagctactcgggaggctgaggcaggagaatggtgggaacccgggaggcagagcttgcagtgagccaagatcacgccactgcactccagcctgggcaacagagcaagactctgtctcaaaaaaaataaataaataaattatgaatgagtattttctagaaattcaacttgctaagcctgtaatacttaagggtagtttatctagatacagtactttcttccctgataagtagtatcattggagcccttaggtataggagaagaggaagaagtttaaaaagtgtaagtgggccgggcgtggtggctcatgcctgtaatcccagcactttgggaggccgaggggggcggatcacgaggtcaggagatccagactatcctggctaacaaggtgaaaccccgtctctactaaaaatacaaaaaaaaacattagccaggcgtggtggcgggcgcttgtagtcccagctactcgggaggctgaggtaggagaatggcttgaacccaggaggcggagcttgcagtgagccgagattgcaccactgcactccagcctgggcgacagagcaagactccgtctcaaaaaaaaaaaaaaagtgtaagtggattaaaagagaaacttggtctagttcataatatttttaatagggctttccctggctgctggaaaacttaggccagtaagcatctctttgtttaaagtcctacaagacaatttgaaataattcattgttcatgccaaaattctaagtactgtttttcttagcaagtgtaacataatcaggaacaatgggtacaagtaaaacattctttggatgatattcaaagccttattagcactgcacctgaataataggtcattttgcctcactcatttgccaaagtagccatttctaagttaaggaagtttttagataggctcatagccttgtatttcgttttagattgtaagctcaatggcagggatactatattggtaattatgttttcatatagcaaccaccacagtatattcttggtgcttaataaatgtttataattgttaacaataa

SEQ ID NO: 73976 - DNA, 1526 bp, Artificial Sequence
  derived and/or modified sequence
gaggacacagtgagagggtgccatctatgagcatggagagcttagcttggacagccagctgatgagggacacatcgaatcaagatacatgacatgcaacatggccaacgccctggccagcgccacttgcgagcgctgcaagggcggctttgcgcccgctgagaagatcgtgaacagtaatggggagctgtaccatgagcagtgtttcgtgtgcgctcagtgcttccagcagttcccagaaggactcttctatgagtttgaaggaagaaagtactgtgaacatgactttcagatgctctttgccccttgctgtcatcagtgtggtgaattcatcattggccgagttatcaaagccatgaataacagctggcatccggagtgcttccgctgtgacctctgccaggaagttctggcagatatcgggtttgtcaagaatgctgggagacacctgtgtcgcccctgtcataatcgtgagaaagccagaggccttgggaaatacatctgccagaaatgccatgctatcatcgatgagcagcctctgatattcaagaacgacccctaccatccagaccatttcaactgcgccaactgcgggaaggagctgactgccgatgcacgggagctgaaaggggagctatactgcctcccatgccatgataaaatgggggtccccatctgtggtgcttgccgacggcccatcgaagggcgcgtggtgaacgctatgggcaagcagtggcatgtggagcattttgtttgtgccaagtgtgagaaaccctttcttggacatcgccattatgagaggaaaggcctggcatattgtgaaactcactataaccagctatttggtgatgtttgcttccactgcaatcgtgttatagaaggtgatgtggtctctgctcttaataaggcctggtgcgtgaactgctttgcctgttctacctgcaacactaaattaacactcaagaataagtttgtggagtttgacatgaagccagtctgtaagaagtgctatgagaaatttccattggagctgaagaaaagacttaagaaactagctgagaccttaggaaggaaataagttcctttattttttcttttctatgcaagataagagattaccaacattacttgtcttgatctacccatatttaaagctatatctcaaagcagttgagagaagaggacctatatgaatggttttatgtcatttttttaattaaaaaagaaaaattcatataatcgtgtttaaaacacaaatgaagtcagtatttgcctttgttaacccttatccatttgttgacatgtagactgtttacaaaaaaaaaacacatggttaaatgttaaattttaattaaggcccccaaaaattaaatataactttttaaaatgaaaggagtcaccttttacatgactcaggtgaaaaaacagtataaacattaatttactttgtgttcaaaagaaaattccaactgctgttggggaaggacacagaaaagaaaaataaccacccaagaaaaacaaaaacaa

SEQ ID NO: 73977 - DNA, 990 bp, Artificial Sequence
  derived and/or modified sequence
atgacctgcaacatggccaatgccctggccagcgccacctgtgagcgctgcaagggcggctttgccccagctgagaagatcgtgaacagcaatggagagctgtaccacgagcagtgctttgtgtgtgcccagtgcttccagcagtttcctgagggcctcttctatgaatttgagggcaggaagtactgtgaacatgacttccagatgctgtttgccccctgctgccaccagtgtggggagttcatcatcggccgggtcatcaaggccatgaacaacagctggcaccctgagtgcttccgctgtgacctgtgccaggaggtgctggccgacattggatttgtgaagaatgccggccgccacctgtgccggccctgccacaaccgggagaaggcccggggcctgggcaagtacatctgccagaagtgccacgccatcattgatgagcagcccctcatcttcaagaatgacccctaccacccagaccacttcaactgtgccaactgtgggaaggagctgacagcagatgcccgggagctgaagggggagctgtactgcctgccctgccacgacaagatgggcgtgcccatctgtggggcctgcagaagacccatcgagggccgggtggtgaatgccatgggcaagcagtggcacgtggagcactttgtgtgtgccaagtgtgagaagcccttcctgggccaccgccactatgaaaggaagggcctggcctactgtgagacccactacaaccagctgtttggagatgtgtgcttccactgcaacagagtgattgaaggagatgtggtgtctgccctgaacaaggcctggtgtgtgaactgctttgcctgcagcacctgcaacaccaagctgaccctgaagaacaagtttgtggagtttgacatgaagcctgtgtgcaagaagtgctatgagaagttccccctggagctgaagaagaggctgaagaagctggccgagaccctgggcaggaagtag

SEQ ID NO: 73978 - DNA, 990 bp, Artificial Sequence
  derived and/or modified sequence
atgacctgcaacatggccaacgccctggccagcgccacctgcgagaggtgtaaggggggctttgcacccgcagagaaaatcgtgaacagcaacggggagctttaccacgagcagtgtttcgtttgcgctcaatgcttccagcagtttcccgaaggcctgttctatgagtttgagggtagaaaatattgcgaacatgatttccagatgttgttcgctccctgctgtcaccagtgcggcgaattcatcatcggtagggtgatcaaggcgatgaataattcgtggcacccggaatgcttcaggtgcgacctatgtcaagaagtgctggctgatatcggcttcgtgaagaacgccggacggcacctgtgtcgcccctgccataaccgcgagaaagcacggggcctggggaagtacatctgtcagaaatgtcatgccattattgatgagcagccactaatctttaagaatgatccatatcatcctgatcacttcaattgtgcaaattgcggcaaggagcttactgctgacgctcgtgagctgaagggagaactgtactgcctcccatgccacgacaagatgggggtgcctatatgtggagcctgtcgcaggcctatcgaaggccgggtcgtcaatgcgatgggcaagcagtggcacgtggaacactttgtgtgcgccaagtgcgagaagcccttcctcggccacagacactacgaacggaagggcttggcatactgtgagactcattataaccagctctttggagatgtgtgttttcattgtaatcgcgtgatcgaaggagacgtggtctccgctctcaataaggcatggtgtgttaactgctttgcatgttcaacttgtaacacaaagttaactctcaagaacaaattcgtggaatttgacatgaaacccgtgtgtaaaaagtgttatgaaaagttccctctcgaattgaagaagcgcctaaaaaagcttgccgaaactctgggacggaaatag

SEQ ID NO: 73979 - DNA, 990 bp, Artificial Sequence
  derived and/or modified sequence
atgacttgtaatatggccaacgcgttggcatccgccacgtgtgagaggtgcaaagggggatttgctcctgcagaaaagatcgtgaacagcaacggagagctataccatgaacagtgctttgtgtgcgcacaatgttttcagcaatttccagagggcctgttttacgagtttgagggccgtaaatattgtgagcacgactttcagatgctgttcgctccctgctgtcatcaatgcggggaattcatcatcggcagggtgatcaaagccatgaacaattcgtggcatccagagtgctttcgctgcgatttgtgccaggaagttctggcggatattggcttcgtgaaaaacgccggaaggcacttgtgccgaccctgccataatcgagagaaggccagaggcctgggcaaatacatatgtcagaagtgtcatgccataattgatgaacagccacttatattcaaaaacgatccgtaccaccctgatcacttcaactgcgcaaattgtggcaaggagctgaccgcagatgctcgtgagttgaagggcgagttatactgtctcccctgccatgacaaaatgggagtgcccatttgcggagcttgccggcgacccattgaaggcagagttgtgaacgccatgggcaaacagtggcatgtcgagcattttgtgtgcgctaaatgcgaaaaacctttcctcggtcacaggcattatgagcgcaagggactggcatattgtgagacccactacaatcagctgtttggagacgtatgctttcattgcaacagggtaatcgaaggcgacgtggtgtcagccctgaacaaggcttggtgcgtcaattgtttcgcctgttccacctgcaatacaaaactgaccttgaaaaataaatttgtggaatttgacatgaaacccgtatgtaaaaaatgctacgagaagttccctttggaactaaaaaagaggttgaagaaattggctgagaccctcggcagaaaatag

SEQ ID NO: 73980 - protein, 337 aa, Artificial Sequence
  derived and/or modified sequence
MLGVAAGMTHSNMANALASATCERCKGGFAPAEKIVNSNGELYHEQCFVCAQCFQQFPEGLFYEFEGRKYCEHDFQMLFAPCCHQCGEFIIGRVIKAMNNSWHPECFRCDLCQEVLADIGFVKNAGRHLCRPCHNREKARGLGKYICQKCHAIIDEQPLIFKNDPYHPDHFNCANCGKELTADARELKGELYCLPCHDKMGVPICGACRRPIEGRVVNAMGKQWHVEHFVCAKCEKPFLGHRHYERKGLAYCETHYNQLFGDVCFHCNRVIEGDVVSALNKAWCVNCFACSTCNTKLTLKNKFVEFDMKPVCKKCYEKFPLELKKRLKKLAETLGRK

SEQ ID NO: 73981 - DNA, 1014 bp, Artificial Sequence
  derived and/or modified sequence
atgctgggcgtggccgccggcatgacccacagcaacatggccaacgccctggccagcgccacctgcgagagatgcaagggcggcttcgcccccgccgagaagatcgtgaacagcaacggcgagctgtaccacgagcagtgcttcgtgtgcgcccagtgcttccagcagttccccgagggcctgttctacgagttcgagggcagaaagtactgcgagcacgacttccagatgctgttcgccccctgctgccaccagtgcggcgagttcatcatcggcagagtgatcaaggccatgaacaacagctggcaccccgagtgcttcagatgcgacctgtgccaggaggtgctggccgacatcggcttcgtgaagaacgccggcagacacctgtgcagaccctgccacaacagagagaaggccagaggcctgggcaagtacatctgccagaagtgccacgccatcatcgacgagcagcccctgatcttcaagaacgacccctaccaccccgaccacttcaactgcgccaactgcggcaaggagctgaccgccgacgccagagagctgaagggcgagctgtactgcctgccctgccacgacaagatgggcgtgcccatctgcggcgcctgcagaagacccatcgagggcagagtggtgaacgccatgggcaagcagtggcacgtggagcacttcgtgtgcgccaagtgcgagaagcccttcctgggccacagacactacgagagaaagggcctggcctactgcgagacccactacaaccagctgttcggcgacgtgtgcttccactgcaacagagtgatcgagggcgacgtggtgagcgccctgaacaaggcctggtgcgtgaactgcttcgcctgcagcacctgcaacaccaagctgaccctgaagaacaagttcgtggagttcgacatgaagcccgtgtgcaagaagtgctacgagaagttccccctggagctgaagaagagactgaagaagctggccgagaccctgggcagaaagtag

SEQ ID NO: 73982 - DNA, 1014 bp, Artificial Sequence
  derived and/or modified sequence
atgttgggtgtcgccgcgggcatgacccatagcaatatggccaatgcgctagcttccgcgacctgcgaacggtgtaaaggggggttcgctcctgcagaaaaaattgtgaattccaatggcgagctgtaccacgagcaatgctttgtgtgcgcccagtgttttcaacaatttccagagggtctgttttacgagtttgaaggccggaaatattgcgagcatgacttccagatgctgtttgcaccctgttgccaccagtgcggcgaatttattatcggtagggtgatcaaggctatgaataactcatggcatccagagtgtttccgctgcgatttgtgccaggaagtcctggctgatattggattcgtcaagaacgccgggcggcacctgtgtcggccatgccataacagagagaaggcacgaggactcggcaagtatatctgccagaagtgccacgcgatcatcgatgaacagcctcttatctttaagaatgatccttaccaccccgatcactttaattgcgctaactgtggaaaggagttgactgccgatgcccgcgagcttaaaggtgagctatactgcctgccttgtcacgacaagatgggggtgcctatctgtggggcctgccgaagaccaattgaagggcgggttgtgaatgctatgggtaagcagtggcatgtggagcattttgtctgcgcaaagtgtgagaaaccattcctggggcaccgtcactacgagcggaaagggctggcctactgcgagacacattacaaccaacttttcggggatgtctgctttcattgtaacagggtaattgagggcgacgtggtgtccgccctcaataaggcctggtgcgtaaactgctttgcctgcagcacctgtaataccaaattgacattgaaaaataagttcgttgagtttgatatgaagcctgtttgcaagaagtgttacgagaagtttcccctggagttgaagaagcgtctgaagaagttagccgagacactgggacggaaatag

SEQ ID NO: 73983 - DNA, 1767 bp, Artificial Sequence
  derived and/or modified sequence
ttcccccccctcccgcgcccccgcgcggccggcccctggccttcctccccttcctgctccgggcccgccagtagccggccgcggcggcgagggactaggacgcggctggagcggcgccgggagacgaggggctgagagacggcggcggccgaaagcggagagatgctgggcgtggcggccgggatgacccacagcaacatggccaacgccctggccagcgccacttgcgagcgctgcaagggcggctttgcgcccgctgagaagatcgtgaacagtaatggggagctgtaccatgagcagtgtttcgtgtgcgctcagtgcttccagcagttcccagaaggactcttctatgagtttgaaggaagaaagtactgtgaacatgactttcagatgctctttgccccttgctgtcatcagtgtggtgaattcatcattggccgagttatcaaagccatgaataacagctggcatccggagtgcttccgctgtgacctctgccaggaagttctggcagatatcgggtttgtcaagaatgctgggagacacctgtgtcgcccctgtcataatcgtgagaaagccagaggccttgggaaatacatctgccagaaatgccatgctatcatcgatgagcagcctctgatattcaagaacgacccctaccatccagaccatttcaactgcgccaactgcgggaaggagctgactgccgatgcacgggagctgaaaggggagctatactgcctcccatgccatgataaaatgggggtccccatctgtggtgcttgccgacggcccatcgaagggcgcgtggtgaacgctatgggcaagcagtggcatgtggagcattttgtttgtgccaagtgtgagaaaccctttcttggacatcgccattatgagaggaaaggcctggcatattgtgaaactcactataaccagctatttggtgatgtttgcttccactgcaatcgtgttatagaaggtgatgtggtctctgctcttaataaggcctggtgcgtgaactgctttgcctgttctacctgcaacactaaattaacactcaagaataagtttgtggagtttgacatgaagccagtctgtaagaagtgctatgagaaatttccattggagctgaagaaaagacttaagaaactagctgagaccttaggaaggaaataagttcctttattttttcttttctatgcaagataagagattaccaacattacttgtcttgatctacccatatttaaagctatatctcaaagcagttgagagaagaggacctatatgaatggttttatgtcatttttttaattaaaaaagaaaaattcatataatcgtgtttaaaacacaaatgaagtcagtatttgcctttgttaacccttatccatttgttgacatgtagactgtttacaaaaaaaaaacacatggttaaatgttaaattttaattaaggcccccaaaaattaaatataactttttaaaatgaaaggagtcaccttttacatgactcaggtgaaaaaacagtataaacattaatttactttgtgttcaaaagaaaattccaactgctgttggggaaggacacagaaaagaaaaataaccacccaagaaaaacaaaaacaagaaaaacaaatcttatacaatcttagtatatttatcaaactagtagctagaaagtgaatatgcacattactaagacaaaaaacaagtgtaattcagaactacttgattttttttagttaaatgcaataattattatgcttag

SEQ ID NO: 73984 - DNA, 1014 bp, Artificial Sequence
  derived and/or modified sequence
atgctgggcgtggccgccggcatgacccacagcaacatggccaatgccctggccagcgccacctgtgagcgctgcaagggcggctttgccccagctgagaagatcgtgaacagcaatggagagctgtaccacgagcagtgctttgtgtgtgcccagtgcttccagcagtttcctgagggcctcttctatgaatttgagggcaggaagtactgtgaacatgacttccagatgctgtttgccccctgctgccaccagtgtggggagttcatcatcggccgggtcatcaaggccatgaacaacagctggcaccctgagtgcttccgctgtgacctgtgccaggaggtgctggccgacattggatttgtgaagaatgccggccgccacctgtgccggccctgccacaaccgggagaaggcccggggcctgggcaagtacatctgccagaagtgccacgccatcattgatgagcagcccctcatcttcaagaatgacccctaccacccagaccacttcaactgtgccaactgtgggaaggagctgacagcagatgcccgggagctgaagggggagctgtactgcctgccctgccacgacaagatgggcgtgcccatctgtggggcctgcagaagacccatcgagggccgggtggtgaatgccatgggcaagcagtggcacgtggagcactttgtgtgtgccaagtgtgagaagcccttcctgggccaccgccactatgaaaggaagggcctggcctactgtgagacccactacaaccagctgtttggagatgtgtgcttccactgcaacagagtgattgaaggagatgtggtgtctgccctgaacaaggcctggtgtgtgaactgctttgcctgcagcacctgcaacaccaagctgaccctgaagaacaagtttgtggagtttgacatgaagcctgtgtgcaagaagtgctatgagaagttccccctggagctgaagaagaggctgaagaagctggccgagaccctgggcaggaagtag

SEQ ID NO: 73985 - DNA, 1014 bp, Artificial Sequence
  derived and/or modified sequence
atgctgggcgtggccgccggcatgacccacagcaacatggccaacgcgctggcctcagcaacttgcgagcggtgcaagggtgggttcgccccggccgaaaagatcgttaactccaacggcgagctctaccatgaacagtgttttgtctgtgctcagtgttttcagcagttccccgagggactcttttatgagtttgaagggcggaagtactgtgagcatgacttccagatgctcttcgccccgtgttgtcaccagtgtggggaatttattatcgggcgtgtcattaaggctatgaataattcttggcatcccgagtgctttagatgcgatctttgccaggaagtgctggccgacataggcttcgtgaagaatgccggtcgccatctctgccggccttgccataaccgtgaaaaggcccgcggcttggggaagtacatctgccagaaatgtcatgctattatcgatgagcagccactaatctttaagaacgacccctatcaccccgaccacttcaactgcgcaaactgcggcaaggaacttacagccgacgctcgggagttaaaaggagagctttattgcctaccctgccatgataagatgggcgtccctatctgtggcgcctgcagacggcctatcgaaggccgggtggtgaatgcaatggggaaacagtggcatgtggagcactttgtgtgcgccaaatgcgagaagccttttctgggccatagacattatgagagaaaaggacttgcctactgtgagacccattacaatcagctattcggcgatgtgtgttttcattgcaaccgcgtaattgagggagatgtagtcagcgctctcaacaaggcctggtgtgtgaattgttttgcctgctccacgtgcaataccaaactgaccctgaagaataagttcgtggaatttgatatgaagcccgtatgtaaaaagtgttatgagaagtttccactcgagctgaaaaagcgtctcaaaaaactcgccgaaacgctgggacgtaaatag

SEQ ID NO: 73986 - DNA, 1014 bp, Artificial Sequence
  derived and/or modified sequence
atgttaggagtagctgccggaatgacccactccaatatggcaaacgccctcgcaagcgccacatgcgagcggtgcaaggggggatttgccccagcagagaagattgttaatagtaatggtgagctgtaccacgagcagtgctttgtctgcgcccagtgctttcagcaattcccggagggactcttctatgaatttgagggccgtaagtactgtgaacatgacttccaaatgctgtttgccccttgctgtcaccagtgcggggagtttattattgggagagtaatcaaggcgatgaacaacagttggcatcctgagtgttttcgatgcgacctgtgtcaggaggttttggctgacattggatttgtgaagaacgccggacgccatttgtgccggccttgtcacaatagagaaaaagcgaggggtttgggtaagtatatttgccagaagtgccacgctataattgacgaacaaccactcattttcaagaatgatccgtaccatccagaccactttaattgtgccaattgtgggaaagagttgaccgccgacgcgcgagagctgaagggagagctgtactgcctcccgtgccacgacaagatgggggtacccatttgtggtgcctgcaggagacctatcgagggcagagtagtcaatgctatgggcaagcaatggcacgtggagcactttgtatgtgccaagtgcgaaaagcctttcttaggccacagacattacgagaggaagggactcgcgtactgcgaaacccattataaccagttgtttggagacgtctgcttccactgcaaccgcgtcattgagggagacgtggtctccgccctgaacaaggcatggtgtgtgaactgcttcgcttgctcgacctgcaacactaagttgaccctgaaaaacaaattcgtggagttcgatatgaaaccagtgtgcaagaagtgctacgagaagttcccactggagctgaagaaaagattgaaaaaacttgccgagaccttggggaggaaatag

SEQ ID NO: 73987 - protein, 325 aa, Artificial Sequence
  derived and/or modified sequence
MANALASATCERCKGGFAPAEKIVNSNGELYHEQCFVCAQCFQQFPEGLFYEFEGRKYCEHDFQMLFAPCCHQCGEFIIGRVIKAMNNSWHPECFRCDLCQEVLADIGFVKNAGRHLCRPCHNREKARGLGKYICQKCHAIIDEQPLIFKNDPYHPDHFNCANCGKELTADARELKGELYCLPCHDKMGVPICGACRRPIEGRVVNAMGKQWHVEHFVCAKCEKPFLGHRHYERKGLAYCETHYNQLFGDVCFHCNRVIEGDVVSALNKAWCVNCFACSTCNTKLTLKNKFVEFDMKPVCKKCYEKFPLELKKRLKKLAETLGRK

SEQ ID NO: 73988 - protein, 362 aa, Artificial Sequence
  derived and/or modified sequence
MTALQLKELSHSGLYRRRRDRPDSLRVNGLPEEELSNMANALASATCERCKGGFAPAEKIVNSNGELYHEQCFVCAQCFQQFPEGLFYEFEGRKYCEHDFQMLFAPCCHQCGEFIIGRVIKAMNNSWHPECFRCDLCQEVLADIGFVKNAGRHLCRPCHNREKARGLGKYICQKCHAIIDEQPLIFKNDPYHPDHFNCANCGKELTADARELKGELYCLPCHDKMGVPICGACRRPIEGRVVNAMGKQWHVEHFVCAKCEKPFLGHRHYERKGLAYCETHYNQLFGDVCFHCNRVIEGDVVSALNKAWCVNCFACSTCNTKLTLKNKFVEFDMKPVCKKCYEKFPLELKKRLKKLAETLGRK

SEQ ID NO: 73989 - DNA, 1089 bp, Artificial Sequence
  derived and/or modified sequence
atgaccgccctgcagctgaaggagctgagccacagcggcctgtacagaagaagaagagacagacccgacagcctgagagtgaacggcctgcccgaggaggagctgagcaacatggccaacgccctggccagcgccacctgcgagagatgcaagggcggcttcgcccccgccgagaagatcgtgaacagcaacggcgagctgtaccacgagcagtgcttcgtgtgcgcccagtgcttccagcagttccccgagggcctgttctacgagttcgagggcagaaagtactgcgagcacgacttccagatgctgttcgccccctgctgccaccagtgcggcgagttcatcatcggcagagtgatcaaggccatgaacaacagctggcaccccgagtgcttcagatgcgacctgtgccaggaggtgctggccgacatcggcttcgtgaagaacgccggcagacacctgtgcagaccctgccacaacagagagaaggccagaggcctgggcaagtacatctgccagaagtgccacgccatcatcgacgagcagcccctgatcttcaagaacgacccctaccaccccgaccacttcaactgcgccaactgcggcaaggagctgaccgccgacgccagagagctgaagggcgagctgtactgcctgccctgccacgacaagatgggcgtgcccatctgcggcgcctgcagaagacccatcgagggcagagtggtgaacgccatgggcaagcagtggcacgtggagcacttcgtgtgcgccaagtgcgagaagcccttcctgggccacagacactacgagagaaagggcctggcctactgcgagacccactacaaccagctgttcggcgacgtgtgcttccactgcaacagagtgatcgagggcgacgtggtgagcgccctgaacaaggcctggtgcgtgaactgcttcgcctgcagcacctgcaacaccaagctgaccctgaagaacaagttcgtggagttcgacatgaagcccgtgtgcaagaagtgctacgagaagttccccctggagctgaagaagagactgaagaagctggccgagaccctgggcagaaagtag

SEQ ID NO: 73990 - DNA, 1089 bp, Artificial Sequence
  derived and/or modified sequence
atgactgctttgcagctgaaagaattgtcacatagtggcctatatcgtaggaggcgggataggccagactccctccgggtgaacgggctgccagaggaggagctgtctaatatggctaacgccctggcgtctgcaacttgcgagcgttgcaaaggaggatttgcacctgcagagaagatagtcaatagcaacggagagttatatcatgagcagtgttttgtatgcgctcagtgcttccagcaatttcccgaggggctgttttacgagtttgaaggcaggaagtattgcgaacacgatttccagatgctgtttgctccatgctgtcaccagtgtggggagttcataatcgggagggtcatcaaggctatgaacaactcttggcatcccgagtgcttcaggtgtgatctctgtcaagaggtactagccgacatagggttcgtgaagaacgcaggacggcatttgtgtcgcccttgccacaatagagagaaggcccggggccttggaaaatacatctgccagaagtgccacgccatcattgatgagcaacccttgatcttcaaaaacgatccatatcacccagatcacttcaactgtgccaactgcgggaaagagttgactgcagatgcccgagagttaaaaggcgagctttactgtctgccatgtcacgacaagatgggtgttccaatatgcggggcgtgccgccgcccaattgaaggcagagtggtgaatgccatgggcaagcagtggcatgtggaacacttcgtgtgcgccaagtgcgagaagccgttcctcggccaccgccactacgagagaaaaggtctggcctattgcgagacccattacaatcaactgtttggggatgtctgcttccattgcaacagagtgatagagggcgacgtagtctcagccttgaataaggcctggtgcgtgaactgctttgcttgttccacctgtaacacaaagttgacgcttaagaacaaatttgtagaattcgacatgaagcccgtttgtaagaagtgttacgaaaaattcccgctggaactgaagaagagattgaagaaactggccgaaaccctgggaaggaaatag

SEQ ID NO: 73991 - DNA, 1235 bp, Artificial Sequence
  derived and/or modified sequence
tagttcaagacaacagagacaaagctaagatgaggaagttctgtacagtttaggaaatagaggctttcaaagataattcgcagtgatgtgaaactggcctcccaagccctgataacaacatggccaacgccctggccagcgccacttgcgagcgctgcaagggcggctttgcgcccgctgagaagatcgtgaacagtaatggggagctgtaccatgagcagtgtttcgtgtgcgctcagtgcttccagcagttcccagaaggactcttctatgagtttgaaggaagaaagtactgtgaacatgactttcagatgctctttgccccttgctgtcatcagtgtggtgaattcatcattggccgagttatcaaagccatgaataacagctggcatccggagtgcttccgctgtgacctctgccaggaagttctggcagatatcgggtttgtcaagaatgctgggagacacctgtgtcgcccctgtcataatcgtgagaaagccagaggccttgggaaatacatctgccagaaatgccatgctatcatcgatgagcagcctctgatattcaagaacgacccctaccatccagaccatttcaactgcgccaactgcgggaaggagctgactgccgatgcacgggagctgaaaggggagctatactgcctcccatgccatgataaaatgggggtccccatctgtggtgcttgccgacggcccatcgaagggcgcgtggtgaacgctatgggcaagcagtggcatgtggagcattttgtttgtgccaagtgtgagaaaccctttcttggacatcgccattatgagaggaaaggcctggcatattgtgaaactcactataaccagctatttggtgatgtttgcttccactgcaatcgtgttatagaaggtgatgtggtctctgctcttaataaggcctggtgcgtgaactgctttgcctgttctacctgcaacactaaattaacactcaagaataagtttgtggagtttgacatgaagccagtctgtaagaagtgctatgagaaatttccattggagctgaagaaaagacttaagaaactagctgagaccttaggaaggaaataagttcctttattttttcttttctatgcaagataagagattaccaacattacttgtcttgatctacccatatttaaagctatatctcaaagcagttgagagaagaggacctatatgaatggttttatgtcatttttttaa

SEQ ID NO: 73992 - DNA, 1627 bp, Artificial Sequence
  derived and/or modified sequence
cctcggcaagggacgctgctttcccctggcagccacactgctgagcataaatgctttaaagtgtcagcaattgatgtgtggagagaagtatgactgcattacagcttaaagagctttcacattcaggtctctacaggagaagacgagatcgccccgatagtttgagagtaaatgggttaccagaggaagagctaagcaacatggccaacgccctggccagcgccacttgcgagcgctgcaagggcggctttgcgcccgctgagaagatcgtgaacagtaatggggagctgtaccatgagcagtgtttcgtgtgcgctcagtgcttccagcagttcccagaaggactcttctatgagtttgaaggaagaaagtactgtgaacatgactttcagatgctctttgccccttgctgtcatcagtgtggtgaattcatcattggccgagttatcaaagccatgaataacagctggcatccggagtgcttccgctgtgacctctgccaggaagttctggcagatatcgggtttgtcaagaatgctgggagacacctgtgtcgcccctgtcataatcgtgagaaagccagaggccttgggaaatacatctgccagaaatgccatgctatcatcgatgagcagcctctgatattcaagaacgacccctaccatccagaccatttcaactgcgccaactgcgggaaggagctgactgccgatgcacgggagctgaaaggggagctatactgcctcccatgccatgataaaatgggggtccccatctgtggtgcttgccgacggcccatcgaagggcgcgtggtgaacgctatgggcaagcagtggcatgtggagcattttgtttgtgccaagtgtgagaaaccctttcttggacatcgccattatgagaggaaaggcctggcatattgtgaaactcactataaccagctatttggtgatgtttgcttccactgcaatcgtgttatagaaggtgatgtggtctctgctcttaataaggcctggtgcgtgaactgctttgcctgttctacctgcaacactaaattaacactcaagaataagtttgtggagtttgacatgaagccagtctgtaagaagtgctatgagaaatttccattggagctgaagaaaagacttaagaaactagctgagaccttaggaaggaaataagttcctttattttttcttttctatgcaagataagagattaccaacattacttgtcttgatctacccatatttaaagctatatctcaaagcagttgagagaagaggacctatatgaatggttttatgtcatttttttaattaaaaaagaaaaattcatataatcgtgtttaaaacacaaatgaagtcagtatttgcctttgttaacccttatccatttgttgacatgtagactgtttacaaaaaaaaaacacatggttaaatgttaaattttaattaaggcccccaaaaattaaatataactttttaaaatgaaaggagtcaccttttacatgactcaggtgaaaaaacagtataaacattaatttactttgtgttcaaaagaaaattccaactgctgttggggaaggacacagaaaagaaaaataaccacccaagaaaaacaaaaacaa

SEQ ID NO: 73993 - DNA, 1089 bp, Artificial Sequence
  derived and/or modified sequence
atgacagccctgcagctgaaggagctgagccacagcggcctgtacagaagaagaagagacagaccagacagcctgcgggtgaatggcctgcctgaggaggagctgagcaacatggccaatgccctggccagcgccacctgtgagcgctgcaagggcggctttgccccagctgagaagatcgtgaacagcaatggagagctgtaccacgagcagtgctttgtgtgtgcccagtgcttccagcagtttcctgagggcctcttctatgaatttgagggcaggaagtactgtgaacatgacttccagatgctgtttgccccctgctgccaccagtgtggggagttcatcatcggccgggtcatcaaggccatgaacaacagctggcaccctgagtgcttccgctgtgacctgtgccaggaggtgctggccgacatcggctttgtgaagaatgccggccgccacctgtgccggccctgccacaaccgggagaaggcccggggcctgggcaagtacatctgccagaagtgccacgccatcattgatgagcagcccctcatcttcaagaatgacccctaccacccagaccacttcaactgtgccaactgtgggaaggagctgacagcagatgcccgggagctgaagggggagctgtactgcctgccctgccacgacaagatgggcgtgcccatctgtggggcctgccggcggcccatcgagggccgggtggtgaatgccatgggcaagcagtggcacgtggagcactttgtgtgtgccaagtgtgagaagcccttcctgggccaccgccactatgaaaggaagggcctggcctactgtgagacccactacaaccagctgtttggagatgtgtgcttccactgcaacagagtcatcgagggagatgtggtgtctgccctgaacaaggcctggtgtgtgaactgctttgcctgcagcacctgcaacaccaagctgaccctgaagaacaagtttgtggagtttgacatgaagcctgtgtgcaagaagtgctatgagaagttccccctggagctgaagaagaggctgaagaagctggccgagaccctgggcaggaagtag

SEQ ID NO: 73994 - DNA, 1089 bp, Artificial Sequence
  derived and/or modified sequence
atgaccgccctgcagctgaaggagctgagccacagcggcctgtacaggcggcgccgggaccgacctgattcattgcgcgtgaacgggctgccggaggaggagttgagtaacatggcaaatgccctcgccagcgcaacctgcgagcgctgcaagggtggatttgcgcccgccgagaagatcgtgaactccaacggagagctctatcacgagcagtgttttgtgtgcgctcagtgcttccaacagtttcctgagggattattctatgagtttgagggccgaaagtactgtgaacatgatttccaaatgctgtttgcgccctgttgccaccagtgcggggagttcattatcggccgagtgattaaggctatgaataactcgtggcatcccgaatgctttaggtgtgatctgtgccaggaagtgttggccgacataggctttgtcaaaaacgcaggtagacatctgtgcagaccatgtcataaccgcgagaaggccagaggtctggggaaatatatctgtcagaagtgccacgctataatagatgagcagccattaatcttcaagaacgatccctatcaccccgatcattttaactgtgcaaattgtggaaaagagcttacagcagatgctcgggaactcaaaggggaattatattgtcttccttgtcacgacaagatgggtgttcccatttgcggcgcatgtcgcaggcccattgaaggccgggtagttaacgctatgggtaagcagtggcatgtggagcactttgtctgtgctaagtgcgaaaaaccctttctgggccaccgtcattatgagcggaaaggtttagcctattgcgagacacattataatcagctgtttggggatgtgtgtttccattgtaatcgagtgatcgagggcgacgtggtctccgccctgaataaagcgtggtgtgtcaattgctttgcctgcagcacctgcaatactaagctgactctgaagaacaaattcgtcgagttcgatatgaagcccgtgtgcaagaaatgttacgagaaattcccactcgaacttaaaaagcggctgaagaagctggctgagacactgggtcggaaatag

SEQ ID NO: 73995 - DNA, 1089 bp, Artificial Sequence
  derived and/or modified sequence
atgacagccctgcaactgaaagaactgtcgcattctggattatatcgcaggcggagggaccgacctgacagcctaagggtgaatgggttgccagaggaggaactgagcaacatggctaatgcactcgccagcgctacttgcgaacgctgtaagggaggcttcgctcccgcagagaagatcgtgaactctaacggcgagctttaccacgaacagtgctttgtgtgtgctcagtgcttccagcaattccccgaaggcctgttttacgaatttgaagggaggaagtactgcgagcatgactttcagatgctctttgctccttgttgccatcaatgcggagaatttattattggcagagtcatcaaggccatgaataactcctggcaccctgagtgttttagatgcgacctctgccaagaagtccttgcagacatcgggttcgtcaagaatgctggacgccatttatgtagaccgtgtcataacagggagaaggccaggggtctgggtaaatacatatgccagaaatgccacgccattatcgatgagcagcccctcatttttaaaaatgatccatatcacccggatcattttaattgcgccaattgcggtaaagagctgaccgccgatgctagagagctgaaaggagaactatattgtctgccttgccacgacaaaatgggagtccctatttgtggggcatgtcggagacccatcgaggggagggtggtcaatgctatgggaaagcagtggcacgtggaacactttgtctgcgccaagtgcgagaaaccttttctgggacaccggcactacgagcggaaaggcctagcatactgcgagacacactacaatcagttatttggggacgtatgttttcactgcaacagagtgatcgagggggacgtggtgtctgccctcaacaaggcttggtgcgtgaattgctttgcctgtagtacctgtaacaccaagctcacattaaagaacaagttcgtcgagtttgatatgaagccagtctgcaaaaaatgctatgagaaattcccgctggaacttaagaagagactcaagaagcttgccgaaaccctcggcaggaaatag

SEQ ID NO: 73996 - protein, 387 aa, Artificial Sequence
  derived and/or modified sequence
MAFSGRARPCIIPENEEIPRAALNTVHEANGTEDERAVSKLQRRHSDVKVYKEFCDFYAKFNMANALASATCERCKGGFAPAEKIVNSNGELYHEQCFVCAQCFQQFPEGLFYEFEGRKYCEHDFQMLFAPCCHQCGEFIIGRVIKAMNNSWHPECFRCDLCQEVLADIGFVKNAGRHLCRPCHNREKARGLGKYICQKCHAIIDEQPLIFKNDPYHPDHFNCANCGKELTADARELKGELYCLPCHDKMGVPICGACRRPIEGRVVNAMGKQWHVEHFVCAKCEKPFLGHRHYERKGLAYCETHYNQLFGDVCFHCNRVIEGDVVSALNKAWCVNCFACSTCNTKLTLKNKFVEFDMKPVCKKCYEKFPLELKKRLKKLAETLGRK

SEQ ID NO: 73997 - protein, 122 aa, Artificial Sequence
  derived and/or modified sequence
MLFAPCCHQCGEFIIGRVIKAMNNSWHPECFRCDLCQEVLADIGFVKNAGRHLCRPCHNREKARGLGKYICQKCHAIIDEQPLIFKNDPYHPDHFNCANCGQEGSDCRCTGAERGAILPAMP

SEQ ID NO: 73998 - DNA, 1164 bp, Artificial Sequence
  derived and/or modified sequence
atggccttcagcggcagagccagaccctgcatcatccccgagaacgaggagatccccagagccgccctgaacaccgtgcacgaggccaacggcaccgaggacgagagagccgtgagcaagctgcagagaagacacagcgacgtgaaggtgtacaaggagttctgcgacttctacgccaagttcaacatggccaacgccctggccagcgccacctgcgagagatgcaagggcggcttcgcccccgccgagaagatcgtgaacagcaacggcgagctgtaccacgagcagtgcttcgtgtgcgcccagtgcttccagcagttccccgagggcctgttctacgagttcgagggcagaaagtactgcgagcacgacttccagatgctgttcgccccctgctgccaccagtgcggcgagttcatcatcggcagagtgatcaaggccatgaacaacagctggcaccccgagtgcttcagatgcgacctgtgccaggaggtgctggccgacatcggcttcgtgaagaacgccggcagacacctgtgcagaccctgccacaacagagagaaggccagaggcctgggcaagtacatctgccagaagtgccacgccatcatcgacgagcagcccctgatcttcaagaacgacccctaccaccccgaccacttcaactgcgccaactgcggcaaggagctgaccgccgacgccagagagctgaagggcgagctgtactgcctgccctgccacgacaagatgggcgtgcccatctgcggcgcctgcagaagacccatcgagggcagagtggtgaacgccatgggcaagcagtggcacgtggagcacttcgtgtgcgccaagtgcgagaagcccttcctgggccacagacactacgagagaaagggcctggcctactgcgagacccactacaaccagctgttcggcgacgtgtgcttccactgcaacagagtgatcgagggcgacgtggtgagcgccctgaacaaggcctggtgcgtgaactgcttcgcctgcagcacctgcaacaccaagctgaccctgaagaacaagttcgtggagttcgacatgaagcccgtgtgcaagaagtgctacgagaagttccccctggagctgaagaagagactgaagaagctggccgagaccctgggcagaaagtag

SEQ ID NO: 73999 - DNA, 1164 bp, Artificial Sequence
  derived and/or modified sequence
atggccttcagcggccgcgccaggccctgcattatcccagaaaatgaggagatccctcgcgccgctctgaacaccgtccacgaggcgaacggcactgaggacgaaagggcggtgtcaaagctacagcggagacattccgatgtcaaggtctataaagagttctgtgacttctatgcaaagtttaacatggcaaatgccctggccagcgctacgtgtgagagatgcaaggggggatttgctccggccgaaaaaattgtgaactcaaacggggagctttaccacgagcagtgcttcgtatgcgcccagtgtttccagcagtttcctgaagggctgttctatgaattcgaaggccggaagtattgcgagcatgattttcagatgctctttgccccatgttgtcatcagtgtggcgagtttattatcggacgggttattaaggctatgaataatagctggcatcctgaatgttttcggtgtgacctgtgccaggaggtgttagccgatattggctttgtgaagaacgccggacgacacctttgccgcccctgccataacagggaaaaagcgcgcggcctgggcaagtatatatgtcagaagtgccatgccattattgatgagcagcccctgatctttaagaatgacccatatcaccccgaccatttcaattgtgccaactgcggcaaggagctcacagcagacgcaagagagttaaagggcgagctgtactgtctcccctgtcatgacaagatgggcgtgcctatatgtggtgcctgtcgcagaccaattgaggggagggtggttaatgccatgggaaagcaatggcacgttgaacattttgtgtgtgcaaagtgtgaaaaacctttcctgggccacagacattacgaacgcaaggggctcgcctattgcgagacccattacaatcagctcttcggagacgtctgcttccactgtaaccgtgtaatagagggagacgtcgtgagcgccctcaacaaagcctggtgtgtcaattgtttcgcctgctctacatgcaataccaaacttacattgaagaacaagtttgtcgaattcgacatgaagccagtttgtaaaaaatgttacgaaaagttccccctcgagctgaagaagaggttaaaaaagttggcggaaaccttgggtaggaaatag

SEQ ID NO: 74000 - DNA, 1876 bp, Artificial Sequence
  derived and/or modified sequence
acaaagactgtgtcactactttgtggaatgttattttagaacttccagaatgcctcagtaaatcctgactgccatgtaactgtgtactgtgctgctgagctcttaacatgaagcagcagtagtgaccctggcgggccaggctgacgtgcgtgggaacagtgggagtgaccctggctgggaagcagggaggcctggatattgtttctcctggctctgtgtcctgccattctcgtccctgtgctcagagctctcaagcacccacgatggccttctcaggccgagcgcgcccctgcattatcccagagaacgaagaaatcccccgagcagcccttaacactgtccacgaggccaatgggaccgaggacgagagggctgtttccaaactgcagcgcaggcacagtgacgtgaaagtctacaaggagttctgtgacttttatgcgaaattcaacatggccaacgccctggccagcgccacttgcgagcgctgcaagggcggctttgcgcccgctgagaagatcgtgaacagtaatggggagctgtaccatgagcagtgtttcgtgtgcgctcagtgcttccagcagttcccagaaggactcttctatgagtttgaaggaagaaagtactgtgaacatgactttcagatgctctttgccccttgctgtcatcagtgtggtgaattcatcattggccgagttatcaaagccatgaataacagctggcatccggagtgcttccgctgtgacctctgccaggaagttctggcagatatcgggtttgtcaagaatgctgggagacacctgtgtcgcccctgtcataatcgtgagaaagccagaggccttgggaaatacatctgccagaaatgccatgctatcatcgatgagcagcctctgatattcaagaacgacccctaccatccagaccatttcaactgcgccaactgcgggaaggagctgactgccgatgcacgggagctgaaaggggagctatactgcctcccatgccatgataaaatgggggtccccatctgtggtgcttgccgacggcccatcgaagggcgcgtggtgaacgctatgggcaagcagtggcatgtggagcattttgtttgtgccaagtgtgagaaaccctttcttggacatcgccattatgagaggaaaggcctggcatattgtgaaactcactataaccagctatttggtgatgtttgcttccactgcaatcgtgttatagaaggtgatgtggtctctgctcttaataaggcctggtgcgtgaactgctttgcctgttctacctgcaacactaaattaacactcaagaataagtttgtggagtttgacatgaagccagtctgtaagaagtgctatgagaaatttccattggagctgaagaaaagacttaagaaactagctgagaccttaggaaggaaataagttcctttattttttcttttctatgcaagataagagattaccaacattacttgtcttgatctacccatatttaaagctatatctcaaagcagttgagagaagaggacctatatgaatggttttatgtcatttttttaattaaaaaagaaaaattcatataatcgtgtttaaaacacaaatgaagtcagtatttgcctttgttaacccttatccatttgttgacatgtagactgtttacaaaaaaaaaacacatggttaaatgttaaattttaattaaggcccccaaaaattaaatataactttttaaaatgaaaggagtcaccttttacatgactcaggtgaaaaaacagtataaacattaatttactttgtgttcaaaagaaaattccaactgctgttggggaaggacacagaaaagaaaaataaccacccaagaaaaacaaaaacaa

SEQ ID NO: 74001 - DNA, 1459 bp, Artificial Sequence
  derived and/or modified sequence
attctcgtccctgtgctcagagctctcaagcacccacgatggccttctcaggccgagcgcgcccctgcattatcccagagaacgaagaaatcccccgagcagcccttaacactgtccacgaggccaatgggaccgaggacgagagggctgtttccaaactgcagcgcaggcacagtgacgtgaaagtctacaaggagttctgtgacttttatgcgaaattcaacatggccaacgccctggccagcgccacttgcgagcgctgcaagggcggctttgcgcccgctgagaagatcgtgaacagtaatggggagctgtaccatgagcagtgtttcgtgtgcgctcagtgcttccagcagttcccagaaggactcttctatgagtttgaaggaagaaagtactgtgaacatgactttcagatgctctttgccccttgctgtcatcagtgtggtgaattcatcattggccgagttatcaaagccatgaataacagctggcatccggagtgcttccgctgtgacctctgccaggaagttctggcagatatcgggtttgtcaagaatgctgggagacacctgtgtcgcccctgtcataatcgtgagaaagccagaggccttgggaaatacatctgccagaaatgccatgctatcatcgatgagcagcctctgatattcaagaacgacccctaccatccagaccatttcaactgcgccaactgcgggaaggagctgactgccgatgcacgggagctgaaaggggagctatactgcctcccatgccatgataaaatgggggtccccatctgtggtgcttgccgacggcccatcgaagggcgcgtggtgaacgctatgggcaagcagtggcatgtggagcattttgtttgtgccaagtgtgagaaaccctttcttggacatcgccattatgagaggaaaggcctggcatattgtgaaactcactataaccagctatttggtgatgtttgcttccactgcaatcgtgttatagaaggtgatgtggtctctgctcttaataaggcctggtgcgtgaactgctttgcctgttctacctgcaacactaaattaacactcaagaataagtttgtggagtttgacatgaagccagtctgtaagaagtgctatgagaaatttccattggagctgaagaaaagacttaagaaactagctgagaccttaggaaggaaataagttcctttattttttcttttctatgcaagataagagattaccaacattacttgtcttgatctacccatatttaaagctatatctcaaagcagttgagagaagaggacctatatgaatggttttatgtcatttttttaattaaaaaagaaaaattcatataatcgtgtttaaaacacaaatgaagtcagtatttgcctttgttaacccttatccatttgttgacatgtagactgtttacaaaaaaaaaacacatggtt

SEQ ID NO: 74002 - DNA, 1164 bp, Artificial Sequence
  derived and/or modified sequence
atggccttcagcggccgggcccggccctgcatcatcccagaaaatgaggagatccccagggctgccctgaacacagtgcatgaggccaacggcacagaagatgaaagagctgtgtccaagctgcagaggaggcacagtgatgtgaaggtgtacaaggagttctgtgacttctacgccaagttcaacatggccaatgccctggccagcgccacctgtgagcgctgcaagggcggctttgccccagctgagaagatcgtgaacagcaatggagagctgtaccacgagcagtgctttgtgtgtgcccagtgcttccagcagtttcctgagggcctcttctatgaatttgagggcaggaagtactgtgaacatgacttccagatgctgtttgccccctgctgccaccagtgtggggagttcatcatcggccgggtcatcaaggccatgaacaacagctggcaccctgagtgcttccgctgtgacctgtgccaggaggtgctggccgacattggatttgtgaagaatgccggccgccacctgtgccggccctgccacaaccgggagaaggcccggggcctgggcaagtacatctgccagaagtgccacgccatcattgatgagcagcccctcatcttcaagaatgacccctaccacccagaccacttcaactgtgccaactgtgggaaggagctgacagcagatgcccgggagctgaagggggagctgtactgcctgccctgccacgacaagatgggcgtgcccatctgtggggcctgcagaagacccatcgagggccgggtggtgaatgccatgggcaagcagtggcacgtggagcactttgtgtgtgccaagtgtgagaagcccttcctgggccaccgccactatgaaaggaagggcctggcctactgtgagacccactacaaccagctgtttggagatgtgtgcttccactgcaacagagtgattgaaggagatgtggtgtctgccctgaacaaggcctggtgtgtgaactgctttgcctgcagcacctgcaacaccaagctgaccctgaagaacaagtttgtggagtttgacatgaagcctgtgtgcaagaagtgctatgagaagttccccctggagctgaagaagaggctgaagaagctggccgagaccctgggcaggaagtag

SEQ ID NO: 74003 - DNA, 1164 bp, Artificial Sequence
  derived and/or modified sequence
atggccttcagcggccgggcccggccctgcatcatccccgagaacgaggaaattcctcgtgcagcactgaacaccgtgcatgaagcaaacggcacagaagacgaaagagccgtgtcaaaactccagagacgacacagcgacgtcaaagtgtacaaagagttttgcgacttctatgctaaattcaatatggccaatgccctggcaagcgccacttgtgagcgttgcaagggcgggtttgcgcccgcggagaagatagtgaattcaaatggagaactgtatcatgagcagtgctttgtgtgtgctcagtgcttccagcagttcccagaagggcttttctacgagttcgaaggacgcaagtattgcgagcatgactttcagatgctgttcgccccatgctgtcatcaatgcggggagtttattattgggcgggtgattaaagccatgaacaatagctggcacccagaatgcttccgctgtgacctgtgccaggaggtcctggcagatatcggtttcgtcaagaatgccgggcggcacctatgccggccgtgtcacaatcgggagaaggcccgggggctggggaagtacatatgccaaaagtgtcatgccattatagatgaacagcccttgatttttaaaaatgatccctaccaccctgatcattttaactgcgccaattgtgggaaggagctgactgcagatgcccgcgagctgaagggcgagttatactgcttgccttgtcatgacaaaatgggggtgccaatttgtggagcctgtcggcgacctattgagggccgggtggttaacgccatggggaagcaatggcatgtggaacacttcgtttgcgcaaaatgcgaaaaaccgttcctgggccatcgccactatgagaggaaggggctggcttactgcgagacgcactacaatcagcttttcggcgacgtttgttttcactgcaatcgcgtgatcgaaggcgacgtcgtctctgccctaaataaggcttggtgcgtgaactgcttcgcatgttccacttgcaatactaagctgaccctcaagaacaagttcgtggagtttgatatgaaaccagtgtgtaagaagtgctacgagaaatttccattggaactcaaaaagaggctcaagaaactggccgagacgctcgggaggaagtag

SEQ ID NO: 74004 - DNA, 1164 bp, Artificial Sequence
  derived and/or modified sequence
atggcctttagtggcagagcgagaccttgtattattcctgaaaacgaggagatacctcgtgctgccttgaatactgtgcatgaggcaaatggaacggaggacgagcgggctgttagtaaactgcagcgtagacactctgacgtcaaagtttataaggagttctgcgacttctacgccaaattcaacatggctaatgcactggcatcggcaacgtgcgagcgatgtaaaggcggtttcgcacctgccgaaaaaatcgttaactcgaacggggagctgtatcatgaacaatgctttgtgtgcgcccagtgctttcagcagttcccagaagggttattttacgagtttgaggggcgaaagtactgtgaacacgactttcaaatgttgttcgccccttgctgccaccagtgcggcgagtttattataggacgcgtgattaaggctatgaataacagctggcacccggagtgttttcggtgcgatctttgtcaggaggtgctagctgatataggcttcgttaaaaatgctgggaggcacctgtgcagaccttgccacaacagagagaaagcccgaggactgggtaaatacatctgccagaagtgccatgccattatcgacgagcagccactcattttcaagaacgacccctatcacccagaccatttcaattgcgctaactgcggcaaagaactcacggccgacgccagggagcttaaaggcgagctatattgtctgccttgccatgataagatgggggtgcccatttgcggtgcctgtaggcgtccaatagaaggcagagtcgtgaacgctatgggaaaacaatggcacgtggaacactttgtgtgcgccaagtgcgaaaaaccttttctgggccacaggcactacgaaagaaagggtttagcttactgcgaaacacactacaatcagctttttggtgatgtgtgctttcactgtaaccgcgtcatcgagggggatgtcgtgtcagcactgaacaaggcttggtgtgtgaactgttttgcttgttctacttgtaatacaaaactgaccctcaaaaacaagttcgtagagtttgatatgaagcctgtgtgtaagaaatgttatgagaagtttccactcgagctgaagaagagacttaaaaagctggccgagactcttggaagaaaatag

SEQ ID NO: 74005 - protein, 444 aa, Artificial Sequence
  derived and/or modified sequence
MACLNPVLWETKVLQSKATEDFFRNSIQSPLFTLQLPHSLHQTLQSSTASLVIPAGRTLPSFTTAELGTSNSSANFTFPGYPIHVPAGVTLQTVSGHLYKVNVPIMVTETSGRAGILQHPIQQVFQQLGQPSVIQTSVPQLNPWSLQATTEKSQRIETVLQQPAILPSGPVDRKHLENATSDILVSPGNEHKIVPEALLCHQESSHYISLPGVVFSPQVSQTNSNVESVLSGSASMAQNLHDESLSTSPHGALHQHVTDIQLHILKNRMYGCDSVKQPRNIEEPSNIPVSEKDSNSQVDLSIRVTDDDIGEIIQVDGSGDTSSNEEIGSTRDADENEFLGNIDGGDLKVPEEEADSISNEDSATNSSDNEDPQVNIVEEDPLNSGDDVSEQDVPDLFDTDNVIVCQYDKIHRSKNKWKFYLKDGVMCFGGRDYVFAKAIGDAEW

SEQ ID NO: 74006 - DNA, 1335 bp, Artificial Sequence
  derived and/or modified sequence
atggcttgcctaaatccggttctgtgggaaacgaaagttctccagtctaaagcaacagaagacttttttcggaactccattcagagcccccttttcacgctgcagctccctcactctcttcaccagactctgcagagcagtacggcctcgctcgtgataccggcaggcagaacattgccttcctttactactgcagaactcgggacctcaaatagtagtgccaatttcaccttcccaggctatccaattcatgtgccagccggtgttacactgcagacagtcagcggccatctatataaggtcaatgtgcctataatggtgactgaaacctccggccgggcaggcatacttcagcacccgattcagcaggttttccagcagctggggcagccaagcgtgatccagacgagcgtccctcagctcaatccgtggtcattgcaggcgactactgaaaagtcacaacggatagagaccgtgttgcagcagccggcgatccttccatccggacctgtggaccggaaacacctagaaaacgctaccagtgatatcctggtatcgcctggcaatgagcacaaaatcgtgcccgaggccctgctctgccatcaggagagctcccactatatctccttgccgggagttgtcttctctcctcaggtgagtcaaacaaactctaacgttgaaagcgtgcttagcggatccgcgagcatggcccaaaacttgcatgatgaatctctctcaacctccccacacggcgcccttcatcaacatgtgaccgacattcagcttcatattttgaaaaaccgtatgtatgggtgtgactcagtcaaacagcccagaaacattgaggagcctagtaacatacccgttagtgaaaaggactctaactcacaagtggatctgtcaataagggtaacagacgacgacatcggggaaattattcaggtggacggcagcggagatacctcatccaatgaagaaataggcagcactcgggatgccgatgaaaatgaattcctcggcaatatcgatgggggggatctgaaagtgcctgaggaagaagctgatagtatttcgaatgaagattctgccacaaacagtagcgataacgaggatccccaggtgaacattgtcgaggaagatcccttgaactcaggggacgatgtttctgagcaggatgtccccgatctcttcgacactgataatgttatcgtgtgccagtacgataaaatccacaggagtaagaacaaatggaagttttacctgaaggacggggttatgtgtttcggtggaagagattatgtctttgccaaggcaattggtgacgctgaatggtag

SEQ ID NO: 74007 - DNA, 1573 bp, Artificial Sequence
  derived and/or modified sequence
aaaacgtgcccagtgtttccctccgagggcactgcgtgccgcgcaggcgcaaagggccaggtgctggaggtgctgtcatggcctgcctcaacccggtgctctgggaaaccaaggttttgcagtctaaagcaacagaagacttcttcagaaatagcatccaatcacctctgtttactcttcagttgccgcacagcttgcaccaaacattgcaatcgtcaacagcatcattagttattcctgctggtagaactcttccaagttttaccacagcagaactgggcacttcaaactccagtgcaaactttacttttcctggttatcccattcatgtaccagcaggtgtgacactacagactgtatctggtcacctttataaagtcaatgtaccaattatggtgacagagacttctggaagagcaggtattcttcagcatccaattcagcaagtatttcaacagcttggccagccttcagtaatacaaactagtgttccacaattgaatccatggtctcttcaagcaactactgaaaaatcacagagaattgaaaccgtgctacagcaacccgcaattctaccttctgggccagtagataggaaacacttagaaaatgccaccagtgatatacttgtatctcctggaaatgagcataaaatcgtgcctgaagctttgttgtgtcatcaggaaagttctcactatatcagtcttccaggtgttgtattttctccacaggtctctcaaacaaattctaatgtggagtcagtgctcagtggttcagctagcatggctcaaaatctgcatgatgagtccctctccacaagccctcatggggctctccaccagcacgtgactgatattcagcttcatattcttaaaaataggatgtatggatgtgattctgtaaagcaaccaagaaatatagaggaacccagcaacatacctgtatcagagaaggattctaattctcaggtggatttaagcattcgggttactgatgatgatattggtgaaataattcaagtagatggaagcggtgatacatcttccaatgaagaaataggaagtacaagagatgcagatgagaatgaatttctagggaatattgacgggggagatctgaaggtacctgaagaagaagctgacagtatttcaaatgaggattcagccacaaacagtagtgataatgaagaccctcaagtaaacattgtagaagaggaccctttaaattctggagatgatgttagtgaacaggatgtgccagacctgtttgacacggataatgttattgtctgtcagtatgataagattcatcgaagcaagaacaaatggaaattctatttgaaagatggtgttatgtgttttggagggagagactatgtatttgcaaaagccattggtgatgcagagtggtaaaccttgtgagctcagtacatctattttgtgaacatcagttggattatattgcatattgtgaattcatttttattttgaatatagtccagcacagagctgttcaaatttttagttcactgtatggaatttaataaaattataattcagatgcagatacaatt

SEQ ID NO: 74008 - DNA, 1335 bp, Artificial Sequence
  derived and/or modified sequence
atggcctgcctgaaccctgtgctgtgggagaccaaggtgctgcagagcaaggccacagaggacttcttcaggaacagcatccagagccccctcttcaccctgcagctgccccacagcctgcaccagaccctgcagagcagcacagccagcctggtgatcccagctggccgcaccctgcccagcttcaccacagctgagctgggcaccagcaacagcagcgccaacttcaccttccctggctaccccatccacgtgcctgctggggtgaccctgcagacagtgtctggccacctgtacaaggtgaatgtgcccatcatggtgacagagaccagcggccgggccggcatcctgcagcaccccatccagcaggtgttccagcagctgggccagcccagcgtcatccagacctctgtgccccagctgaacccctggagcctgcaggccaccacagagaagagccagagaattgagaccgtgctgcagcagcctgccatcctgcccagcggccctgtggacaggaagcacctggagaatgccaccagtgacatcctggtgtccccaggaaatgagcacaagatcgtgcctgaggccctgctgtgccaccaggagagcagccactacatcagcctgcccggggtggtgttcagcccccaggtgtcccagaccaacagcaatgtggagagcgtgctgagcggcagcgcctccatggcccagaacctgcatgatgagagcctgagcaccagcccccacggggccctgcaccagcacgtgacagacatccagctgcacatcctgaagaacaggatgtatggctgtgacagcgtgaagcagcccagaaatattgaggagcccagcaacatccctgtgtctgagaaggacagcaacagccaggtggacctgagcatccgggtgacagatgatgacattggagagatcatccaggtggatggcagcggggacaccagcagcaatgaggagatcggcagcaccagagatgctgatgaaaatgagttcctgggcaacattgatggaggagacctgaaggtgcctgaggaggaggccgacagcatcagcaatgaagacagcgccaccaacagcagtgacaatgaagacccccaggtgaacatcgtggaggaggaccccctgaacagcggagatgatgtgtctgagcaggatgtgcctgacctgtttgacacagacaacgtgattgtgtgccagtatgacaagatccacaggagcaagaacaagtggaagttctacctgaaggatggagtgatgtgcttcggcggccgggactatgtgtttgccaaggccatcggagatgctgagtggtag

SEQ ID NO: 74009 - DNA, 1335 bp, Artificial Sequence
  derived and/or modified sequence
atggcctgcctgaaccccgtgctgtgggagaccaaggtgctgcagtctaaagcgacagaggacttcttcagaaattcaatccaatctcccctgtttaccctgcagctgcctcattcactccaccagaccctgcagtcttctactgcgagtcttgttatccccgctggccgaactctgccgtcatttactacggcagagctgggtacgagtaattcttccgccaactttacgttcccagggtacccaatccacgtccccgccggggtgacacttcagacagtgagtggacacctttacaaggtgaatgtgcctattatggtcaccgaaaccagtgggagggccggaatacttcagcaccccatccagcaggtcttccagcaactcggacagccttcagttattcaaacctcagtgccccagctcaatccgtggagtctccaggcgaccaccgaaaagtctcagagaatcgaaacagtgctgcagcagccagcaatactacccagcgggccagttgaccgaaagcatctcgaaaacgctacctctgatatcttggtctcacctgggaatgaacacaaaattgtgcctgaagccctgctgtgccatcaggagtccagtcattatatctcgctacctggcgtggtgtttagcccacaggtctcgcagaccaacagtaatgttgagtcagttctgtccggctcagcctcaatggcgcagaacctccacgacgagtccctgagcacttcaccccacggagccttacaccagcatgtcaccgacatccaactccatatactgaaaaaccgtatgtacggctgtgactccgtcaaacagcctcggaatatcgaggaaccttccaacattcccgttagcgagaaagactcaaattcccaagtagatcttagtattagagtaacagacgacgatataggggagattattcaggtagacggaagcggcgacacttcctcaaatgaggagatcggtagcacccgggacgctgacgagaatgaatttttgggcaatatcgacggaggcgatctgaaggtgccagaagaagaggctgattctatctctaatgaggatagtgcgaccaatagttccgacaatgaggatccccaggttaatatcgtggaggaggaccccctcaattcaggggatgatgtgtcagagcaggacgttcccgatttgttcgataccgacaacgttattgtctgtcaatatgacaaaatccatcgatcaaaaaataaatggaaattttacctgaaggacggcgtcatgtgttttggcggaagggattatgttttcgcaaaagccattggagacgcggaatggtag

SEQ ID NO: 74010 - DNA, 1335 bp, Artificial Sequence
  derived and/or modified sequence
atggcatgtcttaatcctgtcttatgggaaactaaagtcctacagtccaaggctaccgaagacttctttcggaattcaatccagtccccactcttcactctacagctcccccattctctccatcagaccttacagtctagcaccgcatctttggtgatcccagccggacgaactctgccaagtttcactaccgctgagctgggcacaagcaactcttcggccaactttacattcccagggtaccccatccacgtgcccgctggggtgacactccagaccgtgagtggccacctctacaaagtcaacgtgcccataatggtgaccgaaaccagcggccgagctgggatccttcaacacccaatccaacaggtttttcaacagctggggcagccatcagttatccagacatccgtgccacagctgaatccatggtccttgcaagctactaccgagaagtcgcagagaattgagaccgtacttcagcagccagccatccttccgtctggtcctgtggatagaaagcacttggagaatgctacctcagacatcctggtaagccctggcaacgaacacaaaattgtgcctgaggcccttctttgccaccaggagtcatcccattacatctccctgcccggagttgtattctcaccacaggtgtctcaaactaatagtaatgttgagtcagtgcttagcggttccgcatccatggcccaaaacctgcacgacgagtctctttccacaagtccccatggtgccttgcaccaacacgtcaccgatatccagttgcacattcttaaaaatcggatgtacggatgcgactcagttaaacagcctagaaacattgaggagccttcgaacatccccgtcagtgaaaaagatagcaatagtcaggtcgacttatctatcagagtgaccgacgacgatatcggtgagattattcaagtagatggcagcggcgatacatcgagcaatgaggaaatcgggagcacccgggatgctgacgagaatgaattcctgggaaatattgacggcggagacctgaaggtcccagaggaggaagctgactctatctcaaacgaagattccgcgactaactcttcagataacgaagacccccaggttaatatcgtggaggaagaccctctgaactccggtgatgacgtctccgagcaggacgttcccgacctctttgatactgataacgttattgtttgtcagtatgacaagatacatcggagcaagaacaagtggaagttttatcttaaggatggcgtgatgtgtttcgggggacgcgactacgtgttcgccaaagcgatcggtgatgccgagtggtag

SEQ ID NO: 74011 - DNA, 1335 bp, Artificial Sequence
  derived and/or modified sequence
atggcctgcctgaaccccgtgctgtgggagaccaaggtgctgcagagcaaggccaccgaggacttcttcagaaacagcatccagagccccctgttcaccctgcagctgccccacagcctgcaccagaccctgcagagcagcaccgccagcctggtgatccccgccggcagaaccctgcccagcttcaccaccgccgagctgggcaccagcaacagcagcgccaacttcaccttccccggctaccccatccacgtgcccgccggcgtgaccctgcagaccgtgagcggccacctgtacaaggtgaacgtgcccatcatggtgaccgagaccagcggcagagccggcatcctgcagcaccccatccagcaggtgttccagcagctgggccagcccagcgtgatccagaccagcgtgccccagctgaacccctggagcctgcaggccaccaccgagaagagccagagaatcgagaccgtgctgcagcagcccgccatcctgcccagcggccccgtggacagaaagcacctggagaacgccaccagcgacatcctggtgagccccggcaacgagcacaagatcgtgcccgaggccctgctgtgccaccaggagagcagccactacatcagcctgcccggcgtggtgttcagcccccaggtgagccagaccaacagcaacgtggagagcgtgctgagcggcagcgccagcatggcccagaacctgcacgacgagagcctgagcaccagcccccacggcgccctgcaccagcacgtgaccgacatccagctgcacatcctgaagaacagaatgtacggctgcgacagcgtgaagcagcccagaaacatcgaggagcccagcaacatccccgtgagcgagaaggacagcaacagccaggtggacctgagcatcagagtgaccgacgacgacatcggcgagatcatccaggtggacggcagcggcgacaccagcagcaacgaggagatcggcagcaccagagacgccgacgagaacgagttcctgggcaacatcgacggcggcgacctgaaggtgcccgaggaggaggccgacagcatcagcaacgaggacagcgccaccaacagcagcgacaacgaggacccccaggtgaacatcgtggaggaggaccccctgaacagcggcgacgacgtgagcgagcaggacgtgcccgacctgttcgacaccgacaacgtgatcgtgtgccagtacgacaagatccacagaagcaagaacaagtggaagttctacctgaaggacggcgtgatgtgcttcggcggcagagactacgtgttcgccaaggccatcggcgacgccgagtggtag

SEQ ID NO: 74012 - DNA, 978 bp, Artificial Sequence
  derived and/or modified sequence
atggccaacgccctggccagcgccacctgcgagagatgcaagggcggcttcgcccccgccgagaagatcgtgaacagcaacggcgagctgtaccacgagcagtgcttcgtgtgcgcccagtgcttccagcagttccccgagggcctgttctacgagttcgagggcagaaagtactgcgagcacgacttccagatgctgttcgccccctgctgccaccagtgcggcgagttcatcatcggcagagtgatcaaggccatgaacaacagctggcaccccgagtgcttcagatgcgacctgtgccaggaggtgctggccgacatcggcttcgtgaagaacgccggcagacacctgtgcagaccctgccacaacagagagaaggccagaggcctgggcaagtacatctgccagaagtgccacgccatcatcgacgagcagcccctgatcttcaagaacgacccctaccaccccgaccacttcaactgcgccaactgcggcaaggagctgaccgccgacgccagagagctgaagggcgagctgtactgcctgccctgccacgacaagatgggcgtgcccatctgcggcgcctgcagaagacccatcgagggcagagtggtgaacgccatgggcaagcagtggcacgtggagcacttcgtgtgcgccaagtgcgagaagcccttcctgggccacagacactacgagagaaagggcctggcctactgcgagacccactacaaccagctgttcggcgacgtgtgcttccactgcaacagagtgatcgagggcgacgtggtgagcgccctgaacaaggcctggtgcgtgaactgcttcgcctgcagcacctgcaacaccaagctgaccctgaagaacaagttcgtggagttcgacatgaagcccgtgtgcaagaagtgctacgagaagttccccctggagctgaagaagagactgaagaagctggccgagaccctgggcagaaagtag

SEQ ID NO: 74013 - DNA, 978 bp, Artificial Sequence
  derived and/or modified sequence
atggcgaatgcacttgcgagtgcgacctgtgagcggtgtaagggaggtttcgcccctgccgagaagattgtgaactcaaacggtgagctgtaccatgagcagtgctttgtctgtgctcaatgcttccagcagtttcccgagggccttttttacgagttcgaggggagaaaatactgcgagcacgacttccagatgctttttgccccgtgttgccatcagtgtggggaatttatcattggccgggtcatcaaggcaatgaacaactcatggcacccagagtgctttcggtgcgacctttgtcaggaagtattagcggacattggattcgtgaaaaacgctgggcgccacctgtgtagaccctgccataaccgggaaaaagcccgcgggctagggaagtatatctgccagaagtgtcacgccattatcgacgaacagccgctcatctttaagaatgacccttatcacccagaccacttcaactgcgctaactgcggcaaagagcttaccgctgatgcccgggagctgaagggggaattgtactgcctgccctgtcacgacaaaatgggggtcccaatctgtggggcatgtcggaggccaatcgagggtcgggtcgtcaatgcaatgggaaagcaatggcacgtggagcattttgtctgtgccaagtgcgagaagccatttcttggccatcggcactacgagcggaaaggcctcgcatactgtgagacacactataaccagctctttggagacgtttgctttcattgcaatagggtaatcgaaggagacgtagtttcagcacttaacaaggcttggtgtgttaattgcttcgcatgttctacctgtaacacaaagctcaccctgaagaataaatttgttgagttcgacatgaaaccagtatgtaagaagtgttatgagaaattccctctcgaattaaaaaaaagacttaagaagctggccgaaactctcggccgcaagtag

SEQ ID NO: 74014 - DNA, 978 bp, Artificial Sequence
  derived and/or modified sequence
atggctaatgctctggcttctgctacctgcgaaaggtgtaaaggtggatttgctcccgctgagaagatagtcaactcaaatggagagctgtaccacgagcagtgctttgtttgtgcacagtgtttccagcagtttccagaaggcctgttttacgaattcgagggcaggaaatattgcgagcatgacttccaaatgttgttcgctccttgctgtcatcagtgcggcgaatttatcattggccgggtaatcaaagctatgaacaactcctggcacccagaatgtttccgttgcgacctgtgccaggaagttcttgccgatatcggattcgtgaagaatgcaggccggcatttgtgtcggccttgccacaatagggagaaggcgcgtggtctgggaaagtatatttgccaaaaatgccatgcaatcattgatgaacagcctctgatctttaagaacgatccctaccatccagaccacttcaattgtgcaaactgtggcaaagagttgacagccgacgctcgcgagttgaaaggcgagctttactgtttaccatgccatgataaaatgggagtacccatttgcggcgcatgtcgacgcccaatcgagggacgggtggtgaatgccatgggtaaacagtggcatgtggagcactttgtatgcgccaagtgtgaaaagccgttccttggccatagacactacgaaagaaaggggctggcctattgtgagacccattataaccagctgttcggtgatgtctgttttcactgtaacagagtgatcgaaggggatgtggtgtcggccctcaataaagcatggtgcgtaaactgctttgcctgctcaacctgtaacactaaactgacccttaaaaacaagttcgtcgagttcgatatgaagccagtgtgtaaaaagtgctacgaaaagttcccgttagaattgaagaagcgactgaaaaaactggccgagacgctggggcggaagtag

SEQ ID NO: 74015 - DNA, 978 bp, Artificial Sequence
  derived and/or modified sequence
atggctaacgccctggcctccgcgacatgtgagcgctgcaaggggggttttgcccctgccgaaaaaatcgtgaattctaatggtgagctctaccatgagcagtgctttgtctgtgcccagtgctttcagcagttcccagagggcctgttctatgagttcgaggggcgcaagtactgtgaacatgactttcagatgcttttcgctccttgttgtcatcagtgcggcgaattcatcattggcagagtgataaaggctatgaataacagctggcatcccgagtgttttcggtgtgatttgtgccaggaggtgctggcagatatcggattcgtcaagaatgcaggccgacatttgtgtcgtccttgccacaatcgtgagaaagctcggggcctcggcaagtacatctgtcagaagtgccatgccatcattgatgaacaaccattgatcttcaagaatgatccctaccatccagatcacttcaactgtgcgaactgcgggaaagaacttaccgcagacgcccgcgaacttaaaggagagctgtactgcctgccctgtcatgacaaaatgggagttcctatatgcggcgcctgcagacggccaatcgagggtagggttgtgaatgctatgggaaagcagtggcatgtggagcactttgtgtgcgcgaagtgcgagaagccatttttgggacaccgccactatgagcggaaagggttagcttactgtgagacacattataatcagctttttggcgatgtgtgtttccactgtaaccgggttatcgagggcgatgttgtgtctgccttgaataaagcctggtgcgtaaactgcttcgcgtgctccacgtgtaacaccaagctcactctgaaaaataagttcgtagaattcgacatgaagcctgtatgcaaaaagtgttatgagaagtttcctctagagcttaaaaagcggctcaagaagctcgccgagaccttgggcagaaagtag

SEQ ID NO: 74016 - DNA, 978 bp, Artificial Sequence
  derived and/or modified sequence
atggccaatgccctggccagcgccacctgtgagcgctgcaagggcggctttgccccagctgagaagatcgtgaacagcaatggagagctgtaccacgagcagtgctttgtgtgtgcccagtgcttccagcagtttcctgagggcctcttctatgaatttgagggcaggaagtactgtgaacatgacttccagatgctgtttgccccctgctgccaccagtgtggggagttcatcatcggccgggtcatcaaggccatgaacaacagctggcaccctgagtgcttccgctgtgacctgtgccaggaggtgctggccgacattggatttgtgaagaatgccggccgccacctgtgccggccctgccacaaccgggagaaggcccggggcctgggcaagtacatctgccagaagtgccacgccatcattgatgagcagcccctcatcttcaagaatgacccctaccacccagaccacttcaactgtgccaactgtgggaaggagctgacagcagatgcccgggagctgaagggggagctgtactgcctgccctgccacgacaagatgggcgtgcccatctgtggggcctgcagaagacccatcgagggccgggtggtgaatgccatgggcaagcagtggcacgtggagcactttgtgtgtgccaagtgtgagaagcccttcctgggccaccgccactatgaaaggaagggcctggcctactgtgagacccactacaaccagctgtttggagatgtgtgcttccactgcaacagagtgattgaaggagatgtggtgtctgccctgaacaaggcctggtgtgtgaactgctttgcctgcagcacctgcaacaccaagctgaccctgaagaacaagtttgtggagtttgacatgaagcctgtgtgcaagaagtgctatgagaagttccccctggagctgaagaagaggctgaagaagctggccgagaccctgggcaggaagtag

SEQ ID NO: 74017 - DNA, 978 bp, Artificial Sequence
  derived and/or modified sequence
atggccaacgccctggccagcgccacctgcgagcggtgcaagggcggcttcgcccctgccgagaagatcgtaaatagcaacggagagctgtaccacgagcagtgctttgtgtgtgcacagtgcttccaacagtttccagagggactattctatgagtttgaagggcgaaagtattgcgagcacgacttccaaatgctgttcgcaccttgttgtcaccaatgtggcgaattcattatcgggcgggttatcaaggctatgaataactcttggcaccccgagtgttttcgctgtgatctctgccaggaggtgctggcagacatcggcttcgtgaagaatgcgggccgtcatctgtgccggccatgccacaacagggagaaggctcggggcctaggcaagtacatctgtcagaagtgccacgctattatcgacgaacaacccttgatctttaagaatgatccttaccaccctgatcacttcaactgtgccaactgcgggaaagagctaacagccgatgccagggaactcaaaggagagttgtattgtcttccatgccatgataaaatgggtgttcctatctgcggggcctgtcgccgacctattgaaggtcgcgtggtgaacgcaatgggcaagcagtggcacgttgagcactttgtgtgtgctaaatgcgaaaagcctttcctggggcacaggcattatgagcgcaaaggactggcctactgcgagacacattataatcagctttttggtgacgtgtgctttcattgtaacagggtgatagaaggcgatgtcgtttcggctctgaacaaggcctggtgcgtcaattgtttcgcgtgttctacatgtaacactaaattgactctcaaaaacaagtttgttgagttcgatatgaagcccgtgtgtaaaaagtgttacgagaagttccccctagagctgaaaaaaagactaaagaagctggccgagacattaggccgcaaatag

SEQ ID NO: 74018 - DNA, 978 bp, Artificial Sequence
  derived and/or modified sequence
atggccaacgccctggccagcgccacctgcgagcggtgcaagggcggtttcgctcctgccgagaagattgtgaactctaatggggagttatatcacgaacaatgcttcgtgtgcgcccagtgcttccagcagtttcctgagggtctcttttacgagtttgagggcagaaagtattgcgagcatgattttcagatgttatttgccccttgctgccaccaatgcggtgagtttattattggacgtgtgattaaggccatgaataattcgtggcaccctgagtgtttcaggtgtgatttatgccaggaggtcttggccgacatcggcttcgtgaagaacgcgggcaggcacctttgccgaccatgccacaatagagagaaagctcgcgggctggggaaatacatctgccaaaaatgtcacgcaataattgatgagcagcctctcatcttcaaaaacgacccttatcatcctgaccacttcaattgtgccaactgtggcaaggagcttacagctgacgctagagagctgaaaggagaactttactgcttgccttgccatgataagatgggggtccctatctgtggcgcctgccgcaggccgatcgagggcagggttgttaacgccatgggtaaacagtggcatgtagaacactttgtatgcgcaaaatgtgaaaagccctttctcgggcaccgccactatgagagaaagggacttgcttactgcgaaacccactacaaccagctctttggagatgtctgtttccactgcaacagggtcatagagggcgacgtggtgtcagcactgaacaaggcctggtgcgtgaactgctttgcatgttctacctgcaacactaaactgacgttgaaaaacaaattcgtggaatttgatatgaaaccggtttgcaagaagtgttacgaaaaattccccctggaattaaagaagcgccttaagaagcttgccgaaacgctcggaagaaagtag

SEQ ID NO: 74019 - DNA, 978 bp, Artificial Sequence
  derived and/or modified sequence
atggccaacgccctggccagcgccacctgcgagcggtgcaagggcggattcgccccggctgagaaaattgtgaactccaacggggaactctatcacgagcagtgttttgtctgcgcccagtgcttccagcagttccccgaaggactgttctacgaatttgagggccggaagtattgcgaacacgacttccagatgttgtttgcaccttgctgccaccagtgtggcgagtttattatcggccgcgtaatcaaggctatgaacaacagttggcaccctgaatgcttccgctgtgacctctgtcaagaggtgctggccgatattggtttcgtgaagaatgctggtaggcacttgtgtcgaccctgtcacaacagagagaaggcaagaggcctaggcaagtatatctgccagaaatgccatgcaatcatcgacgagcagcccctgatctttaagaacgatccatatcatccagatcatttcaattgtgctaattgcggcaaagaattgactgccgatgcacgggagctgaaaggggagttgtactgcttgccatgtcacgataagatgggcgttccaatttgtggagcatgtcggcggcctattgaggggcgggttgtaaatgcgatgggaaagcagtggcatgtggagcatttcgtgtgcgctaaatgtgagaaaccattcctgggccatagacattatgagcggaaaggcctggcctattgtgaaacccattacaatcagctgttcggcgatgtttgtttccactgtaacagggtcatcgaaggggacgtggtcagcgccctgaacaaggcgtggtgcgtgaactgttttgcatgctctacttgcaacaccaagctgacactcaaaaataagtttgttgaatttgacatgaagccggtatgcaagaagtgctacgaaaagttccctctggagctgaagaaaaggttgaagaaacttgctgaaactctggggagaaagtag

SEQ ID NO: 74020 - DNA, 978 bp, Artificial Sequence
  derived and/or modified sequence
atggcgaatgcactggcgagtgccacatgcgaacggtgcaaaggaggattcgctcctgcagagaaaatcgtcaactctaatggggaactctaccatgagcagtgctttgtctgcgcacaatgttttcagcagttcccagaagggctcttttatgagtttgagggaaggaaatattgcgagcatgattttcagatgttattcgccccatgctgccaccaatgcggtgaattcatcatcgggagagttatcaaggctatgaacaattcctggcaccccgagtgctttaggtgtgatctatgtcaggaggtgctggctgatatcgggttcgttaagaacgcgggaaggcacctgtgtcgcccttgccataatagggaaaaagcccgagggctgggcaaatacatttgccagaagtgtcatgccattatagacgagcaacccctaatattcaagaacgacccctatcatccggaccatttcaattgcgccaattgtgggaaggaattgaccgccgacgctagggagctgaagggagaattatattgtctgccatgccatgacaagatgggtgtgccaatatgcggggcatgccgcagaccaattgagggcagggtggtgaatgccatgggcaagcagtggcatgtagagcattttgtgtgtgctaaatgcgaaaaacccttcctagggcatcgccactatgagagaaaaggcctggcctactgtgagacccactataatcaactctttggtgatgtttgcttccattgtaacagagtgatcgagggtgacgtcgtttcagctctcaacaaggcgtggtgtgtgaactgctttgcttgctccacatgtaacaccaaactcacactaaaaaataagttcgttgaatttgatatgaagccggtatgtaaaaaatgctatgagaagtttccgctagaactgaagaagagactcaagaagctggctgaaaccctgggtcgcaagtag

SEQ ID NO: 74021 - DNA, 978 bp, Artificial Sequence
  derived and/or modified sequence
atggccaacgcgctggccagcgccacatgtgagagatgtaagggaggtttcgccccagctgaaaaaattgtgaattccaatggagaactgtaccacgaacagtgcttcgtctgtgcccagtgtttccagcagttcccagaggggctgttctatgaattcgagggcaggaagtactgcgaacatgatttccaaatgctttttgctccgtgctgccatcagtgtggggagttcatcatcgggagggttatcaaggccatgaacaattcctggcaccccgagtgcttcagatgtgacctttgtcaggaggtgcttgctgatataggtttcgtgaagaacgcaggtaggcacctgtgtcggccatgccacaacagggaaaaggctcggggattgggtaaatacatctgccagaagtgccatgcaatcatagatgagcagcctctcatcttcaagaacgacccctatcatccggatcactttaactgtgccaattgtggaaaggagctgacggccgatgctcgagagctaaaaggcgagttgtattgtctgccatgccacgacaagatgggagttccaatttgtggcgcttgcagacgcccaatcgaagggagagttgtgaacgcaatgggcaaacaatggcacgtggaacactttgtatgcgccaaatgtgaaaagccatttttggggcatcggcactacgaaaggaaagggctagcttactgtgaaactcattataaccagcttttcggcgatgtgtgttttcactgtaatcgcgtcatcgaaggggatgtcgtatccgcccttaacaaggcgtggtgcgtgaactgcttcgcgtgctctacctgcaatacgaagctaacgctcaagaacaagtttgtggaattcgacatgaagcctgtctgtaaaaagtgctacgagaaatttccccttgagcttaagaagagattaaagaaacttgccgaaaccctcggcagaaaatag

SEQ ID NO: 74022 - DNA, 978 bp, Artificial Sequence
  derived and/or modified sequence
atggccaacgcactagcttctgccacttgtgagcggtgtaagggaggattcgcaccggctgagaaaattgtgaatagcaacggcgaactctatcacgagcagtgcttcgtttgtgcacagtgtttccagcaattccccgaggggcttttctacgaattcgaagggaggaaatattgtgagcacgactttcagatgctgtttgctccctgctgccaccaatgcggagagtttataattggcagagtgattaaagccatgaataattcttggcatccagagtgcttcaggtgcgatctctgccaggaggtcctggctgatattggattcgtgaagaacgccggacgccatctgtgtcgcccttgtcacaatcgggaaaaggcgagaggattggggaaatacatttgccagaagtgccacgccattattgacgagcagcctctcattttcaaaaatgacccctaccatcctgatcacttcaattgcgccaactgcgggaaggaattgactgcagacgcccgagagctaaagggagagctgtattgtctcccttgccatgataagatgggagtgcctatttgtggtgcctgtcgcagaccaatcgagggcagggtggtaaacgcaatgggaaaacagtggcacgtcgagcacttcgtgtgtgctaagtgcgaaaaacccttcctgggacaccgtcattatgagcgcaagggtctagcgtactgcgaaacacactacaaccagctattcggggacgtatgtttccactgcaacagagtgattgagggagacgtggtatccgcgctcaacaaagcctggtgtgttaactgcttcgcttgctctacctgtaacaccaagctgaccttaaagaataaattcgtcgagttcgatatgaagcccgtctgcaaaaagtgctatgagaaattccccttggagctcaaaaagcggctgaaaaagctagctgagaccttaggaagaaagtag

SEQ ID NO: 74023 - DNA, 369 bp, Artificial Sequence
  derived and/or modified sequence
atgctgttcgccccctgctgccaccagtgcggcgagttcatcatcggcagagtgatcaaggccatgaacaacagctggcaccccgagtgcttcagatgcgacctgtgccaggaggtgctggccgacatcggcttcgtgaagaacgccggcagacacctgtgcagaccctgccacaacagagagaaggccagaggcctgggcaagtacatctgccagaagtgccacgccatcatcgacgagcagcccctgatcttcaagaacgacccctaccaccccgaccacttcaactgcgccaactgcggccaggagggcagcgactgcagatgcaccggcgccgagagaggcgccatcctgcccgccatgccctag

SEQ ID NO: 74024 - DNA, 369 bp, Artificial Sequence
  derived and/or modified sequence
atgcttttcgcgccttgctgtcaccaatgcggtgagtttatcatcggacgcgttatcaaagccatgaacaactcctggcacccggaatgctttcgttgcgacctgtgccaggaggtgctggctgacattggtttcgtcaagaacgccggcagacacctttgtcggccctgtcacaaccgggagaaagctagaggcctgggtaaatatatttgtcagaaatgtcatgctatcatcgacgagcaacccttaatctttaagaatgacccatatcaccctgatcactttaactgcgccaactgcggacaagagggctccgactgtcgatgcaccggagccgaacgcggggccattctccctgccatgccgtag

SEQ ID NO: 74025 - DNA, 369 bp, Artificial Sequence
  derived and/or modified sequence
atgctgttcgctccttgttgtcatcagtgtggagagttcatcatcgggagagtgataaaagccatgaacaacagctggcaccctgagtgttttcgatgcgatctatgccaggaagtgctagctgacatcggattcgtgaagaacgcgggcagacacctgtgtcgaccctgccataaccgggaaaaggctaggggcctggggaaatacatctgccagaagtgccacgctattatcgatgagcaacccctcatctttaagaacgacccatatcatccagatcacttcaactgcgccaattgcggccaggagggtagcgattgtagatgtaccggagcagagagaggcgctatactcccagctatgccttag

SEQ ID NO: 74026 - DNA, 369 bp, Artificial Sequence
  derived and/or modified sequence
atgctgtttgccccctgctgccaccagtgtggggagttcatcatcggccgggtcatcaaggccatgaacaacagctggcaccctgagtgcttccgctgtgacctgtgccaggaggtgctggccgacattggatttgtgaagaatgccggccgccacctgtgccggccctgccacaaccgggagaaggcccggggcctgggcaagtacatctgccagaagtgccacgccatcattgatgagcagcccctcatcttcaagaatgacccctaccacccagaccacttcaactgtgccaactgtggccaggagggcagtgactgccgctgcaccggggctgagcggggggccatcctgcctgccatgccctag

SEQ ID NO: 74027 - DNA, 369 bp, Artificial Sequence
  derived and/or modified sequence
atgctgttcgccccctgctgccaccagtgcggcgagttcatcatcggaagagtaattaaagccatgaataactcctggcatccagagtgtttcaggtgcgacttgtgtcaggaagtccttgccgacattgggtttgtcaaaaatgccggacgacacctgtgtcgcccatgtcacaatagagaaaaagcaagagggcttggcaaatacatatgccagaaatgccacgcaattatcgatgaacagccccttatcttcaaaaatgacccctaccaccccgatcatttcaattgtgctaattgcgggcaggaggggtccgattgtcgctgtaccggggctgagagaggagcaatccttcctgctatgccttag

SEQ ID NO: 74028 - DNA, 369 bp, Artificial Sequence
  derived and/or modified sequence
atgctgttcgccccctgctgccaccagtgcggcgagttcatcatcggcagggtaataaaagcgatgaataattcctggcaccctgagtgtttcaggtgcgacctctgtcaagaggtgctggccgacatcggatttgtgaagaacgcgggaaggcacttatgtagaccatgccacaaccgcgaaaaagccagaggattaggcaagtacatatgtcaaaagtgccacgctatcattgacgaacagcccctcatttttaaaaacgacccgtaccatcccgaccactttaactgtgcaaactgcggccaggaggggagcgactgccggtgcactggagccgaaaggggggccattttgccagccatgccatag

SEQ ID NO: 74029 - DNA, 369 bp, Artificial Sequence
  derived and/or modified sequence
atgctgttcgccccatgctgtcatcagtgtggagagttcataatcgggcgtgtgattaaagccatgaacaattcctggcaccctgagtgttttaggtgcgatctgtgccaggaggtgctcgcagacataggatttgtgaagaatgccggaagacacctgtgcagaccatgtcacaatagagaaaaagctcgtggactgggaaagtatatctgccaaaagtgtcatgctattatcgacgagcaacccttgatttttaaaaatgatccgtatcatcctgaccacttcaattgtgcaaattgtggccaagagggatcagattgcaggtgtaccggagcggagcgcggtgctattctgccagccatgccgtag

SEQ ID NO: 74030 - DNA, 369 bp, Artificial Sequence
  derived and/or modified sequence
atgttattcgctccctgctgtcatcagtgtggggaattcattattggcagagtgatcaaagcaatgaataattcctggcatcccgaatgttttcgatgtgatctgtgtcaggaggtgctggcggacatcggtttcgtgaaaaacgctggacggcacttatgccgaccatgtcataatcgggagaaagctcgaggtctgggcaaatacatttgtcagaaatgtcacgccattatagatgagcagcctctgatctttaagaatgacccttaccaccccgaccattttaattgtgcaaactgcggtcaggaggggtccgactgtcgctgcaccggagcagagcgcggagccatactgcccgcaatgccctag

SEQ ID NO: 74031 - protein, 1101 aa, Artificial Sequence
  derived and/or modified sequence
MDRAPTEQNVKLSAEVEPFIPQKKSPDTFMIPMALPNDNGSVSGVEPTPIPSYLITCYPFVQENQSNRQFPLYNNDIRWQQPNPNPTGPYFAYPIISAQPPVSTEYTYYQLMPAPCAQVMGFYHPFPTPYSNTFQAANTVNAITTECTERPSQLGQVFPLSSHRSRNSNRGSVVPKQQLLQQHIKSKRPLVKNVATQKETNAAGPDSRSKIVLLVDASQQTDFPSDIANKSLSETTATMLWKSKGRRRRASHPTAESSSEQGASEADIDSDSGYCSPKHSNNQPAAGALRNPDSGTMNHVESSMCAGGVNWSNVTCQATQKKPWMEKNQTFSRGGRQTEQRNNSQVGFRCRGHSTSSERRQNLQKRPDNKHLSSSQSHRSDPNSESLYFEDEDGFQELNENGNAKDENIQQKLSSKVLDDLPENSPINIVQTPIPITTSVPKRAKSQKKKALAAALATAQEYSEISMEQKKLQEALSKAAGKKNKTPVQLDLGDMLAALEKQQQAMKARQITNTRPLSYTVVTAASFHTKDSTNRKPLTKSQPCLTSFNSVDIASSKAKKGKEKEIAKLKRPTALKKVILKEREEKKGRLTVDHNLLGSEEPTEMHLDFIDDLPQEIVSQEDTGLSMPSDTSLSPASQNSPYCMTPVSQGSPASSGIGSPMASSTITKIHSKRFREYCNQVLCKEIDECVTLLLQELVSFQERIYQKDPVRAKARRRLVMGLREVTKHMKLNKIKCVIISPNCEKIQSKGGLDEALYNVIAMAREQEIPFVFALGRKALGRCVNKLVPVSVVGIFNYFGAESLFNKLVELTEEARKAYKDMVAAMEQEQAEEALKNVKKVPHHMGHSRNPSAASAISFCSVISEPISEVNEKEYETNWRNMVETSDGLEASENEKEVSCKHSTSEKPSKLPFDTPPIGKQPSLVATGSTTSATSAGKSTASDKEEVKPDDLEWASQQSTETGSLDGSCRDLLNSSITSTTSTLVPGMLEEEEDEDEEEEEDYTHEPISVEVQLNSRIESWVSETQRTMETLQLGKTLNGSEEDNVEQSGEEEAEAPEVLEPGMDSEAWTADQQASPGQQKSSNCSSLNKEHSDSNYTTQTT

SEQ ID NO: 74032 - DNA, 3306 bp, Artificial Sequence
  derived and/or modified sequence
atggacagagcccccaccgagcagaacgtgaagctgagcgccgaggtggagcccttcatcccccagaagaagagccccgacaccttcatgatccccatggccctgcccaacgacaacggcagcgtgagcggcgtggagcccacccccatccccagctacctgatcacctgctaccccttcgtgcaggagaaccagagcaacagacagttccccctgtacaacaacgacatcagatggcagcagcccaaccccaaccccaccggcccctacttcgcctaccccatcatcagcgcccagccccccgtgagcaccgagtacacctactaccagctgatgcccgccccctgcgcccaggtgatgggcttctaccaccccttccccaccccctacagcaacaccttccaggccgccaacaccgtgaacgccatcaccaccgagtgcaccgagagacccagccagctgggccaggtgttccccctgagcagccacagaagcagaaacagcaacagaggcagcgtggtgcccaagcagcagctgctgcagcagcacatcaagagcaagagacccctggtgaagaacgtggccacccagaaggagaccaacgccgccggccccgacagcagaagcaagatcgtgctgctggtggacgccagccagcagaccgacttccccagcgacatcgccaacaagagcctgagcgagaccaccgccaccatgctgtggaagagcaagggcagaagaagaagagccagccaccccaccgccgagagcagcagcgagcagggcgccagcgaggccgacatcgacagcgacagcggctactgcagccccaagcacagcaacaaccagcccgccgccggcgccctgagaaaccccgacagcggcaccatgaaccacgtggagagcagcatgtgcgccggcggcgtgaactggagcaacgtgacctgccaggccacccagaagaagccctggatggagaagaaccagaccttcagcagaggcggcagacagaccgagcagagaaacaacagccaggtgggcttcagatgcagaggccacagcaccagcagcgagagaagacagaacctgcagaagagacccgacaacaagcacctgagcagcagccagagccacagaagcgaccccaacagcgagagcctgtacttcgaggacgaggacggcttccaggagctgaacgagaacggcaacgccaaggacgagaacatccagcagaagctgagcagcaaggtgctggacgacctgcccgagaacagccccatcaacatcgtgcagacccccatccccatcaccaccagcgtgcccaagagagccaagagccagaagaagaaggccctggccgccgccctggccaccgcccaggagtacagcgagatcagcatggagcagaagaagctgcaggaggccctgagcaaggccgccggcaagaagaacaagacccccgtgcagctggacctgggcgacatgctggccgccctggagaagcagcagcaggccatgaaggccagacagatcaccaacaccagacccctgagctacaccgtggtgaccgccgccagcttccacaccaaggacagcaccaacagaaagcccctgaccaagagccagccctgcctgaccagcttcaacagcgtggacatcgccagcagcaaggccaagaagggcaaggagaaggagatcgccaagctgaagagacccaccgccctgaagaaggtgatcctgaaggagagagaggagaagaagggcagactgaccgtggaccacaacctgctgggcagcgaggagcccaccgagatgcacctggacttcatcgacgacctgccccaggagatcgtgagccaggaggacaccggcctgagcatgcccagcgacaccagcctgagccccgccagccagaacagcccctactgcatgacccccgtgagccagggcagccccgccagcagcggcatcggcagccccatggccagcagcaccatcaccaagatccacagcaagagattcagagagtactgcaaccaggtgctgtgcaaggagatcgacgagtgcgtgaccctgctgctgcaggagctggtgagcttccaggagagaatctaccagaaggaccccgtgagagccaaggccagaagaagactggtgatgggcctgagagaggtgaccaagcacatgaagctgaacaagatcaagtgcgtgatcatcagccccaactgcgagaagatccagagcaagggcggcctggacgaggccctgtacaacgtgatcgccatggccagagagcaggagatccccttcgtgttcgccctgggcagaaaggccctgggcagatgcgtgaacaagctggtgcccgtgagcgtggtgggcatcttcaactacttcggcgccgagagcctgttcaacaagctggtggagctgaccgaggaggccagaaaggcctacaaggacatggtggccgccatggagcaggagcaggccgaggaggccctgaagaacgtgaagaaggtgccccaccacatgggccacagcagaaaccccagcgccgccagcgccatcagcttctgcagcgtgatcagcgagcccatcagcgaggtgaacgagaaggagtacgagaccaactggagaaacatggtggagaccagcgacggcctggaggccagcgagaacgagaaggaggtgagctgcaagcacagcaccagcgagaagcccagcaagctgcccttcgacaccccccccatcggcaagcagcccagcctggtggccaccggcagcaccaccagcgccaccagcgccggcaagagcaccgccagcgacaaggaggaggtgaagcccgacgacctggagtgggccagccagcagagcaccgagaccggcagcctggacggcagctgcagagacctgctgaacagcagcatcaccagcaccaccagcaccctggtgcccggcatgctggaggaggaggaggacgaggacgaggaggaggaggaggactacacccacgagcccatcagcgtggaggtgcagctgaacagcagaatcgagagctgggtgagcgagacccagagaaccatggagaccctgcagctgggcaagaccctgaacggcagcgaggaggacaacgtggagcagagcggcgaggaggaggccgaggcccccgaggtgctggagcccggcatggacagcgaggcctggaccgccgaccagcaggccagccccggccagcagaagagcagcaactgcagcagcctgaacaaggagcacagcgacagcaactacaccacccagaccacctag

SEQ ID NO: 74033 - DNA, 3306 bp, Artificial Sequence
  derived and/or modified sequence
atggatagagcccccacagaacagaatgtgaaactgtcggcagaagttgagccctttatcccccaaaagaagtctcccgacacttttatgatccccatggctctgcccaatgacaatggatcagtgtccggggtggagcccacacctattccatcatacctgatcacctgttaccccttcgtgcaggagaaccagtccaataggcaattccccctgtacaataacgacatcagatggcagcagccgaaccctaatccgacaggtccctacttcgcctacccaatcatcagtgcccaaccccccgtctctactgagtatacatactaccagctgatgccggcgccctgtgcccaggtgatggggttctatcacccgttcccaacaccttacagcaatacctttcaggccgcgaacactgttaatgcgatcaccaccgagtgtacagagaggccttctcagttaggacaagtgttcccactgtctagccaccgtagtcggaactcaaatcgtggatcagtggtgcccaagcaacaactccttcagcagcatattaaatcgaagcggcctctcgtgaagaacgtggcgacacagaaggaaaccaatgctgcgggacctgatagcaggtccaagatcgtgttacttgtggatgctagccagcaaaccgactttccttccgatatcgcaaacaaaagcctgtctgaaaccacggccaccatgctctggaaaagtaaaggaagacgccgacgcgccagtcatccaacagcggagagctcgtcagagcagggggctagcgaggcagatatcgatagcgattcgggctattgtagccccaaacattcgaacaatcagcctgcggctggagccttgagaaaccccgactctggtaccatgaaccacgtggaatctagcatgtgtgccggcggcgtcaactggtcaaatgttacctgtcaagccacacaaaaaaagccatggatggaaaaaaatcagactttttcacgcggaggacggcagactgagcaaagaaataacagccaagttgggttcagatgtaggggacactctacctcctctgagcgtcggcagaacctgcagaagcgccccgacaataaacatctctcctcttcacagtcacatcggtctgatccaaattctgagtccctttattttgaggatgaggacgggttccaggagttgaatgagaatggtaacgctaaagatgagaacatccagcaaaaactaagttctaaagtgctggatgatttgcctgagaatagccccatcaacatcgtgcaaaccccaatcccgatcactacctccgtgcccaaacgcgccaaatcacagaaaaagaaggctctagccgcagctctggccaccgcccaggaatacagtgaaattagcatggagcagaagaagttgcaggaggctttatctaaagcagcagggaaaaaaaataagacgcctgtccagctggacctgggagatatgctagccgccctggagaagcagcagcaggcaatgaaagcccgtcagatcacaaacactaggcccctatcctatacagtcgtgaccgccgcctctttccacactaaagattctacaaaccgcaaacctttaaccaaatcccaaccctgtcttacctctttcaattccgtggacatagcaagcagcaaggctaaaaaagggaaagagaaggaaattgccaagttaaagcgcccaactgcactcaagaaagtgatcctcaaagaaagagaagagaaaaaaggccgactcaccgtggatcacaatctccttgggtcggaagaacctacagagatgcacctggatttcattgacgaccttccacaggaaattgtgtcccaggaggacacaggcctgagcatgcctagtgataccagtttgagtcccgcctctcaaaattctccttactgcatgacccctgtgagccaaggaagcccggctagctccggaatcgggagccctatggcatcatccaccattacaaagatccactctaaacggtttagggaatattgcaaccaggttctatgcaaagaaatcgacgagtgtgtgacactgctccttcaggaactagtgtcatttcaggagagaatctaccagaaggatccagtgagagccaaagcccgcaggcgcctcgtgatgggactgcgggaggtgacaaaacacatgaagctgaataagatcaagtgcgtgatcatcagcccaaattgtgagaagattcaaagtaaaggtgggctagatgaggccctgtacaatgtgatagctatggcgcgagaacaggaaatccctttcgtgttcgcacttggacgcaaagcactgggaaggtgcgttaacaagttggtacctgtgtctgtagtgggaatcttcaactatttcggagctgagtccctgtttaacaaactggtggagctgacggaagaggctcggaaggcttataaagacatggtggctgcgatggaacaggaacaggccgaagaagcacttaagaacgttaagaaagtgccacatcacatgggccactctcggaacccgagcgctgcttccgccataagcttttgcagtgtcatcagcgaacctatatctgaagtgaacgaaaaagaatacgaaactaattggcgcaatatggtcgagactagcgatgggctcgaagcttccgagaacgagaaagaggtgtcctgcaaacacagcacctcggaaaagccctcaaaactgccattcgatactccacctatcggcaaacaaccatctctggtggcaaccggttcaacaacctcagccacatccgcaggcaaaagcacagctagcgataaggaggaggtcaaacccgatgatctagagtgggcgtctcagcagtctacagagacgggttctctcgacgggtcgtgtcgagacttgctgaattccagcattactagcacaacaagcaccctggtgcctggcatgttagaagaggaagaagacgaggatgaagaagaagaagaagactacacgcacgaacctatttccgtagaggtgcaacttaattcccggatcgaatcctgggtttcggagacccaacgtacgatggagaccctgcaactggggaaaactctgaacggcagcgaagaggataacgttgagcagagcggcgaggaggaggcggaagctcctgaagttctggagccagggatggactccgaagcttggactgctgatcagcaagcttcacctggtcagcagaagtcttctaattgttcttcactcaacaaagaacatagtgattcaaattacacaacccaaacaacttag

SEQ ID NO: 74034 - DNA, 3306 bp, Artificial Sequence
  derived and/or modified sequence
atggaccgggcccccacagagcagaatgtgaagctgtctgctgaggtggagcccttcatcccccagaagaagagcccagacaccttcatgatccccatggccctgcccaatgacaatggatctgtgtctggagtggagcccacccccatccccagctacctgatcacctgctacccctttgtgcaggagaaccagagcaaccggcagttccccctgtacaacaatgacatccgctggcagcagcccaaccccaaccccaccggcccctactttgcctaccccatcatcagcgcccagccccctgtgtccacagagtacacctactaccagctgatgcctgccccctgtgcccaggtgatgggcttctaccaccccttccccaccccctacagcaacaccttccaggccgccaacacagtgaatgccatcaccacagagtgcacagagcggcccagccagctgggccaggtgttccccctgagcagccacaggagcaggaacagcaacagaggctctgtggtgcccaagcagcagctgctgcagcagcacatcaagagcaagaggcccctggtgaagaatgtggccacccagaaggagaccaatgctgctggccctgacagccgcagcaagatcgtgctgctggtggatgccagccagcagacagacttccccagcgacatcgccaacaagagcctgtctgagaccacagccaccatgctgtggaagagcaagggcagaagaagaagagccagccaccccacagctgagagcagcagcgagcagggcgccagcgaggccgacatcgacagcgacagcggctactgcagccccaagcacagcaacaaccagcctgctgctggggccctgaggaacccagacagcggcaccatgaaccacgtggagagctccatgtgtgccggcggcgtgaactggagcaatgtgacctgccaggccacccagaagaagccctggatggagaagaaccagaccttcagccggggcggccggcagacagagcagaggaacaacagccaggtgggcttccgctgccggggccacagcaccagcagcgagcggcggcagaacctgcagaagaggccagacaacaagcacctgagcagcagccagagccacagaagtgaccccaacagcgagagcctgtactttgaagatgaagatggcttccaggagctgaatgaaaatggaaatgccaaggatgagaacatccagcagaagctgagcagcaaggtgctggatgacctgcctgagaacagccccatcaacatcgtgcagacccccatccccatcaccacctctgtgcccaagagggccaagagccagaagaagaaggccctggccgccgccctggccacagcccaggagtacagcgagatctccatggagcagaagaagctgcaggaggccctgagcaaggccgccggcaagaagaacaagacccctgtgcagctggacctgggggacatgctggccgccctggagaagcagcagcaggccatgaaggcccggcagatcaccaacacccggcccctgagctacacagtggtgacagctgccagcttccacaccaaggacagcaccaacaggaagcccctgaccaagagccagccctgcctgaccagcttcaacagcgtggacatcgccagcagcaaggccaagaagggcaaggagaaggagatcgccaagctgaagaggcccacagccctgaagaaggtgatcctgaaggagcgggaggagaagaagggccgcctgactgtggaccacaacctgctgggcagcgaggagcccacagagatgcacctggacttcattgatgacctgccccaggagatcgtgtcccaggaggacaccggcctgtccatgcccagcgacaccagcctgagccctgccagccagaacagcccctactgcatgacccctgtgtcccagggcagccctgccagcagcggcatcggcagccccatggccagcagcaccatcaccaagatccacagcaagcgcttccgggagtactgcaaccaggtgctgtgcaaggagattgatgaatgtgtgaccctgctgctgcaggagctggtgtccttccaggagcgcatctaccagaaggaccctgtgcgggccaaggcccggcggcggctggtgatgggcctgcgggaggtgaccaagcacatgaagctgaacaagatcaagtgtgtgatcatcagccccaactgtgagaagatccagagcaaaggaggcctggatgaggccctgtacaacgtcatcgccatggcccgggagcaggagatcccctttgtgtttgccctgggcaggaaggccctgggccgctgtgtgaacaagctggtgcctgtgtctgtggtgggcatcttcaactactttggagctgagagcctcttcaacaagctggtggagctgacagaggaggccaggaaggcctacaaggacatggtggccgccatggagcaggagcaggccgaggaggccctgaagaatgtgaagaaggtgccccaccacatgggccacagcaggaaccccagcgctgccagcgccatctccttctgcagcgtcatcagcgagcccatcagcgaggtgaatgagaaggagtatgagaccaactggaggaacatggtggagaccagtgatggcctggaggcctctgaaaatgagaaggaggtgtcctgcaagcacagcaccagcgagaagcccagcaagctgccctttgacaccccacccatcggcaagcagcccagcctggtggccaccggcagcaccaccagcgccaccagcgctgggaagagcacagccagtgacaaggaggaggtgaagccagatgacctggagtgggccagccagcagagcacagaaacaggcagcctggatggcagctgccgggacctgctgaacagcagcatcaccagcaccaccagcaccctggtgcccggcatgctggaggaggaggaggatgaagatgaggaggaggaggaggactacacccatgagcccatctctgtggaggtgcagctgaacagcagaattgaatcctgggtgtctgagacccagaggaccatggagaccctgcagctgggcaagaccctgaatggcagcgaggaggacaacgtggagcagagcggggaggaggaggccgaggcccctgaggtgctggagcccggcatggattctgaggcctggacagctgaccagcaggccagccctggccagcagaagagcagcaactgcagcagcctgaacaaggagcacagcgacagcaactacaccacccagaccacctag

SEQ ID NO: 74035 - DNA, 3306 bp, Artificial Sequence
  derived and/or modified sequence
atggaccgggcccccaccgagcagaacgtgaagctgagcgccgaggtggagcctttcatcccccaaaaaaaaagtccagatacctttatgattcctatggcactccctaatgataatggctctgtctcaggggtcgagccaacgccaatcccatcatatttgattacctgttatccgttcgtccaggagaatcagagtaacagacagttccccctttataataatgacattcgatggcagcagcctaaccctaaccctacaggaccgtatttcgcttacccgatcatcagcgcacaaccgcccgtgtctaccgagtatacttactatcaactcatgcctgccccatgtgctcaggtcatgggtttttatcatccctttccaacgccgtattctaacaccttccaggccgccaacaccgttaacgcaatcaccacggagtgcaccgagaggccttctcagctgggccaggtgtttcccctgtcatcccaccgatcaaggaatagcaatagagggtccgttgtccccaagcaacaactgttgcagcagcacatcaaaagtaagcgcccgcttgttaaaaacgtggcaacacagaaggaaacaaacgctgccgggccggactcaaggtccaaaattgttctgttggttgacgcttctcagcagaccgactttcccagcgatatcgctaacaagtcactgagtgagacaacagccactatgctctggaagtcaaaggggcgaagacgaagagccagtcaccctaccgccgagtcttctagcgaacagggcgcttccgaagctgatattgatagcgactctggctactgttcacccaagcacagcaataaccaacccgccgctggagctctgagaaatcccgatagtgggacgatgaaccatgttgagtcctcgatgtgtgctggaggcgtgaattggagtaatgtgacctgtcaggcaacccagaaaaagccctggatggaaaagaaccagactttttcccgcggcggccgccagacagagcagaggaataacagccaagtgggctttcgctgtcgaggccactccaccagttccgaacgcaggcaaaatttgcagaaaaggccagacaataagcatttaagtagttcacagagtcatcgcagtgacccaaactcagagtcactgtacttcgaggacgaggacggatttcaggagctgaacgaaaatgggaacgccaaagatgaaaacatccagcagaagctgagttccaaagtgcttgacgacctcccggaaaatagtcccattaatatcgtgcaaacacctattccgattaccacctcggttcctaaaagagccaagtctcaaaagaagaaagccctcgccgcagccctggccaccgcacaggagtattctgagatttcgatggagcagaagaaactgcaggaggcattgagcaaggctgcaggcaaaaagaacaagacccctgtgcaacttgatctcggggacatgctggccgctctcgagaaacagcagcaggctatgaaggcacgacagatcactaacacacggcccctgtcatatactgtagtcacggccgcaagctttcacacaaaggactcaactaacaggaaacccctaacaaagtctcaaccctgtctcacttccttcaacagcgttgatatcgcatctagcaaagcgaagaaaggcaaagagaaggaaatcgctaaattaaaaaggcctaccgctcttaagaaagtgattctaaaggaacgagaggagaagaaaggcaggttgaccgttgatcataatctgcttggcagcgaagaaccaaccgagatgcacctcgattttatcgacgatctacctcaggagatcgtgtcccaggaggatacaggcctgtctatgcctagcgacacttctctgagtccggcctcccagaatagcccctactgcatgaccccagtttcacaaggctctccagcaagctcagggatcggctcccctatggcctcttcgacaattaccaagattcactcaaaaagattccgggagtactgcaaccaagttttgtgtaaggaaatcgacgaatgtgttactctgctattgcaagaattggtgagttttcaggagaggatctatcagaaagatccggtccgggccaaagctcggcggcgactggtcatgggattgagagaagtcacaaaacacatgaaattaaataagattaaatgcgttattattagccctaactgcgaaaagatccagtccaaaggcggactggatgaggcgctatataacgtgatagcaatggcccgggagcaggaaattccgtttgtatttgcacttggccgaaaagctttgggtcgctgcgtaaacaagctggtacccgtctctgttgtgggaatctttaattacttcggcgccgaatccctgtttaataagctcgtggagttaacggaggaggcaagaaaggcttacaaggatatggtcgctgctatggagcaagagcaggcagaagaggccctgaaaaatgttaagaaggtaccccatcatatgggccatagtcgaaatccatcggcagctagcgcaatatccttttgctctgtgatctcggaaccgattagcgaagtgaatgaaaaagagtacgagacgaattggcgaaatatggtggaaacaagcgatgggctcgaagcatcagaaaatgagaaggaagtgagttgcaagcattcaacttcagaaaagccgtccaagctgccatttgatacccctcctatcggcaagcagccttcgctggtggcaactggatcaaccacgtctgcaacgtccgccggtaaatctacagcatctgataaggaagaggtgaaaccagatgacctcgagtgggcaagtcaacagtccacagagacaggttcactcgacggatcatgccgggatctcctaaacagcagcataaccagcaccacctccacactcgtgcccggaatgttagaggaggaggaagatgaggacgaggaagaagaagaggattatacacacgaacccataagtgtggaggtgcagctgaactcacgcatcgaatcctgggtgtccgaaacacaacggactatggaaacactacagctgggtaaaaccttgaatggctcagaagaggacaatgtggagcaaagtggagaggaagaggcagaagcccccgaggtgctggaacccggcatggatagcgaagcgtggacggcagaccagcaggcttcaccggggcaacagaagagcagtaactgcagctcactgaacaaagagcattccgatagcaattacactacacaaacgacctag

SEQ ID NO: 74036 - DNA, 3306 bp, Artificial Sequence
  derived and/or modified sequence
atggaccgagcacctactgagcaaaatgtcaaactatccgcggaggtggagcctttcataccccaaaaaaagtctcccgatacgttcatgatacctatggctctccccaacgataatggcagtgtgtctggagtggagcctacacctataccttcatacctgattacttgctacccttttgtccaggagaatcagagcaaccggcagttccctctgtataataacgacatcagatggcaacagccaaatccaaacccaaccggcccatatttcgcctaccctatcatcagtgcgcagccacccgtcagcaccgaatatacctactaccagctgatgcccgctccatgtgcccaagtcatgggcttttaccacccgtttcctaccccctactccaatacctttcaagctgctaatacagtgaatgccattactacagaatgcactgaacgaccgtctcaactgggccaggtcttccctctatccagccaccggtctcgcaacagcaacagaggctccgtggtgccaaagcagcagttgctgcaacaacacatcaaatctaagcgcccactcgtcaagaatgtagctacccagaaggaaactaacgcagccggaccagattcgaggtccaagatagttctgctggtagatgcttcacagcaaaccgactttccttccgatatcgccaacaagtctctgagtgagactactgctacaatgctttggaaaagtaaaggcaggcgccgaagggcttcccatcccactgcggagtcctcttccgagcagggcgctagtgaagcagacattgatagtgactcaggttactgtagccccaaacactctaacaatcagcctgccgcaggcgcattgagaaatccagatagcggaactatgaatcacgtggaaagttcaatgtgcgcagggggtgtaaactggtcaaatgtgacctgtcaggcaactcagaagaagccctggatggaaaagaaccagaccttttcccggggtgggagacaaacagaacaaagaaacaatagccaagtgggttttcggtgtagaggccactctacctccagtgagcgtaggcaaaatctgcagaagagacctgataataagcatctgagctcttctcagtcacatcgtagcgatcccaacagcgaatcactctatttcgaggatgaagatgggtttcaggagctgaacgaaaatggaaatgccaaagatgagaacatccagcagaaactgtcctctaaggtgctggatgacttgccagaaaactcgccaataaatatcgttcagaccccaatccccatcaccacgagcgttcctaagcgggctaaatcccagaagaagaaggcccttgcagctgccttggcaaccgctcaggagtattctgagatatccatggaacaaaagaagctgcaggaagccttatctaaggccgctggcaagaagaataagactcccgtacagctggacctcggagatatgctggcagccctcgaaaagcagcaacaggccatgaaggctagacaaattaccaacacccggcctctgtcctataccgtcgtgactgccgcatcttttcacacaaaggattctacaaatcgcaagcccctaaccaaaagtcaaccatgcctcaccagtttcaacagtgtggacatagcctctagcaaggctaagaagggcaaggagaaagaaatagcaaaactcaaaagacccacggcgcttaagaaagtgattctcaaggagcgcgaagagaagaagggaaggctgactgtggaccataatctgctcggtagcgaagaacctactgaaatgcacctggactttattgatgatctgccacaggaaatcgtgtcgcaggaggatacaggactctcaatgccatctgataccagtctgagccccgcatcacaaaatagcccatactgtatgacacccgtctcacagggctcgcccgcaagtagtggaatcggctctccaatggctagtagtacaattacaaagatccacagcaagaggtttagagagtattgcaatcaggttctatgcaaagaaattgatgagtgcgttactctgcttctgcaggagctggtctctttccaagagagaatttatcaaaaagacccggtgcgggctaaagcaaggcgacgcctggtaatgggactacgggaagtaaccaagcacatgaaattaaacaagattaagtgtgttattatcagcccgaactgcgagaagatccagtcaaagggtggacttgacgaagctctgtataatgttattgcaatggccagagaacaggaaatcccatttgtttttgcccttggacgaaaggctcttgggaggtgcgttaataaattggtgcccgtcagtgtggtgggtatcttcaactatttcggagccgagtctctatttaataagctcgtggaattaacggaagaggccagaaaagcgtacaaagacatggtagccgctatggaacaggagcaggctgaagaggcgctcaaaaacgttaagaaagttccccaccatatgggtcattcaagaaatccttctgccgcatcagcaatttccttctgctccgtgatatctgagcctatctctgaagtaaacgaaaaggagtacgaaaccaactggaggaacatggtggagacctctgacggtctcgaggcctccgagaacgagaaggaagtatcgtgcaagcacagcacctccgaaaagccaagcaaattaccatttgacactcctccaatcgggaaacagccatctctggtggccaccgggtctacaacctcggcgactagtgccggtaagtcgacggcgtctgataaagaagaagtaaaacctgatgatctggaatgggcctcgcagcagagcaccgaaacgggttcactcgatgggagctgcagagacctcctcaatagttcgattactagcaccactagcaccttagtccctggcatgcttgaggaagaggaggacgaagatgaagaggaggaagaggattacactcacgagcccattagtgtggaggtgcaacttaatagtagaatcgaatcttgggtctcggaaactcaaagaaccatggagactctccagctggggaagacactgaatggctcagaggaagataatgtggagcaatcaggcgaggaagaagccgaggctccggaagtgctggagcccggaatggattcagaggcttggacggccgaccagcaggcaagccctggacagcagaagtctagtaactgtagcagccttaacaaggaacacagcgattcaaattacaccacacagacgacttag

SEQ ID NO: 74037 - DNA, 7176 bp, Artificial Sequence
  derived and/or modified sequence
atttctaactacgcctccagcccattcgggccctcctcggcttccgtcccagatgatccctccccgaagctgccaccgcctcctccatctcccggagctggagccgcctcctcggccagtggcgtagccgaatcggtgtcgcggccagccagataggggcggaggtccggaacccagtctggacccgagcggggggccatggagaaagcggcccgaggcgctgtttacaccgactagcgcgggcccgttgcggctgcaggcaccatggaccgagcccccacggagcagaatgtcaagctgtcagctgaggtggagccatttattccccagaagaagagtcctgatacatttatgatccctatggctctcccaaatgataatggaagtgtttctggtgtggaaccaactccaattcccagctacctgattacttgttacccatttgtgcaggaaaaccagtccaatagacagtttcctttatataacaatgatatacgatggcaacaacccaatccaaaccctactggaccatactttgcctatcccattatatctgctcagccgcctgtttctacagagtatacatattatcagctgatgccagcaccatgtgcccaggttatgggtttctatcatccttttcctacaccttactccaacacctttcaggctgcaaatactgtaaatgctatcaccacagaatgcactgagcgtccaagtcagcttggacaggtcttcccattgtccagccatcgaagcagaaacagtaacagaggatcagtggtcccaaaacaacagcttttacaacagcacataaaaagcaaaaggccgctggtgaaaaatgtagctactcagaaagaaacaaatgcagcaggtcctgatagtcgatcaaaaattgtgcttctggtagatgcttcacagcaaactgatttcccatcagatatcgctaacaagtctctctcagagaccactgcaacaatgctctggaagtccaagggcaggagaagaagagcatcccaccctactgctgaatcttctagtgagcagggggctagtgaagccgacattgacagtgatagtggttactgcagtcccaaacacagcaacaaccagcctgcagcaggggctttgagaaatcctgattctgggaccatgaatcatgtggaatcatctatgtgtgcaggtggtgtaaattggtccaatgtaacttgccaggcaactcagaaaaaaccttggatggaaaaaaatcagacattttctagaggtggaaggcaaactgaacaaagaaataattcacaggttggattcagatgccgaggacacagtacttcctcagaaagaagacagaatttgcaaaagagaccagataataagcatttaagctctagtcaatcccatagaagcgatccaaattctgagtctttatattttgaggatgaagatgggtttcaagaactaaatgagaatggaaatgctaaggatgagaatattcaacaaaaactttcttctaaagtattggatgatttacctgaaaactcaccaatcaatatagttcagactccaattcctattaccacctcagttcccaaacgtgcaaaaagtcagaagaagaaagctttagcagcagcccttgccacagctcaagagtattcagaaataagtatggagcaaaaaaaattacaggaagctttatcaaaagcagctggaaaaaagaataaaacacctgtgcagctagatttaggggacatgttagctgctctggaaaaacaacagcaagcaatgaaagcacggcaaattactaacaccagacctctgtcatatacagtggttactgcagcttcttttcacactaaagactctactaatagaaaacctttaaccaaaagtcagccctgtttgacatcctttaattctgtggacattgcttcttctaaagcaaaaaaaggaaaagagaaggaaattgcaaaactaaaacgacccacagcacttaaaaaggttattttaaaagaaagagaggaaaagaaggggcgcttaactgtggaccacaatcttttgggatccgaggaaccaacagaaatgcacttagattttattgatgacttgccacaggagattgtttcccaggaagatactggactaagcatgcccagtgatacttcactctctccagcaagtcagaactctccatactgtatgacacctgtgtcacaaggctctcctgctagttctggaataggcagtccaatggcatcttcaacaataaccaaaatccacagcaaaagatttagagagtattgtaatcaggttctttgtaaagagattgatgaatgtgtgactcttcttctccaagagcttgtcagtttccaggaacgcatctaccaaaaagatcctgtaagagcaaaagcaaggagacgactcgttatgggtctaagagaagttaccaaacatatgaagttaaacaagatcaagtgtgttataatttctccaaactgtgaaaaaatccagtcaaaaggtggtctggatgaggctctctataatgttatagccatggcacgggaacaagaaattccttttgtgtttgcccttggaaggaaagctctaggacgctgtgtgaacaagctggttcctgttagcgtagtgggaatcttcaactactttggtgctgagagcctgtttaataaattagtagaactcactgaggaggccaggaaagcatataaagatatggttgcagcaatggaacaggagcaggctgaggaagccttaaagaatgtgaagaaggtaccacaccacatgggacattctcggaatccctctgcagcaagtgccatttctttctgcagtgttatttctgaaccgatctctgaagtaaatgaaaaggaatatgaaacaaattggagaaacatggtggaaacttcagatggactggaagcatcagaaaatgagaaagaggtatcctgtaagcacagcacttctgaaaaacccagtaaacttccatttgacacacccccaattggtaagcagccatcattagtggctacaggcagtactacctcagctacaagtgctgggaaatccacagcaagtgataaagaggaagtgaagccagatgacctggaatgggcctcacagcagagtacagagactggctctttggatggcagttgccgagatcttttgaattcctccatcaccagcaccaccagcactcttgtacctggcatgcttgaagaagaagaagatgaagatgaggaggaggaggaagattatactcatgaacccatatctgtagaagtgcagctcaatagtagaattgagtcttgggtctcagagacccagagaactatggaaacccttcagcttggaaaaacccttaatggttctgaggaagacaatgtagagcaaagtggagaagaggaagcagaggcgcctgaggtgctggagccagggatggacagtgaggcatggactgctgaccagcaggccagtcctgggcagcagaagtccagcaactgcagctcgctcaacaaagagcactctgattctaattacacaacgcaaactacgtaactcaggaaatgtcggctctctatctccagctgtggaagggttgcagccattaccttttatgcttcatctcaacattttgcactgtccagtatttaatatacgtatttaattcccaacaaatatttttgtagcttttacttgttatgatctgtagcttagcttttaattagtatctaagtgtctttctaagaactgtgtggaaaattcagatctgtttcagcttattttgtaatcaaaaacagtgataaaaagaagaccagatcttaaagaaaataaatttcaaatgcttacttaaaagacattttgaaagttaaagaacaaggttctaaggatagaagcagttatcagtgtttgcttcaggactccacctcctctactctaatttgaccaaaaaattgtttgggcttctttaaaaaagaactgggggtggagtcagaaaattaaatgaaaggctgagggtaactaagtccaccagtgttgtatgttaaaaaatcaatgcaacttttatgtggtccacaaatgtttagtcagaagtcactgattattgtaattaattagtgttgggatgggctaaaacagagccttcaaaacttcggctagcagtggagccaccatcttagattatagctagctagcctcatttgtggaaagtgatagatgctgtctataatagtgaacagtcacccatgataggacctccaggttctgtctcatatttgcttcttacttacctcaggaatgctcttgtacatagacttatttacaaaaagctaggcacatgttgacaggtgaataactgtaaccgattgtatgactgctgcacttacatgtaaactcttcagaaacagagtcttatactggtgtgttctcttgcatgcttctggttcaggactcttgatttgagatatggatttgattgagtatccaaacttgtcctgagtgcaaaactgtttcaccttttaaaaaatacctattttgcacctagccttgagcaccttccacatagcaatgaccatagttactgtcaggaggtcaaggaaaggaactttgcacaacttgtgacatgtatcctgataatcaaggcttagaggaggaagttttagaagataagagaaagttgttctaattgtgctgaaactattagatgatttagagtatacagatatgtaggtattaattctctattcactattatttatctctgcccttctctaggagtttgtatacctgcttaggagacaataaatgagctaaatgttttatttgctagtcagtcaccacctggacttcagtgactttacaagtttatgtaatggtggaagaatgacaaactatgtaatttttttgtcttccatccaactccccaccacccccaactgtcccccccacccccctcacacacatgcacacatccgtacgtgtgtgtgttttccacttacaagcttccataagcaggcacaaaactgagaaggaaggggtattatccctgccctgattatctggggcagggctttgcctcacagaggcaggagagaagaattgggcagattctttactgaactcattgggactactgtgctagttttgatgttttataatgctggcatttaattactggagagattggattcttggttgatgatttagtatttgtgaattgtgaaagttcaggagctgtgtagaaaatgttagtcaatcaactttattattgtgctaaaaggggacattcttatactgtcctgtctaaactgttctccagtatagacttcctaggcactaaatatccaatatttaaaggaacacagcaggtaaggaatgaagcctctgaaatagtactcatggatttatacatggcagatcttactgtctctacacatttggaagtgttcgttggtttaaagaaatgatagaggttttgaactactgacagtcttaaaagtgaatttaaaaactgttcatactttttatggtgtaaatttcctttgctcgatgtcagtgattcagataactcttgaccttgagatgatggcttttcacaggtttcttatattttatatctcttctgaacatgaattgtcattttagatttttgacatttgtatcaaaagagaagttgaggaaatcttcagaacactggtaacttttagttttgctatagacttcagaagtgtttatttatatgttcggtaaatgctctcgcatatgcagtacctcttctgccagcaaatccaagggaccatagcctttttatgagacaggtcacctctagaggacaacccaagaattattaaaggaaatgttaccattttgagagcatgcttaaataaatattaataatgtctttataacttgtttcctttaaattttggaatattgaattacaggctttggaggagttgtgaaaattaggaaagtttttatatattttttgaagtgggcatggttggctctttgaagacctataaagagatccagtgggaagagtaagggttggttcatcatcacaagaaataaaaaacatagtgattttttctcttaatgtgtagaggtggttttactggcaataattaataatagatttctatttcagtatgtaagcatattaactaaaatatgaattacacttccaaagttagatttctgcttcagtaggtttgtttgctgtgaagattacttctcaaaagacagatgttcatattagcttaattttcggtttaaatatgtttgtaaatgatgtaatatatttcttttgactaaatgtggaaaagtaatgtgtgttatacattgagaagtttttactggctttgactggaggttgtttttgcagagatggtattttatatgattccagtatttggaaaagaattagtcaaaaggaattcacatagtttaaatactgagaaattaatatccaaatatgtacttgtctgatttctaaataagctgggggaggagggaggggtgggaattgaaatgtgcaaatgagtagtgaatgctacactcattttcaactctttaacatgaaactgttcaatcttaacacattgttactttaatatatgtataaagaagtattactgtttgtaaagctgctgtttgcttaaaaaaaaaaaacacccttgtcatgtattttctgtatgttgggccaacaggttagaacatcaactcatttaaaaatttttatctttttttgatttaaaaaaattctgtgaaataatttatttacagacatcttcctcctccctcatcccttccaacctttacatacatcacagaatcaaccaaactgtttgcctaatctgaaatctgaatcctaatgagaaaaatttaaattttgttggcacatcacaccttgaaagtatttgtattattttataatttaatttctaaatataccacataagtttataatttaatgtcttaattgtaatgctctaataaaaaactagcaaaattagtgtgagttataacatgaagggattttcatcttttgctgtatgaaggataattgttatatcacatttggggggtaataacagcttttttgcactatgtaaatactagtggggattcttctgtactaataaaatgattattgaaatgaaa

SEQ ID NO: 74038 - protein, 234 aa, Artificial Sequence
  derived and/or modified sequence
MNILGLVLFALVLGVALKKLGSEGEDLIRFFNSLNEATMVLVSWIMCSATLPSMMKCIEENNGVDKRISRFILPIGATVNMDGAAIFQCVAAVFIAQLNNVELNAGQIFTILVTATASSVGAAGVPAGGVLTIAIILEAIGLPTHDLPLILAVDWIVDRTTTVVNVEGDALGAGILHHLNQKATKKGEQELAEVKVEAIPNCKSEEETSPLVTHQNPAGPVASAPELESKESVL

SEQ ID NO: 74039 - DNA, 705 bp, Artificial Sequence
  derived and/or modified sequence
atgaacattctgggattggtcttgttcgccttagtcctgggggtcgctctcaagaagctcggtagcgagggtgaggatttaattcggttttttaatagtctgaacgaagcaacgatggttttggtgagctggataatgtgttctgccaccctgccaagcatgatgaaatgtatcgaagagaacaatggggtcgacaagcggattagcaggttcattctgccaatcggggccaccgttaatatggatggggctgccatttttcagtgtgttgccgctgtattcatcgctcagctcaataatgtggaacttaatgccggacagatcttcacaattctggttactgccacagcttccagcgtgggcgcggccggtgtccccgcggggggtgtgctaacaatagcaatcattctcgaggctatcggtctaccaacccacgacctccctttgatccttgctgttgattggattgtggacagaactacaactgtcgtgaacgtggaaggggatgcattaggagctggaatattgcaccacctcaaccagaaagccaccaaaaagggggaacaggaactagccgaggtgaaagttgaggccatccccaactgtaaatcggaagaggaaacgtcacccctggtgacccaccaaaatccggcaggacccgtagcctccgcacccgagctagaaagcaaggagtcagtgttgtag

SEQ ID NO: 74040 - DNA, 705 bp, Artificial Sequence
  derived and/or modified sequence
atgaacatcctgggcctggtgctgtttgccctggtgctgggcgtggccctgaagaagctgggctctgaaggagaagatctcatccgcttcttcaacagcctgaatgaggccaccatggtgctggtgtcctggatcatgtgcagcgccaccctgcccagcatgatgaagtgcatcgaggagaacaacggggtggacaagaggatcagccgcttcatcctgcccatcggggccaccgtgaacatggatggagctgccatcttccagtgtgtggccgctgtgttcatcgcccagctgaacaacgtggagctgaatgccggccagatcttcaccatcctggtgacagccacagccagctctgtgggcgctgctggggtgcctgctggaggagtgctgaccatcgccatcatcctggaggccatcggcctgcccacccatgacctgcccctcatcctggccgtggactggatcgtggacaggaccaccaccgtggtgaatgtggagggagatgccctgggcgccggcatcctgcaccacctgaaccagaaggccaccaagaagggggagcaggagctggccgaggtgaaggtggaggccatccccaactgcaagtctgaggaggagaccagccccctggtgacccaccagaacccagctggccctgtggccagcgcccctgagctggagagcaaggagagcgtgctgtag

SEQ ID NO: 74041 - DNA, 705 bp, Artificial Sequence
  derived and/or modified sequence
atgaacatcctgggcctggtgctgttcgccctggtgctgggcgtggcattgaagaaactcggctcagagggagaagacctaatcaggttttttaactctctcaacgaggcgaccatggtgttggtgagttggatcatgtgcagcgctactctgccgtctatgatgaaatgcatagaggagaacaatggggtggataagcgaatcagtcggtttattctgccaattggtgctacggtgaatatggatggcgcagcgatattccagtgcgtggcggctgtgttcatcgcacagctaaataacgttgaactcaatgctggacagattttcactattctggttaccgccacagctagttccgtgggggcggccggagtgcctgctggcggggtactgaccatagccataattcttgaggctatcgggttaccaactcatgacctaccccttatcttggcagtcgactggatagtcgacagaactaccacagttgtcaatgtcgagggggacgctttgggtgccgggattctacaccacctgaaccagaaagcaacaaagaagggtgaacaggagctggcagaggttaaagtagaggcaattccgaattgcaagtccgaggaagagaccagcccacttgtgactcaccaaaaccccgccgggcccgttgcatcagcccctgagctggagtccaaggagagcgttctgtag

SEQ ID NO: 74042 - DNA, 705 bp, Artificial Sequence
  derived and/or modified sequence
atgaacatactagggctcgtgctgttcgctctggtgctgggtgtggctctgaagaagctaggatcagagggcgaagacttgatcagatttttcaattctcttaacgaagccaccatggtcctggttagttggattatgtgctccgccacgctgcccagcatgatgaaatgcatcgaggaaaacaatggtgtcgacaagcgcatttcccgctttatactgccaataggcgctacagtcaacatggatggggctgcaattttccaatgtgttgccgcagtgttcatcgctcagctcaataacgtggagttgaatgcgggtcagatttttactatcctggtgacggcaaccgcttctagcgttggggcagcaggcgtgcctgctggcggtgtgctgacaatcgctattatcctggaggctatcgggctgcccactcacgacctcccattaatccttgcggtagactggatcgttgacaggacaacaacagtcgtcaacgtagagggagacgcgctgggcgctggtatcttgcaccatctgaaccaaaaagccaccaagaagggggagcaagaacttgccgaagtgaaggtagaagctatacctaattgcaagtccgaggaagagacttcccctctggtgacacatcagaatcctgccggacctgtcgccagcgcccctgaactggaatctaaagagtctgttttgtag

SEQ ID NO: 74043 - DNA, 1217 bp, Artificial Sequence
  derived and/or modified sequence
agctgcctggcgggcgacccagccccatcctgatggccccaggacacaagcccaggagcgccccggtgcgcgcggttccgcggcccaggggcgccgggtttggtggcacagcgagccccctttctctagcgaaacctgtttccctccaatcttgtggttgcagctttccgtacgtatgcaaccgattataaagtcgtgacccagaacagcagctctggaaatgtaacccatgaaaagatccccataggcactgagatagaagggatgaacattttaggattggtcctgtttgctctggtgttaggagtggccttaaagaaactaggctccgaaggagaagacctcatccgtttcttcaattccctcaacgaggcgacgatggtgctggtgtcctggattatgtgctcagcgacccttccctctatgatgaagtgcattgaagagaacaatggtgtggacaagaggatcagcaggtttattctccccatcggggccaccgtgaacatggacggagcagccatcttccagtgtgtggccgcggtgttcattgcgcaactcaacaacgtagagctcaacgcaggacagattttcaccattctagtgactgccacagcgtccagtgttggagcagcaggcgtgccagctggaggggtcctcaccattgccattatcctggaggccattgggctgcctactcatgacctgcctctgatcctggctgtggactggattgtggaccggaccaccacggtggtgaatgtggaaggggatgccctgggtgcaggcattctccaccacctgaatcagaaggcaacaaagaaaggcgagcaggaacttgctgaggtgaaagtggaagccatccccaactgcaagtctgaggaggagacatcgcccctggtgacacaccagaaccccgctggccccgtggccagtgccccagaactggaatccaaggagtcggttctgtgatggggctgggctttgggcttgcctgccagcagtgatgtcccaccctgttcacccagccgccagtcatggacacagggcactgcccttgccaacttttaccctcccaagcaatgctttggcccagtcgctggcctgaggcttacctctcggcactggcattgggctccccagccggaactggttaccaaggacaaggacactctgacattcggcttgatccatgtccaggtgcaactgtgtgtacacca

SEQ ID NO: 74044 - DNA, 705 bp, Artificial Sequence
  derived and/or modified sequence
atgaacatcctgggcctggtgctgttcgccctggtgctgggcgtggccctgaagaagctgggcagcgagggcgaggacctgatcagattcttcaacagcctgaacgaggccaccatggtgctggtgagctggatcatgtgcagcgccaccctgcccagcatgatgaagtgcatcgaggagaacaacggcgtggacaagagaatcagcagattcatcctgcccatcggcgccaccgtgaacatggacggcgccgccatcttccagtgcgtggccgccgtgttcatcgcccagctgaacaacgtggagctgaacgccggccagatcttcaccatcctggtgaccgccaccgccagcagcgtgggcgccgccggcgtgcccgccggcggcgtgctgaccatcgccatcatcctggaggccatcggcctgcccacccacgacctgcccctgatcctggccgtggactggatcgtggacagaaccaccaccgtggtgaacgtggagggcgacgccctgggcgccggcatcctgcaccacctgaaccagaaggccaccaagaagggcgagcaggagctggccgaggtgaaggtggaggccatccccaactgcaagagcgaggaggagaccagccccctggtgacccaccagaaccccgccggccccgtggccagcgcccccgagctggagagcaaggagagcgtgctgtag

SEQ ID NO: 74045 - protein, 391 aa, Artificial Sequence
  derived and/or modified sequence
MAMQKIFAREILDSRGNPTVEVDLHTAKGRFRAAVPSGASTGIYEALELRDGDKGRYLGKAKFGANAILGVSLAVCKAGAAEKGVPLYRHIADLAGNPDLILPVPAFNVINGGSHAGNKLAMQEFMILPVGASSFKEAMRIGAEVYHHLKGVIKAKYGKDATNVGDEGGFAPNILENNEALELLKTAIQAAGYPDKVVIGMDVAASEFYRNGKYDLDFKSPDDPARHITGEKLGELYKSFIKNYPVVSIEDPFDQDDWATWTSFLSGVNIQIVGDDLTVTNPKRIAQAVEKKACNCLLLKVNQIGSVTESIQACKLAQSNGWGVMVSHRSGETEDTFIADLVVGLCTGQIKTGAPCRSERLAKYNQLMRIEEALGDKAIFAGRKFRNPKAK

SEQ ID NO: 74046 - DNA, 1176 bp, Artificial Sequence
  derived and/or modified sequence
atggcaatgcaaaagatatttgctagggagattctggatagccgtgggaatccgactgttgaggtggaccttcatacagccaaggggcggtttcgcgctgctgtcccatcaggagcaagcaccgggatttatgaggcgctggaactgcgagacggtgacaaaggcagatatttgggcaaggcgaagtttggcgccaatgccattctgggagtgtcacttgcagtatgcaaggccggcgctgcagaaaaaggcgtacctctctacagacacatcgccgacctggccggcaatccagaccttatcctgcctgtcccagccttcaatgtgatcaacgggggatctcatgcaggcaacaaactggcgatgcaggagttcatgattttgccggtgggagctagttccttcaaggaagccatgagaattggcgctgaagtctatcaccacttgaagggcgtaatcaaggccaaatatggaaaggatgctacaaatgtaggagacgaagggggctttgcccccaacatcctggaaaacaatgaagcgttagagctgttgaaaacagccatacaagcagccgggtacccagacaaggtggtcattggaatggatgtcgctgcttccgaattctaccggaacggtaagtacgatttggacttcaagtctccagatgatccggcccgtcatattaccggtgagaagctcggagagctgtacaaatcatttatcaaaaattatccagtcgtcagcattgaagatccctttgatcaggatgactgggcaacctggacatcttttctgtctggcgtcaacattcagattgttggagacgacctcactgtcactaatccgaaacgcattgctcaagccgtcgaaaagaaggcttgcaactgcctactgctcaaggttaaccagatcggatccgtcactgagagtattcaggcatgcaaactggcccagtccaatggctggggggtgatggtcagtcatcgcagcggagagaccgaagacacgtttattgctgatctggtcgtcggtctgtgcactggccagattaagacgggggctccttgtcgatccgagaggctcgcgaaatacaatcaactaatgcgcattgaagaagctttgggtgataaagcgatttttgcaggtaggaaatttcggaaccctaaggccaagtag

SEQ ID NO: 74047 - DNA, 1176 bp, Artificial Sequence
  derived and/or modified sequence
atggccatgcagaagatctttgcccgggagatcctggacagccggggcaaccccaccgtggaggtggacctgcacacagccaagggccgcttccgggctgctgtgcccagcggggccagcacaggcatctatgaggccctggagctgagagatggagacaagggccgctacctgggcaaggccaagtttggagccaatgccatcctgggcgtgtccctggccgtgtgcaaggccggggctgctgagaagggcgtgcccctgtaccgccacatcgctgacctggccggcaacccagacctgatcctgcctgtgcctgccttcaacgtcatcaatggaggcagccacgccggcaacaagctggccatgcaggagttcatgatcctgcctgtgggcgccagcagcttcaaggaggccatgagaattggagctgaggtgtaccaccacctgaagggcgtcatcaaggccaagtatggcaaggatgccaccaacgtgggagatgagggcggctttgcccccaacatcctggagaacaatgaggccctggagctgctgaagacagccatccaggccgccggctacccagacaaggtggtgattggcatggatgtggccgccagcgagttctacagaaatggcaagtatgacctggacttcaagagcccagatgatcctgcccggcacatcactggagagaagctgggggagctgtacaagagcttcatcaagaactaccctgtggtgtccattgaggacccctttgaccaggatgactgggccacctggaccagcttcctgagcggcgtgaacatccagatcgtgggagatgacctgactgtgaccaaccccaagagaattgcccaggccgtggagaagaaggcctgcaactgcctgctgctgaaggtgaaccagatcggctctgtgacagagagcatccaggcctgcaagctggcccagagcaatggctggggcgtgatggtgagccacaggtctggagaaacagaggacaccttcatcgctgacctggtggtgggcctgtgcaccggccagatcaagacaggagccccctgccgctctgagcggctggccaagtacaaccagctgatgagaattgaggaggccctgggggacaaggccatctttgctggcaggaagttcaggaaccccaaggccaagtag

SEQ ID NO: 74048 - DNA, 1176 bp, Artificial Sequence
  derived and/or modified sequence
atggccatgcagaagatcttcgcccgggagatcctggacagccggggcaatccgacagtggaagtcgatctgcacacagcaaaagggcggttcagggcagctgttcctagcggggctagtaccgggatttacgaggccctggagctaagggatggggataagggcagatatcttggaaaggctaaatttggcgcgaatgcaatcctgggcgtgagtctggccgtgtgtaaagccggggcagctgaaaaaggagtccctctctatcgacatatagctgacctcgccgggaatcctgatctgattttacccgttccagcttttaatgttatcaatggcgggagtcacgctggcaacaaacttgctatgcaggaatttatgatcctgcccgtgggtgcctcctcattcaaggaggccatgcggataggagctgaagtctatcatcacttgaaaggtgtaataaaggcgaaatacggcaaagatgccaccaacgtcggagatgagggtggtttcgctccaaatatcctggaaaataatgaagcccttgagctcctgaagacagccatacaggccgctggataccctgacaaagtggttataggcatggacgtagcagcaagcgaattctatcgcaacggaaagtacgacctcgacttcaaaagccctgacgatcccgctaggcacatcacaggtgagaagttgggggagttatacaagagtttcataaaaaactatcccgtggtctcaatagaggatcctttcgaccaggatgactgggcaacttggacttcatttctgtctggcgtcaacatacaaattgtgggagatgatctgactgtgacaaacccaaagagaattgctcaggctgtcgagaagaaagcatgcaattgcctactcttaaaggtcaatcagatcggtagcgtcaccgagagcatccaggcctgtaagctcgcacaaagtaacggttggggtgtcatggtttcccacagatccggcgagaccgaagatacctttattgctgacctggttgtgggactgtgtacaggccaaatcaaaacgggagctccatgccgctccgaacgcctagctaaatacaaccagctgatgagaattgaggaagcccttggagacaaagctattttcgccggccgtaaatttaggaatcccaaggcaaagtag

SEQ ID NO: 74049 - DNA, 1176 bp, Artificial Sequence
  derived and/or modified sequence
atggccatgcagaagattttcgcaagagagatcctagattccaggggtaaccctacagtggaagtggatcttcataccgctaaaggccgtttcagggcggctgtcccctcaggggcttctacgggcatttatgaagccctggagctcagagacggggataagggaaggtatcttggtaaagcaaagtttggcgctaacgccatactgggtgtgagcttggccgtctgtaaagccggagcggctgagaagggggtccccctctatcggcatatcgccgacctcgccggaaaccccgacctgattttacccgttccagcatttaatgttattaatggagggagtcatgccggtaacaagctagccatgcaggaatttatgattttgcccgtaggggcaagctcatttaaagaagccatgagaatcggggctgaagtgtaccaccacctaaaaggcgtgattaaagccaaatacggaaaagacgcaacaaatgtgggcgatgagggtggatttgcacctaacatcctggaaaacaatgaagcactggaactcctgaagaccgctattcaggcagccggttatcctgataaggtggtgattggaatggacgttgcagcaagcgagttttaccggaatggaaagtacgacttagattttaaatctcccgacgatccagccaggcacatcaccggggagaagttaggtgaactgtataagtcatttattaaaaattacccggtggtgagcattgaggatcccttcgaccaggacgactgggctacgtggaccagcttcctgtcaggcgtaaatattcagatcgtcggagatgacctgacagtgactaatcccaagcgcattgcccaagcggtcgagaagaaagcatgcaattgcttgctacttaaagtcaaccagataggcagcgtgaccgagagcatccaggcatgtaagcttgcccagtcaaacgggtggggtgtgatggtatctcatagaagtggagaaactgaggatacattcattgccgatctcgtcgtgggcctttgtactggacagatcaaaaccggtgctccgtgcaggagcgagcgactcgccaagtacaaccagctgatgaggatagaagaggccctaggcgacaaggccatcttcgcgggacgcaagttccgaaatcctaaagccaagtag

SEQ ID NO: 74050 - DNA, 1176 bp, Artificial Sequence
  derived and/or modified sequence
atggccatgcagaagatcttcgccagagagatcctggacagcagaggcaaccccaccgtggaggtggacctgcacaccgccaagggcagattcagagccgccgtgcccagcggcgccagcaccggcatctacgaggccctggagctgagagacggcgacaagggcagatacctgggcaaggccaagttcggcgccaacgccatcctgggcgtgagcctggccgtgtgcaaggccggcgccgccgagaagggcgtgcccctgtacagacacatcgccgacctggccggcaaccccgacctgatcctgcccgtgcccgccttcaacgtgatcaacggcggcagccacgccggcaacaagctggccatgcaggagttcatgatcctgcccgtgggcgccagcagcttcaaggaggccatgagaatcggcgccgaggtgtaccaccacctgaagggcgtgatcaaggccaagtacggcaaggacgccaccaacgtgggcgacgagggcggcttcgcccccaacatcctggagaacaacgaggccctggagctgctgaagaccgccatccaggccgccggctaccccgacaaggtggtgatcggcatggacgtggccgccagcgagttctacagaaacggcaagtacgacctggacttcaagagccccgacgaccccgccagacacatcaccggcgagaagctgggcgagctgtacaagagcttcatcaagaactaccccgtggtgagcatcgaggaccccttcgaccaggacgactgggccacctggaccagcttcctgagcggcgtgaacatccagatcgtgggcgacgacctgaccgtgaccaaccccaagagaatcgcccaggccgtggagaagaaggcctgcaactgcctgctgctgaaggtgaaccagatcggcagcgtgaccgagagcatccaggcctgcaagctggcccagagcaacggctggggcgtgatggtgagccacagaagcggcgagaccgaggacaccttcatcgccgacctggtggtgggcctgtgcaccggccagatcaagaccggcgccccctgcagaagcgagagactggccaagtacaaccagctgatgagaatcgaggaggccctgggcgacaaggccatcttcgccggcagaaagttcagaaaccccaaggccaagtag

SEQ ID NO: 74051 - DNA, 1322 bp, Artificial Sequence
  derived and/or modified sequence
gacactgtcccagctgccacctagactcggagctccatccaaacctccagcgaagacatcccagccatggccatgcagaaaatctttgcccgggaaatcttggactccaggggcaaccccacggtggaggtggacctgcacacggccaagggccgattccgagcagctgtgcccagtggggcttccacgggtatctatgaggctctggaactaagagacggagacaaaggccgctacctggggaaagccaagtttggggccaatgccatcctgggcgtgtccttggccgtgtgtaaggcgggagcagctgagaagggggtccccctgtaccgccacatcgcagatctcgctgggaaccctgacctcatactcccagtgccagccttcaatgtgatcaacgggggctcccatgctggaaacaagctggccatgcaggagttcatgattctgcctgtgggagccagctccttcaaggaagccatgcgcattggcgccgaggtctaccaccacctcaagggggtcatcaaggccaagtatgggaaggatgccaccaatgtgggtgatgaaggtggcttcgcacccaacatcctggagaacaatgaggccctggagctgctgaagacggccatccaggcggctggttacccagacaaggtggtgatcggcatggatgtggcagcatctgagttctatcgcaatgggaagtacgatcttgacttcaagtcgcctgatgatcccgcacggcacatcactggggagaagctcggagagctgtataagagctttatcaagaactatcctgtggtctccatcgaagacccctttgaccaggatgactgggccacttggacctccttcctctcgggggtgaacatccagattgtgggggatgacttgacagtcaccaaccccaagaggattgcccaggccgttgagaagaaggcctgcaactgtctgctgctgaaggtcaaccagatcggctcggtgaccgaatcgatccaggcgtgcaaactggctcagtctaatggctggggggtgatggtgagccaccgctctggggagactgaggacacattcattgctgaccttgtggtggggctctgcacaggacagatcaagactggcgccccctgccgctcggagcgtctggccaaatacaaccaactcatgaggatcgaggaggctcttggggacaaggcaatctttgctggacgcaagttccgtaacccgaaggccaagtgagaagctggaggctccaggactccactggacagacccaggtcttccagacctgcttcctgaaataaacactggtgccaacc

SEQ ID NO: 74052 - protein, 1097 aa, Artificial Sequence
  derived and/or modified sequence
MATQVMGQSSGGGGLFTSSGNIGMALPNDMYDLHDLSKAELAAPQLIMLANVALTGEVNGSCCDYLVGEERQMAELMPVGDNNFSDSEEGEGLEESADIKGEPHGLENMELRSLELSVVEPQPVFEASGAPDIYSSNKDLPPETPGAEDKGKSSKTKPFRCKPCQYEAESEEQFVHHIRVHSAKKFFVEESAEKQAKARESGSSTAEEGDFSKGPIRCDRCGYNTNRYDHYTAHLKHHTRAGDNERVYKCIICTYTTVSEYHWRKHLRNHFPRKVYTCGKCNYFSDRKNNYVQHVRTHTGERPYKCELCPYSSSQKTHLTRHMRTHSGEKPFKCDQCSYVASNQHEVTRHARQVHNGPKPLNCPHCDYKTADRSNFKKHVELHVNPRQFNCPVCDYAASKKCNLQYHFKSKHPTCPNKTMDVSKVKLKKTKKREADLPDNITNEKTEIEQTKIKGDVAGKKNEKSVKAEKRDVSKEKKPSNNVSVIQVTTRTRKSVTEVKEMDVHTGSNSEKFSKTKKSKRKLEVDSHSLHGPVNDEESSTKKKKKVESKSKNNSQEVPKGDSKVEENKKQNTCMKKSTKKKTLKNKSSKKSSKPPQKEPVEKGSAQMDPPQMGPAPTEAVQKGPVQVEPPPPMEHAQMEGAQIRPAPDEPVQMEVVQEGPAQKELLPPVEPAQMVGAQIVLAHMELPPPMETAQTEVAQMGPAPMEPAQMEVAQVESAPMQVVQKEPVQMELSPPMEVVQKEPVQIELSPPMEVVQKEPVKIELSPPIEVVQKEPVQMELSPPMGVVQKEPAQREPPPPREPPLHMEPISKKPPLRKDKKEKSNMQSERARKEQVLIEVGLVPVKDSWLLKESVSTEDLSPPSPPLPKENLREEASGDQKLLNTGEGNKEAPLQKVGAEEADESLPGLAANINESTHISSSGQNLNTPEGETLNGKHQTDSIVCEMKMDTDQNTRENLTGINSTVEEPVSPMLPPSAVEEREAVSKTALASPPATMAANESQEIDEDEGIHSHEGSDLSDNMSEGSDDSGLHGARPVPQESSRKNAKEALAVKAAKGDFVCIFCDRSFRKGKDYSKHLNRHLVNVYYLEEAAQGQE

SEQ ID NO: 74053 - protein, 1074 aa, Artificial Sequence
  derived and/or modified sequence
MATQVMGQSSGGGGLFTSSGNIGMALPNDMYDLHDLSKAELAAPQLIMLANVALTGEVNGSCCDYLVGEERQMAELMPVGDNNFSDSEEGEGLEESADIKGEPHGLENMELRSLELSVVEPQPVFEASGAPDIYSSNKDLPPETPGAEDKGKSSKTKPFRCKPCQYEAESEEQFVHHIRVHSAKKFFVEESAEKQAKARESGSSTAEEGDFSKGPIRCDRCGYNTNRYDHYTAHLKHHTRAGDNERVYKCIICTYTTVSEYHWRKHLRNHFPRKVYTCGKCNYFSDRKNNYVQHVRTHTGKRPSGEKPFKCDQCSYVASNQHEVTRHARQVHNGPKPLNCPHCDYKTADRSNFKKHVELHVNPRQFNCPVCDYAASKKCNLQYHFKSKHPTCPNKTMDVSKVKLKKTKKREADLPDNITNEKTEIEQTKIKGDVAGKKNEKSVKAEKRDVSKEKKPSNNVSVIQVTTRTRKSVTEVKEMDVHTGSNSEKFSKTKKSKRKLEVDSHSLHGPVNDEESSTKKKKKVESKSKNNSQEVPKGDSKVEENKKQNTCMKKSTKKKTLKNKSSKKSSKPPQKEPVEKGSAQMDPPQMGPAPTEAVQKGPVQVEPPPPMEHAQMEGAQIRPAPDEPVQMEVVQEGPAQKELLPPVEPAQMVGAQIVLAHMELPPPMETAQTEVAQMGPAPMEPAQMEVAQVESAPMQVVQKEPVQMELSPPMEVVQKEPVQIELSPPMEVVQKEPVKIELSPPIEVVQKEPVQMELSPPMGVVQKEPAQREPPPPREPPLHMEPISKKPPLRKDKKEKSNMQSERARKEQVLIEVGLVPVKDSWLLKESVSTEDLSPPSPPLPKENLREEASGDQKLLNTGEGNKEAPLQKVGAEEADESLPGLAANINESTHISSSGQNLNTPEGETLNGKHQTDSIVCEMKMDTDQNTRENLTGINSTVEEPVSPMLPPSAVEEREAVSKTALASPPATMAANESQEIDEDEGIHSHEGSDLSDNMSEGSDDSGLHGARPVPQESSRKNAKEALAVKAAKGDFVCIFCDRSFRKGKDYSKHLNRHLVNVYYLEEAAQGQE

SEQ ID NO: 74054 - protein, 460 aa, Artificial Sequence
  derived and/or modified sequence
MATQVMGQSSGGGGLFTSSGNIGMALPNDMYDLHDLSKAELAAPQLIMLANVALTGEVNGSCCDYLVGEERQMAELMPVGDNNFSDSEEGEGLEESADIKGEPHGLENMELRSLELSVVEPQPVFEASGAPDIYSSNKDLPPETPGAEDKGKSSKTKPFRCKPCQYEAESEEQFVHHIRVHSAKKFFVEESAEKQAKARESGSSTAEEGDFSKGPIRCDRCGYNTNRYDHYTAHLKHHTRAGDNERVYKCIICTYTTVSEYHWRKHLRNHFPRKVYTCGKCNYFSDRKNNYVQHVRTHTGERPYKCELCPYSSSQKTHLTRHMRTHSGEKPFKCDQCSYVASNQHEVTRHARQVHNGPKPLNCPHCDYKTADRSNFKKHVELHVNPRQFNCPVCDYAASKKCNLQYHFKSKHPTCPNKTMDVSKVKLKKTKKREADLPDNITNEKTEIEQTKKKKKKKKK

SEQ ID NO: 74055 - DNA, 3663 bp, Artificial Sequence
  derived and/or modified sequence
ggcggcggcggcggcgcggactgggtgcgcggcgcagcgtcctgtgttggaatgtgcggctgccgcgagctcgcggcgcagcagcggagcgagcgccgccgaggcccggggccccagaccctggcggcggctgcggcagccgagacggcagggcgaggcccggaggcctgagcaccctctgcagccccactcctgggccttcttggtccacgacggccccagcacccaactttaccaccctcccccacctctcccccgaaactccagcaacaaagaaaagtagtcggagaaggagcggcgactcagggtcgcccgcccctcctcaccgaggaaggccgaatacagttatggccacccaggtaatggggcagtcttctggaggaggagggctgtttaccagcagtggcaacattggaatggccctgcctaacgacatgtatgacttgcatgacctttccaaagctgaactggccgcacctcagcttattatgctggcaaatgtggccttaactggggaagtaaatggcagctgctgtgattacctggtcggtgaagaaagacagatggcagaactgatgccggttggggataacaacttttcagatagtgaagaaggagaaggacttgaagagtctgctgatataaaaggtgaacctcatggactggaaaacatggaactgagaagtttggaactcagcgtcgtagaacctcagcctgtatttgaggcatcaggtgctccagatatttacagttcaaataaagatcttccccctgaaacacctggagcggaggacaaaggcaagagctcgaagaccaaaccctttcgctgtaagccatgccaatatgaagcagaatctgaagaacagtttgtgcatcacatcagagttcacagtgctaagaaattttttgtggaagagagtgcagagaagcaggcaaaagccagggaatctggctcttccactgcagaagagggagatttctccaagggccccattcgctgtgaccgctgcggctacaatactaatcgatatgatcactatacagcacacctgaaacaccacaccagagctggggataatgagcgagtctacaagtgtatcatttgcacatacacaacagtgagcgagtatcactggaggaaacatttaagaaaccattttccaaggaaagtatacacatgtggaaaatgcaactatttttcagacagaaaaaacaattatgttcagcatgttagaactcatacaggagaacgcccatataaatgtgaactttgtccttactcaagttctcagaagactcatctaactagacatatgcgtactcattcaggtgagaagccatttaaatgtgatcagtgcagttatgtggcctctaatcaacatgaagtaacccgccatgcaagacaggttcacaatgggcctaaacctcttaattgcccacactgtgattacaaaacagcagatagaagcaacttcaaaaaacatgtagagctacatgtgaacccacggcagttcaattgccctgtatgtgactatgcagcttccaagaagtgtaatctacagtatcacttcaaatctaagcatcctacttgtcctaataaaacaatggatgtctcaaaagtgaaactaaagaaaaccaaaaaacgagaggctgacttgcctgataatattaccaatgaaaaaacagaaatagaacaaacaaaaataaaaggggatgtggctggaaagaaaaatgaaaagtccgtcaaagcagagaaaagagatgtctcaaaagagaaaaagccttctaataatgtgtcagtgatccaggtgactaccagaactcgaaaatcagtaacagaggtgaaagagatggatgtgcatacaggaagcaattcagaaaaattcagtaaaactaagaaaagcaaaaggaagctggaagttgacagccattctttacatggtcctgtgaatgatgaggaatcttcaacaaaaaagaaaaagaaggtagaaagcaaatccaaaaataatagtcaggaagtgccaaagggtgacagcaaagtggaggagaataaaaagcaaaatacttgcatgaaaaaaagtacaaagaagaaaactctgaaaaataaatcaagtaagaaaagcagtaagcctcctcagaaggaacctgttgagaagggatctgctcagatggaccctcctcagatggggcctgctcccacagaggcggttcagaaggggcccgttcaggtggagctgccacctcccatggagcatgctcagatggagggtgcccagatacggcctgctcctgacgagcctgttcagatggaggtggttcaggaggggcctgctcagaaggagctgctgcctcccgtggagcctgctcagatggtgggtgcccaaattgtacttgctcacatggagctgcctcctcccatggagactgctcagacggaggttgcccaaatggggcctgctcccatggaacctgctcagatggaggttgcccaggtagaatctgctcccatgcaggtggtccagaaggagcctgttcagatggagctgtctcctcccatggaggtggtccagaaggagcctgttcagatagagctgtctcctcccatggaggtggtccagaaggaacctgttaagatagagctgtctcctcccatagaggtggtccagaaggagcctgttcagatggagttgtctcctcccatgggggtggttcagaaggagcctgctcagagggagccacctcctcccagagagcctccccttcacatggagccaatttccaaaaagcctcctctccgaaaagataaaaaggaaaagtctaacatgcagagtgaaagggcacggaaggagcaagtccttattgaagttggcttagtgcctgttaaagatagctggcttctaaaggaaagtgtaagcacagaggatctctcaccaccatcaccaccactgccaaaggaaaatttaagagaagaggcatcaggagaccaaaaattactcaacacaggtgaaggaaataaagaagcccctcttcagaaagtaggagcagaagaggcagatgagagcctacctggtcttgctgctaatatcaacgaatctacccatatttcatcctctggacaaaacttgaatacgccagagggtgaaactttaaatggtaaacatcagactgacagtatagtttgtgaaatgaaaatggacactgatcagaacacaagagagaatctcactggtataaattcaacagttgaagaaccagtttcaccaatgcttcccccttcagcagtagaagaacgtgaagcagtgtccaaaactgcactggcatcacctcctgctacaatggcagcaaatgagtctcaggaaattgatgaagatgaaggcatccacagccatgaaggaagtgacctaagtgacaacatgtcagagggtagtgatgattctggattgcatggggctcggccagttccacaagaatctagcagaaaaaatgcaaaggaagccttggcagtcaaagcggctaagggagattttgtttgtatcttctgtgatcgttctttcagaaagggaaaagattacagcaaacacctcaatcgccatttggttaatgtgtactatcttgaagaagcagctcaagggcaggagtaatgaaactttgaacaaggtttca

SEQ ID NO: 74056 - DNA, 3294 bp, Artificial Sequence
  derived and/or modified sequence
atggccacacaggtcatggggcaatcctccggcgggggaggactgttcacttccagcggtaatatcgggatggctctgcctaatgacatgtacgatcttcatgatctaagcaaggcagagctggccgctccccagctcataatgctggcgaacgtcgcactcactggcgaagtcaatggcagttgttgtgattacctggtcggggaagaacgccagatggccgagcttatgcctgttggcgataacaactttagtgatagcgaagaaggggaaggattggaggagtcggccgacatcaaaggcgagccacacgggctggagaacatggaactgcgttccttagaattgagcgtcgtggaacctcagcctgtttttgaagccagtggagctccagatatttatagcagcaacaaggacctacccccagagacccctggagctgaagacaaaggcaaatccagcaagaccaagccatttagatgtaaaccttgtcagtacgaagccgagagtgaggaacaattcgtacaccatatcagggtgcactccgcaaaaaaatttttcgtggaggagtccgctgaaaaacaggcgaaagcccgagaatccgggtcctctacggccgaggaaggagacttctccaagggtcccattaggtgtgaccgatgtggatacaataccaatcgctacgatcattatactgctcacctgaaacaccacaccagagcaggtgacaacgagagagtttataagtgcataatctgcacatacactaccgtgtctgagtaccactggcggaaacacttgagaaaccattttcctaggaaggtctacacatgcggcaagtgtaactatttctccgacaggaagaacaactacgtgcagcacgtcaggacccacaccggagagagaccctataaatgtgaactttgcccatattccagtagtcagaaaacccacctgactcggcacatgcggacccattcaggcgaaaaaccttttaaatgcgaccaatgttcttacgtcgcttccaatcagcatgaggtgactaggcacgccagacaagtccataatggccccaaaccacttaactgcccccattgcgattataaaactgcggaccggtctaattttaagaagcacgtcgagttgcacgtgaatccgcgtcaattcaactgcccagtctgcgattacgccgcatcaaagaagtgcaaccttcagtatcacttcaagtcaaagcatcctacttgcccaaacaagacaatggacgtgtctaaggtgaagcttaagaagacaaaaaagagagaagccgacttgcctgataacatcaccaatgagaaaacagaaattgaacagaccaagattaaaggtgacgtcgccgggaagaaaaatgaaaagtccgtgaaagctgagaaaagagacgtctccaaagagaaaaagccatctaacaacgtgtctgttattcaggtaactacccgaaccaggaaatctgtaaccgaggtgaaggaaatggacgtccacaccggatcgaattccgagaaatttagcaagaccaaaaagagcaagcgtaaattggaggtcgacagccatagcttgcacggtccagtcaacgatgaggaaagctctacaaagaaaaaaaagaaagttgaatctaagtctaaaaacaacagccaggaagtacccaagggggactcaaaggtggaagagaacaagaagcaaaacacttgcatgaagaagagcacgaaaaagaagacgttaaagaataaatccagcaagaagtcaagcaagcctcctcagaaggaacccgtggaaaagggttctgcccaaatggacccgccgcagatgggccccgcccctacagaggctgtacagaagggacccgtccaagtggagcccccgcctcctatggagcacgcccagatggaaggagctcagatcagacctgcacccgatgagcccgtgcaaatggaggtggtgcaggagggccccgcccagaaagaactcctccctcctgtggaacccgctcagatggttggcgcacagatcgtgctggcccatatggaactccccccacctatggagacggcacaaactgaagttgcgcagatgggtcccgcgcctatggagccagcacagatggaggtggcccaggtggagagcgctcctatgcaggttgtgcagaaagagcccgtacaaatggagctgtctccgcctatggaggttgtgcaaaaggaaccagttcagatcgaactaagcccgccaatggaggtggtccagaaggaaccagtcaaaatcgaactttccccccctatcgaggttgttcagaaagagcccgtgcagatggagctgagccctccaatgggcgttgtgcaaaaagagccggcacagagggaaccccctcctcccagggaacctcctttgcatatggaaccaatctccaaaaagccccccttgagaaaagataaaaaggagaaaagcaacatgcagtccgagcgtgcacgcaaggaacaggtccttatcgaagtcggactggttcctgtgaaggacagttggctgctgaaggagtcagtgtccacagaagacctctcaccacctagtccacccctgccgaaggaaaacctccgtgaggaggcttcaggagaccagaaactgctcaatactggagaaggaaataaagaagccccccttcagaaagtaggggcggaggaggccgatgagagccttccagggctggcagctaacataaacgagagcacacacatcagctcatctgggcagaaccttaacactccggagggagagaccctgaacgggaaacatcagactgattcaattgtatgcgaaatgaagatggatacagaccagaacacaagagagaatctcacaggcatcaatagcaccgtcgaagagccggtgtctcctatgctgcctcccagtgctgtggaagaacgagaagcagtctcgaaaacagccctggcttctccccctgcgacaatggccgccaacgaaagccaggaaattgatgaagatgaggggatccactcccatgagggcagcgacctatccgataacatgtctgagggctcagatgatagtggactccatggcgctcggcctgtgccacaggaaagctcccgcaagaacgccaaagaggccctagccgtaaaggcagcgaagggggattttgtgtgcatattctgcgatcggtcctttcgaaagggcaaggactacagcaagcacctgaaccgccatctggtgaacgtttattatcttgaggaggctgcccagggtcaggagtag

SEQ ID NO: 74057 - DNA, 3225 bp, Artificial Sequence
  derived and/or modified sequence
atggccactcaggtcatgggccaaagctcagggggcggaggcttgtttactagcagcggcaatatcggcatggcgctacctaatgatatgtacgacctgcatgatttatcaaaggcggagcttgcagcacctcagctcatcatgttggccaacgttgcgctcaccggcgaggtgaatggatcctgttgtgattacctagtcggcgaagaaagacagatggctgagctgatgcctgtcggcgacaataacttctctgactccgaagaaggcgaggggctggaagaaagcgccgatattaagggggagccccatggccttgagaacatggagctcagatccttggagctctctgttgtggagcctcagcccgtgttcgaggctagcggtgctccagatatctattccagtaacaaagacttgcctcctgagactcctggggctgaagataagggcaaatcttctaagacgaagccctttcgatgtaaaccttgccagtatgaggccgagagtgaagaacagttcgtgcaccacatccgcgtgcactccgctaagaagttcttcgtggaagaatcggcagagaaacaggccaaggccagagaatctggcagttcaacagccgaagaaggggacttcagcaagggacctatcaggtgtgatcggtgcgggtacaacacaaatcgctacgatcactacactgcccatctgaagcatcacacaagagctggagataatgagcgagtatacaagtgcattatatgtacatatacaaccgtgagtgagtaccattggaggaaacacttacgcaaccacttccctcgcaaagtttacacttgcggcaaatgtaattacttctctgaccgcaagaacaactatgtgcaacacgtcaggacccatacaggaaagcgacctagcggtgagaagccttttaaatgcgaccagtgttcttacgtggcaagcaatcaacacgaggtgactcgtcacgccaggcaggtgcacaatggcccaaaacccctgaactgccctcactgtgactataagactgcagatagatccaacttcaagaagcatgtggaactgcacgtgaatcctaggcaattcaattgccccgtttgtgattatgctgccagtaagaagtgcaatcttcaatatcacttcaagtccaagcaccccacttgtccaaacaagaccatggacgtgagcaaagttaagcttaagaaaaccaagaagcgggaggctgatctgcccgacaatattactaacgagaagaccgagatcgagcagaccaagataaagggggatgtcgccggcaagaagaatgagaagtctgtcaaggcagagaaacgggatgtgagcaaggaaaaaaagccgagcaacaatgtttctgtgattcaggtgacaacccggactcgaaaatcagtcacggaagtgaaagagatggacgtgcatactggtagcaactcggaaaaatttagcaaaactaagaaatcaaaaaggaagcttgaagtggatagccactcgctacacggccccgttaacgacgaagaatcttcaacaaagaagaagaagaaagtcgaaagtaagagcaaaaataatagccaagaagtaccaaagggagattcaaaggtggaggaaaataagaaacagaacacatgcatgaaaaagtccacaaagaaaaaaactctgaaaaataagtctagtaaaaagtcctccaaaccccctcagaaggaacctgtggagaagggttccgcccaaatggaccctccccaaatggggcccgcccctaccgaggcagtacaaaaagggccagtacaggtggagcccccgcccccaatggagcacgcccaaatggaaggtgctcaaatcaggccggctccggacgaaccagtccaaatggaggtcgtccaggaggggcctgcacagaaggagctgctccccccagttgagccagcccagatggtgggcgcccagattgtcttggcacatatggaattaccacccccaatggagacagcacagacagaggtggcgcagatgggaccagctcccatggaacctgctcagatggaggtggctcaagtcgagtccgctcctatgcaggtggttcagaaggagccggtacagatggaactgtctcccccaatggaggtggttcagaaggagcccgtccagatagaactctcaccccctatggaggtggtgcagaaggagcccgttaagatcgaattaagcccacccatagaggtagtgcagaaggagccagtgcagatggagctcagccctccaatgggtgtggtgcagaaagagccagcccagcgcgagccccctcctccccgggagccccctctccatatggaacccatctccaaaaaacccccattgagaaaggataagaaggagaagtcaaatatgcaatccgagcgggcccgcaaggagcaagttttaattgaagtgggcctggtcccagtgaaagattcctggctgctgaaggagtccgtcagcactgaggatctatccccacccagcccacctcttccaaaagagaatctcagagaagaggcttcgggagatcagaagttgcttaacaccggagagggaaataaggaagcgcctttgcagaaggtcggcgcagaagaagccgatgagtccctgcccggcctggctgccaacattaatgaaagcacccacatctcaagcagcggacaaaatttgaatacacccgagggggagacgctgaacgggaaacaccagacagattctattgtgtgtgaaatgaagatggacacagaccaaaacactagggagaatctgaccgggattaactctacagtagaagagccggtttcacctatgctgcccccaagcgcagtggaagaaagagaagccgtgtccaagaccgcactggcgtccccacctgcgaccatggctgctaatgaaagccaagaaatagatgaggacgagggtatccactctcacgagggcagtgacctgagcgataacatgtccgaaggatccgacgattctggtctccacggagccagaccggtgccacaagagagctcacggaaaaatgcgaaggaagcactggctgttaaagccgctaagggcgatttcgtgtgtattttctgcgaccggtcctttagaaaaggcaaagattattccaaacacctgaacagacacctggtaaatgtgtactacctggaggaggctgcacaaggtcaggagtag

SEQ ID NO: 74058 - DNA, 1383 bp, Artificial Sequence
  derived and/or modified sequence
atggctacacaagtgatgggacagtcatctggtggcggtgggctctttaccagctcgggaaacattggaatggccttgcccaacgacatgtacgacctccacgatctttccaaggctgaattagccgccccccagctgatcatgctagcaaatgtagctcttacaggcgaagtcaacggctcatgttgtgattacttagtgggagaggaaaggcagatggctgaactcatgccggtgggcgacaacaatttctccgattcagaggaaggtgagggtcttgaggaaagcgccgacattaagggcgagccccacgggctggagaacatggaactacgatcccttgagctgagcgtcgtcgagccccaacctgtgttcgaggccagtggagcaccagacatctatagcagcaataaggatttgccgcccgagacacctggtgccgaggacaaaggtaaatcaagcaagacaaagccctttaggtgtaagccctgccaatacgaggcagagtctgaagaacagttcgtccatcacataagggttcactctgccaagaagtttttcgtggaggagagcgccgaaaaacaggctaaagccagggaatcgggctctagtaccgctgaggagggcgatttcagcaagggaccaatccggtgcgatagatgcggatacaatacgaatcggtatgaccactataccgcccatctcaagcaccacacgagagcaggtgacaatgagcgcgtatataagtgtattatctgcacttacacaaccgtgagcgagtaccactggagaaaacacctgcgaaaccactttcctaggaaggtgtacacatgtggtaagtgcaactatttcagcgatcgtaaaaataactatgtgcagcacgtgcgtacacatacaggggagagaccgtataagtgtgaactgtgtccatacagctcttctcagaagacacatctaactagacatatgaggactcacagcggcgagaagccttttaagtgtgaccagtgttcatatgtagcctctaatcaacacgaggtcacgagacacgcgcgacaggtccacaacggaccaaaacctcttaactgccctcattgcgactacaaaaccgcagaccgctctaactttaagaagcatgtggaactacatgtcaaccccaggcagttcaactgccccgtttgcgactacgccgcgagcaaaaaatgtaatttgcagtatcatttcaagtcgaaacaccctacctgccccaacaagacaatggacgtctccaaagtgaaactgaaaaagacaaagaaaagagaagcggatctgccggataatataacgaatgaaaagactgaaatagagcaaacaaagaaaaagaagaagaaaaaaaagaaatag

SEQ ID NO: 74059 - DNA, 3294 bp, Artificial Sequence
  derived and/or modified sequence
atggccacccaggtgatgggccagagcagcggcggcggcggcctcttcaccagcagcggcaacatcggcatggccctgcccaatgacatgtatgacctgcatgacctgagcaaggccgagctggccgccccccagctgatcatgctggccaacgtggccctgactggagaggtgaatggcagctgctgtgactacctggtgggggaggagcggcagatggccgagctgatgcctgtgggggacaacaacttcagtgacagcgaggagggggagggcctggaggagagcgctgacatcaagggggagccccacggcctggagaacatggagctgcggagcctggagctgtctgtggtggagccccagcctgtgtttgaggccagcggggccccagacatctacagcagcaacaaggacctgcccccagagaccccaggagctgaggacaagggcaagagcagcaagaccaagcccttccgctgcaagccctgccagtatgaggccgagagcgaggagcagtttgtgcaccacatccgggtgcacagcgccaagaagttctttgtggaggagagcgctgagaagcaggccaaggcccgggagagcggcagcagcacagctgaggagggggacttcagcaagggccccatccgctgtgacagatgtggctacaacaccaacagatatgaccactacacagcccacctgaagcaccacaccagggctggggacaatgaaagagtgtacaagtgcatcatctgcacctacaccaccgtgtctgagtaccactggaggaagcacctgaggaaccacttccccaggaaggtgtacacctgtgggaagtgcaactacttcagtgacaggaagaacaactacgtgcagcacgtgaggacccacactggagagcggccctacaagtgtgagctgtgcccctacagcagcagccagaagacccacctgaccaggcacatgaggacccacagcggggagaagcccttcaagtgtgaccagtgcagctatgtggccagcaaccagcacgaggtgaccaggcatgcccggcaggtgcacaacggccccaagcccctgaactgcccccactgtgactacaagacagctgacaggagcaacttcaagaagcacgtggagctgcacgtgaacccccggcagttcaactgccctgtgtgtgactatgctgccagcaagaagtgcaacctgcagtaccacttcaagagcaagcaccccacctgccccaacaagaccatggatgtgtccaaggtgaagctgaagaagaccaagaagcgggaggccgacctgcctgacaacatcaccaatgagaagacagaaattgagcagaccaagatcaagggagatgtggccggcaagaagaatgagaagtctgtgaaggccgagaagagagatgtgtccaaggagaagaagcccagcaacaacgtgtctgtcatccaggtgaccaccaggaccaggaagtctgtgacagaggtgaaggagatggatgtgcacacaggcagcaacagcgagaagttcagcaagaccaagaagagcaagaggaagctggaggtggacagccacagcctgcacggccctgtgaatgatgaggagagcagcaccaagaagaagaagaaggtggagagcaagagcaagaacaacagccaggaggtgcccaagggggacagcaaggtggaggagaacaagaagcagaacacctgcatgaagaagagcaccaagaagaagaccctgaagaacaagagcagcaagaagagcagcaagccaccccagaaggagcctgtggagaagggcagcgcccagatggaccccccccagatgggccctgcccccacagaggccgtgcagaagggccctgtgcaggtggagcccccaccacccatggagcacgcccagatggagggcgcccagatccggcctgccccagatgagcctgtgcagatggaggtggtgcaggagggccctgcccagaaggagctgctgccccctgtggagcccgcccagatggtgggcgcccagatcgtgctggcccacatggagctgcccccacccatggagacagcccagacagaggtggcccagatgggccctgcccccatggagcccgcccagatggaggtggcccaggtggagagcgcccccatgcaggtggtgcagaaggagcctgtgcagatggagctgagcccccccatggaggtggtgcagaaggagcctgtgcagatcgagctgagcccccccatggaggtggtgcagaaggagcctgtgaagattgagctgagcccccccatcgaggtggtgcagaaggagcctgtgcagatggagctgagcccccccatgggcgtggtgcagaaggagcccgcccagcgggagcccccaccaccccgggagccccccctgcacatggagcccatcagcaagaagccacccctgaggaaggacaagaaggagaagagcaacatgcagagcgagcgggccaggaaggagcaggtgctgattgaggtgggcctggtgcctgtgaaggacagctggctgctgaaggagagcgtgtccacagaggacctgagcccccccagcccccccctgcccaaggagaacctgcgggaggaggccagcggggaccagaagctgctgaacacaggagagggcaacaaggaggcccccctgcagaaggtgggcgctgaggaggctgatgagagcctgcccggcctggccgccaacatcaatgaaagcacccacatcagcagcagcggccagaacctgaacaccccagagggggagaccctgaatggcaagcaccagacagacagcatcgtgtgtgagatgaagatggacacagaccagaacacccgggagaacctgaccggcatcaacagcacagtggaggagcctgtgagccccatgctgcccccatctgctgtggaggagcgggaggccgtgtccaagacagccctggccagccccccagccaccatggccgccaatgaaagccaggagattgatgaagatgagggcatccacagccatgagggcagtgacctgagtgacaacatgtctgagggcagtgatgacagcggcctgcatggagcccggcctgtgccccaggagagcagcaggaagaatgccaaggaggccctggccgtgaaggccgccaagggggactttgtgtgcatcttctgtgacaggagcttcaggaagggcaaggactacagcaagcacctgaacagacacctggtgaatgtgtactacctggaggaggccgcccagggccaggagtag

SEQ ID NO: 74060 - DNA, 3225 bp, Artificial Sequence
  derived and/or modified sequence
atggccacccaggtgatgggccagagcagcggcggcggcggcctcttcaccagcagcggcaacatcggcatggccctgcccaatgacatgtatgacctgcatgacctgagcaaggccgagctggccgccccccagctgatcatgctggccaacgtggccctgactggagaggtgaatggcagctgctgtgactacctggtgggggaggagcggcagatggccgagctgatgcctgtgggggacaacaacttcagtgacagcgaggagggggagggcctggaggagagcgctgacatcaagggggagccccacggcctggagaacatggagctgcggagcctggagctgtctgtggtggagccccagcctgtgtttgaggccagcggggccccagacatctacagcagcaacaaggacctgcccccagagaccccaggagctgaggacaagggcaagagcagcaagaccaagcccttccgctgcaagccctgccagtatgaggccgagagcgaggagcagtttgtgcaccacatccgggtgcacagcgccaagaagttctttgtggaggagagcgctgagaagcaggccaaggcccgggagagcggcagcagcacagctgaggagggggacttcagcaagggccccatccgctgtgacagatgtggctacaacaccaacagatatgaccactacacagcccacctgaagcaccacaccagggctggggacaatgaaagagtgtacaagtgcatcatctgcacctacaccaccgtgtctgagtaccactggaggaagcacctgaggaaccacttccccaggaaggtgtacacctgtgggaagtgcaactacttcagtgacaggaagaacaactacgtgcagcacgtgaggacccacacaggcaagaggcccagcggggagaagcccttcaagtgtgaccagtgcagctatgtggccagcaaccagcacgaggtgaccaggcatgcccggcaggtgcacaacggccccaagcccctgaactgcccccactgtgactacaagacagctgacaggagcaacttcaagaagcacgtggagctgcacgtgaacccccggcagttcaactgccctgtgtgtgactatgctgccagcaagaagtgcaacctgcagtaccacttcaagagcaagcaccccacctgccccaacaagaccatggatgtgtccaaggtgaagctgaagaagaccaagaagcgggaggccgacctgcctgacaacatcaccaatgagaagacagaaattgagcagaccaagatcaagggagatgtggccggcaagaagaatgagaagtctgtgaaggccgagaagagagatgtgtccaaggagaagaagcccagcaacaacgtgtctgtcatccaggtgaccaccaggaccaggaagtctgtgacagaggtgaaggagatggatgtgcacacaggcagcaacagcgagaagttcagcaagaccaagaagagcaagaggaagctggaggtggacagccacagcctgcacggccctgtgaatgatgaggagagcagcaccaagaagaagaagaaggtggagagcaagagcaagaacaacagccaggaggtgcccaagggggacagcaaggtggaggagaacaagaagcagaacacctgcatgaagaagagcaccaagaagaagaccctgaagaacaagagcagcaagaagagcagcaagccaccccagaaggagcctgtggagaagggcagcgcccagatggaccccccccagatgggccctgcccccacagaagctgtgcagaagggccctgtgcaggtggagcccccaccacccatggagcacgcccagatggagggcgcccagatccggcctgccccagatgagcctgtgcagatggaggtggtgcaggagggccctgcccagaaggagctgctgccccctgtggagcccgcccagatggtgggcgcccagatcgtgctggcccacatggagctgcccccacccatggagacagcccagacagaggtggcccagatgggccctgcccccatggagcccgcccagatggaggtggcccaggtggagagcgcccccatgcaggtggtgcagaaggagcctgtgcagatggagctgagcccccccatggaggtggtgcagaaggagcctgtgcagatcgagctgagcccccccatggaggtggtgcagaaggagcctgtgaagattgagctgagcccccccatcgaggtggtgcagaaggagcctgtgcagatggagctgagcccccccatgggcgtggtgcagaaggagcccgcccagcgggagcccccaccaccccgggagccccccctgcacatggagcccatcagcaagaagccacccctgaggaaggacaagaaggagaagagcaacatgcagagcgagcgggccaggaaggagcaggtgctgattgaggtgggcctggtgcctgtgaaggacagctggctgctgaaggagagcgtgtccacagaggacctgagcccccccagcccccccctgcccaaggagaacctgcgggaggaggccagcggggaccagaagctgctgaacacaggagagggcaacaaggaggcccccctgcagaaggtgggcgctgaggaggctgatgagagcctgcccggcctggccgccaacatcaatgaaagcacccacatcagcagcagcggccagaacctgaacaccccagagggggagaccctgaatggcaagcaccagacagacagcatcgtgtgtgagatgaagatggacacagaccagaacacccgggagaacctgaccggcatcaacagcacagtggaggagcctgtgagccccatgctgccccccagcgctgtggaggagcgggaggccgtgtccaagacagccctggccagccccccagccaccatggccgccaatgaaagccaggagattgatgaagatgagggcatccacagccatgagggcagtgacctgagtgacaacatgtctgagggcagtgatgattctggcctgcacggggcccggcctgtgccccaggagagcagcaggaagaatgccaaggaggccctggccgtgaaggccgccaagggggactttgtgtgcatcttctgtgaccgctccttcaggaagggcaaggactacagcaagcacctgaacagacacctggtgaatgtgtactacctggaggaggccgcccagggccaggagtag

SEQ ID NO: 74061 - DNA, 1383 bp, Artificial Sequence
  derived and/or modified sequence
atggccacccaggtgatgggccagagcagcggcggcggcggcctcttcaccagcagcggcaacatcggcatggccctgcccaatgacatgtatgacctgcatgacctgagcaaggccgagctggccgccccccagctgatcatgctggccaacgtggccctgactggagaggtgaatggcagctgctgtgactacctggtgggggaggagcggcagatggccgagctgatgcctgtgggggacaacaacttcagtgacagcgaggagggggagggcctggaggagagcgctgacatcaagggggagccccacggcctggagaacatggagctgcggagcctggagctgtctgtggtggagccccagcctgtgtttgaggccagcggggccccagacatctacagcagcaacaaggacctgcccccagagaccccaggagctgaggacaagggcaagagcagcaagaccaagcccttccgctgcaagccctgccagtatgaggccgagagcgaggagcagtttgtgcaccacatccgggtgcacagcgccaagaagttctttgtggaggagagcgctgagaagcaggccaaggcccgggagagcggcagcagcacagctgaggagggggacttcagcaagggccccatccgctgtgacagatgtggctacaacaccaacagatatgaccactacacagcccacctgaagcaccacaccagggctggggacaatgaaagagtgtacaagtgcatcatctgcacctacaccaccgtgtctgagtaccactggaggaagcacctgaggaaccacttccccaggaaggtgtacacctgtgggaagtgcaactacttcagtgacaggaagaacaactacgtgcagcacgtgaggacccacactggagagcggccctacaagtgtgagctgtgcccctacagcagcagccagaagacccacctgaccaggcacatgaggacccacagcggggagaagcccttcaagtgtgaccagtgcagctatgtggccagcaaccagcacgaggtgaccaggcatgcccggcaggtgcacaacggccccaagcccctgaactgcccccactgtgactacaagacagctgacaggagcaacttcaagaagcacgtggagctgcacgtgaacccccggcagttcaactgccctgtgtgtgactatgctgccagcaagaagtgcaacctgcagtaccacttcaagagcaagcaccccacctgccccaacaagaccatggatgtgtccaaggtgaagctgaagaagaccaagaagcgggaggccgacctgcctgacaacatcaccaatgagaagacagaaattgagcagaccaagaagaagaagaagaagaagaagaagtag

SEQ ID NO: 74062 - DNA, 3294 bp, Artificial Sequence
  derived and/or modified sequence
atggccacccaggtgatgggccagagcagcggcggcggcggcctgtttacctcttcaggcaacatcggaatggccttgcccaatgacatgtacgacctgcacgacctcagcaaggcagagctggcagcaccacaactgattatgctagcgaatgtggcccttactggagaagtgaatggctcctgttgcgattatcttgtaggtgaggagcgccagatggccgaattaatgcctgttggggacaataattttagtgactctgaagagggggagggacttgaagagtcagccgacataaaaggcgagccccatggccttgagaatatggagctgaggtcactggaactgtcagtcgtggagccccagccagtgttcgaagcctctggcgcaccagacatctacagtagcaataaggaccttccccccgagactcctggcgcagaggataaaggaaagagcagcaaaacgaagccgttcaggtgtaagccctgccagtacgaggccgagtcagaagaacagtttgtccaccacatcagggtccactcagctaaaaaattctttgtggaggagagtgcggagaaacaggcaaaggctagggagagtgggtcaagcacagctgaagagggcgatttctccaaagggcctattcgttgtgacagatgcgggtacaacaccaaccgatatgatcactataccgctcacttgaagcatcacacgagagctggggataacgagcgagtgtacaaatgtattatttgtacatataccaccgtctcagagtatcactggcgaaagcatcttcgcaaccattttccccgcaaagtttatacctgcgggaaatgcaactatttttctgataggaagaataactatgtgcagcatgtacgaactcacacaggcgaaagaccatacaagtgcgagctatgcccatattcttcaagccaaaagactcatctgaccaggcatatgcgcacccactccggagagaagccgtttaaatgtgatcagtgtagctacgtggcctccaaccagcacgaagtgacacggcacgccagacaggtgcacaatggtccaaagccattaaactgcccccactgtgattacaagaccgccgacagatccaactttaagaagcacgttgaactgcacgtgaacccgcggcagtttaactgccccgtatgtgattacgccgcttcaaaaaaatgcaatttacagtaccacttcaaatcaaaacaccctacatgcccaaataaaacaatggatgtaagcaaagtaaaacttaagaagactaaaaaaagagaagcggaccttcccgacaacattaccaatgagaaaacagagattgaacagactaagatcaagggggatgtggccggcaaaaagaacgaaaaatccgtcaaagccgagaagcgggacgtctccaaggaaaaaaaaccctcaaacaatgtgtccgtcattcaggtgactaccaggaccagaaagtcagtgactgaggtcaaagagatggacgtgcacacaggaagcaatagtgaaaaattcagcaagaccaagaagtcaaagcggaaacttgaggtggactcccattccctacacgggcccgtaaatgatgaggagtcaagtacaaagaagaagaaaaaagtggagagtaagtccaagaataacagtcaagaggtgcccaaaggggacagcaaggtggaagaaaataaaaagcagaacacttgcatgaaaaagagcaccaaaaagaagacccttaagaacaaatccagtaaaaagagctccaagcccccgcaaaaggaaccagtcgagaagggatctgctcaaatggatccgccccaaatggggccagcccccaccgaggccgtacagaagggccctgtgcaggtcgagcctccaccaccaatggagcatgctcagatggagggcgctcagatcagacctgcccccgatgagccggtacagatggaggtggtgcaggaagggccagcccagaaggagctgctcccccccgtcgaacctgcacagatggtcggggcacaaattgtactggcacatatggagctgccaccgcctatggaaaccgctcagacagaggtggctcagatgggtcccgccccgatggagcctgcccaaatggaggtggcgcaggtagagtcagccccaatgcaggtggtgcagaaagagcccgtgcaaatggagctgagtccccccatggaagttgttcagaaggaacccgtacagatcgagctctctccgccaatggaagttgtgcaaaaagaacccgtgaaaatagaactgtcccccccaatcgaagtggtgcaaaaggagccggtgcaaatggagttgtcgccccccatgggcgtcgtgcagaaggagcctgcccagcgggagccaccccccccaagagagcccccacttcacatggagcctatttctaaaaaaccacccctgcggaaggacaagaaagagaaaagtaacatgcagtccgagcgcgcgcggaaggagcaggtactgatcgaggtagggctcgttcccgtcaaagactcctggttgttgaaagagagcgtgagcacggaagatctgtcccccccgtcccctcccttgccaaaggagaacctgcgtgaagaggcgagtggcgaccagaaactcctgaacaccggcgaaggcaataaggaagctcccctgcagaaggtgggagccgaagaggccgatgagtccctgcccggcttagctgcgaatataaatgaaagcactcacattagttcttcaggccagaacttaaatactcccgagggtgagacactcaatgggaaacatcagactgactcgatcgtgtgtgagatgaagatggatacggaccagaatactagagaaaatttaacaggcattaactctactgtggaagagcctgttagcccgatgctgcccccttccgccgtggaggaacgagaggcagtgagcaaaacggcattagcatccccgcctgcgacaatggccgccaatgaaagccaggagattgacgaagatgagggtattcactcccacgaggggtccgacctcagcgataatatgtccgaaggaagtgacgactctggcctccatggtgctcgacctgtgccacaggaatcttcccgtaagaacgctaaggaggcactcgccgtaaaggcggccaaaggcgattttgtttgtatcttttgtgaccggtccttccggaagggaaaggactatagtaagcatctcaataggcacttagtaaatgtgtattacttagaggaagctgcacagggccaggaatag

SEQ ID NO: 74063 - DNA, 3225 bp, Artificial Sequence
  derived and/or modified sequence
atggccacccaggtgatgggccagagcagcggcggcggcggcctgtttacttcatctggaaacatcggcatggctctgcctaatgacatgtacgacttgcatgacctgagtaaggccgagttagccgccccacagttgatcatgttagcgaacgtcgccctaaccggcgaagtgaatgggtcctgctgtgactatctcgtcggcgaagagcgccagatggccgaactgatgccagtcggcgacaacaacttttcagactccgaagagggcgaaggactggaagagtccgcagacatcaagggtgagccgcacggtcttgaaaacatggaattgaggtctctggaactatccgtggtagagccacagcccgtattcgaagcctctggtgcaccagacatttactcttctaacaaagacttaccaccagagactcccggggcggaggacaagggcaagtctagtaaaaccaagccctttcgctgcaagccatgccagtatgaggccgaatctgaggagcaatttgtgcaccacatccgagtgcactcagccaagaagttcttcgtggaagaatccgctgaaaagcaggctaaagcccgggaaagcggatctagcacagctgaggagggagatttctctaaaggccccatccggtgcgatcgttgtggctataatactaataggtacgatcattacacggcccatcttaagcaccacacacgggcgggagacaatgagagagtctacaagtgtatcatctgcacttacacaacagtgagcgaatatcactggagaaaacacctgcggaatcattttcctcgaaaagtgtatacgtgtggtaagtgcaattacttcagcgataggaagaacaattatgttcagcatgtgagaacccataccggaaaaagaccctctggagagaagccgttcaagtgtgaccagtgttcgtacgttgcatccaatcaacacgaggtgaccaggcacgctcgccaggtgcacaacggccctaaaccgcttaactgcccacactgtgattataaaaccgccgatcgtagtaattttaaaaaacacgtcgagctgcatgtaaacccaagacagtttaattgtccagtctgtgactacgctgccagtaagaagtgcaatctccagtaccacttcaaatccaagcaccctacctgcccgaataagactatggacgtgtcaaaagtgaaactgaagaaaaccaagaaacgcgaagccgaccttcctgataacataacaaacgagaagaccgaaatcgaacagaccaagatcaaaggtgatgtcgctggaaaaaagaacgaaaagtccgtgaaagcagagaagagagacgtatccaaagagaaaaagccaagtaacaatgtgagtgttattcaggttacgacccgcactagaaagagtgtcacagaggtgaaagaaatggacgtccatacaggcagcaacagcgaaaagtttagcaagacgaagaagtccaaacgcaagttggaggtcgatagtcactctctgcacggcccagtcaacgatgaagaatcatcaacgaaaaagaagaaaaaggtcgaatcaaaaagcaagaataacagtcaggaagtccccaagggagacagtaaagtagaggagaacaagaagcagaatacgtgtatgaaaaagagcactaagaaaaaaaccttaaaaaataaatcgtccaaaaagagttcaaagcctcctcaaaaagaacctgtcgaaaaggggtccgcccaaatggatccaccccagatggggcccgcaccaaccgaggccgtgcaaaagggccctgttcaggtagagcctcctccacccatggagcatgctcagatggagggagcccaaattcgtcccgccccagacgagccagttcagatggaagtcgtccaggaaggaccagctcagaaagagctcctgccccctgtagagccggctcagatggtgggcgcgcaaatcgtgctggcccacatggaactgccacctcccatggagaccgcccagacagaggtcgctcagatggggcctgctccaatggagcctgcacagatggaagtggctcaagtcgagagcgcaccaatgcaggtggtgcaaaaggaacctgtgcagatggagctgtccccccctatggaggtggtccagaaggagccggtacagattgaactgtccccccctatggaggtggtgcagaaggaacccgtgaagattgaattgtcccccccaatcgaggtggtgcaaaaggagccagtgcagatggaactgtcaccacccatgggagtggtgcaaaaggaaccggcacagcgcgagcctcctcccccccgcgagcctcctttacacatggagcctataagtaagaagccacctttgcggaaggataaaaaagaaaagtccaacatgcagtccgaacgcgcaaggaaggagcaagtgctcatcgaggtgggcctggtgcctgtaaaggactcctggctcctgaaagaaagtgtttctaccgaggatcttagccctccaagcccacctctgcctaaggaaaacctccgcgaagaggcttcaggggaccaaaaattgctgaatacaggggagggtaataaagaggcaccattacaaaaggtgggcgcagaagaagcagacgagtcgctgccggggctagctgccaacatcaacgaatctactcacatctcaagcagcggacagaatctgaatactcccgagggggagacccttaatggcaagcaccaaacagacagcattgtctgcgagatgaaaatggatactgatcagaatactcgcgaaaatctgaccgggatcaattccaccgttgaggagccagtgtcccctatgctcccaccctctgccgtggaggaaagggaagcagtgagcaaaactgcattggcctctcccccagctactatggccgccaatgaatctcaggaaatcgatgaagatgagggtatacattcccacgagggctcagatctgtccgacaacatgtccgaaggctcagatgatagtgggttgcacggtgcaagaccagtcccccaagaaagcagccgtaagaatgccaaggaggccctggccgtgaaggctgctaagggagacttcgtttgtatcttctgtgatcgatcatttcggaagggcaaggactattccaagcaccttaatagacacctggttaatgtgtattacttggaggaagcagcacaaggccaggaatag

SEQ ID NO: 74064 - DNA, 1383 bp, Artificial Sequence
  derived and/or modified sequence
atggccacccaggtgatgggccagagcagcggcggcggcggcctgttcacctcctccggcaatattggtatggcattaccgaacgacatgtatgatcttcacgatttaagtaaggctgagctggccgctccacagcttatcatgctggctaacgtggcattgaccggtgaagtcaatggtagctgctgcgattacctcgtcggcgaagagaggcaaatggctgagctcatgcctgtgggtgataataacttctctgatagcgaggagggcgaggggttagaggagtctgccgacatcaaaggcgagccccatggattggagaacatggagcttcgcagtctcgagctgagtgtggttgagccacaacctgtcttcgaagccagtggcgcgcccgacatttattcttcaaataaggacctgccacctgagactccaggggcagaagataaaggaaagtcgagcaagacgaaaccctttagatgcaaaccatgccagtacgaggcagagtccgaagaacagtttgtccaccacatcagagtgcactccgctaagaagtttttcgtcgaggaatccgccgagaagcaggctaaggcgcgggaaagtggctccagcacagcagaggaaggggacttctcaaagggccccatccgatgcgatcggtgcggctataacactaatcggtacgaccactatactgcccatttaaaacatcatactagagccggcgacaacgaacgagtctacaaatgcatcatttgtacctatactacagtgagcgagtatcactggcgcaaacacttacggaaccactttccgaggaaagtgtatacatgcggtaagtgcaattacttttcagatcgcaaaaacaattatgtgcaacatgtgaggacccataccggagaacgaccttacaaatgcgaactttgcccttacagctccagccagaagacacaccttacccgccatatgcgaacgcactccggcgaaaaaccttttaagtgcgatcaatgtagttatgttgcctcgaaccaacatgaagtgacccgccatgctcgccaggtgcacaacggcccaaaaccactgaactgtccacattgtgattacaagacagctgacaggagcaattttaaaaagcacgtggagttacacgtgaatccacgccagttcaattgccctgtgtgcgactatgcagcttctaagaagtgcaatctccagtaccactttaaatctaagcatccaacctgcccaaacaaaaccatggatgtcagcaaggtgaagcttaaaaagactaagaaaagggaagcggatctacccgataacattaccaatgaaaaaactgagatcgaacagacaaagaaaaagaaaaagaagaaaaaaaaatag

SEQ ID NO: 74065 - DNA, 3294 bp, Artificial Sequence
  derived and/or modified sequence
atggccacgcaggtgatgggccaatcgtctggaggaggcggactgttcaccagctccggcaacatcggaatggccctccctaacgacatgtacgatttacacgaccttagtaaggctgagctcgctgccccacagttgattatgctcgctaacgttgctctgactggcgaggtcaatgggtcctgttgcgactatctcgtgggggaagaacgccagatggctgagctcatgccagttggcgataacaacttcagcgactccgaggaaggcgagggtctcgaagagagcgccgacattaagggcgagccccacgggcttgagaacatggagttgcgatcccttgagctatccgtggtcgagccacagcccgtgttcgaggcttctggcgctcccgatatttactcctcaaataaagatctgccccctgagacccccggagccgaagacaaaggcaagtcatccaagacgaagccctttcgatgtaagccctgtcagtacgaagcagagagcgaagagcagttcgttcatcatatccgggtgcattcagcaaagaagtttttcgtggaagaaagcgctgaaaagcaggccaaggcgagagagtcggggagttctactgccgaagagggcgatttttctaaaggccctatacgttgtgaccgctgcggatataacacaaaccggtacgaccactacacagcacacctgaagcatcacacaagggcaggcgacaacgagcgcgtttacaagtgtattatatgtacatatactaccgtgtctgaataccactggcgcaaacatctgcgcaaccactttcccagaaaagtgtacacctgcggtaagtgcaactatttctcggacagaaaaaacaattacgtgcagcacgtgaggacccacacaggcgagagaccgtacaaatgcgagctgtgtccttactcctcctcccagaaaacacacttaacgagacatatgcgcactcattctggagagaaaccctttaaatgcgatcagtgcagctatgttgcctcaaatcaacacgaagtgaccaggcacgctcgccaggttcacaacggacccaagccccttaactgcccacactgcgactacaagaccgcggacagatctaatttcaagaaacacgtggaactgcacgtgaacccgagacaatttaactgtcccgtctgtgactatgcagccagcaagaagtgcaacctacagtatcactttaagtcaaaacaccccacatgtccaaataagactatggacgtgtccaaggtgaaacttaaaaaaactaagaagcgggaggcagatctgccagacaacatcacgaatgagaaaacggagatagagcaaaccaagattaagggagatgtggcaggcaaaaaaaacgaaaaaagtgtgaaagcagaaaaacgagatgttagcaaagagaaaaaaccctccaacaatgtgagcgtcatacaagtaaccactcgcacccgcaagtccgtgacagaagtcaaagaaatggacgtccacaccggttcgaacagcgagaaattctcgaagaccaagaagagcaaacggaagttggaagttgattcacactcgctacatggaccagtgaacgatgaagagagctcaacaaaaaaaaagaagaaagtggagtcaaagtctaagaacaactctcaggaggtgcctaagggagattctaaggttgaggaaaacaaaaagcaaaacacgtgtatgaagaaatcaaccaagaagaaaacattaaaaaacaaatccagtaagaaatctagtaagccacctcagaaagaaccagtggagaaaggctccgctcaaatggaccctccacagatgggtcctgctcccacagaggcggtccaaaaaggaccggtgcaagtagagccccctccgccaatggagcatgcgcagatggaaggagcccagattcggcctgccccagatgagcccgtccagatggaggttgtccaggaagggccagcccagaaagagctcttgccccctgtcgaacctgctcagatggtaggcgcacagattgtcctggcacacatggagctgccgccaccaatggagaccgcgcaaacggaggtcgcacaaatgggcccagcccctatggagcctgctcagatggaagtggcccaggtggaatccgctcctatgcaggtagtgcagaaagagccagtccagatggaactaagtccaccaatggaagttgtgcaaaaagagccggttcagatcgaactcagtcccccaatggaagtcgtccaaaaagaacctgtgaaaatagagttgtcacctcctattgaggtggttcagaaggagccagttcagatggagctatccccacctatgggagtcgtgcagaaagagccagcccagcgcgaaccccctccacctcgggagccgccattgcacatggaacccattagcaaaaaacctccactcagaaaagacaagaaagaaaagagtaacatgcaaagcgagcgcgctcggaaagagcaggtgctgatcgaggtaggtcttgtgcccgttaaagactcctggcttctcaaagaatccgtgagtactgaagacctctccccccctagtccaccactgcccaaagaaaacctccgcgaagaagcgagtggagaccagaaactgctgaatacgggcgagggaaacaaagaggcgcctttgcagaaggtgggcgcagaagaagccgatgagtccttacccggactggcggctaatatcaacgaatctacccatatatcttctagtggccagaatctgaacacccctgaaggggagaccttgaatgggaagcatcaaaccgattccatagtctgtgaaatgaagatggatacagaccaaaacacccgggagaacttgactggaataaattccaccgttgaggagcccgtatcacctatgctgccacccagcgcagtggaagagagggaggcggtctctaaaacggctttggcttctcccccagcaaccatggctgctaatgagagtcaggaaattgatgaagatgagggcattcattcacatgagggtagcgacctctctgataatatgagcgagggcagtgacgatagcggcttacacggcgcacggcctgtgccacaagagtcgagtagaaaaaacgccaaggaagctctagccgtgaaagcagctaagggggacttcgtatgtatattctgtgatcgatcattccggaagggaaaagactattcaaagcatctgaaccgtcatcttgttaacgtctactaccttgaagaggctgcgcaaggccaggagtag

SEQ ID NO: 74066 - DNA, 3225 bp, Artificial Sequence
  derived and/or modified sequence
atggctacacaggttatggggcagtcatccggtggcggaggcctttttaccagctccggcaatatcggtatggcactgcctaatgatatgtatgacctccacgacctttcaaaagccgagctcgctgcccctcagctcatcatgctcgcgaacgtcgcactcaccggcgaagtcaatggttcctgttgcgattatttggtgggggaggaacgccagatggccgaattgatgcctgtgggagacaataacttctctgactctgaagaaggagagggtttggaagagagcgccgatatcaaaggcgagccacatggcttggaaaacatggaactgagaagcctggaattaagcgtggtggagccccagcctgtattcgaggcaagtggagcacccgacatctatagctctaataaagatctgcctcccgaaacaccaggggctgaagacaaggggaagtcctcgaagactaagccttttcgctgtaagccttgccagtatgaagcggaatccgaagagcagtttgtgcatcacatccgcgtgcactctgctaaaaagttctttgttgaggaaagcgccgagaagcaagcaaaggcccgtgagtctggctcctcgactgcggaggaaggagacttctctaagggacccattcgttgcgaccgctgtggctacaatacaaaccgctacgaccactacacagcacatctcaagcaccacactcgggcaggggacaatgagcgcgtgtacaagtgtattatctgcacgtacactacagtctcagagtaccactggcggaaacacctgcgcaaccactttccaaggaaggtgtacacatgcggcaagtgtaattacttttctgaccggaaaaataactacgtacagcacgtgcggacccatacgggaaagcggccttccggcgagaagccctttaaatgcgaccagtgttcatatgtagcttctaaccagcatgaggttactcgtcatgccaggcaggttcataatggcccaaaaccactgaattgtccacactgtgactacaaaaccgccgatcgctccaacttcaaaaaacatgtggaactgcatgttaaccctcgacaattcaactgtccagtgtgcgattacgctgcttcaaagaaatgcaatctccaatatcacttcaagtcaaagcaccctacctgccctaacaaaactatggatgtatcaaaagtaaaactgaaaaagaccaagaagagggaggccgacctcccagataacattactaacgaaaaaaccgagattgagcaaacaaagattaagggggacgtggcagggaagaagaatgaaaagtccgttaaggccgaaaaaagagacgtgtccaaagaaaagaaaccgtccaataatgtctctgttattcaggtaacgacccggacccgcaaatccgtcacagaggttaaggagatggatgtgcacactggttcaaactccgagaagtttagtaagaccaagaaatctaagagaaaactggaggtggacagccattcactgcacggcccagtgaatgacgaagagagcagcacgaagaaaaaaaagaaagtagagagcaaatctaagaataacagtcaggaagtgcccaagggtgactccaaggtagaagagaacaagaaacaaaatacttgcatgaagaagtcaaccaagaaaaaaactctgaagaataaaagctccaagaaatccagcaaaccgcctcagaaggaacccgtggaaaaggggtcagcccagatggatccaccacagatgggacctgctcccaccgaggccgttcaaaaagggcctgtgcaagtcgagcctccccctcctatggaacatgcccagatggaaggggcacagatcagacccgcacctgacgagcccgtgcagatggaggtggttcaagagggcccagctcagaaggaattattgcctcctgtggagcccgctcaaatggtgggcgcacagatcgtgctcgctcacatggaactcccccctccgatggaaactgcccagacagaggtagcccagatgggacctgcacccatggaaccagcgcaaatggaggtcgcccaggtggagtctgcccctatgcaggtggtgcaaaaagaacctgtgcagatggagcttagccccccaatggaagtggtgcagaaggagcctgtgcaaattgaattgtcccctccaatggaggtggttcagaaagagccagtcaaaattgagctgagccctcccatagaggttgtgcagaaagagcccgtacagatggaactgagtccaccaatgggcgtggtacaaaaggagcccgcacagcgggagccaccacccccacgcgagcctcctctccatatggaacccattagtaaaaagcctcctctgcggaaggataagaaagagaaatctaatatgcaatccgaacgcgctagaaaggaacaggtattaatagaagtcgggctggtgcctgtgaaggactcttggctgctcaaagaatcggtaagcactgaggacctcagcccacctagccctcctctccccaaggagaacctgcgtgaagaagcctcaggggatcagaagctgcttaacacaggtgaggggaataaagaggctccactacaaaaagttggggctgaggaagccgatgagtctctgcccggtctagcagccaatatcaacgagtccacgcacatcagctcctcggggcagaaccttaacactcctgaaggggaaacactcaacggaaaacaccagacagatagcattgtctgtgagatgaagatggacaccgaccagaacacacgtgagaacctgaccggaatcaactcaaccgtagaggaacctgtgagccccatgctgcccccatctgctgtcgaggagcgagaggccgtttccaagaccgctctcgcctcacccccagctactatggccgctaatgagtcccaggaaatagacgaggatgaggggatccatagccacgaaggctccgatctgagcgataatatgtccgaagggagcgatgattctggtctgcacggggcacgccctgtaccccaagagtcatcgcgaaaaaacgccaaagaggccctcgccgtaaaggccgctaaaggggatttcgtttgtatcttttgcgacagaagctttagaaagggtaaggattactccaagcatctgaacaggcacctggtgaacgtgtactacctggaggaggccgcacagggccaggaatag

SEQ ID NO: 74067 - DNA, 1383 bp, Artificial Sequence
  derived and/or modified sequence
atggccactcaggtcatgggccagtcgtcaggcggaggtgggttgtttacttctagcggcaacattggcatggcgcttcctaacgatatgtatgaccttcacgacctgtctaaggccgagctggcagctccccagcttatcatgttagcaaacgtggctctcaccggggaggtgaatggaagttgctgtgattatctcgtcggtgaagagcgccagatggccgagttgatgcctgttggcgataataacttcagtgattcggaggagggagaaggtctcgaggagtcagccgacataaaaggcgaaccacatggcttggaaaacatggaactccgctctcttgagctgagcgttgtcgagccccagccggtcttcgaagcttccggcgctccggatatctactcatctaataaagatcttcctcccgaaactcctggagcagaggacaaagggaagagctccaagactaaacctttcagatgtaaaccatgccagtacgaagccgaatcagaagagcagttcgtgcatcacatcagagtgcactccgccaaaaagtttttcgtggaggagagcgcagagaagcaggcaaaggcccgtgaatccggctccagcaccgcagaggaaggagacttctctaagggtcccattaggtgcgatcgctgtggatataataccaatcgctatgaccactacactgcgcacctgaaacatcatacccgagctggagacaatgagagggtgtataagtgtatcatctgcacatacacaactgtatctgagtatcactggcggaagcacttaaggaaccactttcccagaaaagtctacacctgtggcaagtgcaactatttcagtgataggaaaaataactatgtccaacacgtaagaactcacactggcgaaaggccctacaagtgtgaactctgcccctatagcagctcccagaaaactcaccttacaagacacatgcgcactcattctggcgagaagccctttaagtgtgatcagtgttcttacgtagcttctaatcagcacgaagtgactagacacgcgaggcaggtccacaatgggccaaaaccactcaattgcccacactgtgattacaagacggcagatcggtccaatttcaagaaacacgtcgagctgcatgtcaatccgagacagttcaattgtcccgtctgtgactacgccgcaagcaaaaaatgtaacctgcagtatcatttcaagtctaagcatcctacatgccccaacaagacaatggatgtcagcaaggtgaaactgaagaagacgaaaaaacgcgaagccgacttaccagataacataaccaatgaaaagactgaaatcgaacagactaagaaaaagaaaaaaaagaaaaaaaaatag

SEQ ID NO: 74068 - DNA, 7300 bp, Artificial Sequence
  derived and/or modified sequence
gcagcgtcctgtgttggaatgtgcggctgccgcgagctcgcggcgcagcagcggagcgagcgccgccgaggcccggggccccagaccctggcggcggctgccgcagccgagacggcagggcgaggcccggaggcctgagcaccctctgcagccccactcctgggccttcttggtccacgacggccccagcacccaactttaccaccctcccccacctctcccccgaaactccagcaacaaagaaaagtagtcggagaaggagcggcgactcagggtcgcccgcccctcctcaccgaggaaggccgaatacagttatggccacccaggtaatggggcagtcttctggaggaggagggctgtttaccagcagtggcaacattggaatggccctgcctaacgacatgtatgacttgcatgacctttccaaagctgaactggccgcacctcagcttattatgctggcaaatgtggccttaactggggaagtaaatggcagctgctgtgattacctggtcggtgaagaaagacagatggcagaactgatgccggttggggataacaacttttcagatagtgaagaaggagaaggacttgaagagtctgctgatataaaaggtgaacctcatggactggaaaacatggaactgagaagtttggaactcagcgtcgtagaacctcagcctgtatttgaggcatcaggtgctccagatatttacagttcaaataaagatcttccccctgaaacacctggagcggaggacaaaggcaagagctcgaagaccaaaccctttcgctgtaagccatgccaatatgaagcagaatctgaagaacagtttgtgcatcacatcagagttcacagtgctaagaaattttttgtggaagagagtgcagagaagcaggcaaaagccagggaatctggctcttccactgcagaagagggagatttctccaagggccccattcgctgtgaccgctgcggctacaatactaatcgatatgatcactatacagcacacctgaaacaccacaccagagctggggataatgagcgagtctacaagtgtatcatttgcacatacacaacagtgagcgagtatcactggaggaaacatttaagaaaccattttccaaggaaagtatacacatgtggaaaatgcaactatttttcagacagaaaaaacaattatgttcagcatgttagaactcatacaggagaacgcccatataaatgtgaactttgtccttactcaagttctcagaagactcatctaactagacatatgcgtactcattcaggtgagaagccatttaaatgtgatcagtgcagttatgtggcctctaatcaacatgaagtaacccgccatgcaagacaggttcacaatgggcctaaacctcttaattgcccacactgtgattacaaaacagcagatagaagcaacttcaaaaaacatgtagagctacatgtgaacccacggcagttcaattgccctgtatgtgactatgcagcttccaagaagtgtaatctacagtatcacttcaaatctaagcatcctacttgtcctaataaaacaatggatgtctcaaaagtgaaactaaagaaaaccaaaaaacgagaggctgacttgcctgataatattaccaatgaaaaaacagaaatagaacaaacaaaaataaaaggggatgtggctggaaagaaaaatgaaaagtccgtcaaagcagagaaaagagatgtctcaaaagagaaaaagccttctaataatgtgtcagtgatccaggtgactaccagaactcgaaaatcagtaacagaggtgaaagagatggatgtgcatacaggaagcaattcagaaaaattcagtaaaactaagaaaagcaaaaggaagctggaagttgacagccattctttacatggtcctgtgaatgatgaggaatcttcaacaaaaaagaaaaagaaggtagaaagcaaatccaaaaataatagtcaggaagtgccaaagggtgacagcaaagtggaggagaataaaaagcaaaatacttgcatgaaaaaaagtacaaagaagaaaactctgaaaaataaatcaagtaagaaaagcagtaagcctcctcagaaggaacctgttgagaagggatctgctcagatggaccctcctcagatggggcctgctcccacagaggcggttcagaaggggcccgttcaggtggagccgccacctcccatggagcatgctcagatggagggtgcccagatacggcctgctcctgacgagcctgttcagatggaggtggttcaggaggggcctgctcagaaggagctgctgcctcccgtggagcctgctcagatggtgggtgcccaaattgtacttgctcacatggagctgcctcctcccatggagactgctcagacggaggttgcccaaatggggcctgctcccatggaacctgctcagatggaggttgcccaggtagaatctgctcccatgcaggtggtccagaaggagcctgttcagatggagctgtctcctcccatggaggtggtccagaaggagcctgttcagatagagctgtctcctcccatggaggtggtccagaaggaacctgttaagatagagctgtctcctcccatagaggtggtccagaaggagcctgttcagatggagttgtctcctcccatgggggtggttcagaaggagcctgctcagagggagccacctcctcccagagagcctccccttcacatggagccaatttccaaaaagcctcctctccgaaaagataaaaaggaaaagtctaacatgcagagtgaaagggcacggaaggagcaagtccttattgaagttggcttagtgcctgttaaagatagctggcttctaaaggaaagtgtaagcacagaggatctctcaccaccatcaccaccactgccaaaggaaaatttaagagaagaggcatcaggagaccaaaaattactcaacacaggtgaaggaaataaagaagcccctcttcagaaagtaggagcagaagaggcagatgagagcctacctggtcttgctgctaatatcaacgaatctacccatatttcatcctctggacaaaacttgaatacgccagagggtgaaactttaaatggtaaacatcagactgacagtatagtttgtgaaatgaaaatggacactgatcagaacacaagagagaatctcactggtataaattcaacagttgaagaaccagtttcaccaatgcttcccccttcagcagtagaagaacgtgaagcagtgtccaaaactgcactggcatcacctcctgctacaatggcagcaaatgagtctcaggaaattgatgaagatgaaggcatccacagccatgaaggaagtgacctaagtgacaacatgtcagagggtagtgatgattctggattgcatggggctcggccagttccacaagaatctagcagaaaaaatgcaaaggaagccttggcagtcaaagcggctaagggagattttgtttgtatcttctgtgatcgttctttcagaaagggaaaagattacagcaaacacctcaatcgccatttggttaatgtgtactatcttgaagaagcagctcaagggcaggagtaatgaaactttgaacaaggtttcagttcttagtttgtaaggtatattacattttatattcatttatgatagcagacaaccttttaagattgctttaattagtatctgatgttgatttttaagtggcattcttttccttaggactttttatgtatacctgttgattgttgtgtaaattttagtaaatctaagagagtgtactaaaccagcaggtatctgttagcttatgtgtttaattgaaattagaaggctaagatggtataacagcattttattgctttgtccagctacaacttgtcatttttttctccatgtcttatcttcctgtttcactttagtttattcttcgttttttattgagatctataaaaaattggcttacttaatagcaaattacttgaagaatttgcctgctttatataaagttagcactttaagatttttttttttagagatgagaagacatttaaattgaagaaaaattcccccagcaatagacagtctatcagtccaagtatttacttcctgagttttgatcaatattttttatttgtgtatgttaatcgtcataaaaacagtgattttggtgtgttttttattttggtgctttaatggcttaagatgttgcacattttttttttcttttggtttctgtttatgtttttttgcctatgcagttaaatttttcctagaaatagcatttgtgttgaacagtaacactttatacatatatatatgcatgtttattttgtttggcgtctttggagggatgcttttagacttgtttgcaaaagggcagttttctttttctttgctgcagttgtctattttgcagaataatagtgtgtgcaagtttgtgagcaaatgaaatatgcaggttcaatctattgattttgatttttacatcttatatctatgccagaatctgtatttcatataacttatttatttcgaatggatgtagtaaattcacagctatcagttttgattttgcaataaataaaccactaggttgcatgtcgaacaaatttttatctcaaataccaaccatcagttttttttttcatgtgttttggtacagctaattcctaattgtagagtgttaaatgtttgaggagaaccttttctcatagatggttggtgttcatatggctactttacaataaagagaactgtaagtgatatttggaaactacaaacctggaattaggagatataattattccttcaagttttatagaatatcacttgggagattccaaagccatagctattacgcggcaaacctaggataagaaaggtagtatgagtgctggtagaccagctgcaactttcctatacagtgaaaaaggctggtgaaacaagtacagtccagattttttaaaatcatactttctcagggatctccacaaactggtgggtgtcctggctgtctgtgtgatagcctctttctataggtgaggcctcaaatgaattgcagctatcctggtgttcctatgagggcactttgtatgaaaaagggcatgtactccaaaacatttttgtaggttctttggccagttgccaaagagtgtgaaagaatccaatagaggatttttcttactgatagcagtcattcattgcagtaaaataaaatatgatcccattagggaatcttgaattctgacctcccatactccgttttgaaataaccactttatatttcattttttaaaaatctgatgatctctttgaggcaggtttcagatttggcagtacaacatgaaagattaggaaaagcattaataacgtgtgggtggaaagcttgttaaaaatctgagagtgaagtttgagttaaaagttgtttgaacatggcattgactgggaggccaaagatttaaagaagcggaagattcttctcttaagacatgaggagtaagttgtgtgataatggtatgtgttttgtgtgcatgaatggacattgtaaatgttgaattctaggctccgacaatcattgtcaacagaagatcaagctgcaaatatttatgttttaaaacttaaattataaagctagttaagtctttctaatgactagttttaatgttcatgggtacattttacctaagttaccgtttacattgtatagaaaaagatacatcttaagcacagattggttattaggaattagtttggggaagaggtttttttgtggattctttcatactgcaaagaaaaaccatttgccttttggggaattgagctaacttctaatctagtcttaagactagaatgctaaaaacaaaaacatgaaggaaattaaaaccccttattattaaattgatttgtaaaaacattgttactggaaatttattggacttgaggccttcctccagaaaataaggacttgattgtcaggcctatattaggttctgaaccttaatgccatgtatttgtacttactaaaaattgtttcaatgaaaagtacattagcagtatgaacttctggtccagttggaagtttttccatttgaaaaatgtgatgtttgcatggaactgtttgaaacttttttattttctagtccccctcccccacactggatagaatttagcctagaattttccctttggataaaagaacaaaaattgaacatgttatttgtaaattgatgtttagtaattagtgataaacttgaaatactagcatatattataagccttaatcttaggtagtcttatgaaaatgaatctcttaactatcttttgaacctgtattcacattggttttcaagatattttaagttatattttttcctcttttcagagctgcttcttattctggggctacttttttttttagttgtgtaattcacaaagggctgcatttttttttttttttaataaggcttataactatggctggatcttttgctctagtcttctaagaagggccattttattttttagagtcacttctaaagtcatgtggtaattaactttggagactgttttgcgtatgagtgctgatacaaattaaaacccaagtagacctcattgcatgtcaccctatgaatgttgacaatggaaggaataccttgcctgtagtatactgtcacttctggattgataagctgaggaagaaagttaagtttcttttttacataagtcagaaaaacttacagctggtgttcctagtttcctggttgacctcagcagatgaagtgaacagatagtgttaattcagattgaagaaattatctgaatcttggtttgtgtagatttacaatctacatgcaatattaactaaatcagatagcttttacagtttcacatgtgtacataggttccctcccggtcccttccatatccattagttattgaactttctaaactggcattgaaacattacaacaatgttttgttgcaccaattttataaacttaagcagtgcaatacgtgttacttttctgaggcaaaccaaaggtaaatttctcaaggttcttgctgccttctttagcagcatttgatggaagatcttttatacatttgtaatagataaaaataaaccagattgcaaatccttttttaaaatcctaaaccatgtaccaagtttttggtccaaattatgtaggataagttaaacttaaattgcattctattaaccaatatgagtgtatttctgtaagcatagttatgttgaaataaagttttaaaaacca

SEQ ID NO: 74069 - DNA, 3225 bp, Artificial Sequence
  derived and/or modified sequence
atggccacccaggtaatggggcagtcttctggaggaggagggctgtttaccagcagtggcaacattggaatggccctgcctaacgacatgtatgacttgcatgacctttccaaagctgaactggccgcacctcagcttattatgctggcaaatgtggccttaactggggaagtaaatggcagctgctgtgattacctggtcggtgaagaaagacagatggcagaactgatgccggttggggataacaacttttcagatagtgaagaaggagaaggacttgaagagtctgctgatataaaaggtgaacctcatggactggaaaacatggaactgagaagtttggaactcagcgtcgtagaacctcagcctgtatttgaggcatcaggtgctccagatatttacagttcaaataaagatcttccccctgaaacacctggagcggaggacaaaggcaagagctcgaagaccaaaccctttcgctgtaagccatgccaatatgaagcagaatctgaagaacagtttgtgcatcacatcagagttcacagtgctaagaaattttttgtggaagagagtgcagagaagcaggcaaaagccagggaatctggctcttccactgcagaagagggagatttctccaagggccccattcgctgtgaccgctgcggctacaatactaatcgatatgatcactatacagcacacctgaaacaccacaccagagctggggataatgagcgagtctacaagtgtatcatttgcacatacacaacagtgagcgagtatcactggaggaaacatttaagaaaccattttccaaggaaagtatacacatgtggaaaatgcaactatttttcagacagaaaaaacaattatgttcagcatgttagaactcatacaggtaagagaccttcaggtgagaagccatttaaatgtgatcagtgcagttatgtggcctctaatcaacatgaagtaacccgccatgcaagacaggttcacaatgggcctaaacctcttaattgcccacactgtgattacaaaacagcagatagaagcaacttcaaaaaacatgtagagctacatgtgaacccacggcagttcaattgccctgtatgtgactatgcagcttccaagaagtgtaatctacagtatcacttcaaatctaagcatcctacttgtcctaataaaacaatggatgtctcaaaagtgaaactaaagaaaaccaaaaaacgagaggctgacttgcctgataatattaccaatgaaaaaacagaaatagaacaaacaaaaataaaaggggatgtggctggaaagaaaaatgaaaagtccgtcaaagcagagaaaagagatgtctcaaaagagaaaaagccttctaataatgtgtcagtgatccaggtgactaccagaactcgaaaatcagtaacagaggtgaaagagatggatgtgcatacaggaagcaattcagaaaaattcagtaaaactaagaaaagcaaaaggaagctggaagttgacagccattctttacatggtcctgtgaatgatgaggaatcttcaacaaaaaagaaaaagaaggtagaaagcaaatccaaaaataatagtcaggaagtgccaaagggtgacagcaaagtggaggagaataaaaagcaaaatacttgcatgaaaaaaagtacaaagaagaaaactctgaaaaataaatcaagtaagaaaagcagtaagcctcctcagaaggaacctgttgagaagggatctgctcagatggaccctcctcagatggggcctgctcccacagaggcggttcagaaggggcccgttcaggtggagccgccacctcccatggagcatgctcagatggagggtgcccagatacggcctgctcctgacgagcctgttcagatggaggtggttcaggaggggcctgctcagaaggagctgctgcctcccgtggagcctgctcagatggtgggtgcccaaattgtacttgctcacatggagctgcctcctcccatggagactgctcagacggaggttgcccaaatggggcctgctcccatggaacctgctcagatggaggttgcccaggtagaatctgctcccatgcaggtggtccagaaggagcctgttcagatggagctgtctcctcccatggaggtggtccagaaggagcctgttcagatagagctgtctcctcccatggaggtggtccagaaggaacctgttaagatagagctgtctcctcccatagaggtggtccagaaggagcctgttcagatggagttgtctcctcccatgggggtggttcagaaggagcctgctcagagggagccacctcctcccagagagcctccccttcacatggagccaatttccaaaaagcctcctctccgaaaagataaaaaggaaaagtctaacatgcagagtgaaagggcacggaaggagcaagtccttattgaagttggcttagtgcctgttaaagatagctggcttctaaaggaaagtgtaagcacagaggatctctcaccaccatcaccaccactgccaaaggaaaatttaagagaagaggcatcaggagaccaaaaattactcaacacaggtgaaggaaataaagaagcccctcttcagaaagtaggagcagaagaggcagatgagagcctacctggtcttgctgctaatatcaacgaatctacccatatttcatcctctggacaaaacttgaatacgccagagggtgaaactttaaatggtaaacatcagactgacagtatagtttgtgaaatgaaaatggacactgatcagaacacaagagagaatctcactggtataaattcaacagttgaagaaccagtttcaccaatgcttcccccttcagcagtagaagaacgtgaagcagtgtccaaaactgcactggcatcacctcctgctacaatggcagcaaatgagtctcaggaaattgatgaagatgaaggcatccacagccatgaaggaagtgacctaagtgacaacatgtcagagggtagtgatgattctggattgcatggggctcggccagttccacaagaatctagcagaaaaaatgcaaaggaagccttggcagtcaaagcggctaagggagattttgtttgtatcttctgtgatcgttctttcagaaagggaaaagattacagcaaacacctcaatcgccatttggttaatgtgtactatcttgaagaagcagctcaagggcaggagtaa

SEQ ID NO: 74070 - DNA, 1727 bp, Artificial Sequence
  derived and/or modified sequence
ggcggcggcggcggcgcggactgggtgcgcggcgcagcgtcctgtgttggaatgtgcggctgccgcgagctcgcggcgcagcagcggagcgagcgccgccgaggcccggggccccagaccctggcggcggctgccgcagccgagacggcagggcgaggcccggaggcctgagcaccctctgcagccccactcctgggccttcttggtccacgacggccccagcacccaactttaccaccctcccccacctctcccccgaaactccagcaacaaagaaaagtagtcggagaaggagcggcgactcagggtcgcccgcccctcctcaccgaggaaggccgaatacagttatggccacccaggtaatggggcagtcttctggaggaggagggctgtttaccagcagtggcaacattggaatggccctgcctaacgacatgtatgacttgcatgacctttccaaagctgaactggccgcacctcagcttattatgctggcaaatgtggccttaactggggaagtaaatggcagctgctgtgattacctggtcggtgaagaaagacagatggcagaactgatgccggttggggataacaacttttcagatagtgaagaaggagaaggacttgaagagtctgctgatataaaaggtgaacctcatggactggaaaacatggaactgagaagtttggaactcagcgtcgtagaacctcagcctgtatttgaggcatcaggtgctccagatatttacagttcaaataaagatcttccccctgaaacacctggagcggaggacaaaggcaagagctcgaagaccaaaccctttcgctgtaagccatgccaatatgaagcagaatctgaagaacagtttgtgcatcacatcagagttcacagtgctaagaaattttttgtggaagagagtgcagagaagcaggcaaaagccagggaatctggctcttccactgcagaagagggagatttctccaagggccccattcgctgtgaccgctgcggctacaatactaatcgatatgatcactatacagcacacctgaaacaccacaccagagctggggataatgagcgagtctacaagtgtatcatttgcacatacacaacagtgagcgagtatcactggaggaaacatttaagaaaccattttccaaggaaagtatacacatgtggaaaatgcaactatttttcagacagaaaaaacaattatgttcagcatgttagaactcatacaggagaacgcccatataaatgtgaactttgtccttactcaagttctcagaagactcatctaactagacatatgcgtactcattcaggtgagaagccatttaaatgtgatcagtgcagttatgtggcctctaatcaacatgaagtaacccgccatgcaagacaggttcacaatgggcctaaacctcttaattgcccacactgtgattacaaaacagcagatagaagcaacttcaaaaaacatgtagagctacatgtgaacccacggcagttcaattgccctgtatgtgactatgcagcttccaagaagtgtaatctacagtatcacttcaaatctaagcatcctacttgtcctaataaaacaatggatgtctcaaaagtgaaactaaagaaaaccaaaaaacgagaggctgacttgcctgataatattaccaatgaaaaaacagaaatagaacaaacaaaaaaaaaaaaaaaaaaaaaaaaaaag

SEQ ID NO: 74071 - DNA, 3294 bp, Artificial Sequence
  derived and/or modified sequence
atggccacccaggtgatgggccagagcagcggcggcggcggcctgttcaccagcagcggcaacatcggcatggccctgcccaacgacatgtacgacctgcacgacctgagcaaggccgagctggccgccccccagctgatcatgctggccaacgtggccctgaccggcgaggtgaacggcagctgctgcgactacctggtgggcgaggagagacagatggccgagctgatgcccgtgggcgacaacaacttcagcgacagcgaggagggcgagggcctggaggagagcgccgacatcaagggcgagccccacggcctggagaacatggagctgagaagcctggagctgagcgtggtggagccccagcccgtgttcgaggccagcggcgcccccgacatctacagcagcaacaaggacctgccccccgagacccccggcgccgaggacaagggcaagagcagcaagaccaagcccttcagatgcaagccctgccagtacgaggccgagagcgaggagcagttcgtgcaccacatcagagtgcacagcgccaagaagttcttcgtggaggagagcgccgagaagcaggccaaggccagagagagcggcagcagcaccgccgaggagggcgacttcagcaagggccccatcagatgcgacagatgcggctacaacaccaacagatacgaccactacaccgcccacctgaagcaccacaccagagccggcgacaacgagagagtgtacaagtgcatcatctgcacctacaccaccgtgagcgagtaccactggagaaagcacctgagaaaccacttccccagaaaggtgtacacctgcggcaagtgcaactacttcagcgacagaaagaacaactacgtgcagcacgtgagaacccacaccggcgagagaccctacaagtgcgagctgtgcccctacagcagcagccagaagacccacctgaccagacacatgagaacccacagcggcgagaagcccttcaagtgcgaccagtgcagctacgtggccagcaaccagcacgaggtgaccagacacgccagacaggtgcacaacggccccaagcccctgaactgcccccactgcgactacaagaccgccgacagaagcaacttcaagaagcacgtggagctgcacgtgaaccccagacagttcaactgccccgtgtgcgactacgccgccagcaagaagtgcaacctgcagtaccacttcaagagcaagcaccccacctgccccaacaagaccatggacgtgagcaaggtgaagctgaagaagaccaagaagagagaggccgacctgcccgacaacatcaccaacgagaagaccgagatcgagcagaccaagatcaagggcgacgtggccggcaagaagaacgagaagagcgtgaaggccgagaagagagacgtgagcaaggagaagaagcccagcaacaacgtgagcgtgatccaggtgaccaccagaaccagaaagagcgtgaccgaggtgaaggagatggacgtgcacaccggcagcaacagcgagaagttcagcaagaccaagaagagcaagagaaagctggaggtggacagccacagcctgcacggccccgtgaacgacgaggagagcagcaccaagaagaagaagaaggtggagagcaagagcaagaacaacagccaggaggtgcccaagggcgacagcaaggtggaggagaacaagaagcagaacacctgcatgaagaagagcaccaagaagaagaccctgaagaacaagagcagcaagaagagcagcaagcccccccagaaggagcccgtggagaagggcagcgcccagatggaccccccccagatgggccccgcccccaccgaggccgtgcagaagggccccgtgcaggtggagccccccccccccatggagcacgcccagatggagggcgcccagatcagacccgcccccgacgagcccgtgcagatggaggtggtgcaggagggccccgcccagaaggagctgctgccccccgtggagcccgcccagatggtgggcgcccagatcgtgctggcccacatggagctgcccccccccatggagaccgcccagaccgaggtggcccagatgggccccgcccccatggagcccgcccagatggaggtggcccaggtggagagcgcccccatgcaggtggtgcagaaggagcccgtgcagatggagctgagcccccccatggaggtggtgcagaaggagcccgtgcagatcgagctgagcccccccatggaggtggtgcagaaggagcccgtgaagatcgagctgagcccccccatcgaggtggtgcagaaggagcccgtgcagatggagctgagcccccccatgggcgtggtgcagaaggagcccgcccagagagagccccccccccccagagagccccccctgcacatggagcccatcagcaagaagccccccctgagaaaggacaagaaggagaagagcaacatgcagagcgagagagccagaaaggagcaggtgctgatcgaggtgggcctggtgcccgtgaaggacagctggctgctgaaggagagcgtgagcaccgaggacctgagcccccccagcccccccctgcccaaggagaacctgagagaggaggccagcggcgaccagaagctgctgaacaccggcgagggcaacaaggaggcccccctgcagaaggtgggcgccgaggaggccgacgagagcctgcccggcctggccgccaacatcaacgagagcacccacatcagcagcagcggccagaacctgaacacccccgagggcgagaccctgaacggcaagcaccagaccgacagcatcgtgtgcgagatgaagatggacaccgaccagaacaccagagagaacctgaccggcatcaacagcaccgtggaggagcccgtgagccccatgctgccccccagcgccgtggaggagagagaggccgtgagcaagaccgccctggccagcccccccgccaccatggccgccaacgagagccaggagatcgacgaggacgagggcatccacagccacgagggcagcgacctgagcgacaacatgagcgagggcagcgacgacagcggcctgcacggcgccagacccgtgccccaggagagcagcagaaagaacgccaaggaggccctggccgtgaaggccgccaagggcgacttcgtgtgcatcttctgcgacagaagcttcagaaagggcaaggactacagcaagcacctgaacagacacctggtgaacgtgtactacctggaggaggccgcccagggccaggagtag

SEQ ID NO: 74072 - DNA, 3225 bp, Artificial Sequence
  derived and/or modified sequence
atggccacccaggtgatgggccagagcagcggcggcggcggcctgttcaccagcagcggcaacatcggcatggccctgcccaacgacatgtacgacctgcacgacctgagcaaggccgagctggccgccccccagctgatcatgctggccaacgtggccctgaccggcgaggtgaacggcagctgctgcgactacctggtgggcgaggagagacagatggccgagctgatgcccgtgggcgacaacaacttcagcgacagcgaggagggcgagggcctggaggagagcgccgacatcaagggcgagccccacggcctggagaacatggagctgagaagcctggagctgagcgtggtggagccccagcccgtgttcgaggccagcggcgcccccgacatctacagcagcaacaaggacctgccccccgagacccccggcgccgaggacaagggcaagagcagcaagaccaagcccttcagatgcaagccctgccagtacgaggccgagagcgaggagcagttcgtgcaccacatcagagtgcacagcgccaagaagttcttcgtggaggagagcgccgagaagcaggccaaggccagagagagcggcagcagcaccgccgaggagggcgacttcagcaagggccccatcagatgcgacagatgcggctacaacaccaacagatacgaccactacaccgcccacctgaagcaccacaccagagccggcgacaacgagagagtgtacaagtgcatcatctgcacctacaccaccgtgagcgagtaccactggagaaagcacctgagaaaccacttccccagaaaggtgtacacctgcggcaagtgcaactacttcagcgacagaaagaacaactacgtgcagcacgtgagaacccacaccggcaagagacccagcggcgagaagcccttcaagtgcgaccagtgcagctacgtggccagcaaccagcacgaggtgaccagacacgccagacaggtgcacaacggccccaagcccctgaactgcccccactgcgactacaagaccgccgacagaagcaacttcaagaagcacgtggagctgcacgtgaaccccagacagttcaactgccccgtgtgcgactacgccgccagcaagaagtgcaacctgcagtaccacttcaagagcaagcaccccacctgccccaacaagaccatggacgtgagcaaggtgaagctgaagaagaccaagaagagagaggccgacctgcccgacaacatcaccaacgagaagaccgagatcgagcagaccaagatcaagggcgacgtggccggcaagaagaacgagaagagcgtgaaggccgagaagagagacgtgagcaaggagaagaagcccagcaacaacgtgagcgtgatccaggtgaccaccagaaccagaaagagcgtgaccgaggtgaaggagatggacgtgcacaccggcagcaacagcgagaagttcagcaagaccaagaagagcaagagaaagctggaggtggacagccacagcctgcacggccccgtgaacgacgaggagagcagcaccaagaagaagaagaaggtggagagcaagagcaagaacaacagccaggaggtgcccaagggcgacagcaaggtggaggagaacaagaagcagaacacctgcatgaagaagagcaccaagaagaagaccctgaagaacaagagcagcaagaagagcagcaagcccccccagaaggagcccgtggagaagggcagcgcccagatggaccccccccagatgggccccgcccccaccgaggccgtgcagaagggccccgtgcaggtggagccccccccccccatggagcacgcccagatggagggcgcccagatcagacccgcccccgacgagcccgtgcagatggaggtggtgcaggagggccccgcccagaaggagctgctgccccccgtggagcccgcccagatggtgggcgcccagatcgtgctggcccacatggagctgcccccccccatggagaccgcccagaccgaggtggcccagatgggccccgcccccatggagcccgcccagatggaggtggcccaggtggagagcgcccccatgcaggtggtgcagaaggagcccgtgcagatggagctgagcccccccatggaggtggtgcagaaggagcccgtgcagatcgagctgagcccccccatggaggtggtgcagaaggagcccgtgaagatcgagctgagcccccccatcgaggtggtgcagaaggagcccgtgcagatggagctgagcccccccatgggcgtggtgcagaaggagcccgcccagagagagccccccccccccagagagccccccctgcacatggagcccatcagcaagaagccccccctgagaaaggacaagaaggagaagagcaacatgcagagcgagagagccagaaaggagcaggtgctgatcgaggtgggcctggtgcccgtgaaggacagctggctgctgaaggagagcgtgagcaccgaggacctgagcccccccagcccccccctgcccaaggagaacctgagagaggaggccagcggcgaccagaagctgctgaacaccggcgagggcaacaaggaggcccccctgcagaaggtgggcgccgaggaggccgacgagagcctgcccggcctggccgccaacatcaacgagagcacccacatcagcagcagcggccagaacctgaacacccccgagggcgagaccctgaacggcaagcaccagaccgacagcatcgtgtgcgagatgaagatggacaccgaccagaacaccagagagaacctgaccggcatcaacagcaccgtggaggagcccgtgagccccatgctgccccccagcgccgtggaggagagagaggccgtgagcaagaccgccctggccagcccccccgccaccatggccgccaacgagagccaggagatcgacgaggacgagggcatccacagccacgagggcagcgacctgagcgacaacatgagcgagggcagcgacgacagcggcctgcacggcgccagacccgtgccccaggagagcagcagaaagaacgccaaggaggccctggccgtgaaggccgccaagggcgacttcgtgtgcatcttctgcgacagaagcttcagaaagggcaaggactacagcaagcacctgaacagacacctggtgaacgtgtactacctggaggaggccgcccagggccaggagtag

SEQ ID NO: 74073 - DNA, 1383 bp, Artificial Sequence
  derived and/or modified sequence
atggccacccaggtgatgggccagagcagcggcggcggcggcctgttcaccagcagcggcaacatcggcatggccctgcccaacgacatgtacgacctgcacgacctgagcaaggccgagctggccgccccccagctgatcatgctggccaacgtggccctgaccggcgaggtgaacggcagctgctgcgactacctggtgggcgaggagagacagatggccgagctgatgcccgtgggcgacaacaacttcagcgacagcgaggagggcgagggcctggaggagagcgccgacatcaagggcgagccccacggcctggagaacatggagctgagaagcctggagctgagcgtggtggagccccagcccgtgttcgaggccagcggcgcccccgacatctacagcagcaacaaggacctgccccccgagacccccggcgccgaggacaagggcaagagcagcaagaccaagcccttcagatgcaagccctgccagtacgaggccgagagcgaggagcagttcgtgcaccacatcagagtgcacagcgccaagaagttcttcgtggaggagagcgccgagaagcaggccaaggccagagagagcggcagcagcaccgccgaggagggcgacttcagcaagggccccatcagatgcgacagatgcggctacaacaccaacagatacgaccactacaccgcccacctgaagcaccacaccagagccggcgacaacgagagagtgtacaagtgcatcatctgcacctacaccaccgtgagcgagtaccactggagaaagcacctgagaaaccacttccccagaaaggtgtacacctgcggcaagtgcaactacttcagcgacagaaagaacaactacgtgcagcacgtgagaacccacaccggcgagagaccctacaagtgcgagctgtgcccctacagcagcagccagaagacccacctgaccagacacatgagaacccacagcggcgagaagcccttcaagtgcgaccagtgcagctacgtggccagcaaccagcacgaggtgaccagacacgccagacaggtgcacaacggccccaagcccctgaactgcccccactgcgactacaagaccgccgacagaagcaacttcaagaagcacgtggagctgcacgtgaaccccagacagttcaactgccccgtgtgcgactacgccgccagcaagaagtgcaacctgcagtaccacttcaagagcaagcaccccacctgccccaacaagaccatggacgtgagcaaggtgaagctgaagaagaccaagaagagagaggccgacctgcccgacaacatcaccaacgagaagaccgagatcgagcagaccaagaagaagaagaagaagaagaagaagtag

SEQ ID NO: 74074 - protein, 501 aa, Artificial Sequence
  derived and/or modified sequence
MGTIHLFRKPQRSFFGKLLREFRLVAADRRSWKILLFGVINLICTGFLLMWCSSTNSIALTAYTYLTIFDLFRDGVSPFWLGWSQTPDLKWSTHLGLPKCWDNRRELPCLSNSLMTCLISYWVTLRKPSPVYSFGFERLEVLAVFASTVLAQLGALFILKESAERFLEQPEIHTGRLLVGTFVALCFNLFTMLSIRNKPFAYVSEAASTSWLQEHVADLSRSLCGIIPGLSSIFLPRMNPFVLIDLAGAFALCITYMLIEINNYFAVDTASAIAIALMTFGTMYPMSVYSGKVLLQTTPPHVIGQLDKLIREVSTLDGVLEVRNEHFWTLGFGSLAGSVHVRIRRDANEQMVLAHVTNRLYTLVSTLTVQIFKDDWIRPALLSGPVAANVLNFSDHHVIPMPLLKGTDDLNPVTSTPAKPSSPPPEFSFNTPGKNVNPVILLNTQTRPYGFGLNHGHTPYSSMLNQGLGVPGIGATQGLRTGFTNIPSRYGTNNRIGQPRP

SEQ ID NO: 74075 - DNA, 1506 bp, Artificial Sequence
  derived and/or modified sequence
atgggtactatccatctattccggaagccccaaagatccttctttggcaagctactccgcgagttccgtctggtggccgccgacagacgctcctggaagatactgttgttcggagtgattaacctcatctgcaccggcttccttctgatgtggtgcagctccacaaactccatagctctaaccgcctacacctaccttactatattcgatctctttagggacggcgtatctcctttttggctgggatggtcccagaccccagatctgaagtggtctactcacctcggactgccgaagtgctgggacaataggcgggaactgccctgcctaagcaatagcttgatgacctgccttatcagttactgggtaactctgcggaagccttcccccgtgtacagctttggatttgagcgtctggaggtcctcgcagtgttcgctagcacagtgctggcacagctaggagcgctgttcatcctgaaagagtcagctgagaggtttctggagcagcctgaaatacacaccggccgcctgctggttgggacttttgtggccctgtgcttcaacctgttcacaatgttgtcgatcaggaacaaaccttttgcctacgtttctgaagcggcctctacatcttggttgcaggaacatgtggcagatttatccagatcactttgcggaatcattccgggactatcctcaatctttctgcctagaatgaatccatttgtgctaattgacttggctggcgccttcgccctgtgcatcacatatatgctgattgaaatcaacaactattttgcggtcgatactgcttccgcaatcgcgatagcccttatgactttcggcactatgtatccgatgtctgtttatagtggcaaggttctccttcagactacccctcctcacgttatcgggcagctagacaagctgatccgcgaggtgagtacactggacggcgttctcgaggtgaggaatgagcatttctggacgttggggtttggttctctcgccgggagcgttcatgttagaatccgccgggatgccaatgagcaaatggtcctagcccacgtcacaaatcggctgtacactctggtgagcacactgacagtgcagattttcaaggacgactggattagaccagccctattaagcggtccagtcgcagccaacgtcctgaacttcagtgaccaccatgtgatcccgatgcccctgctgaagggaacagacgaccttaacccagtaacatcaacgccggccaagcccagttcaccccctccagagttcagcttcaatactccaggcaaaaatgtgaatcctgttattcttctgaatacccaaacgcgcccctatggatttggtcttaaccatggacacacaccatacagctctatgctgaaccagggactcggtgttccaggtattggcgccacgcagggactgagaaccggcttcacaaatataccttcacggtacggcacgaataatcgtataggccagcccagaccctag

SEQ ID NO: 74076 - DNA, 1506 bp, Artificial Sequence
  derived and/or modified sequence
atgggcaccatccacctgttcaggaagccccagaggagcttcttcggcaagctgctgcgggagttccggctggtggccgctgacagaagatcctggaagatcctgctgtttggagtcatcaacctgatctgcaccggcttcctgctgatgtggtgcagcagcaccaacagcatcgccctgacagcctacacctacctgaccatctttgacctcttcagagatggagtgagccccttctggctgggctggagccagaccccagacctgaagtggagcacccacctgggcctgcccaagtgctgggacaacagaagagagctgccctgcctgagcaacagcctgatgacctgcctgatctcctactgggtgaccctgaggaagcccagccctgtgtacagctttggatttgagcggctggaggtgctggccgtgtttgccagcacagtgctggcccagctgggcgccctcttcatcctgaaggagagcgctgagcgcttcctggagcagcctgagatccacacaggccgcctgctggtgggcacctttgtggccctgtgcttcaacctcttcaccatgctgagcatccggaacaagccctttgcctacgtgtctgaggccgccagcacctcctggctgcaggagcacgtggccgacctgagccgcagcctgtgtggcatcatccctggcctgagcagcatcttcctgcccaggatgaacccctttgtgctgattgacctggccggggcctttgccctgtgcatcacctacatgctgattgagatcaacaactactttgctgtggacacagccagcgccatcgccatcgccctgatgaccttcggcaccatgtaccccatgtctgtgtacagcggcaaggtgctgctgcagaccaccccacctcatgtgattggccagctggacaagctgatccgggaggtgtccaccctggatggagtgctggaggtgagaaatgagcacttctggaccctgggcttcggcagcctggccggctctgtgcacgtgcgcatcagaagagatgccaatgagcagatggtgctggcccacgtgaccaaccggctgtacaccctggtgtccaccctgactgtgcagatcttcaaggatgactggatccggcctgccctgctgagcggccctgtggccgccaacgtgctgaacttcagtgaccaccacgtgatccccatgcccctgctgaagggcacagatgacctgaaccctgtgaccagcaccccagccaagcccagcagccccccacctgagttctccttcaacacccctgggaagaatgtgaaccctgtgatcctgctgaacacccagacccggccctacggcttcggcctgaaccacggccacaccccctacagctccatgctgaaccagggcctgggcgtgcccggcattggagccacccagggcctgaggacaggcttcaccaacatccccagccgctatggcaccaacaaccgcatcggccagccccggccctag

SEQ ID NO: 74077 - DNA, 1506 bp, Artificial Sequence
  derived and/or modified sequence
atgggcaccatccacctgttccggaagccccagcggagcttcttcggcaaactgctgcgtgagttcaggctcgtggcggccgatcggcgcagctggaagatcctgctgttcggagtgattaatctaatttgcaccggctttctgctaatgtggtgcagctctaccaattccattgctctgactgcatacacctacctcactatattcgacctgttccgcgacggcgtgtccccattctggctgggatggagtcagactccagacttaaagtggagcacccacctgggactgcccaagtgctgggacaataggcgggaactcccctgtctgagcaactccttgatgacctgcttgatctcctactgggtgaccttaaggaaaccatctcctgtttactcatttggatttgagcggctcgaggtgctagctgtgtttgctagcacagtgctggcccagctgggggctctgtttatattaaaggagagcgcggaacggttcctggagcagcctgaaattcataccgggcggttactggtgggtacttttgtcgccctctgcttcaacctgtttacaatgctgtctatcaggaacaaaccatttgcgtatgtgagcgaagccgcaagtacgtcttggcttcaggaacacgtcgcagacctttctagaagcctgtgtggtatcatccctgggctgtcatcgatatttctgccgagaatgaacccatttgtgctgatcgaccttgccggagcctttgccttatgtataacatacatgctgatagagattaataactacttcgccgttgacactgccagcgccatagccatcgctctgatgacctttggcactatgtaccccatgtcagtgtattctgggaaggttctcttgcaaacaacccctccacatgtcattggccagctggacaaattaatccgagaggtgtccacattggacggcgtactggaggtcagaaatgaacacttctggactctggggttcggctccctcgctgggtctgtgcatgtgcgaatccgacgcgacgctaacgagcagatggtcctggcccacgttacgaaccgcctgtatacactcgttagcaccctgactgtccagatctttaaagacgactggatccgccctgctttgctgagcggcccagtggccgccaatgttttgaacttctccgaccatcacgtaatcccaatgcctttattaaagggcaccgacgatctgaatcccgtgaccagcacccctgcaaaaccatcctcccctcctcctgaattcagtttcaacacccctggcaagaacgtgaatcctgtcatacttctgaacactcagacgaggccttacgggttcgggctcaatcacggccacacaccgtacagtagcatgctcaaccaagggttgggcgtgcccggcatcggggcgacacagggcttgagaacggggtttactaacatcccgagccgatatggaactaacaaccgaataggacagccgcggccctag

SEQ ID NO: 74078 - DNA, 1506 bp, Artificial Sequence
  derived and/or modified sequence
atggggacaatacatctgtttagaaagcctcagcgttccttctttggaaaactgcttcgggagtttcgcctggtggctgcagatagacgcagctggaaaatcctcctgtttggagtaattaacctgatctgtactggatttcttttaatgtggtgttcaagtacaaattcaatcgcattgacagcctacacatatctaaccatttttgacctgtttcgggatggggttagccccttttggttgggatggtcccagacaccggatttaaagtggagtacgcatttgggcttgccgaaatgctgggataataggagggagcttccatgtctgtctaattctttgatgacctgtttgatctcctactgggtaacccttcgcaagccctccccagtttactcatttgggttcgagcggctagaagtgctcgcagtctttgcttccactgtcttggcacaactaggcgcattgttcatcctcaaggagagcgctgaaagattcctggaacaaccagaaattcacacgggccgtctgctcgtgggtacttttgttgccctatgcttcaaccttttcaccatgctctcgatcagaaacaagccctttgcctacgtgagcgaagcggcatcaacaagttggctgcaggaacatgtagcagacctctcacggagcctgtgcggaatcatccctgggctgtctagcatcttcctgccaaggatgaaccccttcgtgctcattgacttagccggagctttcgccctgtgtatcacctacatgctgattgaaattaacaactactttgccgtggacacagcctcagccattgcaatcgccctaatgaccttcggcactatgtacccaatgagcgtatatagcgggaaggtgctcctgcagactacaccaccacacgttatcggtcagctggataaactaattcgggaggtgagtactttagatggagttctggaagttcgcaacgaacacttctggactctgggcttcggatctttagctgggtcagttcacgttagaattagaagggatgctaatgaacagatggtgctggctcacgttactaatcgattgtatacattagtgtcaacactgactgtacagatttttaaagacgactggatcagacccgctctgctgtctggtcccgtagctgcgaacgtcctcaactttagcgaccatcacgtgattcccatgcccttgctaaaaggcaccgacgacctaaaccccgttactagtacgcccgcaaaaccgagcagcccaccacccgagttttcattcaacacccctggaaaaaacgtaaacccggtgattctactgaacactcaaacaaggccgtacggcttcggcttaaaccacggccacactccgtactccagcatgctcaaccagggcctgggcgtcccagggattggggctacccagggattgagaactgggttcactaatatcccctccagatatggtacaaacaaccggatcggacaaccgaggccttag

SEQ ID NO: 74079 - DNA, 2354 bp, Artificial Sequence
  derived and/or modified sequence
agaacggcttccggcgggagctgtgcagctccttatcatggggacaattcatctctttcgaaaaccacaaagatccttttttggcaagttgttacgggaatttagacttgtagcagctgaccgaaggtcctggaagatactgctctttggtgtaataaacttgatatgtactggcttcctgcttatgtggtgcagttctactaatagtatagctttaactgcctatacttacctgaccatttttgatctttttagagacggggtttcaccattttggctgggctggtctcaaactcctgacctcaagtggtccacccacctcggcctaccaaagtgctgggataacaggcgtgagctaccgtgcctgagcaatagtttaatgacatgtttaataagttactgggtaacattgaggaaacctagccctgtctattcatttgggtttgaaagattagaagtcctggctgtatttgcctccacagtcttggcacagttgggagctctctttatattaaaagaaagtgcagaacgctttttggaacagcccgagatacacacgggaagattattagttggtacttttgtggctctttgtttcaacctgttcacgatgctttctattcggaataaaccttttgcttatgtctcagaagctgctagtacgagctggcttcaagagcatgttgcagatcttagtcgaagcttgtgtggaattattccgggacttagcagtatcttccttccccgaatgaatccatttgttttgattgatcttgctggagcatttgctctttgtattacatatatgctcattgaaattaataattattttgccgtagacactgcctctgctatagctattgccttgatgacatttggcactatgtatcccatgagtgtgtacagtgggaaagtcttactccagacaacaccaccccatgttattggtcagttggacaaactcatcagagaggtatctaccttagatggagttttagaagtccgaaatgaacatttttggaccctaggttttggctcattggctggatcagtgcatgtaagaattcgacgagatgccaatgaacaaatggttcttgctcatgtgaccaacaggctgtacactctagtgtctactctaactgttcaaattttcaaggatgactggattaggcctgccttattgtctgggcctgttgcagccaatgtcctaaacttttcagatcatcacgtaatcccaatgcctcttttaaagggtactgatgatttgaacccagttacatcaactccagctaaacctagtagtccacctccagaattttcatttaacactcctgggaaaaatgtgaacccagttattcttctaaacacacaaacaaggccttatggttttggtctcaatcatggacacacaccttacagcagcatgcttaatcaaggacttggagttccaggaattggagcaactcaaggattgaggactggttttacaaatataccaagtagatatggaactaataatagaattggacaaccaagaccatgatagactctaacttatttttataaggaatattgactccttggcttccaatttatttagtaatccaactttgcattgactgtttaatcatttactctaaatgttagataatagtagtcttgttcacatttcatgaaacctatgaaactatatttttgtaaaatgtatttgtgacagtgaaatcctcgtaaatgttaaaggctttaaataggcttcctttagaaaatgtgtttctttaaatttggattttggtatctttggttttgtagttgactgcagtgtgatgtgaccttacctttataagagccacttgatggagtagatctgtcacattactaagatacgatatttctttttttttccgagacggagtcttgctctgccactgtgcccggccaatacattattattaacttaaggctgtactttattaaggcttccttagtttttgttttgttttgttttttgagatggagtctcactctgtcgcccaggctggaatgcagtggcatgatctcagctcactgcaacctctgcctcctgagttcaaatgattctcctgcctcagcctcccgagtagctgggattacaggcacctgccaccacgcccagctaatttttgtatttttagtaaagacgggggatttcaccatgttggccaggctggtcttgaactcctgacctcatgatccacccaccttagcctcccaaagtgctgggattaggtgtgagccaccgcacctggccgatattttctttaatgaaatttataaatatgcttcttgaataatacacattttgggaaagggaaaaa

SEQ ID NO: 74080 - DNA, 1506 bp, Artificial Sequence
  derived and/or modified sequence
atgggcaccatccacctgttcagaaagccccagagaagcttcttcggcaagctgctgagagagttcagactggtggccgccgacagaagaagctggaagatcctgctgttcggcgtgatcaacctgatctgcaccggcttcctgctgatgtggtgcagcagcaccaacagcatcgccctgaccgcctacacctacctgaccatcttcgacctgttcagagacggcgtgagccccttctggctgggctggagccagacccccgacctgaagtggagcacccacctgggcctgcccaagtgctgggacaacagaagagagctgccctgcctgagcaacagcctgatgacctgcctgatcagctactgggtgaccctgagaaagcccagccccgtgtacagcttcggcttcgagagactggaggtgctggccgtgttcgccagcaccgtgctggcccagctgggcgccctgttcatcctgaaggagagcgccgagagattcctggagcagcccgagatccacaccggcagactgctggtgggcaccttcgtggccctgtgcttcaacctgttcaccatgctgagcatcagaaacaagcccttcgcctacgtgagcgaggccgccagcaccagctggctgcaggagcacgtggccgacctgagcagaagcctgtgcggcatcatccccggcctgagcagcatcttcctgcccagaatgaaccccttcgtgctgatcgacctggccggcgccttcgccctgtgcatcacctacatgctgatcgagatcaacaactacttcgccgtggacaccgccagcgccatcgccatcgccctgatgaccttcggcaccatgtaccccatgagcgtgtacagcggcaaggtgctgctgcagaccacccccccccacgtgatcggccagctggacaagctgatcagagaggtgagcaccctggacggcgtgctggaggtgagaaacgagcacttctggaccctgggcttcggcagcctggccggcagcgtgcacgtgagaatcagaagagacgccaacgagcagatggtgctggcccacgtgaccaacagactgtacaccctggtgagcaccctgaccgtgcagatcttcaaggacgactggatcagacccgccctgctgagcggccccgtggccgccaacgtgctgaacttcagcgaccaccacgtgatccccatgcccctgctgaagggcaccgacgacctgaaccccgtgaccagcacccccgccaagcccagcagccccccccccgagttcagcttcaacacccccggcaagaacgtgaaccccgtgatcctgctgaacacccagaccagaccctacggcttcggcctgaaccacggccacaccccctacagcagcatgctgaaccagggcctgggcgtgcccggcatcggcgccacccagggcctgagaaccggcttcaccaacatccccagcagatacggcaccaacaacagaatcggccagcccagaccctag

SEQ ID NO: 74081 - protein, 438 aa, Artificial Sequence
  derived and/or modified sequence
MGTIHLFRKPQRSFFGKLLREFRLVAADRRSWKILLFGVINLICTGFLLMWCSSTNSIALTAYTYLTIFDLFSLMTCLISYWVTLRKPSPVYSFGFERLEVLAVFASTVLAQLGALFILKESAERFLEQPEIHTGRLLVGTFVALCFNLFTMLSIRNKPFAYVSEAASTSWLQEHVADLSRSLCGIIPGLSSIFLPRMNPFVLIDLAGAFALCITYMLIEINNYFAVDTASAIAIALMTFGTMYPMSVYSGKVLLQTTPPHVIGQLDKLIREAGSVHVRIRRDANEQMVLAHVTNRLYTLVSTLTVQIFKDDWIRPALLSGPVAANVLNFSDHHVIPMPLLKGTDDLNPVTSTPAKPSSPPPEFSFNTPGKNVNPVILLNTQTRPYGFGLNHGHTPYSSMLNQGLGVPGIGATQGLRTGFTNIPSRYGTNNRIGQPRP

SEQ ID NO: 74082 - DNA, 1317 bp, Artificial Sequence
  derived and/or modified sequence
atgggtacaatccacttgtttcgcaagccacagaggtctttctttggaaagcttctgcgcgaattccgcctcgtggcggctgaccgccgcagctggaagattctgttgttcggtgtcatcaatcttatatgcaccggctttctgcttatgtggtgttctagtaccaatagcattgcactcactgcgtacacatacctgacaatttttgatctcttcagccttatgacctgcctgattagctactgggtcactttgaggaaaccatcacccgtatatagcttcggatttgagagacttgaggtgttggccgtgttcgcctccactgttctagctcaactgggtgccctcttcatcctcaaagagagtgccgaaagattcctggaacaaccagagatccacacgggtaggcttctggtgggcaccttcgtcgccctgtgcttcaacttgttcacaatgctctccatccggaataagccatttgcttatgtgagcgaagctgcgagtacctcatggttgcaggagcacgtggctgacctgtcgcggagtctctgcggaattattcctgggctctcctcaattttcttacctcgcatgaatccatttgtcctcatcgacttagcgggtgcctttgccttatgtatcacctatatgcttattgaaatcaacaattatttcgcagtcgatactgccagcgcaatcgctatcgcccttatgacctttggtaccatgtatcctatgagtgtgtatagtgggaaagttctgctccagacaactcccccccacgttattgggcagctggataaacttatacgggaagccggtagcgtccacgtgagaattcggcgagacgctaatgagcagatggtgctcgcccacgtgacgaatcgcctgtacactctcgtgtccacattgacggtccagatctttaaagatgattggatccggcccgcacttctcagtggaccagtggccgctaatgtgttaaattttagcgaccatcacgtgattccgatgccccttctgaaaggtaccgacgacctgaatcccgtgacaagcactcccgccaaaccctcctctcctcctcctgaattcagctttaacacgcccggtaaaaacgtcaatccagtcatcctgcttaatacgcagacaaggccctacggctttggattgaaccacggtcatacaccatattcttcaatgttaaatcagggcttgggcgtgccaggtatcggcgccacgcaagggctccgcacaggcttcaccaatatcccctcaaggtacggcaccaacaatcgaatcggacaaccccgaccatag

SEQ ID NO: 74083 - DNA, 1317 bp, Artificial Sequence
  derived and/or modified sequence
atgggcaccatccacctgttcaggaagccccagaggagcttcttcggcaagctgctgcgggagttccggctggtggccgctgacagaagatcctggaagatcctgctgtttggagtcatcaacctgatctgcaccggcttcctgctgatgtggtgcagcagcaccaacagcatcgccctgacagcctacacctacctgaccatctttgacctcttcagcctgatgacctgcctgatctcctactgggtgaccctgaggaagcccagccctgtgtacagctttggatttgagcggctggaggtgctggccgtgtttgccagcacagtgctggcccagctgggcgccctcttcatcctgaaggagagcgctgagcgcttcctggagcagcctgagatccacacaggccgcctgctggtgggcacctttgtggccctgtgcttcaacctcttcaccatgctgagcatccggaacaagccctttgcctacgtgtctgaggccgccagcacctcctggctgcaggagcacgtggccgacctgagccgcagcctgtgtggcatcatccctggcctgagcagcatcttcctgcccaggatgaacccctttgtgctgattgacctggccggggcctttgccctgtgcatcacctacatgctgattgagatcaacaactactttgctgtggacacagccagcgccatcgccatcgccctgatgaccttcggcaccatgtaccccatgtctgtgtacagcggcaaggtgctgctgcagaccaccccacctcatgtgattggccagctggacaagctgatccgggaggccggctctgtgcacgtgcgcatcagaagagatgccaatgagcagatggtgctggcccacgtgaccaacagactctacaccctggtgtccaccctgactgtgcagatcttcaaggatgactggatccggcctgccctgctgagcggccctgtggccgccaacgtgctgaacttcagtgaccaccacgtgatccccatgcccctgctgaagggcacagatgacctgaaccctgtgaccagcaccccagccaagcccagcagccccccacctgagttctccttcaacaccccaggcaagaatgtgaaccctgtgatcctgctgaacacccagacccggccctacggcttcggcctgaaccacggccacaccccctacagctccatgctgaaccagggcctgggcgtgcccggcatcggggccacccagggcctgaggacaggcttcaccaacatccccagccgctatggcaccaacaacagaattggccagccccggccctag

SEQ ID NO: 74084 - DNA, 1317 bp, Artificial Sequence
  derived and/or modified sequence
atgggcaccatccacctgttccggaagccccagcggagcttcttcggtaaattactccgagaattcaggctagttgctgccgacaggagatcttggaaaatcttgttgtttggcgtcattaacctgatttgtaccgggttcctgctgatgtggtgctctagcaccaattcaatcgccttgaccgcctacacctacctgacgatcttcgatctgttctctctgatgacatgtctcatctcctactgggtgactctccgcaaaccttctccggtgtatagttttggcttcgagaggttggaagtcctggctgtgtttgctagtactgtgcttgcccagctgggtgcccttttcatcctaaaagagtcagcagagcgtttcctcgagcagcctgagatccacacaggaagactcctagtaggaacttttgtggctttgtgtttcaacctgttcacaatgctgtcaatccgaaacaaacccttcgcctatgtatccgaggctgctagcacaagctggttacaggagcacgtcgcggacttgtccagaagtctttgtgggatcatcccagggctgtctagcatttttctccctaggatgaatcctttcgtcttgattgacttggctggggcattcgcactatgcattacttacatgctgatagagatcaacaattattttgccgtggatacggccagcgcaatcgcgatcgctcttatgacatttggaactatgtaccccatgtctgtgtattccggaaaagttcttcttcaaaccacccccccccacgtgattgggcagttggacaagctcatcagagaggcggggtcagtgcatgtgaggattcgcagagacgctaatgagcaaatggtcctggcccacgtcacaaaccggctgtacacactggtcagtaccctaaccgttcagattttcaaggacgactggatcaggcccgcactgttgtctgggcctgtggctgctaatgtgttaaatttctccgaccaccatgtgattccgatgccactactgaagggcaccgatgatcttaaccccgtgactagcacacctgctaagcctagctccccacctcccgagttttccttcaacacaccgggcaaaaacgtgaacccggtgatcctgctgaatacccagacccggccttatggctttggcttaaaccatggacatactccttattcatccatgctgaaccagggactcggcgttccaggtattggggccacccagggactgcgcacaggctttacaaatataccgagccggtatggcaccaacaaccggattggtcagcctaggccctag

SEQ ID NO: 74085 - DNA, 1317 bp, Artificial Sequence
  derived and/or modified sequence
atggggaccattcatctgtttcgcaagccccagcgctcttttttcggcaaactactgcgagagttcaggctggtggcggcagatcggagaagctggaagatacttctgtttggcgtcattaacctgatatgcaccggtttcctgttaatgtggtgcagttccaccaatagtattgccctcacagcgtatacctacttgacaattttcgatttgttctcacttatgacctgcttaatcagctattgggtgaccctgagaaagcccagccccgtgtacagcttcgggtttgaaaggctggaggtcctggccgtctttgcatctactgtgctggcccagctgggcgctctattcattctcaaagaaagcgctgagcggttcctggagcagccagagatccataccggcaggttacttgtcggcaccttcgtcgctctgtgctttaaccttttcaccatgttaagtatccggaataagccttttgcctacgtaagtgaagcagcttcaacaagctggctgcaggagcatgtcgcagacctgagccgatcactctgcggcatcattcctgggctgagcagcatcttcctgccacggatgaacccttttgtcctaatagatctagccggtgctttcgcactctgtatcacttacatgctcattgagataaataactattttgctgtggatacagcatcggccattgccatcgctttaatgaccttcggcactatgtatcccatgagcgtgtactccgggaaagtgctgcttcagactactccaccccatgtcattggacaactagataaactcatccgtgaggcgggtagcgttcatgtcaggattcgaagagacgcgaacgaacagatggtcttggctcatgtgacgaatcgactgtacaccctcgtgagcaccctcacggttcagattttcaaggatgattggattagacccgctctgctatcaggccctgttgcagcaaacgttctgaatttctctgaccatcacgtgatccccatgcccctgctgaagggcaccgatgacttaaaccccgtgactagcacccctgccaagccaagcagccctccgccagaatttagcttcaacacacctggcaaaaatgttaatccagttatactgttaaacactcagactcgtccctacggcttcgggttgaatcatggacacacaccatactcctcgatgctgaatcagggactcggcgttccgggaatcggcgcaacacagggtctccgcactggctttaccaacattccatctagatacggtacaaataacagaatcggtcaacctcggccatag

SEQ ID NO: 74086 - DNA, 2381 bp, Artificial Sequence
  derived and/or modified sequence
agaacggcttccggcgggagctgtgcagctccttatcatggggacaattcatctctttcgaaaaccacaaagatccttttttggcaagttgttacgggaatttagacttgtagcagctgaccgaaggtcctggaagatactgctctttggtgtaataaacttgatatgtactggcttcctgcttatgtggtgcagttctactaatagtatagctttaactgcctatacttacctgaccatttttgatctttttagtttaatgacatgtttaataagttactgggtaacattgaggaaacctagccctgtctattcatttgggtttgaaagattagaagtcctggctgtatttgcctccacagtcttggcacagttgggagctctctttatattaaaagaaagtgcagaacgctttttggaacagcccgagatacacacgggaagattattagttggtacttttgtggctctttgtttcaacctgttcacgatgctttctattcggaataaaccttttgcttatgtctcagaagctgctagtacgagctggcttcaagagcatgttgcagatcttagtcgaagcttgtgtggaattattccgggacttagcagtatcttccttccccgaatgaatccatttgttttgattgatcttgctggagcatttgctctttgtattacatatatgctcattgaaattaataattattttgccgtagacactgcctctgctatagctattgccttgatgacatttggcactatgtatcccatgagtgtgtacagtgggaaagtcttactccagacaacaccaccccatgttattggtcagttggacaaactcatcagagaggctggatcagtgcatgtaagaattcgacgagatgccaatgaacaaatggttcttgctcatgtgaccaacaggctgtacactctagtgtctactctaactgttcaaattttcaaggatgactggattaggcctgccttattgtctgggcctgttgcagccaatgtcctaaacttttcagatcatcacgtaatcccaatgcctcttttaaagggtactgatgatttgaacccagttacatcaactccagctaaacctagtagtccacctccagaattttcatttaacactcctgggaaaaatgtgaacccagttattcttctaaacacacaaacaaggccttatggttttggtctcaatcatggacacacaccttacagcagcatgcttaatcaaggacttggagttccaggaattggagcaactcaaggattgaggactggttttacaaatataccaagtagatatggaactaataatagaattggacaaccaagaccatgatagactctaacttatttttataaggaatattgactccttggcttccaatttatttagtaatccaactttgcattgactgtttaatcatttactctaaatgttagataatagtagtcttgttcacatttcatgaaacctatgaaactatatttttgtaaaatgtatttgtgacagtgaaatcctcgtaaatgttaaaggctttaaataggcttcctttagaaaatgtgtttctttaaatttggattttggtatctttggttttgtagttgactgcagtgtgatgtgaccttacctttataagagccacttgatggagtagatctgtcacattactaagatacgatatttctttttttttccgagacggagtcttgctctgccactgtgcccggccaatacattattattaacttaaggctgtactttattaaggcttccttagtttttgttttgttttgttttttgagatggagtctcactctgtcgcccaggctggaatgcagtggcatgatctcagctcactgcaacctctgcctcctgagttcaaatgattctcctgcctcagcctcccgagtagctgggattacaggcacctgccaccacgcccagctaatttttgtatttttagtaaagacgggggatttcaccatgttggccaggctggtcttgaactcctgacctcatgatccacccaccttagcctcccaaagtgctgggattaggtgtgagccaccgcacctggccgatattttctttaatgaaatttataaatatgcttcttgaataatacacattttgggaaagggaaaaatgtctgttcaaaaagtaaaagtctcttttatagcttttccaaacttaattgctaaatttttctttgaggttctcctgaattatgtcttacaaactaaaagcaaaaatttttagcagaaattttggaatacattctatctagcacaatttgaatttttaattatcaagatttttgttaaagtttctctcctttaaaaattttagtacatttgtaaat

SEQ ID NO: 74087 - DNA, 1317 bp, Artificial Sequence
  derived and/or modified sequence
atgggcaccatccacctgttcagaaagccccagagaagcttcttcggcaagctgctgagagagttcagactggtggccgccgacagaagaagctggaagatcctgctgttcggcgtgatcaacctgatctgcaccggcttcctgctgatgtggtgcagcagcaccaacagcatcgccctgaccgcctacacctacctgaccatcttcgacctgttcagcctgatgacctgcctgatcagctactgggtgaccctgagaaagcccagccccgtgtacagcttcggcttcgagagactggaggtgctggccgtgttcgccagcaccgtgctggcccagctgggcgccctgttcatcctgaaggagagcgccgagagattcctggagcagcccgagatccacaccggcagactgctggtgggcaccttcgtggccctgtgcttcaacctgttcaccatgctgagcatcagaaacaagcccttcgcctacgtgagcgaggccgccagcaccagctggctgcaggagcacgtggccgacctgagcagaagcctgtgcggcatcatccccggcctgagcagcatcttcctgcccagaatgaaccccttcgtgctgatcgacctggccggcgccttcgccctgtgcatcacctacatgctgatcgagatcaacaactacttcgccgtggacaccgccagcgccatcgccatcgccctgatgaccttcggcaccatgtaccccatgagcgtgtacagcggcaaggtgctgctgcagaccacccccccccacgtgatcggccagctggacaagctgatcagagaggccggcagcgtgcacgtgagaatcagaagagacgccaacgagcagatggtgctggcccacgtgaccaacagactgtacaccctggtgagcaccctgaccgtgcagatcttcaaggacgactggatcagacccgccctgctgagcggccccgtggccgccaacgtgctgaacttcagcgaccaccacgtgatccccatgcccctgctgaagggcaccgacgacctgaaccccgtgaccagcacccccgccaagcccagcagccccccccccgagttcagcttcaacacccccggcaagaacgtgaaccccgtgatcctgctgaacacccagaccagaccctacggcttcggcctgaaccacggccacaccccctacagcagcatgctgaaccagggcctgggcgtgcccggcatcggcgccacccagggcctgagaaccggcttcaccaacatccccagcagatacggcaccaacaacagaatcggccagcccagaccctag

SEQ ID NO: 74088 - protein, 264 aa, Artificial Sequence
  derived and/or modified sequence
MNPFVLIDLAGAFALCITYMLIEINNYFAVDTASAIAIALMTFGTMYPMSVYSGKVLLQTTPPHVIGQLDKLIREVSTLDGVLEVRNEHFWTLGFGSLAGSVHVRIRRDANEQMVLAHVTNRLYTLVSTLTVQIFKDDWIRPALLSGPVAANVLNFSDHHVIPMPLLKGTDDLNPVTSTPAKPSSPPPEFSFNTPGKNVNPVILLNTQTRPYGFGLNHGHTPYSSMLNQGLGVPGIGATQGLRTGFTNIPSRYGTNNRIGQPRP

SEQ ID NO: 74089 - protein, 432 aa, Artificial Sequence
  derived and/or modified sequence
MSWKILLFGVINLICTGFLLMWCSSTNSIALTAYTYLTIFDLFSLMTCLISYWVTLRKPSPVYSFGFERLEVLAVFASTVLAQLGALFILKESAERFLEQPEIHTGRLLVGTFVALCFNLFTMLSIRNKPFAYVSEAASTSWLQEHVADLSRSLCGIIPGLSSIFLPRMNPFVLIDLAGAFALCITYMLIEINNYFAVDTASAIAIALMTFGTMYPMSVYSGKVLLQTTPPHVIGQLDKLIREVSTLDGVLEVRNEHFWTLGFGSLAGSVHVRIRRDANEQMVLAHVTNRLYTLVSTLTVQIFKDDWIRPALLSGPVAANVLNFSDHHVIPMPLLKGTDDLNPVTSTPAKPSSPPPEFSFNTPGKNVNPVILLNTQTRPYGFGLNHGHTPYSSMLNQGLGVPGIGATQGLRTGFTNIPSRYGTNNRIGQPRP

SEQ ID NO: 74090 - DNA, 1299 bp, Artificial Sequence
  derived and/or modified sequence
atgtcgtggaaaatcctgctcttcggagttattaacctcatctgtaccggattccttctgatgtggtgttcttcgactaactcaatcgcactgacagcctacacctacctcacaatctttgatctgttctctttgatgacatgtctgattagctactgggttaccttaaggaagccgagtcccgtctactcctttgggttcgagcgccttgaggtgctggcagtcttcgcatccacagtactcgcacaactcggcgccctgtttattcttaaagagtcagccgagagatttctggaacagccggagatccacacagggcggttgttagtgggtacatttgtggctctctgttttaatctgttcacgatgctgtctattagaaataaacccttcgcgtacgtatctgaagccgcatcaaccagttggctacaggagcatgtggccgatctgtccaggagcttatgtggtatcatccctggcctttccagtattttcctacctcgaatgaatcccttcgtcctgattgatctcgctggggcctttgcattatgtatcacctatatgctgatcgaaataaacaactattttgctgtcgacaccgcttccgccatcgcaattgccctgatgacctttggcacaatgtatcccatgtccgtgtattccggcaaggtgttgctccagactacccctccccacgtcatcggccagctcgataaactgattcgggaggtgagtacgcttgacggcgtgttggaggtgcggaacgagcatttttggacactgggattcggctccctcgccggctccgttcacgtgagaataaggcgcgacgccaatgaacaaatggtgctggcgcatgtaaccaacaggctctacaccctcgtctctactttaactgtgcagatatttaaggacgactggatacgccccgccctgctctccggccccgtggccgccaatgtcttgaacttcagcgaccatcacgtaattccaatgccacttttaaaggggactgatgacctcaatcctgtcaccagcacccccgccaagccatcatcccctccaccagaattcagttttaacactcctgggaaaaatgtaaaccctgtaattctgctcaacacacaaactcgcccgtatggtttcggcctgaatcacgggcacactccatactccagcatgctgaatcaggggcttggggtcccggggatcggtgccacccagggcttaagaacaggatttacaaacattccttctagatatggcaccaacaacaggattggacagccccgcccgtag

SEQ ID NO: 74091 - DNA, 1299 bp, Artificial Sequence
  derived and/or modified sequence
atgtcctggaagatcctgctgtttggagtcatcaacctgatctgcaccggcttcctgctgatgtggtgcagcagcaccaacagcatcgccctgacagcctacacctacctgaccatctttgacctcttcagcctgatgacctgcctgatctcctactgggtgaccctgaggaagcccagccctgtgtacagctttggatttgagcggctggaggtgctggccgtgtttgccagcacagtgctggcccagctgggcgccctcttcatcctgaaggagagcgctgagcgcttcctggagcagcctgagatccacacaggccgcctgctggtgggcacctttgtggccctgtgcttcaacctcttcaccatgctgagcatccggaacaagccctttgcctacgtgtctgaggccgccagcacctcctggctgcaggagcacgtggccgacctgagccgcagcctgtgtggcatcatccctggcctgagcagcatcttcctgcccaggatgaacccctttgtgctgattgacctggccggggcctttgccctgtgcatcacctacatgctgattgagatcaacaactactttgctgtggacacagccagcgccatcgccatcgccctgatgaccttcggcaccatgtaccccatgtctgtgtacagcggcaaggtgctgctgcagaccaccccaccccacgtgattggccagctggacaagctgatccgggaggtgtccaccctggatggagtgctggaggtgagaaatgagcacttctggaccctgggcttcggcagcctggccggctctgtgcacgtgcgcatcagaagagatgccaatgagcagatggtgctggcccacgtgaccaacagactctacaccctggtgtccaccctgactgtgcagatcttcaaggatgactggatccggcctgccctgctgagcggccctgtggccgccaacgtgctgaacttcagtgaccaccacgtgatccccatgcccctgctgaagggcacagatgacctgaaccctgtgaccagcaccccagccaagcccagcagccccccacctgagttctccttcaacaccccaggcaagaatgtgaaccctgtgatcctgctgaacacccagacccggccctacggcttcggcctgaaccacggccacaccccctacagctccatgctgaaccagggcctgggcgtgcccggcatcggggccacccagggcctgaggacaggcttcaccaacatccccagccgctatggcaccaacaacagaattggccagccccggccctag

SEQ ID NO: 74092 - DNA, 1299 bp, Artificial Sequence
  derived and/or modified sequence
atgagctggaagatcctgctgttcggcgtgatcaacctgatctgcacaggattcctccttatgtggtgctcttccaccaattcaatcgcccttaccgcctacacctacctcactatctttgacctgttcagccttatgacgtgcctgataagctactgggtgactctcaggaaaccaagcccagtatattctttcggttttgaaaggctcgaggtacttgcagtgtttgcaagtacagtgctggctcagctgggggctctgttcatattgaaagagagcgcagagagattcctggaacaaccagaaatccataccggacgtctcctggtcgggaccttcgtggctctctgttttaatctcttcacgatgctgtcaatccgcaataaaccctttgcctatgtgtccgaagctgccagcacctcctggcttcaggagcacgttgccgatctctccagatctctttgcggcatcatccctgggctatcctcgattttcttgccacggatgaatccattcgtgcttatagatttggccggcgccttcgccctttgtataacatatatgctgatcgaaataaataactatttcgccgttgacaccgcctctgcgatagctatcgccctgatgacattcggcactatgtatcctatgtcagtctattccggaaaagtcctcttgcaaaccaccccacctcacgttataggccagctagataaactcataagagaagtttctacacttgacggcgtgttggaagtcaggaacgaacacttttggacactggggtttggtagtctcgctggttctgtacacgttcggatcagacgtgacgcgaacgagcaaatggtgctagcacatgttacaaaccgtctgtacaccctggtctccacacttactgtacaaatctttaaggacgactggattagacctgccttgctatccggaccagtggccgccaacgtactgaacttttcagatcaccatgtgatccctatgccattactcaagggaaccgatgatcttaatccggtaacctccacccccgctaagccatcatcccctccccctgagttttctttcaacacgccaggcaagaacgtcaaccccgtgattctcttgaatacccaaacaagaccttacggctttggtctgaaccatggccacactccatactcctccatgctgaaccaggggctgggagtccctggaattggggctacccagggattgcgcactggcttcactaacatacctagccggtatggcaccaataacagaattggccaaccacggccttag

SEQ ID NO: 74093 - DNA, 1299 bp, Artificial Sequence
  derived and/or modified sequence
atgagctggaagattctgcttttcggggtgataaacttaatctgtaccgggttcttattaatgtggtgctctagtactaattcaatcgctcttactgcatatacctatctgaccattttcgacctgttcagcctgatgacctgtctgattagctattgggttactctccggaagccctcccccgtgtatagctttggcttcgagcgacttgaagtcctcgccgtgttcgcttcaacagttctggctcagcttggggcactattcatcctgaaagagtcagctgaaagatttctcgaacaaccggagatccacacaggcaggctgctggttggtaccttcgtagccctgtgctttaaccttttcaccatgctgagtattaggaataaaccgttcgcctacgtgtctgaggcggctagcacgtcatggctgcaggaacatgttgcagacctgtcacgcagtctctgtggcattatccctggtctctcaagcatcttcctgccccgaatgaacccatttgtgctgatcgatctggctggagctttcgccctttgtatcacatatatgctcattgaaattaataattactttgcagtggacaccgcttctgcaattgcaatcgcacttatgacatttggcaccatgtatcctatgtccgtgtactctggcaaagttcttctccaaactactccgccacatgtgatcggacagctcgacaaactgatacgggaggtatctaccctcgatggcgtgctggaagtgcgcaatgaacatttttggacactgggattcgggagcttggcgggatccgtacacgtgagaatccggagagacgccaacgagcagatggttctggcacatgtgaccaatcgtttatacaccctggtaagtaccctgactgtacaaatctttaaggatgactggattcgtcctgcactactctctggcccagtggcagcgaatgtcctgaatttctccgaccaccacgtgattcctatgccacttttaaaaggcactgatgacctcaaccccgtgacatccacacctgccaagccctcgtctccgccacctgagttctcatttaatacgccaggcaaaaatgtgaaccctgtaatactgctaaacactcagacacgtccatacgggttcggcctgaaccacggacacacgccatattcaagtatgctgaatcaagggttgggcgtcccaggaattggcgctacccaaggactccgcacaggttttaccaacatacccagcagatacggcacaaataatcgaatcggtcagcccaggccatag

SEQ ID NO: 74094 - DNA, 1770 bp, Artificial Sequence
  derived and/or modified sequence
agaacggcttccggcgggagctgtgcagctccttatcatgtcctggaagatactgctctttggtgtaataaacttgatatgtactggcttcctgcttatgtggtgcagttctactaatagtatagctttaactgcctatacttacctgaccatttttgatctttttagtttaatgacatgtttaataagttactgggtaacattgaggaaacctagccctgtctattcatttgggtttgaaagattagaagtcctggctgtatttgcctccacagtcttggcacagttgggagctctctttatattaaaagaaagtgcagaacgctttttggaacagcccgagatacacacgggaagattattagttggtacttttgtggctctttgtttcaacctgttcacgatgctttctattcggaataaaccttttgcttatgtctcagaagctgctagtacgagctggcttcaagagcatgttgcagatcttagtcgaagcttgtgtggaattattccgggacttagcagtatcttccttccccgaatgaatccatttgttttgattgatcttgctggagcatttgctctttgtattacatatatgctcattgaaattaataattattttgccgtagacactgcctctgctatagctattgccttgatgacatttggcactatgtatcccatgagtgtgtacagtgggaaagtcttactccagacaacaccaccccatgttattggtcagttggacaaactcatcagagaggtatctaccttagatggagttttagaagtccgaaatgaacatttttggaccctaggttttggctcattggctggatcagtgcatgtaagaattcgacgagatgccaatgaacaaatggttcttgctcatgtgaccaacaggctgtacactctagtgtctactctaactgttcaaattttcaaggatgactggattaggcctgccttattgtctgggcctgttgcagccaatgtcctaaacttttcagatcatcacgtaatcccaatgcctcttttaaagggtactgatgatttgaacccagttacatcaactccagctaaacctagtagtccacctccagaattttcatttaacactcctgggaaaaatgtgaacccagttattcttctaaacacacaaacaaggccttatggttttggtctcaatcatggacacacaccttacagcagcatgcttaatcaaggacttggagttccaggaattggagcaactcaaggattgaggactggttttacaaatataccaagtagatatggaactaataatagaattggacaaccaagaccatgatagactctaacttatttttataaggaatattgactccttggcttccaatttatttagtaatccaactttgcattgactgtttaatcatttactctaaatgttagataatagtagtcttgttcacatttcatgaaacctatgaaactatatttttgtaaaatgtatttgtgacagtgaaatcctcgtaaatgttaaaggctttaaataggcttcctttagaaaatgtgtttctttaaatttggattttggtatctttggttttgtagttgactgcagtgtgatgtgaccttacctttataagagccacttgatggagtagatctgtcacattactaagatacgatatttctttttttttccgagacggagtcttgctctgccactgtgcccggccaatacattattattaacttaaggctgtactttattaaggc

SEQ ID NO: 74095 - DNA, 1299 bp, Artificial Sequence
  derived and/or modified sequence
atgagctggaagatcctgctgttcggcgtgatcaacctgatctgcaccggcttcctgctgatgtggtgcagcagcaccaacagcatcgccctgaccgcctacacctacctgaccatcttcgacctgttcagcctgatgacctgcctgatcagctactgggtgaccctgagaaagcccagccccgtgtacagcttcggcttcgagagactggaggtgctggccgtgttcgccagcaccgtgctggcccagctgggcgccctgttcatcctgaaggagagcgccgagagattcctggagcagcccgagatccacaccggcagactgctggtgggcaccttcgtggccctgtgcttcaacctgttcaccatgctgagcatcagaaacaagcccttcgcctacgtgagcgaggccgccagcaccagctggctgcaggagcacgtggccgacctgagcagaagcctgtgcggcatcatccccggcctgagcagcatcttcctgcccagaatgaaccccttcgtgctgatcgacctggccggcgccttcgccctgtgcatcacctacatgctgatcgagatcaacaactacttcgccgtggacaccgccagcgccatcgccatcgccctgatgaccttcggcaccatgtaccccatgagcgtgtacagcggcaaggtgctgctgcagaccacccccccccacgtgatcggccagctggacaagctgatcagagaggtgagcaccctggacggcgtgctggaggtgagaaacgagcacttctggaccctgggcttcggcagcctggccggcagcgtgcacgtgagaatcagaagagacgccaacgagcagatggtgctggcccacgtgaccaacagactgtacaccctggtgagcaccctgaccgtgcagatcttcaaggacgactggatcagacccgccctgctgagcggccccgtggccgccaacgtgctgaacttcagcgaccaccacgtgatccccatgcccctgctgaagggcaccgacgacctgaaccccgtgaccagcacccccgccaagcccagcagccccccccccgagttcagcttcaacacccccggcaagaacgtgaaccccgtgatcctgctgaacacccagaccagaccctacggcttcggcctgaaccacggccacaccccctacagcagcatgctgaaccagggcctgggcgtgcccggcatcggcgccacccagggcctgagaaccggcttcaccaacatccccagcagatacggcaccaacaacagaatcggccagcccagaccctag

SEQ ID NO: 74096 - protein, 182 aa, Artificial Sequence
  derived and/or modified sequence
MGLFGKTQEKPPKELVNEWSLKIRKEMRVVDRQIRDIQREEEKVKRSVKDAAKKGQKDVCIVLAKEMIRSRKAMQSLVKIPEIQATMRELSKEMMKAGIIEEMLEDTFESMDDQEEMEEEAEMEIDRILFEITAGALGKAPSKVTDALPEPEPPGAMAASEDEEEEEEALEAMQSRLATLRS

SEQ ID NO: 74097 - DNA, 549 bp, Artificial Sequence
  derived and/or modified sequence
atgggcctgtttgggaaaacgcaagagaaaccccccaaggaacttgtcaatgagtggagtcttaaaatccggaaagagatgcgagtagtggatcggcaaattagagatatacagcgagaagaggagaaggtgaaacgcagtgtgaaagatgcagctaaaaagggacagaaagatgtgtgcatcgttctcgcaaaggagatgatccggagccgaaaggcgatgcagtccttagtcaaaattcccgaaatccaggccacgatgagagaactcagtaaggagatgatgaaagctggtatcattgaagagatgctagaggatactttcgaaagcatggacgaccaggaggagatggaggaagaagctgaaatggaaatagaccgaatactgttcgagattaccgcgggagctttagggaaagcgcccagcaaagtgactgacgcattacctgagccagaacccccaggggcaatggccgcttcggaagacgaggaagaggaagaggaggccctggaagccatgcagtcccgcctcgctactctacggtcgtag

SEQ ID NO: 74098 - DNA, 549 bp, Artificial Sequence
  derived and/or modified sequence
atgggcctgtttgggaagacccaggagaagccacccaaggagctggtgaatgagtggagcctgaagatcaggaaggagatgagggtggtggaccggcagatccgggacatccagcgggaggaggagaaggtgaagaggtctgtgaaggatgctgccaagaagggccagaaggatgtgtgcatcgtgctggccaaggagatgatccgcagcaggaaggccatgcagagcctggtgaagatccctgagatccaggccaccatgagggagctgagcaaggagatgatgaaggccggcatcatcgaggagatgctggaggacacctttgagagcatggatgaccaggaggagatggaggaggaggccgagatggagattgaccgcatcctgtttgagatcacagctggggccctgggcaaggcccccagcaaggtgacagatgccctgcctgagcctgagcccccaggggccatggccgcctctgaagatgaggaggaggaggaggaggccctggaggccatgcagagccggctggccaccctgcggagctag

SEQ ID NO: 74099 - DNA, 549 bp, Artificial Sequence
  derived and/or modified sequence
atgggcctgttcggcaagacccaggagaagccccccaaggagctggttaacgaatggagtctgaagatccgaaaggagatgcgcgttgtggaccgacagattagagatattcaaagagaggaggaaaaagtcaagagatctgtgaaagatgccgcaaagaaaggccaaaaggatgtttgcatcgtgctggccaaagagatgatccggagcagaaaggcaatgcagtcactggtgaagattcccgagatccaggctactatgcgggagcttagcaaagagatgatgaaggcagggattatcgaagagatgctggaggacaccttcgagtctatggatgaccaggaggagatggaagaggaagccgagatggaaatcgataggatccttttcgagattacagctggtgctttagggaaggcgccctctaaagtcactgacgccctgcccgaaccagagcctccgggggccatggctgcgtcggaagacgaggaagaggaagaagaggctttggaagcgatgcaatcacggttggcaacccttcggtcttag

SEQ ID NO: 74100 - DNA, 549 bp, Artificial Sequence
  derived and/or modified sequence
atgggcctattcgggaaaacacaagaaaagcctccgaaggagctggtgaatgagtggagcctcaagatccgtaaggagatgcgcgtcgtggatcgccaaattcgggatattcagcgtgaagaggagaaggtgaagcgctcggttaaggatgctgcgaagaaagggcagaaagatgtatgtatcgtactggcgaaagaaatgatccgctcgcggaaggccatgcagtccctcgttaagattcctgaaattcaggcaacaatgagggagttgtcaaaggagatgatgaaggccggtatcatcgaggaaatgctcgaggacacatttgagtccatggacgatcaagaagagatggaggaagaggcagagatggaaatcgaccgcatcctgtttgagattacagcgggtgctctaggcaaggcaccttccaaggtgacagatgcccttccagaacccgagcctcccggagccatggcagcatccgaagacgaggaggaagaggaggaggctttagaggcaatgcagtccagactcgctaccctgcgctcttag

SEQ ID NO: 74101 - DNA, 1851 bp, Artificial Sequence
  derived and/or modified sequence
aaggggcaagacgggttcagttcgtcatggggctgtttggaaagacccaggagaagccgcccaaagaactggtcaatgagtggtcattgaagataagaaaggaaatgagagttgttgacaggcaaataagggatatccaaagagaagaagaaaaagtgaaacgatctgtgaaagatgctgccaagaagggccagaaggatgtctgcatagttctggccaaggagatgatcaggtcaaggaaggccatgcaaagtcttgtgaagattccagagattcaggccaccatgagggagttgtccaaagaaatgatgaaggctgggatcatagaggagatgttagaggacacttttgaaagcatggacgatcaggaagaaatggaggaagaagcagaaatggaaattgacagaattctctttgaaattacagcaggggccttgggcaaagcacccagtaaagtgactgatgcccttccagagccagaacctccaggagcgatggctgcctcagaggatgaggaggaggaggaagaggctctggaggccatgcagtcccggctggccacactccgcagctaggggctgcctaccccgctgggtgtgcacacactcctctcaagagctgccattttatgtgtctcttgcactacacctctgttgtgaggactaccattttggagaaggttctgtttgtctcttttcattctctgcccaggttttgggatcgcaaagggattgttcttataaaagtggcataaataaatgcatcatttttaggagtatagacagatatatcttattgtggggaggggaaagaaatccatctgctcatgaagcacttctgaaaatataggtgattgcctgaatgtcgaagactctacttttgtctataaaacactatataaatgaattttaataaatttttgctttagcacttggccccattgtagattgccctgtgcagtaaactttcaaggtgtcggctgccccagattgcttcatttgctgggtgtggaaagagttgctatggccaggcatatgggatttggaagctcagcagaagtgacttctgctctgtggttgctgctccccggctttcacagacatggtatggcagccattcttttatctatttaaccaagaggatgctggggaattgtgctgcttgtcctgttggctggtggctgcattatgtcctggggtgtgcatgtgggtctatttagagcttctgtcccttccttcccattgcaagttgcacccagatgagacagctgtagtactaggtctctttcacctctcattgcctgtccctgcttcgagctggttgtcttgtgcgtgggacatgggccttcctatctgtgttttctcaaagtcaggagctgaccaggagcacactaaggtgtggtcatgcatcataaccaacattcactcatctgggacattcttaagatacatttataaatcatttcagcagtagtactttgtatgtgttgagagtttacagagctctttgacatacgcgatcttagtctttacaaataaggaaaacagctcagtttgggaagtatcagagatgggattcaaacccagatcctctggtccaagttgtatgtgcactgaactaatcaggcaggaaaaaagcccagccactgtctcacagattgttttttgtatattgtagcaaaatcctgaaacaatggggtccttccagtctcatcatacaaaatggcaatcttggctgggtgcggtggttcatgcctataatcccagtgctttacaaggctgaggcaggaggctctcttgagaataggagttcaagaccagcctgggcaacatagcaagatcctgtctctcc

SEQ ID NO: 74102 - DNA, 549 bp, Artificial Sequence
  derived and/or modified sequence
atgggcctgttcggcaagacccaggagaagccccccaaggagctggtgaacgagtggagcctgaagatcagaaaggagatgagagtggtggacagacagatcagagacatccagagagaggaggagaaggtgaagagaagcgtgaaggacgccgccaagaagggccagaaggacgtgtgcatcgtgctggccaaggagatgatcagaagcagaaaggccatgcagagcctggtgaagatccccgagatccaggccaccatgagagagctgagcaaggagatgatgaaggccggcatcatcgaggagatgctggaggacaccttcgagagcatggacgaccaggaggagatggaggaggaggccgagatggagatcgacagaatcctgttcgagatcaccgccggcgccctgggcaaggcccccagcaaggtgaccgacgccctgcccgagcccgagccccccggcgccatggccgccagcgaggacgaggaggaggaggaggaggccctggaggccatgcagagcagactggccaccctgagaagctag

SEQ ID NO: 74103 - protein, 806 aa, Artificial Sequence
  derived and/or modified sequence
MAKSSSLNVRVVEGRALPAKDVSGSSDPYCLVKVDDEVVARTATVWRSLGPFWGEEYTVHLPLDFHQLAFYVLDEDTVGHDDIIGKISLSREAITADPRGIDSWINLSRVDPDAEVQGEICLSVQMLEDGQGRCLRCHVLQARDLAPRDISGTSDPFARVFWGSQSLETSTIKKTRFPHWDEVLELREMPGAPSPLRVELWDWDMVGKNDFLGMVEFSPKTLQQKPPKGWFRLLPFPRAEEDSGGNLGALRVKVRLIEDRVLPSQCYQPLMELLMESVQGPAEEDTASPLALLEELTLGDCRQDLATKLVKLFLGRGLAGRFLDYLTRREVARTMDPNTLFRSNSLASKSMEQFMKLVGMPYLHEVLKPVISRVFEEKKYMELDPCKMDLGRTRRISFKGALSEEQMRETSLGLLTGYLGPIVDAIVGSVGRCPPAMRLAFKQLHRRVEERFPQAEHQQDVKYLAISGFLFLRFFAPAILTPKLFDLRDQHADPQTSRSLLLLAKAVQSIGNLGQQLGQGKELWMAPLHPFLLQCVSRVRDFLDRLVDVDGDEEAGVPARALFPPSAIVREGYLLKRKEEPAGLATRFAFKKRYVWLSGETLSFSKSPEWQMCHSIPVSHIRAVERVDEGAFQLPHVMQVVTQDGTGALHTTYLQCKNVNELNQWLSALRKASAPNPNKLAACHPGAFRSARWTCCLQAERSAAGCSRTHSAVTLGDWSDPLDPDAEAQTVYRQLLLGRDQLRLKLLEDSNMDTTLEADTGACPEVLARQRAATARLLEVLADLDRAHEEFQQQERGKAALGPLGP

SEQ ID NO: 74104 - DNA, 2421 bp, Artificial Sequence
  derived and/or modified sequence
atggccaaatcatctagcctgaacgtgcgggtcgtcgagggccgagcactgcctgcaaaagacgtgtctggctcttcagatccttactgcctggtgaaggtcgatgatgaggtggtggcaaggaccgccactgtgtggcggagcctcggcccattctggggtgaggagtacactgtgcacctccctctggactttcatcaactagccttctacgtactggacgaggacactgtcggccatgatgacataattggaaagatcagtttatcacgggaggctattaccgccgacccccggggaatcgacagttggatcaacctgagtagagtggaccccgacgccgaggtccagggcgaaatctgtctatctgttcagatgttagaggacggacaggggcgttgcctgcgatgtcacgtactgcaggcgagagaccttgcgccccgggacatctctggcacctccgatccctttgctagggttttttgggggagccagagcctggaaacatctacaatcaagaagacaagattcccgcactgggatgaagtcctggaattacgcgagatgccaggcgcccctagcccccttcgcgtggaattgtgggattgggatatggttggtaaaaacgactttctgggcatggtggaattttcccctaagactctccagcagaagccccccaaagggtggttccggctccttccattcccaagggccgaggaagatagcggagggaacctgggggccctccgggtcaaggtgaggctgatcgaagacagagtcctgccaagtcagtgttatcaacccttaatggagttgcttatggagagcgtccagggacccgccgaagaggacaccgcatctcccctggctctcttggaggaattgacactgggcgattgtaggcaagacctcgctacgaagctcgtgaaactctttcttggtcgtggactagctggaagattcctcgactacttaactaggagggaggtagctagaacaatggatccaaatacactctttcgttctaactctttggcgtctaagtcaatggagcagttcatgaaactggttggcatgccatatctccacgaggtgttgaaaccagtgataagtcgtgtgttcgaagagaaaaaatacatggagttggacccctgtaaaatggacttgggccgaacacggaggataagcttcaagggagccttaagcgaggagcaaatgcgagagacgtcgctaggactcctgaccggatatctcggtccaatcgtggacgccatagtgggctccgttggacgttgtcctcctgcaatgcggctggcgttcaagcagcttcacaggagggtcgaggagcgctttccccaagctgaacatcagcaggatgtgaagtatttagcgattagcggattcttattcctgcgattttttgccccggccatcctgacgcctaaactgttcgatttgagagatcagcatgccgacccacagaccagtcgcagtcttttactactggccaaagctgtccagagcattggaaatctaggccaacagctgggtcagggcaaggagctatggatggcaccactacatccctttctcctccagtgtgtgagcagagtaagagactttctggataggctggttgacgtcgacggtgatgaggaagctggggtacccgctcgggctcttttccccccctcagccatagtgcgcgaaggatatctgcttaaacgcaaggaagaacccgcagggctggccacgaggtttgctttcaagaaacgatacgtatggctcagcggagagaccttatctttctctaagtccccagaatggcagatgtgccactcgatcccggtctcccatattcgtgccgttgaaagagtggacgaaggcgcttttcagctgcctcatgtcatgcaggtggtgacacaggacgggacaggcgcgctgcatacaacttacctgcagtgtaaaaacgtcaacgagctgaaccagtggctgtctgcccttaggaaggcgtctgctccgaatcccaataaactggccgcgtgccaccctggggcttttcggagcgctcgctggacatgttgtttgcaggctgagcgcagtgccgcaggttgtagtcggacccattccgccgtaaccctaggggactggagtgaccccctcgacccagacgccgaggctcagactgtgtaccggcaactccttctgggcagggaccagctgcgcctaaagctcctggaggattccaatatggacacgactttggaggctgacactggcgcctgccctgaagtgctcgctcggcagcgcgcggctacagctaggctcctggaggtcctagcagatctggatcgggctcacgaagaatttcagcagcaagaacgagggaaggccgctcttggtccattgggcccgtag

SEQ ID NO: 74105 - DNA, 2421 bp, Artificial Sequence
  derived and/or modified sequence
atggccaagagcagcagcctgaatgtgcgggtggtggagggccgggccctgcctgccaaggatgtgtctggcagcagtgacccctactgcctggtgaaggtggatgatgaggtggtggccaggacagccaccgtgtggaggagcctgggccccttctggggcgaggagtacacagtgcacctgcccctggacttccaccagctggccttctacgtgctggatgaagatactgtgggccatgatgacatcatcggcaagatcagcctgagccgggaggccatcacagctgacccccggggcatcgacagctggatcaacctgagccgggtggaccctgatgctgaggtgcagggcgagatctgcctgtctgtgcagatgctggaggatggccagggccgctgcctgcgctgccacgtgctgcaggcccgggacctggccccccgggacatcagcggcaccagtgacccctttgcccgggtcttctggggcagccagagcctggagaccagcaccatcaagaagacccgcttcccccactgggatgaggtgctggagctgcgggagatgcctggggcccccagccccctgcgggtggagctgtgggactgggacatggtgggcaagaatgacttcctgggcatggtggagttcagccccaagaccctgcagcagaagccacccaagggctggttccggctgctgcccttccccagggcagaagaagattctgggggcaacctgggcgccctgcgggtgaaggtgcggctgattgaggacagagtgctgcccagccagtgctaccagcccctgatggagctgctgatggagagcgtgcagggccctgctgaggaggacacagccagccccctggccctgctggaggagctgaccctgggggactgccggcaggacctggccaccaagctggtgaagctgttcctgggccggggcctggccggccgcttcctggactacctgacccggcgggaggtggcccggaccatggaccccaacaccctcttccgcagcaacagcctggccagcaagtccatggagcagttcatgaagctggtgggcatgccctacctgcacgaggtgctgaagcctgtgatcagccgggtgtttgaggagaagaagtacatggagctggacccctgcaagatggacctgggccgcacccggcgcatctccttcaagggggccctgtctgaggagcagatgagggagaccagcctgggcctgctgaccggctacctgggccccatcgtggatgccatcgtgggctctgtgggccgctgccccccagccatgaggctggccttcaagcagctgcaccggcgggtggaggagcgcttcccccaggccgagcaccagcaggatgtgaagtacctggccatcagcggcttcctgttcctgcgcttctttgccccagccatcctgacccccaagctgtttgacctgcgggaccagcacgccgacccccagaccagccgcagcctgctgctgctggccaaggctgtgcagagcatcggcaacctgggccagcagctgggccagggcaaggagctgtggatggcccccctgcaccccttcctgctgcagtgtgtgtcccgggtgcgggacttcctggaccggctggtggatgtggatggagatgaggaggccggcgtgcctgcccgggccctcttcccccccagcgccatcgtgcgggagggctacctgctgaagaggaaggaggagcccgccggcctggccaccaggtttgccttcaagaagcgctacgtgtggctgagcggggagaccctgtccttcagcaagagccctgagtggcagatgtgccacagcatccctgtgagccacatccgggctgtggagcgggtggatgagggcgccttccagctgccccacgtgatgcaggtggtgacccaggacggcaccggggccctgcacaccacctacctgcagtgcaagaatgtgaatgagctgaaccagtggctgagcgccctgaggaaggccagcgcccccaaccccaacaagctggccgcctgccaccctggggccttccgcagcgcccgctggacctgctgcctgcaggccgagaggtctgctgctggctgcagcaggacccacagcgctgtgaccctgggggactggagcgaccccctggaccctgatgctgaggcccagacagtgtaccggcagctgctgctgggccgggaccagctgcggctgaagctgctggaggacagcaacatggacaccaccctggaggccgacaccggggcctgcccagaggtgctggcccggcagagagctgccacagcccggctgctggaggtgctggccgacctggaccgggcccacgaggagttccagcagcaggagcggggcaaggccgccctgggccccctgggcccctag

SEQ ID NO: 74106 - DNA, 2421 bp, Artificial Sequence
  derived and/or modified sequence
atggccaagagcagcagcctgaacgtgcgggtggtggagggccgggcccttcctgcaaaggacgtcagtggctctagcgatccttactgcctcgtaaaagtcgacgacgaagtagtggcaaggacggccactgtgtggcgttcacttggccccttttggggcgaggaatataccgttcatcttccgctggacttccaccagctggctttctacgtattggacgaagatacagtgggtcacgacgatatcatcggcaagataagcctgtcccgcgaggctattacggcagacccgcgcgggattgattcctggataaacctgagccgtgtggaccctgacgcagaggtgcagggcgagatttgtctgtccgtgcagatgttggaggacggccagggccgctgcttgcggtgtcacgtgctacaggcacgagatctggccccgcgcgatataagcggtacatctgatcctttcgctcgggtgttctgggggtcccagtcccttgagacatctacgattaagaagacacggtttccccactgggacgaggtgttggagctgcgcgaaatgcccggagcgccgtcccccctgagggtagagctgtgggactgggatatggtcggcaaaaatgattttctcggtatggttgagtttagtcctaaaactttgcagcaaaaaccccctaagggttggtttcggctgctgccatttccacgggccgaggaggactctggtggtaatctgggcgcattacgggtgaaagtaaggttgatcgaagacagagtactgccctcacagtgctaccagccactcatggagttgctgatggaatcagtccaaggccctgcggaagaggatacagcaagtcctctggctctgttggaggaactgacacttggtgattgccgacaagacttggccaccaagctcgtcaaattgttcctgggtaggggtttggccggtagatttctcgattacctcacacgacgagaagtggcccggacaatggacccaaacaccttgtttcggagcaactccctggcttcaaaatcaatggagcagttcatgaagttagtcgggatgccttacttgcacgaagtccttaaaccagtcatctccagggtgttcgaggaaaagaagtacatggaattggacccatgcaaaatggatctcggaaggacgagaaggatcagctttaaaggagcactgtcagaagagcagatgcgcgagacctctctgggccttttaaccgggtatctggggcctatcgtcgacgcaattgtcgggagtgttggccgctgcccccctgccatgcggcttgcattcaaacagcttcataggagagtggaggagaggttcccccaggctgaacatcagcaggacgtcaagtatttggccattagcggattcctgtttctgcgcttttttgcccccgccatcctaacccccaagctgtttgacctgcgagatcaacatgctgatccccagacaagccgttctctgctattgcttgccaaagcagtacagagtattggcaacctgggccaacagctaggtcagggaaaagaactctggatggcgccgctgcaccctttcttactgcagtgcgtatcaagagtcagagatttcctagacaggctagttgacgtcgatggcgacgaggaagccggagttccagcacgagcactgtttcccccctctgccatagttcgggaggggtatctcctgaagcgtaaggaggaacccgccgggctggccacacggttcgcctttaagaagcgttacgtctggttgtccggagagacgctttcattttcaaaatctccagagtggcagatgtgtcattcaatccctgtctcacatataagagctgtggagagggtggatgagggagccttccagctacctcacgtaatgcaggtggtgacccaagatggcactggcgccctccacacaacatatctccagtgcaagaacgtaaacgaattaaaccagtggctgagcgcacttaggaaagcctcagctcccaatcccaacaagctggccgcctgtcaccctggggcttttcggagcgcccgctggacctgctgccttcaggctgagcgaagtgccgctgggtgctcaaggacccattctgcagttactctgggagactggtcggacccgttggacccagacgcagaggcccagactgtctaccgtcagttgttactgggcagggaccagttgaggctaaagcttctcgaagactcaaacatggacacaacattggaggctgacaccggagcatgcccagaggtgttggcccgccagagagcggctacggcccggctgctggaggtcttagctgatttggatcgcgctcacgaggagtttcaacaacaagagagaggtaaagcagcccttggaccactggggccgtag

SEQ ID NO: 74107 - DNA, 2421 bp, Artificial Sequence
  derived and/or modified sequence
atggcaaagagtagcagcctgaatgtaagggtagtggaggggagagccttacctgccaaagacgtgagtggttctagcgacccatactgcctcgtgaaggtagatgatgaagtggtggccagaacggccaccgtgtggagatccctgggccctttctggggcgaggaatataccgtgcaccttccactcgatttccaccagttggccttttacgtgttagacgaggacacagtcgggcacgatgatatcatcggcaagatttctttgagcagagaggcaattacagctgaccccaggggcatagactcatggatcaacttaagccgcgtagatccggacgccgaggtccagggggagatctgtctgtctgttcagatgttagaggacgggcaaggacgttgtctccgctgtcatgtcctgcaggcccgagacctagccccaagggatatcagcggaaccagtgacccatttgctcgagtcttctgggggtctcaatcactcgagactagtactatcaaaaagactcgtttccctcattgggatgaggttctagaactacgggaaatgccgggagctcctagtccactcagagtggaactctgggactgggacatggtgggtaagaatgatttcctgggaatggtggagttttcacccaaaactcttcagcagaaaccgcctaagggatggttcagattgctgccattcccacgcgcagaggaggattcagggggaaatttaggagccctgcgggtgaaggttcggctgatcgaggacagggtgctgccaagccaatgctaccagccactgatggagctcttaatggagtccgtgcagggacccgctgaagaagatacagctagcccactggcgttacttgaggagctgactctgggggactgtagacaagatctggccacaaagttggtgaaattgttcttgggaagaggcctagcgggtcgtttcctggattacctgacccggagagaggttgccagaaccatggacccgaataccctgttcagatccaatagtctggcatctaagtctatggaacaatttatgaagctggtgggcatgccctacctgcatgaggtactgaagcctgtaatttctagagtatttgaggaaaagaagtacatggagctggatccctgtaagatggatctcggacgcacccggagaatttccttcaaaggggcattaagcgaagaacagatgcgcgagacaagcctcggattactcaccggctatttgggacccatcgtcgacgccatagtagggtctgttggtcgatgcccccctgccatgcgcctggcatttaagcagcttcaccggagagtggaggagcgcttcccacaggcagagcatcagcaggacgtgaagtacctggctatctcagggttcctgtttcttcgcttttttgcccctgcaattctgacacctaaactttttgacctacgggatcagcacgccgacccccagacctcccggtcgctactgctcttggctaaggcagtccagagcatcggtaatctggggcaacagctggggcagggcaaagaactctggatggcacctctgcaccctttcctgctgcagtgtgtttcacgagttcgcgacttcctggacaggctagttgacgtggacggggacgaagaggccggagttccggctcgtgctctgttcccacctagcgctatcgtgagggagggttacctgctgaagaggaaagaggaaccagccggactggctacaagattcgcctttaaaaagagatacgtgtggctgtctggagagacactctcatttagcaaatccccagagtggcagatgtgccattctatcccagtgagccacatccgcgcagtggaaagggtggatgagggggctttccagctgccccacgtcatgcaggtggttacccaagacggcacaggcgcactgcacaccacctatctgcagtgcaagaacgtcaatgagttaaaccagtggctgtcagccttaagaaaggcatcggcacccaatccaaacaagttggcggcatgccaccccggagcattccggagtgccaggtggacctgctgcctgcaggctgaacgcagtgcggctggctgctctaggactcacagtgctgtcacactcggcgactggagtgatcctctcgacccagatgccgaagctcagacggtctatagacagctgctgcttggtcgtgatcagttgcgcctgaagctgttagaggattccaatatggataccacactggaggcagatacaggggcatgccctgaggtactggccagacagagggccgctacagccaggctgttagaggttctggcagacttggacagagcccacgaagagtttcagcagcaagagcgaggcaaggctgcactgggccctcttggtccctag

SEQ ID NO: 74108 - DNA, 3817 bp, Artificial Sequence
  derived and/or modified sequence
ctagaacgagatggaaggggatgttcaaggcccctcccttgactctgaacggacccccagggaacatgcgaccctctctctggcgacgcctcccacccaccactaatacttgctcctggaccggggggcgcggaggttggagagaggagctacccgggtctcggacaggcggcactgggaccacgaggcagggagccaggcttgaagcaggtgacatgtagacgtcccctggtccagcctcggaacctgagcgcccttctgcctggaaagtttgtggctaggcgccatggccaagagcagctccctgaatgttcgcgtggtggagggccgcgcgctgcctgccaaggacgtgtctgggagcagcgacccctactgcctagtgaaagtggacgacgaggtggtggccaggacagctactgtctggaggagcctgggccccttctggggggaggagtacacggtgcacctgcctctggatttccaccagctggccttctacgtgctggatgaggacactgtcgggcacgacgacatcatcggcaagatctcgctgagcagggaggcgattacagccgacccccgagggattgacagctggattaacttgagccgagtggacccagatgcagaagtgcagggtgagatctgcctgtcagtgcagatgctggaggatgggcagggccgctgccttcgctgccatgtgcttcaggccagggacctggctcccagagacatctctggcacatctgacccatttgcacgtgtgttttggggcagccagagcttggagacctcaaccatcaagaagactcgcttcccgcactgggatgaagtgctggagctgcgggagatgccaggtgccccgtccccactgcgggtggagctctgggactgggacatggtgggcaagaatgacttcttgggcatggtggagttctctccaaagaccctccagcagaagccacctaaaggctggttccgcctcctgccctttcccagagccgaggaggattctggggggaacctgggtgccctgcgagtgaaggtacgcctgattgaggaccgcgtcctgccctcccagtgctaccagcctctcatggagctgctcatggagtctgtgcaggggccagcagaggaggacactgctagccccttggctttgctggaagagctgaccttgggggactgccgccaggaccttgccaccaagctggtgaaactctttcttggccggggactggctgggcgctttctggactatctcacccggcgtgaggtggctcggaccatggaccccaacaccctcttccgttctaactccctggcatccaagtcgatggaacagtttatgaagctcgtgggcatgccctacctgcacgaggtcctgaagcctgtgattagccgtgtctttgaggagaagaagtacatggagctggatccctgcaagatggacctgggccgcacccggaggatctccttcaaaggcgcactctcggaggagcagatgcgggagaccagcctggggctgctgacgggctacctggggcccatcgtggacgccatcgtgggctccgtggggcgctgcccgcccgccatgcgcctcgccttcaagcagctgcaccggcgagtggaggagcgcttcccccaggccgagcaccagcaggatgtgaagtacctggccatcagtggatttctcttcttgcgattcttcgcacctgccatccttaccccaaagctgtttgaccttcgggaccaacacgcggacccccagactagccgctcactgctgttgcttgccaaggctgtgcagagcattggaaacctgggccagcagctgggccaaggcaaggaactgtggatggcccccctgcaccccttcctgctgcagtgtgtctcacgtgtgagagacttcctggaccggctggtggatgtggatggggatgaagaagctggtgtcccagccagggccctgttcccgccctcggccattgttcgagaaggctatctgctgaagcgcaaggaggagcctgccggcctggccacgcgctttgccttcaagaagcgctacgtctggctcagcggggagaccctctccttctccaagagtcctgagtggcagatgtgtcactccatccccgtgtctcacatccgcgccgtggagcgcgtagacgagggcgccttccaactgccccacgtgatgcaggtggtgacgcaggacggcacgggggcgctgcacaccacctacctccagtgcaagaatgtgaatgagctcaaccagtggctctcggccttgcgcaaggccagcgcccccaacccgaacaagctggccgcctgccaccccggtgccttccgcagcgcgcgctggacctgctgcctccaggctgagcgctcagccgccggctgcagccgtacacactcagctgtcaccctgggggactggagtgacccactggatcctgatgctgaggcccagacagtgtatcggcagctgctcctggggcgggaccagctcaggctgaaattactggaggattctaacatggatacaactctggaggcagacacaggggcctgtcctgaggtcctggcccggcaaagagcagcaactgcccgcctgctggaggtgctcgcagacctggatcgtgcccacgaggagttccagcagcaggagcgagggaaggcggccctgggcccccttggcccctaaggaaatgccagagctagcccggaaggaggagcaagagccagggggccctcttcagcgcatcctgccccgggagtctcctgtctccttggacctctttgattctgtggtttggaggctcccagagacgtgcctagtcctgtgtgccttgagtccagaactcagggcatggaagccctttggcaggggccagccttgcactgagtgaaacttgccctctggcttgattcagactggagtggataggataaggaacctgacttatttgactgagactggggtctctacttcaccaaactggcctctatccataccaaggaggccagcctggccctgagctgctggatacagctggacctgaattcctgatgcccatgtgatgttgttgccccagatgggcactaaatggcctcactccttcctgttttcatgtctgctaatccctataacctcactgattcttctgtaccctgcccttggcctaggactccaaccacaagcttccagaatcaggtgccctcaggaagaaccaaggctgggtgggggtccagtgtgccaaactcagacccttggagcctgggagaccttgggccaggctgtttatctctctctgggtctcagattaccctgtataaaaagaggagggaaagtctagatgtgtggttttcaaactggattccaatgaggtagttcaagaacaagggaggagtttctctgactgtgggccaaagaccacccgctagaatgtctgctagaaatgcagatttctgaggcccagccagctactgactcagaatctgagggtatatgaaggcaagaatcagggttatttaacagattccgtaggtcatttggatgagtatcagctttgaggaccacaggcctggggaatgggcaattttattttattttgtttttagagttgggggtctcactctgttgcccaggctgcagtacagtggcatgatcataggtcagtgcaccctcaaacttctggacttcagtgatcctcccacgttagcctccagagcagctgcgactacaggtgcaagccatcacgcctggctaatttttaaatttttgtagagatggggggtctcactatgttgccca

SEQ ID NO: 74109 - DNA, 2421 bp, Artificial Sequence
  derived and/or modified sequence
atggccaagagcagcagcctgaacgtgagagtggtggagggcagagccctgcccgccaaggacgtgagcggcagcagcgacccctactgcctggtgaaggtggacgacgaggtggtggccagaaccgccaccgtgtggagaagcctgggccccttctggggcgaggagtacaccgtgcacctgcccctggacttccaccagctggccttctacgtgctggacgaggacaccgtgggccacgacgacatcatcggcaagatcagcctgagcagagaggccatcaccgccgaccccagaggcatcgacagctggatcaacctgagcagagtggaccccgacgccgaggtgcagggcgagatctgcctgagcgtgcagatgctggaggacggccagggcagatgcctgagatgccacgtgctgcaggccagagacctggcccccagagacatcagcggcaccagcgaccccttcgccagagtgttctggggcagccagagcctggagaccagcaccatcaagaagaccagattcccccactgggacgaggtgctggagctgagagagatgcccggcgcccccagccccctgagagtggagctgtgggactgggacatggtgggcaagaacgacttcctgggcatggtggagttcagccccaagaccctgcagcagaagccccccaagggctggttcagactgctgcccttccccagagccgaggaggacagcggcggcaacctgggcgccctgagagtgaaggtgagactgatcgaggacagagtgctgcccagccagtgctaccagcccctgatggagctgctgatggagagcgtgcagggccccgccgaggaggacaccgccagccccctggccctgctggaggagctgaccctgggcgactgcagacaggacctggccaccaagctggtgaagctgttcctgggcagaggcctggccggcagattcctggactacctgaccagaagagaggtggccagaaccatggaccccaacaccctgttcagaagcaacagcctggccagcaagagcatggagcagttcatgaagctggtgggcatgccctacctgcacgaggtgctgaagcccgtgatcagcagagtgttcgaggagaagaagtacatggagctggacccctgcaagatggacctgggcagaaccagaagaatcagcttcaagggcgccctgagcgaggagcagatgagagagaccagcctgggcctgctgaccggctacctgggccccatcgtggacgccatcgtgggcagcgtgggcagatgcccccccgccatgagactggccttcaagcagctgcacagaagagtggaggagagattcccccaggccgagcaccagcaggacgtgaagtacctggccatcagcggcttcctgttcctgagattcttcgcccccgccatcctgacccccaagctgttcgacctgagagaccagcacgccgacccccagaccagcagaagcctgctgctgctggccaaggccgtgcagagcatcggcaacctgggccagcagctgggccagggcaaggagctgtggatggcccccctgcaccccttcctgctgcagtgcgtgagcagagtgagagacttcctggacagactggtggacgtggacggcgacgaggaggccggcgtgcccgccagagccctgttcccccccagcgccatcgtgagagagggctacctgctgaagagaaaggaggagcccgccggcctggccaccagattcgccttcaagaagagatacgtgtggctgagcggcgagaccctgagcttcagcaagagccccgagtggcagatgtgccacagcatccccgtgagccacatcagagccgtggagagagtggacgagggcgccttccagctgccccacgtgatgcaggtggtgacccaggacggcaccggcgccctgcacaccacctacctgcagtgcaagaacgtgaacgagctgaaccagtggctgagcgccctgagaaaggccagcgcccccaaccccaacaagctggccgcctgccaccccggcgccttcagaagcgccagatggacctgctgcctgcaggccgagagaagcgccgccggctgcagcagaacccacagcgccgtgaccctgggcgactggagcgaccccctggaccccgacgccgaggcccagaccgtgtacagacagctgctgctgggcagagaccagctgagactgaagctgctggaggacagcaacatggacaccaccctggaggccgacaccggcgcctgccccgaggtgctggccagacagagagccgccaccgccagactgctggaggtgctggccgacctggacagagcccacgaggagttccagcagcaggagagaggcaaggccgccctgggccccctgggcccctag

SEQ ID NO: 74110 - protein, 776 aa, Artificial Sequence
  derived and/or modified sequence
MAKSSSLNVRVVEGRALPAKDVSGSSDPYCLVKVDDEVVARTATVWRSLGPFWGEEYTVHLPLDFHQLAFYVLDEDTVGHDDIIGKISLSREAITADPRGIDSWINLSRVDPDAEVQGEICLSVQMLEDGQGRCLRCHVLQARDLAPRDISGTSDPFARVFWGSQSLETSTIKKTRFPHWDEVLELREMPGAPSPLRVELWDWDMVGKNDFLGMVEFSPKTLQQKPPKGWFRLLPFPRAEEDSGGNLGALRVKVRLIEDRVLPSQCYQPLMELLMESVQGPAEEDTASPLALLEELTLGDCRQDLATKLVKLFLGRGLAGRFLDYLTRREVARTMDPNTLFRSNSLASKSMEQFMKLVGMPYLHEVLKPVISRVFEEKKYMELDPCKMDLGRTRRISFKGALSEEQMRETSLGLLTGYLGPIVDAIVGSVGRCPPAMRLAFKQLHRRVEERFPQAEHQDVKYLAISGFLFLRFFAPAILTPKLFDLRDQHADPQTSRSLLLLAKAVQSIGNLGQQLGQGKELWMAPLHPFLLQCVSRVRDFLDRLVDVDGDEAGVPARALFPPSAIVREGYLLKRKEEPAGLATRFAFKKRYVWLSGETLSFSKSPEWQVVTQDGTGALHTTYLQCKNVNELNQWLSALRKASAPNPNKLAACHPGAFRSARWTCCLQAERSAAGCSRTHSAVTLGDWSDPLDPDAEAQTVYRQLLLGRDQLRLKLLEDSNMDTTLEADTGACPEVLARQRAATARLLEVLADLDRAHEEFQQQERGKAALGPLGP

SEQ ID NO: 74111 - DNA, 2331 bp, Artificial Sequence
  derived and/or modified sequence
atggctaagagcagtagcctgaatgtgagagttgtggagggaagagcgcttcctgccaaggatgtcagtggatcttccgatccctactgtttagtcaaagtggatgatgaggtggtcgctaggaccgcaacagtctggcggtccctgggtcctttttggggggaggaatatacagtgcatctaccactggacttccatcaactcgccttttatgttctggacgaggatactgtggggcacgacgacattatcggcaagatttccctgagccgggaagccatcacggctgatccgagaggcatcgactcttggattaacctgagtagggtggatcctgatgctgaggtccaaggagaaatttgtctgagtgtgcagatgctagaggacgggcaagggaggtgtttgagatgccacgtcctgcaggctagggatctggctccaagagacatttcggggacaagtgacccctttgcaagggtattctggggctcccagtctttggagacttccacaattaaaaagacgaggttcccacactgggacgaggtcctcgaacttcgagagatgcccggggctcccagcccactcagagtggagttgtgggactgggatatggtcgggaagaatgacttcctgggcatggttgagttttcaccaaaaaccctacagcagaaaccccccaaagggtggttcagactcttaccatttcccagggccgaagaagatagtggcggcaacctgggagctttgcgggtgaaagtccgtctcattgaggatcgagtcctcccttcccagtgctaccagccactgatggaactcctgatggagtccgtacaaggacctgcagaggaggacaccgccagtcctctggcccttctggaggaactgaccctgggcgattgccgccaagatctggctactaagttggtcaagctgttcctcggccggggcctcgcagggcggttcctggattatctgaccaggcgggaagtcgctcgcactatggaccccaatacactcttccgctctaatagcctggcctctaaatccatggagcaattcatgaagttagtcggaatgccctaccttcatgaagtcctgaaaccagtgatcagcagagtgttcgaagagaagaaatacatggagcttgatccctgcaaaatggacctcggacgaacccgtcgcatttccttcaagggtgctctgagcgaagaacagatgagggagacttcacttggcctgctgacaggatatttggggcccatcgtggacgccatagtgggctctgtgggacggtgtccccccgccatgcgcctcgcttttaaacagctgcataggagagtcgaagaacggtttccacaggctgaacatcaggatgtgaaatatttggcaattagtggcttcttgttccttcggttttttgcccccgccatccttacccctaaacttttcgatttacgtgatcaacacgccgatcctcaaacaagcagatcactcctcctgctagcgaaagccgttcagagcatagggaacctgggccagcaactgggccaggggaaggagctgtggatggctcctctgcatcctttccttctgcaatgtgtcagccgagtgcgagatttcttggatcggctggtagacgtcgatggcgacgaggctggcgtcccagcgagagccttattcccaccttcggccatcgtcagagagggttacctgctcaagaggaaggaagagccagctggtctcgctacccgttttgcttttaagaagcgatacgtgtggctgtcgggcgaaacactgtcgttctccaaatcccccgagtggcaggtcgtgacccaggatggaactggcgcactacacactacttatctgcagtgtaagaatgtgaatgagttgaaccaatggctctccgccttacgtaaagccagtgccccaaaccctaacaagctggcagcttgtcatcctggggccttccgctcagcgagatggacttgttgcctgcaagctgagaggtccgctgccggctgttcgaggacccattccgctgtgacactgggcgattggtctgacccactcgatccggacgccgaagcccagacagtgtatcgtcagctgctcctgggaagggaccagttacgactgaagctgcttgaagacagcaacatggataccacactagaggccgatacaggggcatgccccgaggtcttagcgagacagagggccgctaccgcaaggttactcgaggtgctcgccgacctcgatcgagcacatgaagagttccaacagcaagaaaggggaaaagcagcccttggccccctaggcccatag

SEQ ID NO: 74112 - DNA, 2331 bp, Artificial Sequence
  derived and/or modified sequence
atggccaagagcagcagcctgaatgtgcgggtggtggagggccgggccctgcctgccaaggatgtgtctggcagcagtgacccctactgcctggtgaaggtggatgatgaggtggtggccaggacagccaccgtgtggaggagcctgggccccttctggggcgaggagtacacagtgcacctgcccctggacttccaccagctggccttctacgtgctggatgaagatactgtgggccatgatgacatcatcggcaagatcagcctgagccgggaggccatcacagctgacccccggggcatcgacagctggatcaacctgagccgggtggaccctgatgctgaggtgcagggcgagatctgcctgtctgtgcagatgctggaggatggccagggccgctgcctgcgctgccacgtgctgcaggcccgggacctggccccccgggacatcagcggcaccagtgacccctttgcccgggtcttctggggcagccagagcctggagaccagcaccatcaagaagacccgcttcccccactgggatgaggtgctggagctgcgggagatgcctggggcccccagccccctgcgggtggagctgtgggactgggacatggtgggcaagaatgacttcctgggcatggtggagttcagccccaagaccctgcagcagaagccacccaagggctggttccggctgctgcccttccccagggcagaagaagattctgggggcaacctgggcgccctgcgggtgaaggtgcggctgattgaggacagagtgctgcccagccagtgctaccagcccctgatggagctgctgatggagagcgtgcagggccctgctgaggaggacacagccagccccctggccctgctggaggagctgaccctgggggactgccggcaggacctggccaccaagctggtgaagctgttcctgggccggggcctggccggccgcttcctggactacctgacccggcgggaggtggcccggaccatggaccccaacaccctcttccgcagcaacagcctggccagcaagtccatggagcagttcatgaagctggtgggcatgccctacctgcacgaggtgctgaagcctgtgatcagccgggtgtttgaggagaagaagtacatggagctggacccctgcaagatggacctgggccgcacccggcgcatctccttcaagggggccctgtctgaggagcagatgagggagaccagcctgggcctgctgaccggctacctgggccccatcgtggatgccatcgtgggctctgtgggccgctgccccccagccatgaggctggccttcaagcagctgcaccggcgggtggaggagcgcttcccccaggccgagcaccaggatgtgaagtacctggccatcagcggcttcctgttcctgcgcttctttgccccagccatcctgacccccaagctgtttgacctgcgggaccagcacgccgacccccagaccagccgcagcctgctgctgctggccaaggctgtgcagagcatcggcaacctgggccagcagctgggccagggcaaggagctgtggatggcccccctgcaccccttcctgctgcagtgtgtgtcccgggtgcgggacttcctggaccggctggtggatgtggatggagatgaagctggggtgcctgcccgggccctcttcccccccagcgccatcgtgcgggagggctacctgctgaagaggaaggaggagcccgccggcctggccaccaggtttgccttcaagaagcgctacgtgtggctgagcggggagaccctgtccttcagcaagagccctgagtggcaggtggtgacccaggacggcaccggggccctgcacaccacctacctgcagtgcaagaatgtgaatgagctgaaccagtggctgagcgccctgaggaaggccagcgcccccaaccccaacaagctggccgcctgccaccctggggccttccgcagcgcccgctggacctgctgcctgcaggccgagaggtctgctgctggctgcagcaggacccacagcgctgtgaccctgggggactggagcgaccccctggaccctgatgctgaggcccagacagtgtaccggcagctgctgctgggccgggaccagctgcggctgaagctgctggaggacagcaacatggacaccaccctggaggccgacaccggggcctgcccagaggtgctggcccggcagagagctgccacagcccggctgctggaggtgctggccgacctggaccgggcccacgaggagttccagcagcaggagcggggcaaggccgccctgggccccctgggcccctag

SEQ ID NO: 74113 - DNA, 2331 bp, Artificial Sequence
  derived and/or modified sequence
atggccaagagcagcagcctgaacgtgcgggtggtggagggccgggctctaccagcaaaggatgtgagcgggtcaagcgacccctattgtctggttaaagtggatgatgaggtcgttgctcggactgctacagtgtggcgatccctgggcccgttctggggcgaggagtatactgtgcacctccccctcgacttccaccagctggctttctatgttctcgatgaagacaccgtcggtcacgatgatatcatcggtaaaatcagtcttagcagggaggccattacggctgatcctcgcgggatcgactcatggataaatctatccagggttgatcccgatgccgaagtgcagggtgagatttgtttaagcgtgcagatgctggaggacgggcagggacgctgtctcagatgtcacgtactgcaggcccgcgatctcgcccccagggatataagtggtacctcagaccctttcgccagagtcttctggggtagtcaaagtctggagaccagcacaatcaagaaaacaagatttccacattgggatgaagtcctcgagctacgggaaatgccaggcgccccttcgccccttagagtcgagttgtgggactgggatatggtgggcaaaaacgattttctggggatggtggagttcagcccaaaaaccctgcagcaaaaaccacccaaaggctggtttcggctgttgccatttccacgcgccgaagaagactcaggcggaaacctcggggcgttgagagtgaaagtgcggctaattgaagatcgagtgctaccctcccagtgttatcaacctcttatggagctgctcatggaatccgtccagggccctgccgaggaggataccgcttcacccctagctctcttagaagagctcacactgggcgactgtcggcaagatttagctaccaagttagtgaagctattcctcgggagaggacttgccgggcggttcctggactacctgacaaggcgtgaagtcgcccgtactatggatcccaacacactattcaggagtaattctttagcatcgaaatctatggagcagtttatgaagttggtgggaatgccctacttacatgaggtgcttaaaccggtgattagccgtgtattcgaggagaaaaagtacatggagttggacccatgcaaaatggacctggggaggacaaggcgcatcagcttcaagggggccctgtctgaagaacagatgagagagacctcattggggctactgacgggatatctgggcccaattgtcgacgcaatcgtggggtcggtcgggcggtgcccaccagccatgaggctggcgttcaaacagctgcatcgccgggtagaggagcggttcccacaagcggagcaccaggacgtaaaatatctggcaatatctgggttcctgtttctgcgcttcttcgctcccgcaattctcacaccgaagcttttcgacctccgcgatcagcatgcagatcctcagacttcacgttcactgctgctcctggcaaaagccgtgcagtccataggcaacctgggccagcagcttggccagggcaaggaactctggatggctcctttacaccctttcctcctgcagtgtgtgtcacgtgtccgtgatttcctggaccggcttgtggacgttgatggcgacgaggccggagtgcctgccagagctctattcccaccctctgccattgtccgagagggctatctcctcaagcgcaaagaagagccggcaggattggccacgagattcgcgttcaagaaacgttatgtatggttatctggcgagactctgagcttcagtaaaagccccgagtggcaggttgtaactcaagatgggactggggcgctacacacaacctaccttcagtgtaagaatgtgaatgaactaaaccagtggctttctgccctgcggaaggcttccgccccaaatcctaacaagttggccgcttgtcaccccggggcctttagatcggcgagatggacttgctgtctgcaagccgagcgctcggctgcagggtgtagccgcacccactctgcagtgaccctgggcgattggtcagacccgttggacccggacgcagaagctcagactgtctacagacagctactcctggggcgtgaccagctcagattaaaattgttagaggactcaaatatggataccaccctcgaggccgacaccggggcgtgcccggaggtgctggctaggcagcgcgccgccacagcgagacttttggaagtgcttgcagacttagacagggcccacgaggaattccagcagcaggaacgggggaaagccgcattaggacctctcgggccttag

SEQ ID NO: 74114 - DNA, 2331 bp, Artificial Sequence
  derived and/or modified sequence
atggccaagagctcgtcgctcaacgtccgggttgtggaagggcgagcactcccagcaaaggacgtatcaggttcctcggacccttactgtctggtcaaagtggacgatgaggtggtggccagaaccgccactgtttggcgaagcctgggccctttctggggggaagagtacacagttcatctccctctagacttccatcagctcgctttttacgtcctcgacgaagacactgtgggacacgacgatatcatagggaagatttccctgtcccgagaggcaatcactgccgacccacggggaatcgattcttggattaacctgtcaagagtcgaccctgatgccgaagtccagggggaaatttgtctgtcagttcagatgctggaggacggccaggggcgatgtctgcggtgtcatgtgctgcaggccagagacctcgccccacgcgatatctccggcacgtcggacccattcgccagggtgttttggggttcacagtcactggagacctcaaccattaaaaaaacgcgatttccccactgggacgaggtgcttgaactcagggagatgccgggagccccaagccccctacgagtggagctctgggactgggatatggtgggaaaaaacgacttcctcgggatggtggaattcagccctaaaacgctgcagcaaaaacctcccaaagggtggttccgcctcttgccctttccccgtgctgaggaggactccggtggaaatctgggcgcactaagggttaaggttaggctgatcgaggatcgggtgctaccttctcagtgctaccagccattgatggaactattgatggaaagtgttcagggccctgcagaagaggataccgcatcacctttagcgctgcttgaggagttgacgcttggtgactgtcgacaagatctcgctaccaaactagtgaaattattcctgggcagggggctggccggacgtttcctggattatttaacaagacgcgaagttgctagaaccatggatccaaacacactgttcaggtccaattccctggcatcaaagagcatggaacaattcatgaaactagtgggaatgccgtatctgcatgaggtgctgaagcctgtcatcagccgagtgtttgaagaaaagaagtatatggagttggatccttgtaaaatggacctggggagaaccaggcggatctcattcaaaggtgctttgagcgaagaacagatgcgagagacctccctggggctcttgaccggatacctgggccctattgtggacgcaatcgtaggctctgtgggcaggtgcccgccagcaatgcggttagctttcaagcagctgcatcggagagtcgaagagaggtttccccaggctgagcaccaagatgtcaaataccttgccatctccggtttcctttttctcagatttttcgctccggcaatcctgactccaaagctcttcgatctcagagatcagcatgccgaccctcagacgtcacggtcccttctgcttctggcaaaggcggttcagtcaatcggaaatctcggccagcagctgggccagggcaaagaactatggatggcccctcttcacccatttctgctgcagtgcgtgtctcgtgtgagagacttcttagataggctggtggacgttgatggcgatgaggctggggttccagcacgggctctcttcccaccctcggccatcgtgcgcgagggctatctgctgaagcgcaaagaggaaccggctggcttagccacccgctttgcttttaaaaagcgatacgtttggctgtctggagaaacgttgagctttagcaagagtccagagtggcaggtcgtcacccaggatggaaccggcgctctacacacaacttacctacagtgtaagaatgtcaacgagcttaatcagtggctgtccgcactgcggaaggccagcgcccctaaccccaataagctagccgcttgtcaccccggtgcttttaggtcggctcgctggacttgttgtctgcaggcagagcggtccgctgcgggttgctcccgcacccatagcgccgtaactctgggtgactggagcgatccgctcgatccagatgcagaggcacagacagtctaccggcagctcttactcggtagagaccagctgcgtctcaaacttttggaagactcaaatatggacaccacgctggaggcagataccggggcttgtcccgaggtgctcgctagacaacgagcagctaccgccagattgctcgaggtcttagcggatctcgaccgcgcacacgaagagttccagcagcaagagagaggcaaagcagccttgggtccgcttgggccatag

SEQ ID NO: 74115 - DNA, 3040 bp, Artificial Sequence
  derived and/or modified sequence
ttgtctggagctccagacgcctcggcaagagcccgctgcgccccctgcgcgctcctcctgctcggagcacggctcctacctgtagagtccggacgggcgctccctccccgggcacctacaccttctcctctttcggaaatctcccatccagctacccgggtctcggacaggcggcactgggaccacgaggcagggagccaggcttgaagcaggtgacatgtagacgtcccctggtccagcctcggaacctgagcgcccttctgcctggaaagtttgtggctaggcgccatggccaagagcagctccctgaatgttcgcgtggtggagggccgcgcgctgcctgccaaggacgtgtctgggagcagcgacccctactgcctagtgaaagtggacgacgaggtggtggccaggacagctactgtctggaggagcctgggccccttctggggggaggagtacacggtgcacctgcctctggatttccaccagctggccttctacgtgctggatgaggacactgtcgggcacgacgacatcatcggcaagatctcgctgagcagggaggcgattacagccgacccccgagggattgacagctggattaacttgagccgagtggacccagatgcagaagtgcagggtgagatctgcctgtcagtgcagatgctggaggatgggcagggccgctgccttcgctgccatgtgcttcaggccagggacctggctcccagagacatctctggcacatctgacccatttgcacgtgtgttttggggcagccagagcttggagacctcaaccatcaagaagactcgcttcccgcactgggatgaagtgctggagctgcgggagatgccaggtgccccgtccccactgcgggtggagctctgggactgggacatggtgggcaagaatgacttcttgggcatggtggagttctctccaaagaccctccagcagaagccacctaaaggctggttccgcctcctgccctttcccagagccgaggaggattctggggggaacctgggtgccctgcgagtgaaggtacgcctgattgaggaccgcgtcctgccctcccagtgctaccagcctctcatggagctgctcatggagtctgtgcaggggccagcagaggaggacactgctagccccttggctttgctggaagagctgaccttgggggactgccgccaggaccttgccaccaagctggtgaaactctttcttggccggggactggctgggcgctttctggactatctcacccggcgtgaggtggctcggaccatggaccccaacaccctcttccgttctaactccctggcatccaagtcgatggaacagtttatgaagctcgtgggcatgccctacctgcacgaggtcctgaagcctgtgattagccgtgtctttgaggagaagaagtacatggagctggatccctgcaagatggacctgggccgcacccggaggatctccttcaaaggcgcactctcggaggagcagatgcgggagaccagcctggggctgctgacgggctacctggggcccatcgtggacgccatcgtgggctccgtggggcgctgcccgcccgccatgcgcctcgccttcaagcagctgcaccggcgagtggaggagcgcttcccccaggccgagcaccaggatgtgaagtacctggccatcagtggatttctcttcttgcgattcttcgcacctgccatccttaccccaaagctgtttgaccttcgggaccaacacgcggacccccagactagccgctcactgctgttgcttgccaaggctgtgcagagcattggaaacctgggccagcagctgggccaaggcaaggaactgtggatggcccccctgcaccccttcctgctgcagtgtgtctcacgtgtgagagacttcctggaccggctggtggatgtggatggggatgaagctggtgtcccagccagggccctgttcccgccctcggccattgttcgagaaggctatctgctgaagcgcaaggaggagcctgccggcctggccacgcgctttgccttcaagaagcgctacgtctggctcagcggggagaccctctccttctccaagagtcctgagtggcaggtggtgacgcaggacggcacgggggcgctgcacaccacctacctccagtgcaagaatgtgaatgagctcaaccagtggctctcggccttgcgcaaggccagcgcccccaacccgaacaagctggccgcctgccaccccggtgccttccgcagcgcgcgctggacctgctgcctccaggctgagcgctcagccgccggctgcagccgtacacactcagctgtcaccctgggggactggagtgacccactggatcctgatgctgaggcccagacagtgtatcggcagctgctcctggggcgggaccagctcaggctgaaattactggaggattctaacatggatacaactctggaggcagacacaggggcctgtcctgaggtcctggcccggcaaagagcagcaactgcccgcctgctggaggtgctcgcagacctggatcgtgcccacgaggagttccagcagcaggagcgagggaaggcggccctgggcccccttggcccctaaggaaatgccagagctagcccggaaggaggagcaagagccagggggccctcttcagcgcatcctgccccgggagtctcctgtctccttggacctctttgattctgtggtttggaggctcccagagacgtgcctagtcctgtgtgccttgagtccagaactcagggcatggaagccctttggcaggggccagccttgcactgagtgaaacttgccctctggcttgattcagactggagtggataggataaggaacctgacttatttgactgagactggggtctctacttcaccaaactggcctctatccataccaaggaggccagcctggccctgagctgctggatacagctggacctgaattcctgatgcccatgtgatgttgttgccccagatgggcactaaatggcctcactccttcctg

SEQ ID NO: 74116 - DNA, 2331 bp, Artificial Sequence
  derived and/or modified sequence
atggccaagagcagcagcctgaacgtgagagtggtggagggcagagccctgcccgccaaggacgtgagcggcagcagcgacccctactgcctggtgaaggtggacgacgaggtggtggccagaaccgccaccgtgtggagaagcctgggccccttctggggcgaggagtacaccgtgcacctgcccctggacttccaccagctggccttctacgtgctggacgaggacaccgtgggccacgacgacatcatcggcaagatcagcctgagcagagaggccatcaccgccgaccccagaggcatcgacagctggatcaacctgagcagagtggaccccgacgccgaggtgcagggcgagatctgcctgagcgtgcagatgctggaggacggccagggcagatgcctgagatgccacgtgctgcaggccagagacctggcccccagagacatcagcggcaccagcgaccccttcgccagagtgttctggggcagccagagcctggagaccagcaccatcaagaagaccagattcccccactgggacgaggtgctggagctgagagagatgcccggcgcccccagccccctgagagtggagctgtgggactgggacatggtgggcaagaacgacttcctgggcatggtggagttcagccccaagaccctgcagcagaagccccccaagggctggttcagactgctgcccttccccagagccgaggaggacagcggcggcaacctgggcgccctgagagtgaaggtgagactgatcgaggacagagtgctgcccagccagtgctaccagcccctgatggagctgctgatggagagcgtgcagggccccgccgaggaggacaccgccagccccctggccctgctggaggagctgaccctgggcgactgcagacaggacctggccaccaagctggtgaagctgttcctgggcagaggcctggccggcagattcctggactacctgaccagaagagaggtggccagaaccatggaccccaacaccctgttcagaagcaacagcctggccagcaagagcatggagcagttcatgaagctggtgggcatgccctacctgcacgaggtgctgaagcccgtgatcagcagagtgttcgaggagaagaagtacatggagctggacccctgcaagatggacctgggcagaaccagaagaatcagcttcaagggcgccctgagcgaggagcagatgagagagaccagcctgggcctgctgaccggctacctgggccccatcgtggacgccatcgtgggcagcgtgggcagatgcccccccgccatgagactggccttcaagcagctgcacagaagagtggaggagagattcccccaggccgagcaccaggacgtgaagtacctggccatcagcggcttcctgttcctgagattcttcgcccccgccatcctgacccccaagctgttcgacctgagagaccagcacgccgacccccagaccagcagaagcctgctgctgctggccaaggccgtgcagagcatcggcaacctgggccagcagctgggccagggcaaggagctgtggatggcccccctgcaccccttcctgctgcagtgcgtgagcagagtgagagacttcctggacagactggtggacgtggacggcgacgaggccggcgtgcccgccagagccctgttcccccccagcgccatcgtgagagagggctacctgctgaagagaaaggaggagcccgccggcctggccaccagattcgccttcaagaagagatacgtgtggctgagcggcgagaccctgagcttcagcaagagccccgagtggcaggtggtgacccaggacggcaccggcgccctgcacaccacctacctgcagtgcaagaacgtgaacgagctgaaccagtggctgagcgccctgagaaaggccagcgcccccaaccccaacaagctggccgcctgccaccccggcgccttcagaagcgccagatggacctgctgcctgcaggccgagagaagcgccgccggctgcagcagaacccacagcgccgtgaccctgggcgactggagcgaccccctggaccccgacgccgaggcccagaccgtgtacagacagctgctgctgggcagagaccagctgagactgaagctgctggaggacagcaacatggacaccaccctggaggccgacaccggcgcctgccccgaggtgctggccagacagagagccgccaccgccagactgctggaggtgctggccgacctggacagagcccacgaggagttccagcagcaggagagaggcaaggccgccctgggccccctgggcccctag

SEQ ID NO: 74117 - protein, 493 aa, Artificial Sequence
  derived and/or modified sequence
MAAIKAVNSKAEVARARAALAVNICAARGLQDVLRTNLGPKGTMKMLVSGAGDIKLTKDGNVLLDEMQIQHPTASLIAKVATAQDDVTGDGTTSNVLIIGELLKQADLYISEGLHPRIIAEGFEAAKIKALEVLEEVKVTKEMKRKILLDVARTSLQTKVHAELADVLTEVVVDSVLAVRRPGYPIDLFMVEIMEMKHKLGTDTKEVNSGFFYKTAEEKEKLVKAERKFIEDRVQKIIDLKDKVCAQSNKGFVVINQKGIDPFSLDSLAKHGIVALRRAKRRNMERLSLACGGMAVNSFEDLTVDCLGHAGLVYEYTLGEEKFTFIEECVNPCSVTLLVKGPNKHTLTQVKDAIRDGLRAIKNAIEDGCMVPGAGAIEVAMAEALVTYKNSIKGRARLGVQAFADALLIIPKVLAQNAGYDPQETLVKVQAEHVESKQLVGVDLNTGEPMVAADAGVWDNYCVKKQLLHSCTVIATNILLVDEIMRAGMSSLK

SEQ ID NO: 74118 - DNA, 1482 bp, Artificial Sequence
  derived and/or modified sequence
atggcggcaattaaggccgttaattccaaagccgaggtcgccagagcccgcgctgccctggcagtgaatatctgcgctgcacggggcctccaagacgtcctgaggaccaatcttggccccaagggcaccatgaaaatgctcgtgagcggggcaggagacattaaattaacgaaggacggcaatgttcttctagacgagatgcagatccagcacccaacagccagcttaatagcgaaagtggcgacagcacaggatgacgtgacgggagatgggaccacaagcaatgtgcttatcatcggcgagctcttaaaacaagcagatctgtacatctccgaggggctacatccccggattatagctgaaggcttcgaggcagctaagatcaaggccctggaagtgctcgaggaggtcaaggtcaccaaggaaatgaagaggaagatcttactggatgtcgccagaacctcattgcagacaaaggtgcatgccgagctggctgatgtcttgactgaggtggtggtggattctgtgttggctgtaagaaggcctggttatcctatagacctgttcatggtcgagattatggagatgaaacacaagctgggaaccgacaccaaggaggtgaactcaggatttttctataagaccgcggaggagaaagagaagctagttaaggccgaacgcaagtttatagaagacagggttcagaaaattattgatttaaaagacaaagtgtgtgctcagagcaacaaaggcttcgtggtgatcaaccagaaaggaatcgatcctttttctctggacagcctcgctaaacatggcattgtggccttgcgccgagccaagcgccgcaatatggagaggctatcactcgcgtgcggtgggatggccgttaattcttttgaggaccttactgtggactgcctggggcacgccggtctggtatatgaatacactctgggagaggagaaatttacattcatcgaggaatgcgtcaatccatgcagcgtgacactgttagtgaaggggcccaataaacacacgctgacacaggtgaaggatgctatcagagatgggctgagggcaatcaagaatgccattgaggatggctgcatggtaccaggtgccggtgcaatcgaggtggccatggctgaagcactggtgacatacaagaacagcatcaaggggcgcgccaggctgggggtccaggcttttgcagacgctctattaatcattccaaaggtactggcccagaatgcgggctacgatccccaggagaccctggtgaaggtccaggctgaacatgtcgaaagcaaacagcttgtgggagtagaccttaacaccggtgagcctatggtcgctgcagatgcaggggtctgggacaattattgcgttaaaaagcagctgcttcacagctgcacggtgattgcaactaatattctcctggtggatgagatcatgagagcgggcatgtcaagcttgaagtag

SEQ ID NO: 74119 - DNA, 1482 bp, Artificial Sequence
  derived and/or modified sequence
atggccgccatcaaggctgtgaacagcaaggccgaggtggcccgggcccgggccgccctggccgtgaacatctgtgccgcccggggcctgcaggatgtgctgcggaccaacctgggccccaagggcaccatgaagatgctggtgtctggagctggggacatcaagctgaccaaggatggaaatgtgctgctggatgagatgcagatccagcaccccacagccagcctgattgccaaggtggccacagcccaggatgatgtgactggagatggcaccaccagcaatgtgctgatcattggagagctgctgaagcaggccgacctgtacatcagcgagggcctgcacccccgcatcatcgccgagggctttgaagctgccaagatcaaggccctggaggtgctggaggaggtgaaggtgaccaaggagatgaagaggaagatcctgctggatgtggcccggaccagcctgcagaccaaggtgcacgccgagctggctgatgtgctgacagaggtggtggtggacagcgtgctggccgtgcggcggcccggctaccccatcgacctcttcatggtggagatcatggagatgaagcacaagctgggcacagacaccaaggaggtgaacagcggcttcttctacaagacagctgaggagaaggagaagctggtgaaggccgagaggaagttcattgaagatagagtgcagaagatcatcgacctgaaggacaaggtgtgtgcccagagcaacaagggctttgtggtgatcaaccagaagggcatcgaccccttcagcctggacagcctggccaagcatggaattgtggccctgcggcgggccaagagaagaaacatggagcggctgagcctggcctgtggcggcatggctgtgaacagctttgaggacctgactgtggactgcctgggccacgccggcctggtgtatgagtacaccctgggggaggagaagttcaccttcatcgaggagtgtgtgaacccctgcagcgtgaccctgctggtgaagggccccaacaagcacaccctgacccaggtgaaggatgccatcagagatggcctgcgggccatcaagaatgccattgaagatggctgcatggtgcctggggccggggccatcgaggtggccatggccgaggccctggtgacctacaagaacagcatcaagggccgggcccggctgggcgtgcaggcctttgctgatgccctgctgatcatccccaaggtgctggcccagaatgccggctatgacccccaggagaccctggtgaaggtgcaggccgagcacgtggagagcaagcagctggtgggcgtggacctgaacacaggagagcccatggtggccgcagatgctggggtgtgggacaactactgtgtgaagaagcagctgctgcacagctgcaccgtcatcgccaccaacatcctgctggtggatgagatcatgagagctggcatgagcagcctgaagtag

SEQ ID NO: 74120 - DNA, 1482 bp, Artificial Sequence
  derived and/or modified sequence
atggccgccatcaaggccgtgaacagcaaggccgaggtggcccgggcacgagccgctctggccgtgaacatttgcgcggctcggggtttgcaagacgtgttacgaacaaatctcggaccaaaaggcaccatgaagatgctcgtctccggcgcaggcgatatcaagctgaccaaggacggtaacgtgcttctcgatgaaatgcagattcagcatcccacggcctcactgattgcgaaggtggctacggcacaggacgacgttaccggcgatggcaccactagcaacgttcttataattggagagctccttaagcaggccgatctgtacatttccgagggactgcatcctagaatcatagccgagggcttcgaggcagccaaaatcaaggcattagaggttttggaggaagtgaaggtcaccaaagagatgaagcgcaaaatcctgctggatgtggcccgaacaagcctccagactaaagtgcacgccgagctggccgacgtcttgaccgaggtggtggtggattctgtactagcagtccgtaggcccggatacccaatagatctcttcatggtagagatcatggagatgaaacacaagctggggacagatactaaagaggtgaatagcggctttttctacaagaccgccgaggaaaaggagaagctggtcaaggcagagagaaaattcatcgaggatcgagtgcagaagattatcgatctgaaagacaaggtgtgtgcccagtcaaacaaaggctttgtggtaattaatcagaagggtatcgatccctttagtctcgactccctggcaaagcacggaatcgtcgccctgcggcgggcaaagcgccgcaacatggagcggctcagccttgcctgtggaggaatggccgttaactcatttgaagacctgacagtggactgcctggggcatgctggtcttgtgtatgagtataccctgggggaagagaaatttaccttcatcgaggaatgtgtgaacccctgtagcgtgactctgttagtcaaaggtccaaataagcacacactaactcaagtaaaggacgctattcgagacggactccgagccataaaaaatgccattgaggatggttgcatggtgcccggcgccggtgctattgaggtggctatggctgaggcccttgtgacctataagaactcaattaagggcagagcacgcctgggtgtgcaagcattcgctgatgctctccttatcattcccaaagtactggcgcagaacgccggatatgatccacaggaaacactcgtaaaagtccaggctgaacacgtcgagtccaagcaattggtaggcgtcgacctgaacaccggggagccgatggtggctgccgatgccggagtatgggataactattgtgtgaaaaaacaactactccactcttgtaccgtgatcgccacaaacatcctcctggtggatgagataatgcgggccggaatgagctctctgaagtag

SEQ ID NO: 74121 - DNA, 1482 bp, Artificial Sequence
  derived and/or modified sequence
atggctgcaatcaaagctgtcaattctaaggctgaggtcgctagagccagagcagccctggctgtcaatatctgcgccgcacggggtttacaggatgtgttgagaacaaatttgggccctaaaggcacgatgaagatgcttgtgtcaggcgctggagatatcaaactgaccaaagacggtaacgtactgctggatgagatgcagatccagcatccaaccgcaagcctcatcgctaaggttgccactgcgcaggatgacgtcacaggggatggcaccactagtaacgtcttgattattggcgagctgctgaagcaagccgatctctacattagcgagggtctccaccccaggatcattgcagaaggcttcgaggcggcaaagatcaaggctctcgaggtcctcgaggaggtgaaggtcacaaaagaaatgaagagaaagattctgttggatgtggcgcgaacctcacttcaaacaaaggtacacgcggaactcgctgatgtgctcaccgaagttgtggtagattctgtcctcgcggtgaggcggccaggctacccgatcgatctgtttatggtggaaattatggagatgaaacataaactggggaccgatacgaaggaggtaaattctggttttttctataaaaccgctgaagaaaaagagaaactggtgaaagctgaacgtaagtttatagaggacagggtgcagaagatcatcgacctaaaagacaaggtctgtgcccagagcaataaaggatttgtcgtaatcaatcagaagggtatcgaccccttttccctggattcactggcaaagcacggaatcgtcgcactccgtagagctaagcggaggaatatggagcgactgtccctggcctgtggcggaatggccgtgaactccttcgaggaccttactgtggactgcttaggccacgctgggctcgtttacgagtacacccttggggaagagaaattcacctttatcgaagaatgtgtgaacccctgctcagttactttactagtgaaaggcccaaacaagcacacactgacacaggtgaaggacgctatccgggatggcttgcgtgcgatcaaaaatgcgattgaggacgggtgcatggtacctggtgccggtgctattgaagtcgctatggcagaggcactggtgacttacaagaactcaatcaaggggagggcacggctgggcgtgcaggcctttgccgatgcactactcattattcccaaggtattggcacaaaatgcaggctacgatccacaggagacactcgtgaaggtccaggcagaacacgtggaaagcaagcagctggtaggagtcgacctgaacacgggggaacccatggtggctgccgacgcaggcgtgtgggataactactgtgttaagaagcaactactccactcttgtacagtgatcgctactaatatccttctggtcgacgaaatcatgcgcgcaggaatgagtagcctgaagtag

SEQ ID NO: 74122 - DNA, 1676 bp, Artificial Sequence
  derived and/or modified sequence
aggctatggctgcgataaaggccgtcaactccaaggctgaggtggcgcgggcccgggcagctttggctgtcaatatatgcgccgcccgagggctgcaggatgtgctgcggaccaacttgggtcctaaaggcaccatgaaaatgcttgtttctggtgcaggtgacatcaaactcaccaaagatggcaatgtgctgctcgatgagatgcaaattcaacatccaacagcttccttgatagcaaaagtagcaacagctcaggatgacgtcacaggagatggtactacttcaaatgttctaattattggagagttattaaaacaagctgacctgtacatttctgagggcctgcaccctagaataatagctgaaggatttgaagctgcaaagataaaagcacttgaagttttggaggaagttaaagtgacaaaggagatgaaaagaaaaatcctcttagatgtagctagaacatcattacaaactaaagttcatgctgaactggctgatgtcttaacagaggttgtggtggattctgttttggctgttagaagaccaggttaccctattgatctcttcatggtagaaataatggagatgaagcataaattaggaacagatacaaaagaggtgaactctggtttcttttataagactgcagaagagaaagagaaattggtaaaagctgaaagaaaatttattgaagatagagtacaaaaaataatagacctgaaggacaaagtctgtgctcagtcaaataaaggatttgtcgtcattaatcaaaagggaattgatccattttccttagattctcttgcaaaacatggaatagtagctcttcgcagagcaaaaagaagaaatatggaaagactctctcttgcttgtggtggaatggccgtgaattcttttgaagatctcactgtagattgcttgggacatgctggtcttgtgtatgagtatacattaggtgaagaaaagttcacttttattgaggagtgtgttaacccttgctctgttaccttgttggttaaaggaccaaataagcatactctcacacaagtcaaggatgccataagagatggacttcgtgctatcaaaaatgccattgaagatggttgtatggttcctggagctggtgcaattgaagtggcaatggctgaagctcttgttacatataagaacagtataaaaggaagagctcgtcttggagtccaagcttttgctgatgccttactcattattcccaaggttcttgctcagaatgctggttatgacccacaggaaacattagtaaaagttcaggctgagcatgtcgagtcaaaacaacttgtgggcgtagatttgaatacaggtgagccaatggtagcagcagatgcaggagtttgggataattattgtgtaaaaaaacaacttcttcactcttgcacagtgattgccaccaacattctcctggttgatgaaattatgcgagctgggatgtcttctctcaaatgatgattgaattcaaaatcaacccttctagaagatgaaatttagtacactttacatctgactactattgtgtagcctgagccattctgaatttctacacaataaatgcagtttatgtcttttgggtcttaatagtctcaaaaatatttcatcaaggtataaagaacacaataaatacttttacagtaaagg

SEQ ID NO: 74123 - DNA, 1482 bp, Artificial Sequence
  derived and/or modified sequence
atggccgccatcaaggccgtgaacagcaaggccgaggtggccagagccagagccgccctggccgtgaacatctgcgccgccagaggcctgcaggacgtgctgagaaccaacctgggccccaagggcaccatgaagatgctggtgagcggcgccggcgacatcaagctgaccaaggacggcaacgtgctgctggacgagatgcagatccagcaccccaccgccagcctgatcgccaaggtggccaccgcccaggacgacgtgaccggcgacggcaccaccagcaacgtgctgatcatcggcgagctgctgaagcaggccgacctgtacatcagcgagggcctgcaccccagaatcatcgccgagggcttcgaggccgccaagatcaaggccctggaggtgctggaggaggtgaaggtgaccaaggagatgaagagaaagatcctgctggacgtggccagaaccagcctgcagaccaaggtgcacgccgagctggccgacgtgctgaccgaggtggtggtggacagcgtgctggccgtgagaagacccggctaccccatcgacctgttcatggtggagatcatggagatgaagcacaagctgggcaccgacaccaaggaggtgaacagcggcttcttctacaagaccgccgaggagaaggagaagctggtgaaggccgagagaaagttcatcgaggacagagtgcagaagatcatcgacctgaaggacaaggtgtgcgcccagagcaacaagggcttcgtggtgatcaaccagaagggcatcgaccccttcagcctggacagcctggccaagcacggcatcgtggccctgagaagagccaagagaagaaacatggagagactgagcctggcctgcggcggcatggccgtgaacagcttcgaggacctgaccgtggactgcctgggccacgccggcctggtgtacgagtacaccctgggcgaggagaagttcaccttcatcgaggagtgcgtgaacccctgcagcgtgaccctgctggtgaagggccccaacaagcacaccctgacccaggtgaaggacgccatcagagacggcctgagagccatcaagaacgccatcgaggacggctgcatggtgcccggcgccggcgccatcgaggtggccatggccgaggccctggtgacctacaagaacagcatcaagggcagagccagactgggcgtgcaggccttcgccgacgccctgctgatcatccccaaggtgctggcccagaacgccggctacgacccccaggagaccctggtgaaggtgcaggccgagcacgtggagagcaagcagctggtgggcgtggacctgaacaccggcgagcccatggtggccgccgacgccggcgtgtgggacaactactgcgtgaagaagcagctgctgcacagctgcaccgtgatcgccaccaacatcctgctggtggacgagatcatgagagccggcatgagcagcctgaagtag

SEQ ID NO: 74124 - protein, 485 aa, Artificial Sequence
  derived and/or modified sequence
MAAIKAVNSKAEVARARAALAVNICAARGLQDVLRTNLGPKGTMKMLVSGAGDIKLTKDGNVLLDEMGLHPRIIAEGFEAAKIKALEVLEEVKVTKEMKRKILLDVARTSLQTKVHAELADVLTEVVVDSVLAVRRPGYPIDLFMVEIMEMKHKLGTDTKLIQGLVLDHGARHPDMKKRVEDAFILICNVSLEYEKTEVNSGFFYKTAEEKEKLVKAERKFIEDRVQKIIDLKDKVCAQSNKGFVVINQKGIDPFSLDSLAKHGIVALRRAKRRNMERLSLACGGMAVNSFEDLTVDCLGHAGLVYEYTLGEEKFTFIEECVNPCSVTLLVKGPNKHTLTQVKDAIRDGLRAIKNAIEDGCMVPGAGAIEVAMAEALVTYKNSIKGRARLGVQAFADALLIIPKVLAQNAGYDPQETLVKVQAEHVESKQLVGVDLNTGEPMVAADAGVWDNYCVKKQLLHSCTVIATNILLVDEIMRAGMSSLK

SEQ ID NO: 74125 - DNA, 1458 bp, Artificial Sequence
  derived and/or modified sequence
atggcagcaatcaaagccgtgaacagcaaagccgaggtggcccgtgcacgcgccgcactggctgtcaatatctgtgcagctcggggactccaagacgtgctccggactaacctaggacctaagggtacaatgaaaatgctggtctcgggcgctggcgatattaagctgacaaaggacggcaatgtgttgttggatgagatgggcctacacccacgtattatcgctgaaggatttgaggcggctaagatcaaggcactggaggtgctggaggaggtaaaagtcacaaaggagatgaaacggaaaatactgctcgacgtagccaggacgtccctgcagactaaagtgcacgcagaactggctgatgtgctcacagaggtcgtggttgactctgttctagctgtaaggcggcccgggtaccctatcgatctgtttatggtagagataatggaaatgaaacataaactcgggactgatacaaagttgattcagggactggtgctggaccacggcgctaggcacccagatatgaaaaagcgcgtagaggatgcattcattttgatttgtaatgtctctctggaatatgagaaaacagaagtcaactcaggtttcttttacaaaacagccgaggagaaggagaagctcgtgaaagctgagcgaaagtttattgaggatcgggtccagaagatcattgacttaaaggataaggtgtgcgcccagtccaataaagggtttgttgtaattaaccagaaagggatcgacccattctccttggactcattagctaaacacgggattgttgcccttcgaagggccaagcgtcggaacatggagcgcctgtcactggcttgcggcggtatggcagtcaactccttcgaggacctgactgtagattgcctgggccacgccgggttagtttatgaatacacactcggagaagagaagtttaccttcattgaagagtgcgtgaatccatgctcggtcactctcttggtgaagggcccaaacaagcacacgcttactcaggtcaaagatgcaattagggacggtctgagggccattaagaacgcaatcgaagatgggtgtatggtgccaggagccggcgccatcgaggtggccatggcagaggcactggttacgtataagaactctataaaggggagagcccgacttggcgtacaggccttcgcggacgcattattgatcatccccaaggtgcttgcccagaatgccggctacgatccacaggagactttggtcaaagtccaagctgagcatgtcgagagtaagcaacttgttggcgtggacctcaacactggagagccaatggttgccgccgatgccggcgtatgggataactactgcgtaaaaaaacagctgctccacagttgtaccgtcatagctactaatatcctgttggtagacgaaattatgcgagcgggcatgagtagtctgaagtag

SEQ ID NO: 74126 - DNA, 1458 bp, Artificial Sequence
  derived and/or modified sequence
atggccgccatcaaggctgtgaacagcaaggccgaggtggcccgggcccgggccgccctggccgtgaacatctgtgccgcccggggcctgcaggatgtgctgcggaccaacctgggccccaagggcaccatgaagatgctggtgtctggagctggggacatcaagctgaccaaggatggaaatgtgctgctggatgagatgggcctgcacccccgcatcatcgccgagggctttgaggccgccaagatcaaggccctggaggtgctggaggaggtgaaggtgaccaaggagatgaagaggaagatcctgctggatgtggcccggaccagcctgcagaccaaggtgcatgctgagctggctgatgtgctgacagaggtggtggtggacagcgtgctggccgtgagaagacctggctaccccatcgacctcttcatggtggagatcatggagatgaagcacaagctgggcacagacaccaagctgatccagggcctggtgctggaccatggagcccggcacccagacatgaagaagagggtggaggatgccttcatcctgatctgcaatgtgtccctggagtatgagaagacagaggtgaacagcggcttcttctacaagacagctgaggagaaggagaagctggtgaaggccgagaggaagttcattgaagatagagtgcagaagatcatcgacctgaaggacaaggtgtgtgcccagagcaacaagggctttgtggtgatcaaccagaagggcatcgaccccttcagcctggacagcctggccaagcatggaattgtggccctgcggcgggccaagagaagaaacatggagcggctgagcctggcctgtggcggcatggctgtgaacagctttgaggacctgactgtggactgcctgggccacgccggcctggtgtatgagtacaccctgggggaggagaagttcaccttcatcgaggagtgtgtgaacccctgcagcgtgaccctgctggtgaagggccccaacaagcacaccctgacccaggtgaaggatgccatcagagatggcctgcgggccatcaagaatgccattgaagatggctgcatggtgcctggggccggggccatcgaggtggccatggccgaggccctggtgacctacaagaacagcatcaagggccgggcccggctgggcgtgcaggcctttgctgatgccctgctgatcatccccaaggtgctggcccagaatgccggctatgacccccaggagaccctggtgaaggtgcaggccgagcacgtggagagcaagcagctggtgggcgtggacctgaacacaggagagcccatggtggccgcagatgctggggtgtgggacaactactgtgtgaagaagcagctgctgcacagctgcaccgtcatcgccaccaacatcctgctggtggatgagatcatgagagctggcatgagcagcctgaagtag

SEQ ID NO: 74127 - DNA, 1458 bp, Artificial Sequence
  derived and/or modified sequence
atggccgccatcaaggccgtgaacagcaaggccgaggtggcccgggcaagggcggcactggccgtgaacatttgcgcggctcggggcctccaggatgttctgcgcacaaatctgggaccgaagggcactatgaaaatgctggtctctggtgcaggcgatattaaactaacaaaggacggaaatgtgctgctggacgagatgggcttacacccaagaatcatcgctgagggatttgaggctgctaaaatcaaagcgctggaggtcctagaagaggtgaaagtgacaaaagagatgaaacgcaaaattctactggacgtcgcccgcacatctcttcagaccaaggtacacgccgagttggccgatgtgctgaccgaggtggtggtggatagtgtcctggcagtgagacgccctggatatcccatcgaccttttcatggttgagattatggagatgaagcacaagctcggaactgacaccaaacttattcaaggactggttctggaccacggcgctcgccacccagatatgaaaaagcgcgttgaagatgcctttatactgatctgcaatgtgagcttggagtacgagaaaaccgaagtcaacagcggatttttctataagacggcagaagagaaggaaaaactcgtcaaggccgagagaaaatttatcgaagatagagtgcagaagatcatcgatctgaaggataaagtctgcgcccagtccaacaagggattcgtagtaataaaccagaagggcatcgatcctttcagcctagattcacttgcaaaacatggcattgtggcactgcggagggcaaagcgacgcaatatggagcgtctcagtctggcatgtggcgggatggccgtcaattcctttgaggacttaaccgtggattgcctgggccacgccggattagtgtatgaatatacacttggggaggaaaaattcacctttattgaggagtgtgtaaacccctgttccgtgacccttctggtgaaaggtccgaacaaacatacactgacacaggtgaaagatgccattcgcgatggcctaagggctataaaaaacgcgatcgaggatgggtgtatggtgcccggtgcaggtgccatcgaagtagccatggccgaggccctcgtgacgtacaagaactccatcaaaggccgcgctaggctcggcgtccaggcatttgccgatgctcttctcatcataccaaaggtactggcccagaatgccgggtacgacccccaagagacactagtcaaagtccaggctgagcatgttgaatctaagcaactcgtcggcgtcgatcttaacacaggtgaacccatggtggcagccgacgctggagtatgggataactactgcgtcaagaaacagctgctgcactcatgtaccgtgatagccacaaatatcctgcttgtagacgagatcatgcgagcaggaatgagctcgttgaagtag

SEQ ID NO: 74128 - DNA, 1458 bp, Artificial Sequence
  derived and/or modified sequence
atggcagcgataaaagccgtgaactctaaagccgaggttgcccgagccagggccgctcttgcagtaaacatatgcgctgctagaggactgcaggacgtgctgcgaacaaacctgggtcccaagggaacaatgaagatgctggtgtccggagctggggacatcaaactgactaaggacggcaacgtgttgttagatgaaatgggacttcaccctagaattatcgcagaagggtttgaggccgctaaaattaaagcccttgaagtccttgaggaagtgaaggtgacgaaagagatgaagcgaaagatacttctggacgttgctaggacatccctgcagactaaggtacatgccgaactggctgacgtgctgacagaggtggtcgtagactcggtgctcgcagttcgacgacctggttatcccattgatctttttatggtggagataatggaaatgaaacacaagctaggcacagataccaagctgattcaagggctcgtcctcgatcacggtgcacgacacccggacatgaaaaagcgtgtcgaagacgcttttattcttatatgtaacgtgtcactcgagtacgagaaaaccgaggtcaacagtgggtttttctataagactgctgaggagaaagagaaattggtgaaggctgagcgcaaattcatagaagaccgcgtgcagaagattatcgatttgaaggacaaggtctgcgcacaaagcaacaagggctttgtagtgatcaatcagaaaggcattgaccccttctccctcgattcactggctaagcacggtatcgttgccctgagaagggccaaaaggcgtaacatggaacggttgagtctggcttgtggtgggatggctgttaactcttttgaggacctgacggtggactgcctggggcacgctggattggtgtacgagtacaccctcggggaggagaagttcacatttattgaggagtgtgtcaacccgtgtagcgtgactctgcttgtcaaaggccctaataaacatacattgactcaggtcaaggatgcgattcgcgacgggttaagggctattaaaaatgcaattgaagacggttgcatggttcctggagcaggagccatcgaagtggccatggcagaagctcttgtaacatataagaacagcatcaaaggcagagcgcgtttgggagtacaggcatttgccgacgctctgcttatcatccccaaagtgcttgcacagaatgcagggtatgaccctcaggagactttggtgaaagtccaagccgagcacgttgaaagcaagcagctcgtgggagtcgacctcaatactggcgaacccatggtggctgcagacgcgggagtctgggacaactattgcgtaaaaaagcagctgctccactcgtgtactgtcattgctacaaatattttacttgtcgacgagatcatgcgcgcaggaatgtcctctctgaagtag

SEQ ID NO: 74129 - DNA, 1627 bp, Artificial Sequence
  derived and/or modified sequence
gctcagaatcgcgactaaggctttttttttttctccctctgaacggttaggctatggctgcgataaaggccgtcaactccaaggctgaggtggcgcgggcccgggcagctttggctgtcaatatatgcgccgcccgagggctgcaggatgtgctgcggaccaacttgggtcctaaaggcaccatgaaaatgcttgtttctggtgcaggtgacatcaaactcaccaaagatggcaatgtgctgctcgatgagatgggcctgcaccctagaataatagctgaaggatttgaagctgcaaagataaaagcacttgaagttttggaggaagttaaagtgacaaaggagatgaaaagaaaaatcctcttagatgtagctagaacatcattacaaactaaagttcatgctgaactggctgatgtcttaacagaggttgtggtggattctgttttggctgttagaagaccaggttaccctattgatctcttcatggtagaaataatggagatgaagcataaattaggaacagatacaaagttgatccaaggattagttttggatcatggtgcccgtcatccagatatgaagaagcgagtagaagatgcatttatccttatttgcaacgtttcactggaatatgaaaaaacagaggtgaactctggtttcttttataagactgcagaagagaaagagaaattggtaaaagctgaaagaaaatttattgaagatagagtacaaaaaataatagacctgaaggacaaagtctgtgctcagtcaaataaaggatttgtcgtcattaatcaaaagggaattgatccattttccttagattctcttgcaaaacatggaatagtagctcttcgcagagcaaaaagaagaaatatggaaagactctctcttgcttgtggtggaatggccgtgaattcttttgaagatctcactgtagattgcttgggacatgctggtcttgtgtatgagtatacattaggtgaagaaaagttcacttttattgaggagtgtgttaacccttgctctgttaccttgttggttaaaggaccaaataagcatactctcacacaagtcaaggatgccataagagatggacttcgtgctatcaaaaatgccattgaagatggttgtatggttcctggagctggtgcaattgaagtggcaatggctgaagctcttgttacatataagaacagtataaaaggaagagctcgtcttggagtccaagcttttgctgatgccttactcattattcccaaggttcttgctcagaatgctggttatgacccacaggaaacattagtaaaagttcaggctgagcatgtcgagtcaaaacaacttgtgggcgtagatttgaatacaggtgagccaatggtagcagcagatgcaggagtttgggataattattgtgtaaaaaaacaacttcttcactcttgcacagtgattgccaccaacattctcctggttgatgaaattatgcgagctgggatgtcttctctcaaatgatgattgaattcaaaatcaacccttctagaagatgaaatttagtacactttacatctgactactattgtgtagcctgagccattctgaatttctacacaataaatgcagtttatgtc

SEQ ID NO: 74130 - DNA, 1458 bp, Artificial Sequence
  derived and/or modified sequence
atggccgccatcaaggccgtgaacagcaaggccgaggtggccagagccagagccgccctggccgtgaacatctgcgccgccagaggcctgcaggacgtgctgagaaccaacctgggccccaagggcaccatgaagatgctggtgagcggcgccggcgacatcaagctgaccaaggacggcaacgtgctgctggacgagatgggcctgcaccccagaatcatcgccgagggcttcgaggccgccaagatcaaggccctggaggtgctggaggaggtgaaggtgaccaaggagatgaagagaaagatcctgctggacgtggccagaaccagcctgcagaccaaggtgcacgccgagctggccgacgtgctgaccgaggtggtggtggacagcgtgctggccgtgagaagacccggctaccccatcgacctgttcatggtggagatcatggagatgaagcacaagctgggcaccgacaccaagctgatccagggcctggtgctggaccacggcgccagacaccccgacatgaagaagagagtggaggacgccttcatcctgatctgcaacgtgagcctggagtacgagaagaccgaggtgaacagcggcttcttctacaagaccgccgaggagaaggagaagctggtgaaggccgagagaaagttcatcgaggacagagtgcagaagatcatcgacctgaaggacaaggtgtgcgcccagagcaacaagggcttcgtggtgatcaaccagaagggcatcgaccccttcagcctggacagcctggccaagcacggcatcgtggccctgagaagagccaagagaagaaacatggagagactgagcctggcctgcggcggcatggccgtgaacagcttcgaggacctgaccgtggactgcctgggccacgccggcctggtgtacgagtacaccctgggcgaggagaagttcaccttcatcgaggagtgcgtgaacccctgcagcgtgaccctgctggtgaagggccccaacaagcacaccctgacccaggtgaaggacgccatcagagacggcctgagagccatcaagaacgccatcgaggacggctgcatggtgcccggcgccggcgccatcgaggtggccatggccgaggccctggtgacctacaagaacagcatcaagggcagagccagactgggcgtgcaggccttcgccgacgccctgctgatcatccccaaggtgctggcccagaacgccggctacgacccccaggagaccctggtgaaggtgcaggccgagcacgtggagagcaagcagctggtgggcgtggacctgaacaccggcgagcccatggtggccgccgacgccggcgtgtgggacaactactgcgtgaagaagcagctgctgcacagctgcaccgtgatcgccaccaacatcctgctggtggacgagatcatgagagccggcatgagcagcctgaagtag

SEQ ID NO: 74131 - protein, 186 aa, Artificial Sequence
  derived and/or modified sequence
MWNQQGRPGIRNQFSLFFFLTQSLALSLRLECSGAISDHCNLRLLGSSDSSASASRVAGIIDVRHMPGQHGETLSLLKIQKLAGCGGSHLYSQLLGRLKWEDGLSSGGRGCSELRGRHCAPGWVTARLCLKKKKKRGGGKTKLYSVGLEFNIWKVDIWNALVPLDLWFSLKGESRTIVLESSEVRT

SEQ ID NO: 74132 - protein, 167 aa, Artificial Sequence
  derived and/or modified sequence
MPSQSACPVLSTAPGTPCDLRKHLLNMVSEEKRSPQLSAKTWRRGLRLQKRRNALFLPEGDICVVGSTSGARALIPETSKLERSGTVIAYCNLELLASSDPPVWASQSTGMTGMSYRSQPQLGFKSTPPAHSSVFHHSVKAPKEDQAQEAASRPLTSQDGWNPNIKK

SEQ ID NO: 74133 - protein, 752 aa, Artificial Sequence
  derived and/or modified sequence
MPLAAYCYLRVVGKGSYGEVTLVKHRRDGKQYLHEKHILHRDLKTQNVFLTRTNIIKVGDLGIARVLENHCDMASTLIGTPYYMSPELFSNKPYNYKSDVWALGCCVYEMATLKHAFNAKDMNSLVYRIIEGKLPPMPRDYSPELAELIRTMLSKRPEERPSVRSILRQPYIKRQISFFLEATKIKTSKNNIKNGDSQSKPFATVVSGEAESNHEVIHPQPLSSEGSQTYIMGEGKCLSQEKPRASGLLKSPASLKAHTCKQDLSNTTELATISSVNIDILPAKGRDSVSDGFVQENQPRYLDASNELGGICSISQVEEEMLQDNTKSSAQPENLIPMWSSDIVTGEKNEPVKPLQPLIKEQKPKDQSLALSPKLECSGTILAHSNLRLLGSSDSPASASRVAGITGVCHHAQDQVAGECIIEKQGRIHPDLQPHNSGSEPSLSRQRRQKRREQTEHRGEKRQVRRDLFAFQESPPRFLPSHPIVGKVDVTSTQKEAENQRRVVTGSVSSSRSSEMSSSKDRPLSARERRRLKQSQEEMSSSGPSVRKASLSVAGPGKPQEEDQPLPARRLSSDCSVTQERKQIHCLSEDELSSSTSSTDKSDGDYGEGKGQTNEINALVQLMTQTLKLDSKESCEDVPVANPVSEFKLHRKYRDTLILHGKVAEEAEEIHFKELPSAIMPGSEKIRRLVEVLRTDVIRGLGVQLLEQVYDLLEEEDEFDREVRLREHMGEKYTTYSVKARQLKFFEENMNF

SEQ ID NO: 74134 - DNA, 2259 bp, Artificial Sequence
  derived and/or modified sequence
atgccactagcagcctattgttacctgagggtggtgggtaaggggtcatacggcgaagtgaccctggttaagcaccgccgcgacggcaaacaatacttacatgaaaaacacatcctgcaccgagatctgaaaacgcaaaatgtcttcctgaccagaaccaacattatcaaagttggagatttgggaatcgcccgagtgctggaaaatcactgtgacatggcatccacacttataggtacaccttactacatgtctcctgagttgtttagtaataagccatataactataagagtgacgtgtgggccctcggctgttgtgtctacgaaatggcaactctcaaacatgcgtttaatgctaaggatatgaacagcttagtctaccgaatcatcgaggggaagcttcctcccatgcctagggattactccccagaattggcagagttaatacgcaccatgctgtcaaagcgacccgaggagcgacctagcgtgcgctctatcttgcgccagccctatataaagcgacagatttctttctttctcgaggcaactaagataaaaacatctaaaaataacatcaaaaatggggactcccagtcaaaacccttcgccaccgtggtctctggcgaagccgaatccaaccacgaggtcatccatcctcagccactgtcaagcgaaggatcacagacatatatcatgggggagggcaagtgcctatcccaagagaagccccgtgcttcaggactgctgaagtcccctgccagcttgaaagcgcacacttgcaagcaggaccttagcaatacaacagagctggctacaatctcgtctgtgaacattgatatcctccctgccaagggcagagattccgttagcgatggcttcgtgcaggaaaaccagcctcggtaccttgacgcctctaatgaattggggggcatctgctctatcagtcaggttgaagaggaaatgctccaggataataccaagtcctctgctcaacccgagaatctgatccctatgtggagctcggacatagtcactggcgagaagaacgaacctgtgaagccgctgcagcccctgatcaaagaacagaaacctaaagaccaaagcctggcactctcaccgaagttggagtgcagcgggactatactcgcacattctaacctgaggcttctgggctcctccgatagcccagcctccgcatcgcgcgtcgccgggatcactggggtgtgtcaccatgctcaggaccaggtggcgggcgaatgcataattgaaaagcaaggccgtatccacccggatttgcagccacacaactctggttcggagccatcgctgagtcgtcaacggaggcagaaacgccgggagcagaccgagcatagaggcgagaaaagacaagtgcgccgcgacttgtttgccttccaagagtctccacccaggtttctcccctcacatcccatagtgggtaaagtggacgtaacttctactcagaaggaagccgagaatcagcggagagtggtcacaggcagcgtgtcttcctctcgttcttccgaaatgagttccagcaaagatagacccctttcggccagagaaagacgtcgattgaagcagtcacaagaggagatgtcatcaagcggaccctcggtgagaaaggccagcctcagtgttgcaggaccaggtaaacctcaggaagaggatcagccattgccagctagaaggctaagttctgactgttctgtgactcaggagcgcaagcagattcattgtctatcagaggatgagctttcttcttcaacaagctccacagacaaatccgacggggactatggggaaggaaagggacagacaaatgagatcaacgccctcgtgcagctgatgacacagacactgaaactggattccaaggagagctgtgaggacgtgcccgtggcaaatcctgtctccgagtttaaactccatcgcaaataccgcgacaccctgattctccacggaaaggtggcagaggaggcagaggaaatccatttcaaagagttgccctcggcgatcatgcctggatcggagaaaatccgccgccttgtggaagtgcttagaactgatgtgatccgtggtttgggcgtgcagctgctcgagcaggtgtatgatctactggaggaagaggacgagtttgacagggaggtgagactgagagaacacatgggcgagaagtataccacctactccgttaaggccagacagttgaagttttttgaagaaaatatgaatttctag

SEQ ID NO: 74135 - DNA, 2259 bp, Artificial Sequence
  derived and/or modified sequence
atgcccctggccgcctactgctacctgcgggtggtgggcaagggcagctatggagaggtgaccctggtgaagcacagaagagatggcaagcagtacctgcacgagaagcacatcctgcaccgggacctgaagacccagaatgtgttcctgaccaggaccaacatcatcaaggtgggggacctgggcatcgcccgggtgctggagaaccactgtgacatggccagcaccctcatcggcaccccctactacatgagccctgagctgttcagcaacaagccctacaactacaagagtgatgtgtgggccctgggctgctgcgtgtatgagatggccaccctgaagcacgccttcaatgccaaggacatgaacagcctggtgtaccgcatcatcgagggcaagctgccccccatgccccgggactacagccctgagctggccgagctgatccgcaccatgctgagcaagaggcctgaggagcggcccagcgtgcgcagcatcctgcggcagccctacatcaagaggcagatctccttcttcctggaggccaccaagatcaagaccagcaagaacaacatcaagaatggagacagccagagcaagccctttgccaccgtggtgtctggagaggccgagagcaaccacgaggtgatccacccccagcccctgagcagcgagggcagccagacctacatcatgggagagggcaagtgcctgagccaggagaagccccgggccagcggcctgctgaagagccctgccagcctgaaggcccacacctgcaagcaggacctgagcaacaccacagagctggccaccatcagctctgtgaacatcgacatcctgcctgccaagggccgggacagcgtgtctgatggctttgtgcaggagaaccagccccgctacctggatgccagcaatgagctgggcggcatctgcagcatcagccaggtggaggaggagatgctgcaggacaacaccaagagcagcgcccagccagaaaatctcatccccatgtggagcagtgacatcgtgactggagagaagaatgaacctgtgaagcccctgcagcccctcatcaaggagcagaagcccaaggaccagagcctggccctgagccccaagctggagtgcagcggcaccatcctggcccacagcaacctgcggctgctgggcagcagtgacagccctgccagcgccagccgggtggccggcatcaccggggtgtgccaccacgcccaggaccaggtggccggggagtgcatcatcgagaagcagggccgcatccacccagacctgcagccccacaacagcggcagcgagcccagcctgagccggcagaggcggcagaagagaagagagcagacagagcacagaggagagaagaggcaggtgagaagagacctgtttgccttccaggagagccccccacgcttcctgcccagccaccccatcgtgggcaaggtggatgtgaccagcacccagaaggaggccgagaaccagaggagagtggtgactggatctgtgagcagcagccgcagcagcgagatgagcagcagcaaggaccggcccctgagcgcccgggagcggcggcggctgaagcagagccaggaggagatgagcagcagcggccccagcgtgaggaaggccagcctgtctgtggccggccctgggaagccccaggaggaggaccagcccctgcctgcccggcggctgagcagtgactgcagcgtgacccaggagaggaagcagatccactgcctgtctgaagatgagctgagcagcagcaccagcagcacagacaagagtgatggagactatggagagggcaagggccagaccaatgagatcaatgccctggtgcagctgatgacccagaccctgaagctggacagcaaggagagctgtgaagatgtgcctgtggccaaccctgtgtctgagttcaagctgcacaggaagtacagagacaccctcatcctgcacggcaaggtggccgaggaggccgaggagatccacttcaaggagctgcccagcgccatcatgcctggcagcgagaagatccggcggctggtggaggtgctgaggacagatgtgatccggggcctgggcgtgcagctgctggagcaggtgtatgacctgctggaggaggaggatgaatttgaccgggaggtgcggctgcgggagcacatgggagagaagtacaccacctacagcgtgaaggcccggcagctgaagttctttgaggagaacatgaacttctag

SEQ ID NO: 74136 - DNA, 2259 bp, Artificial Sequence
  derived and/or modified sequence
atgcccctggccgcctactgctacctgcgggtggtgggcaagggcagctatggagaggttacccttgtgaagcaccgccgggacgggaaacagtacctacacgagaagcacatccttcaccgcgatttgaagacacaaaatgtattcctcactcggaccaatataatcaaggttggagatctgggtattgcaagggtccttgagaatcattgtgacatggcctcaactttaatcgggactccttattatatgagccctgagctgttttctaacaagccctataattacaagagtgatgtgtgggcgcttggctgctgtgtttatgagatggctacactgaagcacgcgtttaatgccaaggacatgaactcccttgtgtatcggataatagaagggaagttgcccccaatgcctagggactattcccctgagttagctgagctgatccgaactatgctcagcaagagacccgaagagcggccatctgttcgctctattttacgacagccttacattaagaggcagatttcattctttcttgaggcaacaaaaattaagacctctaagaataacatcaagaacggcgactcccagagcaagccctttgctaccgtggttagcggggaggctgaaagtaatcatgaggtgatccacccccagcctctctcttccgagggaagccagacctacatcatgggggaaggaaaatgtttgtcccaggagaaacctagggcgagtggattgctcaaaagtccagcatccctgaaggcacatacatgcaagcaggatctctccaacacaacagagctggctacaatcagttccgtgaatatcgacattctgcccgctaagggcagagattcagtgtccgacgggtttgtgcaggagaaccagcctagataccttgatgcaagtaacgaattgggtggcatctgctccatcagccaagtggaggaagaaatgttgcaggacaataccaagagctcagcccagcccgagaacctgatcccaatgtggtccagcgacatcgtcactggcgaaaaaaatgagccggtgaagccccttcaaccacttatcaaggaacagaaaccaaaggaccagtctttggctctgtcacccaagctggagtgcagtgggaccatcctcgctcattcgaacctgcggctgctggggtcaagcgactctccggcaagtgcctcacgcgtggcgggcattaccggagtgtgccaccacgcacaggaccaagtggcgggggaatgcatcattgaaaaacaagggaggatacatcccgacctccagccacacaatagtggctcggaaccaagcctcagccggcaaaggaggcagaagcggagggagcagacggaacatcggggagaaaagcggcaggtaagacgcgacctgttcgcattccaggaatctccaccgaggttcctgccttcccatccgatagtgggcaaagttgatgtgacctccacccagaaagaagccgaaaaccagaggcgagtggtgacagggtccgttagtagctcacgatcttctgagatgagtagcagtaaagacagaccactcagcgcgcgtgagaggcgacgcttgaaacagagccaggaggaaatgagtagctcgggcccgtcggtacggaaggccagcttgagtgtggcagggcctggaaagcctcaagaggaagatcaaccactccccgcaaggcggctgtcgtccgattgctctgttacccaagagcgtaaacagattcattgcctctctgaggatgaactctctagttcaacaagttctacggataagtctgacggggactacggcgaagggaaggggcaaaccaacgagattaacgcccttgtccagctaatgactcagaccctcaaacttgactctaaggagtcctgtgaggacgtgccggtagctaaccccgtttcagaattcaagctgcataggaaataccgcgatactctcatcttgcatggcaaagtggccgaagaagccgaagaaatacacttcaaagaactccccagcgccattatgcctggcagtgagaaaattcgccgacttgtagaagtgttacgcaccgacgtgatccgcgggttgggtgtccaactactggaacaggtttatgacctgctcgaggaggaggacgaattcgatcgggaagtgcgcctgagagagcatatgggtgagaaatacacgacctattctgtcaaggcacgtcagctcaaatttttcgaagagaatatgaatttttag

SEQ ID NO: 74137 - DNA, 2553 bp, Artificial Sequence
  derived and/or modified sequence
aacagccgcccccactgccccctctcgggcatgaaccgagcttcttgttgccgcccgctgccctacccgccgctgccgccgcatcccgactctgggccagcgctgggaacatgcccctggccgcctactgctacctgcgggtcgtgggcaaggggagctatggagaggtgacgcttgtgaagcaccggcgggacggcaagcagtatttacatgaaaaacacatccttcatcgagatctgaaaactcaaaatgtcttcctaacaagaacaaacatcatcaaagtaggggacctaggaattgcccgagtgttagagaaccactgtgacatggctagcaccctcattggcacaccctactacatgagccctgaattgttctcaaacaaaccctacaactataagtctgatgtttgggctctaggatgctgtgtctatgaaatggccaccttgaagcatgctttcaatgcaaaagatatgaattctttagtttatcggattattgaaggaaagctgccaccaatgccaagagattacagcccagagctggcagaactgataagaacaatgctgagcaaaaggcctgaagaaaggccgtctgtgaggagcatcctgaggcagccttatataaagcggcaaatctccttctttttggaggccacaaagataaaaacctccaaaaataacattaaaaatggtgactctcaatccaagccttttgctacagtggtttctggagaggcagaatcaaatcatgaagtaatccacccccaaccactctcttctgagggctcccagacatatataatgggtgaaggcaaatgtttgtcccaggagaaacccagggcctctggtctcttgaagtcacctgccagtctgaaagcccatacctgcaaacaggacttgagcaataccacagaactagccacaatcagtagcgtaaatattgacatcttacctgcaaaagggagggattcagtgagtgatggctttgttcaggagaatcagccaagatatttggatgcctctaatgagttaggaggtatatgcagtatttctcaagtggaagaggagatgctgcaggacaacactaaatccagtgcccagcctgaaaacctgattcccatgtggtcctctgacattgtcactggggaaaagaatgaaccagtgaagcctctgcagcccctaatcaaagaacaaaagccaaaggaccagagtcttgccctgtcgcccaagctggagtgcagtggcacaatcttggctcacagcaacctccgcctcctgggttcaagtgattctccagcctcagcctcccgagtagctgggattacaggcgtgtgccaccacgcccaggatcaagttgctggtgaatgtattatagaaaaacagggcagaatccacccagatttacagccacacaactctgggtctgaaccttccctgtctcgacagcgacggcaaaagaggagagaacagactgagcacagaggggaaaagagacaggtccgcagagatctctttgctttccaagagtcgcctcctcgatttttgccttctcatcccattgttgggaaagtggatgtcacatcaacacaaaaagaggctgaaaaccaacgtagagtggtcactgggtctgtgagcagttcaaggagcagtgagatgtcatcatcaaaggatcgaccattatcagccagagagaggaggcgactaaagcagtcacaggaagaaatgtcctcttcaggcccttcagtgaggaaagcgtctctgagtgtagcagggccaggaaaaccccaggaagaagaccagcccttgcctgcccgacggctctcctctgactgcagcgtcactcaggaaaggaaacagattcattgtctgtctgaggatgagttaagttcttctacaagttcaactgataagtcagatggggattacggggaagggaaaggtcagacaaatgaaattaatgccttggtacaattgatgactcagaccctgaaactggattctaaagagagctgtgaagatgtcccggtagcaaacccagtgtcagaattcaaacttcatcggaaatatcgggacacactgatacttcatgggaaggttgcagaagaggcagaggaaatccattttaaagagctaccttcagctattatgccaggttctgaaaagatcaggagactagttgaagtcttgagaactgatgtaattcgtggcctgggagttcagcttttagagcaggtgtatgatcttttggaggaggaggatgaatttgatagagaggtacgtttgcgggagcacatgggtgaaaagtatacaacttacagtgtgaaagctcgccagttgaaattttttgaagaaaacatgaatttttgagcatttgtcctaatctgctgccagaattaaagacctatttttagaggattttggcttaaaaagcaagggcaaacagtcatttggaagccactcaccactgttttatatctcttttttatatctctttggcgtttccctacagaaaagaaattggacagaacagaataatatgaagcaggatcac

SEQ ID NO: 74138 - DNA, 2259 bp, Artificial Sequence
  derived and/or modified sequence
atgccactggccgcatactgttacttgcgggtggttggcaaaggatcatacggggaggtgactcttgtaaagcaccggagggacggcaagcaatacttgcatgaaaagcacattcttcatcgggatctgaagacacagaacgtctttcttaccaggaccaacatcataaaggttggtgaccttggcattgcacgggtcctggagaatcattgcgatatggcatcaacccttattggtaccccatactatatgtcccccgagctgttcagcaataagccatacaactataaatctgacgtctgggcgttgggatgttgcgtgtacgaaatggcaacattgaagcacgcttttaatgccaaagatatgaattccttagtctaccgaataattgaaggcaagttgccaccaatgcctagggattatagtcctgagctagctgaactcattaggactatgttatcaaagagacccgaggagcgcccatccgtccgaagcatcctgcgacagccttatattaagcggcagatatctttcttcttggaggcaaccaaaatcaaaacatctaaaaacaatatcaagaacggtgattcgcagagcaagccctttgctacggtggtgagcggggaagccgaaagcaatcatgaggttatacacccgcagcctctgtcaagcgaaggaagccagacatatatcatgggagaggggaagtgtctgagtcaggagaagcccagagcttccggactcctcaaatccccagcttctcttaaagcccatacttgtaaacaagacctgtctaacacgaccgagctggctacgatttcaagcgtcaacatcgacattctgccggctaagggcagggacagcgtttctgatggcttcgtgcaggagaatcagcctagataccttgatgcttcaaatgaattgggtggcatttgcagcattagccaggtcgaggaggagatgctccaagataacacaaagtccagtgcacagcccgaaaatttgattcccatgtggagctcagatatagtcaccggtgaaaaaaatgaacctgtaaagccattgcagcccctgattaaggagcagaagcctaaggaccagagtctggccttatcccctaagctggaatgctcagggacgatactcgcccatagcaacctgaggctgctgggtagctccgacagccccgcatcagctagccgcgtcgcaggcataacaggcgtgtgtcaccatgcccaagaccaagtggccggtgaatgcatcatcgagaaacaaggaaggattcaccctgacctgcagccccataactcgggaagtgaaccctccctgtcccgccagcgccgacagaaaagaagagagcaaaccgagcatcggggagaaaaacgacaggtccgcagagatctctttgcctttcaagaatctcccccaagatttttaccctctcaccctattgtcggcaaggttgacgtgacgtctacacagaaggaagccgagaaccagcgccgagtcgtgaccggttcagtgtccagttctcgcagtagtgaaatgagctcaagcaaagaccggcctctctctgccagagagcggcgacgactgaagcagagccaggaagagatgagctcctctgggccatcagtgcggaaggccagtctctccgtcgccggaccgggaaagccacaagaggaggatcaacctctgcctgcccgtcgcctgagttccgattgtagtgtgacccaggaacggaagcaaatacactgcctgagcgaggacgagttgagctcctccaccagcagtacggacaagagcgatggcgattacggtgagggtaagggccagacgaatgagattaatgccctagtgcagctgatgacccagaccttgaaactcgattcaaaggaatcctgtgaggacgtgcccgtcgccaatccagtcagcgaatttaagctccatagaaaatacagggataccctcattttgcacggcaaggtggcagaggaagctgaagaaattcattttaaggaacttccatctgccatcatgcctggctccgaaaaaattaggcggctcgtggaggtgctgcgaaccgacgtaatccggggacttggagtccagcttctggagcaggtgtacgatctgttagaggaagaagatgaatttgatagagaagttagactgcgtgaacatatgggcgaaaagtataccacatacagcgtgaaggctcggcagctgaagtttttcgaggaaaacatgaacttttag

SEQ ID NO: 74139 - DNA, 2259 bp, Artificial Sequence
  derived and/or modified sequence
atgcccctggccgcctactgctacctgagagtggtgggcaagggcagctacggcgaggtgaccctggtgaagcacagaagagacggcaagcagtacctgcacgagaagcacatcctgcacagagacctgaagacccagaacgtgttcctgaccagaaccaacatcatcaaggtgggcgacctgggcatcgccagagtgctggagaaccactgcgacatggccagcaccctgatcggcaccccctactacatgagccccgagctgttcagcaacaagccctacaactacaagagcgacgtgtgggccctgggctgctgcgtgtacgagatggccaccctgaagcacgccttcaacgccaaggacatgaacagcctggtgtacagaatcatcgagggcaagctgccccccatgcccagagactacagccccgagctggccgagctgatcagaaccatgctgagcaagagacccgaggagagacccagcgtgagaagcatcctgagacagccctacatcaagagacagatcagcttcttcctggaggccaccaagatcaagaccagcaagaacaacatcaagaacggcgacagccagagcaagcccttcgccaccgtggtgagcggcgaggccgagagcaaccacgaggtgatccacccccagcccctgagcagcgagggcagccagacctacatcatgggcgagggcaagtgcctgagccaggagaagcccagagccagcggcctgctgaagagccccgccagcctgaaggcccacacctgcaagcaggacctgagcaacaccaccgagctggccaccatcagcagcgtgaacatcgacatcctgcccgccaagggcagagacagcgtgagcgacggcttcgtgcaggagaaccagcccagatacctggacgccagcaacgagctgggcggcatctgcagcatcagccaggtggaggaggagatgctgcaggacaacaccaagagcagcgcccagcccgagaacctgatccccatgtggagcagcgacatcgtgaccggcgagaagaacgagcccgtgaagcccctgcagcccctgatcaaggagcagaagcccaaggaccagagcctggccctgagccccaagctggagtgcagcggcaccatcctggcccacagcaacctgagactgctgggcagcagcgacagccccgccagcgccagcagagtggccggcatcaccggcgtgtgccaccacgcccaggaccaggtggccggcgagtgcatcatcgagaagcagggcagaatccaccccgacctgcagccccacaacagcggcagcgagcccagcctgagcagacagagaagacagaagagaagagagcagaccgagcacagaggcgagaagagacaggtgagaagagacctgttcgccttccaggagagcccccccagattcctgcccagccaccccatcgtgggcaaggtggacgtgaccagcacccagaaggaggccgagaaccagagaagagtggtgaccggcagcgtgagcagcagcagaagcagcgagatgagcagcagcaaggacagacccctgagcgccagagagagaagaagactgaagcagagccaggaggagatgagcagcagcggccccagcgtgagaaaggccagcctgagcgtggccggccccggcaagccccaggaggaggaccagcccctgcccgccagaagactgagcagcgactgcagcgtgacccaggagagaaagcagatccactgcctgagcgaggacgagctgagcagcagcaccagcagcaccgacaagagcgacggcgactacggcgagggcaagggccagaccaacgagatcaacgccctggtgcagctgatgacccagaccctgaagctggacagcaaggagagctgcgaggacgtgcccgtggccaaccccgtgagcgagttcaagctgcacagaaagtacagagacaccctgatcctgcacggcaaggtggccgaggaggccgaggagatccacttcaaggagctgcccagcgccatcatgcccggcagcgagaagatcagaagactggtggaggtgctgagaaccgacgtgatcagaggcctgggcgtgcagctgctggagcaggtgtacgacctgctggaggaggaggacgagttcgacagagaggtgagactgagagagcacatgggcgagaagtacaccacctacagcgtgaaggccagacagctgaagttcttcgaggagaacatgaacttctag

SEQ ID NO: 74140 - protein, 674 aa, Artificial Sequence
  derived and/or modified sequence
MAPFPEEVDVFTAPHWRMKQLVGLYCDKSLYATFKEFKMHEQIENEYIIGLLQQRSQTIYNVHSDNKLSEMLSLFEKGLKNVKNEYEQLNYAKQLKERLEAFTRDFLPHMKEEEEVFQPMLMEYFTYEELKDIKKKVIAQHCSQKDTAELLRGLSLWNHAEERQKFFKYSVDEKSDKEAEVSEHSTGITHLPPEVMLSIFSYLNPQELCRCSQVSMKWSQLTKTGSLWKHLYPVHWARGDWYSGPATELDTEPDDEWVKNRKDESRAFHEWDEDADIDESEESAEESIAISIAQMEKRLLHGLIHNVLPYVGTSVKTLVLAYSSAVSSKMVRQILELCPNLEHLDLTQTDISDSAFDSWSWLGCCQSLRHLDLSGCEKITDVALEKISRALGILTSHQSGFLKTSTSKITSTAWKNKDITMQSTKQYACLHDLTNKGIGEEIDNEHPWTKPVSSENFTSPYVWMLDAEDLADIEDTVEWRHRNVESLCVMETASNFSCSTSGCFSKDIVGLRTSVCWQQHCASPAFAYCGHSFCCTGTALRTMSSLPESSAMCRKAARTRLPRGKDLIYFGSEKSDQETGRVLLFLSLSGCYQITDHGLRVLTLGGGLPYLEHLNLSGCLTITGAGLQDLVSACPSLNDEYFYYCDNINGPHADTASGCQNLQCGFRACCRSGE

SEQ ID NO: 74141 - DNA, 2949 bp, Artificial Sequence
  derived and/or modified sequence
gtctatggagaggcggcggccgcggctgctgaggcggaggctgaggcagtggcgatggcgccctttcctgaagaagtggacgtcttcaccgccccacactggcggatgaagcagctggtggggctctactgcgacaagctttctaaaaccaatttttccaacaacaacgatttccgtgctcttctgcagtctttgtatgctactttcaaggagttcaaaatgcatgagcagattgaaaatgaatacattattggtttgcttcaacaacgcagccagaccatttataatgtacattctgacaataaactctccgagatgcttagcctctttgaaaagggactgaagaatgttaagcctactactgttgactggaagccttaccaataacataaaacaatcgaataacaattatttcatgtattatatgtaaaatatatatactggattcttacagtaagaatgaatatgaacagttaaattatgcaaaacaactgaaagagagattggaggcttttacaagagattttcttcctcacatgaaagaggaagaggaggtttttcagcccatgttaatggaatattttacctatgaagagcttaaggatattaaaaagaaagtgattgcacaacactgctctcagaaggatactgcagaactccttagaggtcttagcctatggaatcatgctgaagagcgacagaagttttttaaatattccgtggatgaaaagtcagataaagaagcagaagtgtcagaacactccacaggtataacccatcttcctcctgaggtaatgctgtcaattttcagctatcttaatcctcaagagttatgtcgatgcagtcaagtaagcatgaaatggtctcagctgacaaaaacgggatcgctttggaaacatctttaccctgttcattgggccagaggtgactggtatagtggtcccgcaactgaacttgatactgaacctgatgatgaatgggtgaaaaataggaaagatgaaagtcgtgcttttcatgagtgggatgaagatgctgacattgatgaatctgaagagtctgcggaggaatcaattgctatcagcattgcacaaatggaaaaacgtttactccatggcttaattcataacgttctaccatatgttggtacttctgtaaaaaccttagtattagcatacagctctgcagtttccagcaaaatggttaggcagattttagagctttgtcctaacctggagcatctggatcttacccagactgacatttcagattctgcatttgacagttggtcttggcttggttgctgccagagtcttcggcatcttgatctgtctggttgtgagaaaatcacagatgtggccctagagaagatttccagagctcttggaattctgacatctcatcaaagtggctttttgaaaacatctacaagcaaaattacttcaactgcgtggaaaaataaagacattaccatgcagtccaccaagcagtatgcctgtttgcacgatttaactaacaagggcattggagaagaaatagataatgaacacccctggactaagcctgtttcttctgagaatttcacttctccttatgtgtggatgttagatgctgaagatttggctgatattgaagatactgtggaatggagacatagaaatgttgaaagtctttgtgtaatggaaacagcatccaactttagttgttccacctctggttgttttagtaaggacattgttggactaaggactagtgtctgttggcagcagcattgtgcttctccagcctttgcgtattgtggtcactcattttgttgtacaggaacagctttaagaactatgtcatcactcccagaatcttctgcaatgtgtagaaaagcagcaaggactagattgcctaggggaaaagacttaatttactttgggagtgaaaaatctgatcaagagactggacgtgtacttctgtttctcagtttatctggatgttatcagatcacagaccatggtctcagggttttgactctgggaggagggctgccttatttggagcaccttaatctctctggttgtcttactataactggtgcaggcctgcaggatttggtttcagcatgtccttctctgaatgatgaatacttttactactgtgacaacattaacggtcctcatgctgataccgccagtggatgccagaatttgcagtgtggttttcgagcctgctgccgctctggcgaatgacccttgacttctgatctttgtctacttcatttagctgagcaggctttctttcatgcactttactcatagcacatttcttgtgttaaccatccctttttgagcgtgacttgttttggccccatttcttacaacttcagaaatcttaatttaccagtgaattgtaatgttgtttctcttgcaaattatacttttggtttagaaagggattaggtcttttcaaaagggtgagaacagtcttacatttttcttttaaatgaaatgctttaaagaatgttggtaatgccatgtcatttaaagtatttcatagataattttgagttttaaagtccatggaggtgattggttctctttacacattaacactgtaccaagctttgcagatcttttccgacacacatgtctgaagacttattttcaaagacagcacatttttggaaactaatctcttttccgtaatatttcctttatttcaatgattctcagaaggccaattcaaacaaacccacatttaaggttctttaggattatagaataaattggcttctgagtgttagctcagtgagctaggaaagcaccaatcgatatttgtttcctttagggatactttgttctcaccactgtccctatgtcatcaaatttgggagagattttttaaaataccacaatcatttgaagaaatgtataaataaaatctactttgaggactttaccaagt

SEQ ID NO: 74142 - DNA, 2837 bp, Artificial Sequence
  derived and/or modified sequence
atgcgcaagggggcgcgccgcctctgccccgcggcgagggtgtctatggagaggcggcggccgcggctgctgaggcggaggctgaggcagtggcgatggcgccctttcctgaagaagtggacgtcttcaccgccccacactggcggatgaagcagctggtggggctctactgcgacaagtctttgtatgctactttcaaggagttcaaaatgcatgagcagattgaaaatgaatacattattggtttgcttcaacaacgcagccagaccatttataatgtacattctgacaataaactctccgagatgcttagcctctttgaaaagggactgaagaatgttaagaatgaatatgaacagttaaattatgcaaaacaactgaaagagagattggaggcttttacaagagattttcttcctcacatgaaagaggaagaggaggtttttcagcccatgttaatggaatattttacctatgaagagcttaaggatattaaaaagaaagtgattgcacaacactgctctcagaaggatactgcagaactccttagaggtcttagcctatggaatcatgctgaagagcgacagaagttttttaaatattccgtggatgaaaagtcagataaagaagcagaagtgtcagaacactccacaggtataacccatcttcctcctgaggtaatgctgtcaattttcagctatcttaatcctcaagagttatgtcgatgcagtcaagtaagcatgaaatggtctcagctgacaaaaacgggatcgctttggaaacatctttaccctgttcattgggccagaggtgactggtatagtggtcccgcaactgaacttgatactgaacctgatgatgaatgggtgaaaaataggaaagatgaaagtcgtgcttttcatgagtgggatgaagatgctgacattgatgaatctgaagagtctgcggaggaatcaattgctatcagcattgcacaaatggaaaaacgtttactccatggcttaattcataacgttctaccatatgttggtacttctgtaaaaaccttagtattagcatacagctctgcagtttccagcaaaatggttaggcagattttagagctttgtcctaacctggagcatctggatcttacccagactgacatttcagattctgcatttgacagttggtcttggcttggttgctgccagagtcttcggcatcttgatctgtctggttgtgagaaaatcacagatgtggccctagagaagatttccagagctcttggaattctgacatctcatcaaagtggctttttgaaaacatctacaagcaaaattacttcaactgcgtggaaaaataaagacattaccatgcagtccaccaagcagtatgcctgtttgcacgatttaactaacaagggcattggagaagaaatagataatgaacacccctggactaagcctgtttcttctgagaatttcacttctccttatgtgtggatgttagatgctgaagatttggctgatattgaagatactgtggaatggagacatagaaatgttgaaagtctttgtgtaatggaaacagcatccaactttagttgttccacctctggttgttttagtaaggacattgttggactaaggactagtgtctgttggcagcagcattgtgcttctccagcctttgcgtattgtggtcactcattttgttgtacaggaacagctttaagaactatgtcatcactcccagaatcttctgcaatgtgtagaaaagcagcaaggactagattgcctaggggaaaagacttaatttactttgggagtgaaaaatctgatcaagagactggacgtgtacttctgtttctcagtttatctggatgttatcagatcacagaccatggtctcagggttttgactctgggaggagggctgccttatttggagcaccttaatctctctggttgtcttactataactggtgcaggcctgcaggatttggtttcagcatgtccttctctgaatgatgaatacttttactactgtgacaacattaacggtcctcatgctgataccgccagtggatgccagaatttgcagtgtggttttcgagcctgctgccgctctggcgaatgacccttgacttctgatctttgtctacttcatttagctgagcaggctttctttcatgcactttactcatagcacatttcttgtgttaaccatccctttttgagcgtgacttgttttggccccatttcttacaacttcagaaatcttaatttaccagtgaattgtaatgttgtttctcttgcaaattatacttttggtttagaaagggattaggtcttttcaaaagggtgagaacagtcttacatttttcttttaaatgaaatgctttaaagaatgttggtaatgccatgtcatttaaagtatttcatagataattttgagttttaaagtccatggaggtgattggttctctttacacattaacactgtaccaagctttgcagatcttttccgacacacatgtctgaagacttattttcaaagacagcacatttttggaaactaatctcttttccgtaatatttcctttatttcaatgattctcagaaggccaattcaaacaaacccacatttaaggttctttaggattatagaataaattggcttctgagtgttagctcagtgagctaggaaagcaccaatcgatatttgtttcctttagggatactttgttctcaccactgtccctatgtcatcaaatttgggagagattttttaaaataccacaatcatttgaagaaatgtataaataaaatctactttgaggactttaccaagtaa

SEQ ID NO: 74143 - DNA, 1698 bp, Artificial Sequence
  derived and/or modified sequence
atgaaggaggaagaggaggtcttccagcccatgcttatggaatactttacttacgaggaattaaaggacatcaaaaaaaaggtgatagcccagcattgctcacagaaagacacagctgagctgctgcggggactgtcattgtggaatcacgctgaggaacgccaaaagttcttcaaatattccgtcgacgaaaagagcgataaagaggctgaggtatctgagcacagcactgggataacccaccttccacccgaggttatgttatcaatctttagctacctcaacccccaggagctgtgcagatgttctcaagtgtccatgaaatggagccagctgaccaagactgggagcctctggaaacatctctaccctgtgcattgggcccgtggggactggtactccgggccagccaccgagctcgatactgaaccagatgacgaatgggtcaaaaaccgcaaggatgagtctagagcatttcacgagtgggatgaagatgcggacatagatgaatccgaggagagtgctgaggagtcaatagccatctcgatagcccaaatggagaaacgtcttctgcatggactgatacacaatgtgttaccttacgtggggacgtctgtgaagaccctcgttctggcctactcctcggcagtatctagcaaaatggtaaggcagattctggaactttgccccaacttggagcacctggacctcacacagacagacataagcgactctgcattcgattcctggtcatggcttggatgctgtcagagcctcagacacttagacctgtcagggtgcgaaaagattacagatgtcgcgttggagaaaatttctagagccttgggtattctgacttcccatcagtctggctttttgaagactagcacctctaagattacaagcactgcttggaagaacaaggatattaccatgcaatcaacaaagcagtatgcttgccttcatgatttgacaaataaaggcataggcgaagagatagacaacgagcacccatggaccaaacccgtgagctccgaaaatttcacgtctccctatgtgtggatgctggatgcggaagacctggcggacatcgaagataccgttgagtggaggcatcggaatgttgagtccctttgtgtcatggagacagcttccaacttttcttgctccacctcgggatgtttttccaaggacatagttggactgcgtacaagtgtatgttggcaacaacactgcgcatctcccgcgtttgcatattgcggccactccttctgctgcactggtactgcccttcgcaccatgagctcacttcctgaatcctccgccatgtgcaggaaggccgcgcggacacgcctcccacgagggaaagacttaatttatttcggatctgagaaaagcgatcaggaaacgggcagagtgctcctttttctctccctgtcaggctgctaccagattaccgatcacggcctgcgagtcctgactctgggcgggggtctgccgtacctagaacacctcaatctcagcggttgcctaaccatcactggcgcagggcttcaggatctcgtgtctgcctgccctagtcttaacgatgagtacttttactactgcgacaatattaacggaccccacgccgatacggctagcggatgccagaaccttcaatgcggatttcgggcttgctgcaggtccggcgagtag

SEQ ID NO: 74144 - DNA, 2025 bp, Artificial Sequence
  derived and/or modified sequence
atggctccgttccccgaagaggtggatgtcttcactgcgcctcattggcggatgaagcaattggttggattgtactgcgacaagtcgttgtatgcgaccttcaaagaatttaagatgcacgaacagattgagaacgagtatattatcggactgcttcagcagcgctcccagactatttataacgtgcacagcgataataaactgagcgaaatgctgagcctctttgaaaaaggactgaaaaacgtgaaaaatgagtacgagcaacttaattatgccaaacaactgaaagagcgactggaggcatttactcgtgatttcctgccacacatgaaggaagaggaggaagtattccagccaatgttgatggaatattttacatacgaggaactaaaagatattaaaaaaaaagtgatcgcccaacactgctcacagaaggacaccgcggagctactgagagggctatcactctggaatcatgctgaagagagacagaaattttttaagtacagcgtcgatgaaaaaagtgacaaagaggctgaggttagcgagcactccacaggtattacacacctgccaccagaggtcatgctaagcatcttcagttatctaaacccccaagagctgtgcagatgctcccaggtctctatgaaatggagccagcttaccaaaactgggtcactttggaaacacctctatccagtgcactgggcgcgcggagattggtactccggccccgccaccgagttagacacagagccagacgatgagtgggttaagaatagaaaggatgaatcccgggcctttcatgagtgggacgaagatgctgatattgatgagtccgaggagtccgccgaagagtccatcgcaatttccattgcccagatggaaaagcgactgttgcacgggttgatccataatgtcctgccctacgtgggcacgagcgttaagaccttagtgctggcttactcgtcagctgtgtctagtaaaatggtgagacagatactggagctgtgtccaaacctcgagcacttggatctgacccagactgacattagcgactctgcctttgattcctggtcttggctcggctgctgccagtcactgcggcacctcgacctctctggatgcgagaagatcactgacgtagctctcgaaaagataagccgagccctgggcatccttaccagtcaccagtcaggattcttgaaaacaagcacgtctaaaatcacttctaccgcctggaagaacaaggacataacgatgcagtccaccaaacagtacgcctgcctgcatgatctaacaaataaggggattggtgaagagatagataacgagcatccttggactaagcccgtgtcaagcgaaaatttcaccagcccctatgtgtggatgcttgatgcagaggaccttgccgacatcgaagacactgtagagtggaggcatagaaacgtggagtccctgtgtgtgatggagacggcctctaatttcagctgttccacgtctggatgtttcagcaaagacatcgtaggccttagaacttccgtgtgttggcagcagcactgcgcttcgcccgccttcgcttactgcggccactccttttgttgcaccgggacggccttacgcaccatgtcctctttgcccgaaagtagcgctatgtgtaggaaggcagccaggacccgcctgcccagaggcaaagacctgatctacttcggtagtgaaaaaagcgaccaagagaccggtagggttctactgttcctgtccctctcagggtgttaccagatcacagaccatggcctcagagtgctgaccctgggtggcggcctgccatacctggaacatctgaatctgagcggctgtcttaccatcacaggtgctggattgcaggatctggtttccgcctgtccgagcctgaatgacgagtacttctattactgtgacaatattaacggcccacacgctgataccgccagcggctgtcaaaaccttcagtgcggatttcgcgcttgttgcaggagtggtgaatag

SEQ ID NO: 74145 - DNA, 1698 bp, Artificial Sequence
  derived and/or modified sequence
atgaaggaggaggaggaggtgttccagcccatgctgatggagtacttcacctatgaggagctgaaggacatcaagaagaaggtgattgcccagcactgcagccagaaggacacagctgagctgctgcggggcctgagcctgtggaaccacgccgaggagcggcagaagttcttcaagtacagcgtggatgagaagagtgacaaggaggccgaggtgtctgagcacagcacaggcatcacccacctgcccccagaggtgatgctgagcatcttctcctacctgaacccccaggagctgtgccgctgcagccaggtgtccatgaagtggagccagctgaccaagacaggcagcctgtggaagcacctgtaccctgtgcactgggcccggggggactggtacagcggccctgccacagagctggacacagagccagatgatgagtgggtgaagaacaggaaggatgagagccgggccttccacgagtgggatgaagatgctgacattgatgaaagtgaggagagcgctgaggagagcatcgccatcagcatcgcccagatggagaagaggctgctgcacggcctcatccacaacgtgctgccctacgtgggcacctctgtgaagaccctggtgctggcctacagcagcgctgtgagcagcaagatggtgcggcagatcctggagctgtgccccaacctggagcacctggacctgacccagacagacatcagtgacagcgcctttgacagctggagctggctgggctgctgccagagcctgcggcacctggacctgagcggctgtgagaagatcacagatgtggccctggagaagatcagccgggccctgggcatcctgaccagccaccagagcggcttcctgaagaccagcaccagcaagatcaccagcacagcctggaagaacaaggacatcaccatgcagagcaccaagcagtatgcctgcctgcatgacctgaccaacaagggcattggagaggagattgacaatgagcacccctggaccaagcctgtgtcctctgagaacttcaccagcccctacgtgtggatgctggatgctgaggacctggccgacattgaagatactgtggagtggaggcacagaaatgtggagagcctgtgtgtgatggagacagccagcaacttcagctgcagcaccagcggctgcttcagcaaggacatcgtgggcctgcggacctctgtgtgctggcagcagcactgtgccagccctgcctttgcctactgcggccacagcttctgctgcacaggaacagccctgcggaccatgagcagcctgcctgagagcagcgccatgtgcaggaaggccgcccggacccggctgccccggggcaaggacctgatctactttggaagtgagaagagtgaccaggagaccggccgggtgctgctcttcctgagcctgagcggctgctaccagatcacagaccacggcctgcgggtgctgaccctgggcggcggcctgccctacctggagcacctgaacctgagcggctgcctgaccatcaccggggccggcctgcaggacctggtgtctgcctgccccagcctgaatgatgagtacttctactactgtgacaacatcaatggcccccacgccgacacagccagcggctgccagaacctgcagtgtggcttccgggcctgctgccgctctggagagtag

SEQ ID NO: 74146 - DNA, 2025 bp, Artificial Sequence
  derived and/or modified sequence
atggcccccttccctgaggaggtggatgtgttcaccgccccccactggaggatgaagcagctggtgggcctgtactgtgacaagagcctgtatgccaccttcaaggagttcaagatgcatgagcagattgaaaatgagtacatcatcggcctgctgcagcagaggagccagaccatctacaacgtgcacagcgacaacaagctgtctgagatgctgagcctgtttgagaagggcctgaagaatgtgaagaatgaatatgagcagctgaactatgccaagcagctgaaggagcggctggaggccttcacccgggacttcctgccccacatgaaggaggaggaggaggtgttccagcccatgctgatggagtacttcacctatgaggagctgaaggacatcaagaagaaggtgattgcccagcactgcagccagaaggacacagctgagctgctgcggggcctgagcctgtggaaccacgccgaggagcggcagaagttcttcaagtacagcgtggatgagaagagtgacaaggaggccgaggtgtctgagcacagcacaggcatcacccacctgcccccagaggtgatgctgagcatcttctcctacctgaacccccaggagctgtgccgctgcagccaggtgtccatgaagtggagccagctgaccaagacaggcagcctgtggaagcacctgtaccctgtgcactgggcccggggggactggtacagcggccctgccacagagctggacacagagccagatgatgagtgggtgaagaacaggaaggatgagagccgggccttccacgagtgggatgaagatgctgacattgatgagagcgaggagagcgctgaggagagcatcgccatcagcatcgcccagatggagaagaggctgctgcacggcctcatccacaacgtgctgccctacgtgggcacctctgtgaagaccctggtgctggcctacagcagcgctgtgagcagcaagatggtgcggcagatcctggagctgtgccccaacctggagcacctggacctgacccagacagacatcagtgacagcgcctttgacagctggagctggctgggctgctgccagagcctgcggcacctggacctgagcggctgtgagaagatcacagatgtggccctggagaagatcagccgggccctgggcatcctgaccagccaccagagcggcttcctgaagaccagcaccagcaagatcaccagcacagcctggaagaacaaggacatcaccatgcagagcaccaagcagtatgcctgcctgcatgacctgaccaacaagggcatcggggaggagattgacaatgagcacccctggaccaagcctgtgtcctctgagaacttcaccagcccctacgtgtggatgctggatgctgaggacctggccgacatcgaggacacagtggagtggaggcacagaaatgtggagagcctgtgtgtgatggagacagccagcaacttcagctgcagcaccagcggctgcttcagcaaggacatcgtgggcctgcggacctctgtgtgctggcagcagcactgtgccagccctgcctttgcctactgcggccacagcttctgctgcaccggcacagccctgcggaccatgagcagcctgcctgagagcagcgccatgtgcaggaaggccgcccggacccggctgccccggggcaaggacctgatctacttcggcagcgagaagagtgaccaggagaccggccgggtgctgctcttcctgagcctgagcggctgctaccagatcacagaccacggcctgcgggtgctgaccctgggcggcggcctgccctacctggagcacctgaacctgagcggctgcctgaccatcactggagctggcctgcaggacctggtgtctgcctgccccagcctgaatgatgagtacttctactactgtgacaacatcaatggcccccatgctgacacagccagcggctgccagaacctgcagtgtggcttccgggcctgctgccgcagcggggagtag

SEQ ID NO: 74147 - DNA, 1698 bp, Artificial Sequence
  derived and/or modified sequence
atgaaggaggaggaggaggtgttccagcccatgctgatggagtacttcacatatgaggaactgaaggatatcaagaaaaaggttatcgctcagcattgctctcagaaagacacagcagaattactccgtggcctgtctttatggaatcacgccgaggagaggcagaagttctttaagtattcagtcgacgaaaagtctgacaaggaggccgaagtgagtgaacacagcacaggcatcacgcatctgcccccagaggtgatgctgagcatcttttcctacctgaacccccaggagttgtgccgctgctcacaggttagcatgaagtggtcgcagttgacgaaaaccggctccttgtggaagcacctgtatcctgtccactgggcccgcggcgactggtactctggccccgcgaccgagctggatacagagccagatgacgagtgggtgaagaatcgtaaggacgaaagccgcgctttccacgaatgggatgaggatgctgatatagacgagtccgaggaaagcgccgaagagagtatcgccattagcattgcccagatggagaaacggctgctgcatggtcttatacataacgttctcccttatgtcggcaccagtgtcaaaacactggttcttgcgtatagtagtgctgtctcttcgaaaatggttcggcaaatcctggaactatgcccgaatttggaacatctagacttgacacagactgatataagcgactccgcctttgactcatggagctggttgggctgctgccaatcattaaggcacctggacctttcaggctgcgaaaaaattactgatgtggcactggaaaaaatctcaagagccctgggcattttgacctcccaccaatccggcttcttgaagacatccacctcgaaaattacaagcactgcttggaaaaacaaagacataaccatgcagagcactaaacagtatgcttgtctgcatgacttgaccaataagggtattggggaagagatcgataatgaacacccttggaccaagcccgtctcctctgagaacttcacatccccctacgtctggatgttggatgccgaagacctcgcagacatcgaggataccgtggaatggagacacagaaatgttgaatcattatgtgttatggaaactgcttctaatttcagttgttcaactagcgggtgcttcagcaaggacattgtgggactgcgaacctcagtgtgttggcagcaacactgcgcgtcccccgcattcgcgtactgtggccattcattttgctgtaccggcacagccttgaggacaatgtctagtctgcccgaatccagcgctatgtgcaggaaggctgcacgcacgaggctgccaagaggtaaggacctgatatattttggatcagagaagtctgatcaggagacaggccgcgttctgctgtttctttcactttctgggtgttatcaaataaccgatcatgggctgagggtcctcaccctgggcggtgggctcccctacctggaacatctgaatctcagcggttgtctgacaatcaccggggccgggttgcaagacctggtatcagcatgtccttcactgaatgatgaatatttctactattgtgataacattaacggtcctcacgcagacactgcatccggttgtcaaaacttgcaatgcggctttcgcgcttgctgccgctccggcgaatag

SEQ ID NO: 74148 - DNA, 2025 bp, Artificial Sequence
  derived and/or modified sequence
atggcccccttccccgaggaggtggacgtgttcaccgccccccactggaggatgaaacagctggtaggattatattgtgataagtccttgtacgccacattcaaagaatttaagatgcacgaacagattgagaacgaatacataatagggctgctgcagcagagaagccaaaccatctataatgtacactcagacaataagttaagtgaaatgctctctctgtttgagaaaggcctgaagaatgttaagaatgagtacgagcagttgaattacgccaagcaactcaaggagcgcctcgaggcttttactcgcgattttctcccccacatgaaggaggaggaagaagtctttcaacccatgctcatggagtacttcacatacgaggaactcaaagatattaagaagaaagtcatcgcacagcactgctcccagaaagatacagccgagctacttcgagggctaagcctgtggaatcacgctgaggagcggcagaaattttttaagtatagtgttgatgaaaaatcggataaggaagctgaggtgtctgaacactcaactggtatcactcacctccctccagaggtaatgctgagcatcttcagttacctcaacccccaggaattgtgcaggtgctcacaggtgtccatgaagtggagccaactcactaagacaggcagcctgtggaaacacctgtatccagtgcactgggcccgcggcgactggtactccgggcctgctaccgaattggataccgagccagatgatgaatgggtcaaaaatcggaaggacgagtcacgagcttttcatgagtgggacgaggatgcggacattgacgagagcgaggaatccgcagaggagtcaatcgcgatctctattgcacagatggagaagcggctgctgcatggcctgattcataatgtgcttccctacgtaggcacatccgtgaagaccctggtattagcgtattcctcagccgtgtccagtaagatggtgcgacaaatcctggaattgtgcccgaatctggaacacttggacttgacacaaaccgatattagtgactcagcatttgactcctggagctggcttggctgttgccagtccctccggcacctggatctgagcggatgcgaaaaaatcactgacgtggctctcgagaagatttccagagctctgggaatcctcacctcacaccagagcggctttctgaaaacaagcacctctaaaatcaccagtaccgcctggaagaataaagacatcacaatgcagtccacaaagcagtatgcctgtctgcatgacctcacgaataagggaatcggagaagaaatcgataatgagcatccctggacaaaacccgtctcttcagaaaactttaccagcccttatgtatggatgctcgatgctgaggacctggccgatattgaagatacagtggagtggcgccatcgcaatgtggagagtctgtgtgtgatggagaccgcatctaatttctcctgctcaacttccgggtgcttttctaaagatatcgtaggtctgcgaacctctgtgtgctggcagcagcactgcgcttcaccagctttcgcctactgcgggcattcattctgttgcactggaaccgccctgcgaactatgtcttccctgcctgaatctagcgcaatgtgcagaaaggccgccagaacacggctgccccgcgggaaggacctcatttatttcggctccgaaaagagtgatcaggaaactggtcgggtgctgttgttcttaagtctgtcgggctgctaccagattacggaccatggcctgcgcgtgcttactctgggggggggactaccgtacttagagcacctgaacctcagcggatgccttaccattaccggtgccggcctacaagacttagtgtcggcctgtccctccctaaacgacgagtacttctattactgcgataacatcaatggacctcatgcagataccgcttctgggtgtcagaatttacagtgcggcttccgagcctgctgcaggtcgggagaatag

SEQ ID NO: 74149 - DNA, 1698 bp, Artificial Sequence
  derived and/or modified sequence
atgaaagaggaggaagaggtatttcagcccatgctgatggaatattttacttacgaagagcttaaagatatcaagaagaaagtcatcgctcagcactgctcgcagaaggacacagcggaactgctccggggtctcagcctctggaaccatgcggaagagaggcagaagttcttcaaatattcagtggacgagaagtccgataaggaagccgaggttagcgaacattccactggaattacgcacctgccgcctgaagtaatgttgtctattttttcttacctgaacccacaagagctatgccggtgcagccaggtctcaatgaagtggtcccagcttacaaagactggaagcctctggaagcatctgtatcctgtgcactgggccaggggcgactggtactctgggcctgcaaccgaattagatacagaaccagatgacgagtgggttaagaatagaaaagacgaatcaagagcatttcatgaatgggacgaagacgccgatattgacgaaagcgaggaaagcgcagaagaatctatcgcgatctctatcgcgcagatggagaagcggctcctccatggtctgatccataacgttttgccatacgtcggtacctccgtcaaaacattagtgctggcatacagcagcgccgtttccagcaaaatggtgagacagattttggaactgtgcccaaatcttgagcacctggacctgacccagaccgatataagtgactccgctttcgatagttggtcttggcttggctgttgccagagccttcggcacctggacttgtccggctgtgaaaagatcacggatgtagcccttgaaaaaattagccgcgctttgggcatccttacatcccaccagagcggatttttaaaaacttccacaagcaaaataacaagtacagcttggaagaacaaggatattactatgcagtcaaccaaacaatacgcttgcttgcacgatctaaccaataagggcatcggcgaagaaatcgacaatgagcacccttggaccaaaccagtcagtagcgaaaatttcacctctccatacgtgtggatgctagatgcggaagacttggcagacatcgaagatacggtggagtggcgccacaggaacgtagaatccctgtgtgtgatggagacagcctctaacttctcttgtagtacgtccgggtgtttttccaaggatattgtgggtctcagaacttccgtgtgttggcaacagcactgcgcgagccctgcattcgcttattgtggccattctttctgctgcactggcaccgcactgcgcactatgagctcactgcctgagagcagtgccatgtgcaggaaagccgctcgcactcgactgccgagaggtaaagacctcatttacttcggttccgagaaatcagaccaggaaactgggagggtgctgttattcctgagcctgtcggggtgctaccagataaccgaccacggtctgcgcgttttgaccttgggaggaggcctgccatatctagaacacctgaatctgtccgggtgcctcacgatcactggcgcagggctccaggatctggtcagtgcctgcccgagcctcaatgatgaatacttttactattgtgacaacatcaacgggccacatgcagatactgcaagcggctgccaaaacctccagtgcggcttccgcgcttgctgccggagcggcgagtag

SEQ ID NO: 74150 - DNA, 2025 bp, Artificial Sequence
  derived and/or modified sequence
atggccccatttccagaagaggtcgacgtattcacggctcctcactggcggatgaaacagttggtggggctttattgcgacaagtctctgtatgcaacctttaaagagttcaagatgcacgaacagatcgagaatgagtacatcattggactgctgcagcagcgttcccagaccatctataacgtgcactctgacaataagttgagcgaaatgctgagcttattcgagaagggactgaaaaacgtgaaaaacgagtatgaacagctaaattacgctaaacaactgaaggaacgtttggaggcctttacgagggactttttgccacatatgaaagaggaagaagaagtcttccagccgatgctgatggagtactttacttatgaagagcttaaggacatcaagaaaaaggtgattgcacaacactgcagccagaaggacaccgccgagctgctgagaggtctgagcctgtggaaccatgccgaggagcgccagaagttctttaaatatagtgtggacgaaaagtccgataaagaagccgaggtgtcagagcattcaactgggataacgcacctcccacctgaggtcatgctctcaatctttagttacctgaacccccaggaattatgtaggtgcagtcaggtgtcaatgaaatggtcccagctgaccaaaacgggatccttgtggaagcacctctaccccgttcactgggctagaggggattggtactcgggtcccgctaccgaacttgatacagagcctgacgatgagtgggtgaaaaatcggaaggacgaatcgcgagcgtttcacgagtgggacgaggatgcagacattgacgagagcgaggagagtgccgaggagagtatcgctatctctatcgcacagatggaaaagcgactgctgcacggactgatccacaacgtgctcccgtacgtgggaacgtctgtcaaaacccttgtcctcgcatactccagtgccgtttctagtaagatggtcagacagatcttggaactctgtccgaaccttgagcacctggacctgacacaaacagatatctctgattctgccttcgattcctggtcatggctggggtgttgccagtcgctcagacatttggacctgtccggctgcgaaaagataacagacgtcgccctggagaagatctccagggccctggggatcctgaccagccatcagagtggattcctcaagactagtacttccaagatcacatccaccgcttggaagaataaggacattacaatgcagtccacaaaacagtatgcatgtcttcacgacctgacaaacaaggggatcggagaggaaatcgataacgagcacccctggactaaaccagtgtcatcagaaaactttacaagtccctacgtgtggatgctcgacgcagaggacctcgccgacatcgaagatactgtagaatggcggcataggaatgtcgaaagcctttgtgtgatggagacagcatctaattttagttgttcaacctccgggtgtttctcaaaagatatagttggtctgcggacgagtgtgtgctggcaacagcactgtgcctctccagcctttgcctattgcggacactccttttgttgtacgggcacagctttaaggactatgtccagtctacctgagtctagcgcaatgtgccggaaagccgctcggactcggttaccacgcggtaaagacctgatctattttggatcagaaaaaagcgatcaggaaaccggccgtgtactcctcttcttgagcttgagtggctgctaccagataacagatcatggcctccgcgtcctgacactggggggagggctcccatatcttgagcacctcaacctgtccggatgcctgacaatcacgggggcaggattgcaggacttggtgtctgcgtgtcccagcctcaacgatgaatacttttactattgtgataatattaacggaccgcacgctgataccgccagcggatgccagaatctccagtgtggcttccgggcttgttgtagatcaggcgagtag

SEQ ID NO: 74151 - DNA, 1698 bp, Artificial Sequence
  derived and/or modified sequence
atgaaggaggaggaggaggtgttccagcccatgctgatggagtacttcacctacgaggagctgaaggacatcaagaagaaggtgatcgcccagcactgcagccagaaggacaccgccgagctgctgagaggcctgagcctgtggaaccacgccgaggagagacagaagttcttcaagtacagcgtggacgagaagagcgacaaggaggccgaggtgagcgagcacagcaccggcatcacccacctgccccccgaggtgatgctgagcatcttcagctacctgaacccccaggagctgtgcagatgcagccaggtgagcatgaagtggagccagctgaccaagaccggcagcctgtggaagcacctgtaccccgtgcactgggccagaggcgactggtacagcggccccgccaccgagctggacaccgagcccgacgacgagtgggtgaagaacagaaaggacgagagcagagccttccacgagtgggacgaggacgccgacatcgacgagagcgaggagagcgccgaggagagcatcgccatcagcatcgcccagatggagaagagactgctgcacggcctgatccacaacgtgctgccctacgtgggcaccagcgtgaagaccctggtgctggcctacagcagcgccgtgagcagcaagatggtgagacagatcctggagctgtgccccaacctggagcacctggacctgacccagaccgacatcagcgacagcgccttcgacagctggagctggctgggctgctgccagagcctgagacacctggacctgagcggctgcgagaagatcaccgacgtggccctggagaagatcagcagagccctgggcatcctgaccagccaccagagcggcttcctgaagaccagcaccagcaagatcaccagcaccgcctggaagaacaaggacatcaccatgcagagcaccaagcagtacgcctgcctgcacgacctgaccaacaagggcatcggcgaggagatcgacaacgagcacccctggaccaagcccgtgagcagcgagaacttcaccagcccctacgtgtggatgctggacgccgaggacctggccgacatcgaggacaccgtggagtggagacacagaaacgtggagagcctgtgcgtgatggagaccgccagcaacttcagctgcagcaccagcggctgcttcagcaaggacatcgtgggcctgagaaccagcgtgtgctggcagcagcactgcgccagccccgccttcgcctactgcggccacagcttctgctgcaccggcaccgccctgagaaccatgagcagcctgcccgagagcagcgccatgtgcagaaaggccgccagaaccagactgcccagaggcaaggacctgatctacttcggcagcgagaagagcgaccaggagaccggcagagtgctgctgttcctgagcctgagcggctgctaccagatcaccgaccacggcctgagagtgctgaccctgggcggcggcctgccctacctggagcacctgaacctgagcggctgcctgaccatcaccggcgccggcctgcaggacctggtgagcgcctgccccagcctgaacgacgagtacttctactactgcgacaacatcaacggcccccacgccgacaccgccagcggctgccagaacctgcagtgcggcttcagagcctgctgcagaagcggcgagtag

SEQ ID NO: 74152 - DNA, 2025 bp, Artificial Sequence
  derived and/or modified sequence
atggcccccttccccgaggaggtggacgtgttcaccgccccccactggagaatgaagcagctggtgggcctgtactgcgacaagagcctgtacgccaccttcaaggagttcaagatgcacgagcagatcgagaacgagtacatcatcggcctgctgcagcagagaagccagaccatctacaacgtgcacagcgacaacaagctgagcgagatgctgagcctgttcgagaagggcctgaagaacgtgaagaacgagtacgagcagctgaactacgccaagcagctgaaggagagactggaggccttcaccagagacttcctgccccacatgaaggaggaggaggaggtgttccagcccatgctgatggagtacttcacctacgaggagctgaaggacatcaagaagaaggtgatcgcccagcactgcagccagaaggacaccgccgagctgctgagaggcctgagcctgtggaaccacgccgaggagagacagaagttcttcaagtacagcgtggacgagaagagcgacaaggaggccgaggtgagcgagcacagcaccggcatcacccacctgccccccgaggtgatgctgagcatcttcagctacctgaacccccaggagctgtgcagatgcagccaggtgagcatgaagtggagccagctgaccaagaccggcagcctgtggaagcacctgtaccccgtgcactgggccagaggcgactggtacagcggccccgccaccgagctggacaccgagcccgacgacgagtgggtgaagaacagaaaggacgagagcagagccttccacgagtgggacgaggacgccgacatcgacgagagcgaggagagcgccgaggagagcatcgccatcagcatcgcccagatggagaagagactgctgcacggcctgatccacaacgtgctgccctacgtgggcaccagcgtgaagaccctggtgctggcctacagcagcgccgtgagcagcaagatggtgagacagatcctggagctgtgccccaacctggagcacctggacctgacccagaccgacatcagcgacagcgccttcgacagctggagctggctgggctgctgccagagcctgagacacctggacctgagcggctgcgagaagatcaccgacgtggccctggagaagatcagcagagccctgggcatcctgaccagccaccagagcggcttcctgaagaccagcaccagcaagatcaccagcaccgcctggaagaacaaggacatcaccatgcagagcaccaagcagtacgcctgcctgcacgacctgaccaacaagggcatcggcgaggagatcgacaacgagcacccctggaccaagcccgtgagcagcgagaacttcaccagcccctacgtgtggatgctggacgccgaggacctggccgacatcgaggacaccgtggagtggagacacagaaacgtggagagcctgtgcgtgatggagaccgccagcaacttcagctgcagcaccagcggctgcttcagcaaggacatcgtgggcctgagaaccagcgtgtgctggcagcagcactgcgccagccccgccttcgcctactgcggccacagcttctgctgcaccggcaccgccctgagaaccatgagcagcctgcccgagagcagcgccatgtgcagaaaggccgccagaaccagactgcccagaggcaaggacctgatctacttcggcagcgagaagagcgaccaggagaccggcagagtgctgctgttcctgagcctgagcggctgctaccagatcaccgaccacggcctgagagtgctgaccctgggcggcggcctgccctacctggagcacctgaacctgagcggctgcctgaccatcaccggcgccggcctgcaggacctggtgagcgcctgccccagcctgaacgacgagtacttctactactgcgacaacatcaacggcccccacgccgacaccgccagcggctgccagaacctgcagtgcggcttcagagcctgctgcagaagcggcgagtag

SEQ ID NO: 74153 - protein, 641 aa, Artificial Sequence
  derived and/or modified sequence
MKGFGSDKEAILDIITSRSNRQRQEVCQSYKSLYGKDLIADLKYELTGKFERLIVGLMRPPAYCDAKEIKDAISGIGTDEKCLIEILASRTNEQMHQLVAAYKDAYERDLEADIIGDTSGHFQKMLVVLLQGTREEDDVVSEDLVQQDVQDLYEAGELKWGTDEAQFIYILGNRSKQHLRLVFDEYLKTTGKPIEASIRGELSGDFEKLMLAVVKCIRSTPEYFAERLFKAMKGLGTRDNTLIRIMVSRSELDMLDIREIFRTKYEKSLYSMIKNDTSGEYKKTLLKLSGGDDDAAGQFFPEAAQVAYQMWELSAVARVELKGTVRPANDFNPDADAKALRKAMKGLGTDEDTIIDIITHRSNVQRQQIRQTFKSHFGRDLMTDLKSEISGDLARLILGLMMPPAHYDAKQLKKAMEGAGTDEKALIEILATRTNAEIRAINEAYKEDYHKSLEDALSSDTSGHFRRILISLATGHREEGGENLDQAREDAQVAAEILEIADTPSGDKTSLETRFMTILCTRSYPHLRRVFQEFIKMTNYDVEHTIKKEMSGDVRDAFVAIVQSVKNKPLFFADKLYKSMKGAGTDEKTLTRIMVSRSEIDLLNIRREFIEKYDKSLHQAIEGDTSGDFLKALLALCGGED

SEQ ID NO: 74154 - protein, 547 aa, Artificial Sequence
  derived and/or modified sequence
MHQLVAAYKDAYERDLEADIIGDTSGHFQKMLVVLLQGTREEDDVVSEDLVQQDVQDLYEAGELKWGTDEAQFIYILGNRSKQHLRLVFDEYLKTTGKPIEASIRGELSGDFEKLMLAVVKCIRSTPEYFAERLFKAMKGLGTRDNTLIRIMVSRSELDMLDIREIFRTKYEKSLYSMIKNDTSGEYKKTLLKLSGGDDDAAGQFFPEAAQVAYQMWELSAVARVELKGTVRPANDFNPDADAKALRKAMKGLGTDEDTIIDIITHRSNVQRQQIRQTFKSHFGRDLMTDLKSEISGDLARLILGLMMPPAHYDAKQLKKAMEGAGTDEKALIEILATRTNAEIRAINEAYKEDYHKSLEDALSSDTSGHFRRILISLATGHREEGGENLDQAREDAQVAAEILEIADTPSGDKTSLETRFMTILCTRSYPHLRRVFQEFIKMTNYDVEHTIKKEMSGDVRDAFVAIVQSVKNKPLFFADKLYKSMKGAGTDEKTLTRIMVSRSEIDLLNIRREFIEKYDKSLHQAIEGDTSGDFLKALLALCGGED

SEQ ID NO: 74155 - DNA, 1926 bp, Artificial Sequence
  derived and/or modified sequence
atgaagggctttggctccgataaagaagcaatcctagatatcattacatccaggtccaatcgacagcggcaggaggtgtgtcagtcgtacaagtctctgtacggaaaagatctgatcgccgacctcaaatacgaactgactggaaaattcgaaagattgatcgtgggacttatgagacctccggcatactgcgacgccaaagaaatcaaggacgcgatttctggcattgggactgatgagaaatgtctcattgagatattagcctcacggacaaacgaacagatgcaccagcttgttgccgcctacaaagatgcctatgagagggatttggaggccgacattatcggcgacacttcagggcatttccaaaagatgcttgtcgtcctcctccagggaaccagggaggaagacgatgttgtgtcggaggatttggtgcagcaggacgttcaggatctttacgaagctggggagctgaagtggggaactgacgaggcccagttcatttacattctgggcaatcgctcgaaacagcacctgagactagtctttgatgaataccttaaaactactggcaagccaatcgaggcctccatccggggcgaactgtcaggagactttgaaaagctcatgttagcggttgttaagtgtatccggtcaacaccagagtacttcgcagagcggctgttcaaggctatgaaaggtctgggcaccagagacaacacactcattagaattatggtctccaggagcgaattagatatgctcgatatcagagagatatttagaaccaagtatgagaaaagtctctacagtatgatcaagaacgataccagtggagagtataagaagacactgctcaagctgtcgggcggggacgatgatgcagctggacagtttttcccggaagctgctcaggttgcataccagatgtgggagttgagcgccgtggcaagggtggaattgaagggcacagtgcgccctgcaaatgacttcaaccccgacgctgatgccaaggcgctgagaaaggccatgaagggactcggcactgacgaggatactatcatcgacattatcacccaccgtagcaatgtgcaacgccagcagatcaggcagacatttaagagccattttggtagagatcttatgacagatctgaagtccgaaatcagtggggacctggcccggcttatcctagggctcatgatgccccctgcccattacgatgcgaaacagctgaagaaagccatggagggtgccgggactgatgagaaggccctgatagagatcctcgccaccaggaccaacgcagaaatcagagctatcaacgaagcctacaaagaagactaccacaagtccctggaagacgctttatctagcgatacctcgggacacttccgccgcatcctgatcagtctagctacaggccaccgggaggagggcggtgaaaatttagaccaagcaagagaggacgctcaggtcgctgctgagatccttgagatcgctgatactccatctggagacaagactagcctggaaacccggttcatgaccatcctctgcactagaagctatcctcatctccgccgagtcttccaggagtttattaagatgaccaactacgatgttgaacacactataaagaaagagatgtcaggcgacgtgagggatgctttcgtagcaatagttcaatccgtcaaaaacaaacccctgtttttcgccgataaattatacaagtccatgaagggagccggcacagatgaaaagaccctgacaagaatcatggtgtcacgctcggaaatcgatttgctcaacatccggcgggagttcatcgaaaagtacgacaagagcctccatcaagcaattgaaggggacacatccggagattttctcaaagcattactggcgctgtgtggcggagaggattag

SEQ ID NO: 74156 - DNA, 1644 bp, Artificial Sequence
  derived and/or modified sequence
atgcaccagcttgtcgcggcgtacaaggacgcctatgaacgagacctggaagccgacataattggcgacaccagtggccattttcagaagatgctggtcgttctgctgcagggtactagggaggaagatgacgtagtttccgaagacctggtccagcaggacgttcaggacctgtatgaggcgggcgagttgaagtggggtactgacgaagcgcagtttatttatattctcgggaacaggagcaaacagcacctgcgcctggtgtttgatgagtacctaaaaaccaccggcaagcccattgaagcctccatccggggcgaactgtctggggattttgaaaaattgatgctggctgtcgttaaatgcattcggtcgacacctgagtattttgctgaaaggctattcaaggccatgaagggattgggtacgagggataataccttaatccgaatcatggtgtcccgctccgagctggatatgttagacatccgtgagatcttccgcactaagtacgaaaaatctttgtatagcatgattaagaacgatacgtcaggggaatacaagaagaccctgttaaaactgtctggcggagacgacgacgccgcaggtcaattttttcctgaagccgcgcaggttgcttatcagatgtgggaactgtctgccgtggcgagagtggagcttaaagggaccgtgcggcctgctaacgacttcaatcccgacgcagatgctaaagctctgagaaaggcaatgaaaggtttgggcaccgacgaggacactattatcgatattattacacacagaagcaatgtacagcggcaacaaatacgccagaccttcaaatcccactttggcagagacctcatgacagacctgaagagcgagatcagcggcgacctcgctaggctgatcctggggttgatgatgcctccagcccactatgacgcaaagcagctaaagaaggccatggagggagccgggacagacgaaaaagcactgattgagattcttgccacaaggacaaatgctgagatacgagccataaatgaggcatacaaggaggattatcacaagtcgttggaggatgccctgagttcagacaccagtggccactttaggagaattctgatatcactcgccactggccaccgagaagagggcggtgagaatctggatcaagccagagaggatgcccaagttgccgccgagatcctggagatagcggataccccatcgggggataagacatccctagagactcggtttatgacgattctgtgcaccaggtcttacccacaccttaggcgcgtgttccaagagtttattaagatgaccaactacgatgtcgaacatacaattaagaaggagatgtccggcgatgtgagggacgcttttgtggcgatagtgcagagcgtgaaaaataaacctttgtttttcgccgacaagctctacaagtctatgaagggagccggcacggatgaaaaaacgctcacccgcataatggtgagtcgctcagagattgacctcctcaacattcgcagggagttcatcgagaagtacgacaagagtctgcaccaagccatcgagggcgacaccagtggggacttcctcaaagcgctcctggctctctgtgggggcgaggattag

SEQ ID NO: 74157 - DNA, 1926 bp, Artificial Sequence
  derived and/or modified sequence
atgaagggcttcggcagtgacaaggaggccatcctggacatcatcaccagccgcagcaaccggcagaggcaggaggtgtgccagagctacaagagcctgtatggcaaggacctgattgctgacctgaagtatgagctgaccgggaagtttgagcggctcatcgtgggcctgatgaggcccccagcctactgtgatgccaaggagatcaaggatgccatcagcggcatcggcacagatgagaagtgcctgattgagatcctggccagcaggaccaatgagcagatgcaccagctggtggccgcctacaaggatgcctatgaaagagacctggaggccgacatcattggagacaccagcggccacttccagaagatgctggtggtgctgctgcagggcacccgggaggaggatgatgtggtgtctgaggacctggtgcagcaggatgtgcaggacctgtatgaagctggggagctgaagtggggcacagatgaggcccagttcatctacatcctgggcaacagaagcaagcagcacctgcggctggtgtttgatgagtacctgaagaccaccgggaagcccatcgaggccagcatccggggggagctgagcggggactttgagaagctgatgctggccgtggtgaagtgcatccgcagcaccccagagtactttgctgagcggctcttcaaggccatgaagggcctgggcacccgggacaacaccctcatccgcatcatggtgagccgctctgagctggacatgctggacatccgggagatcttccgcaccaagtatgagaagagcctgtacagcatgatcaagaatgacaccagcggggagtacaagaagaccctgctgaagctgtctggaggagatgatgatgctgctggccagttcttccctgaggccgcccaggtggcctaccagatgtgggagctgtctgctgtggcccgggtggagctgaagggcaccgtgcggcctgccaatgacttcaacccagatgctgatgccaaggccctgaggaaggccatgaagggcctgggcacagatgaggacaccatcatcgacatcatcacccacaggagcaatgtgcagaggcagcagatccggcagaccttcaagagccacttcggccgggacctgatgacagacctgaagtctgagatcagcggggacctggcccggctcatcctgggcctgatgatgcccccagcccactatgatgccaagcagctgaagaaggccatggagggcgccggcacagatgagaaggccctgattgagatcctggccaccaggaccaatgctgagatccgggccatcaatgaggcctacaaggaggactaccacaagagcctggaggatgccctgagcagtgacaccagcggccacttccgccgcatcctgatcagcctggccaccggccaccgggaggagggcggggagaacctggaccaggccagagaagatgcccaggtggccgctgagatcctggagattgctgacaccccatctggggacaagaccagcctggagacccgcttcatgaccatcctgtgcaccaggagctacccccacctgcggcgggtcttccaggagttcatcaagatgaccaactatgatgtggagcacaccatcaagaaggagatgtctggagatgtgagagatgcctttgtggccatcgtgcagagcgtgaagaacaagcccctcttctttgctgacaagctgtacaagtccatgaagggagctggaacagatgagaagaccctgacccgcatcatggtgagccgctcagaaattgacctgctgaacatccggcgggagttcatcgagaagtatgacaagagcctgcaccaggccattgaaggagacaccagcggggacttcctgaaggccctgctggccctgtgtggcggggaggactag

SEQ ID NO: 74158 - DNA, 1644 bp, Artificial Sequence
  derived and/or modified sequence
atgcaccagctggtggccgcctacaaggatgcctatgaaagagacctggaggccgacatcattggagacaccagcggccacttccagaagatgctggtggtgctgctgcagggcacccgggaggaggatgatgtggtgtctgaggacctggtgcagcaggatgtgcaggacctgtatgaagctggggagctgaagtggggcacagatgaggcccagttcatctacatcctgggcaacagaagcaagcagcacctgcggctggtgtttgatgagtacctgaagaccaccgggaagcccatcgaggccagcatccggggggagctgagcggggactttgagaagctgatgctggccgtggtgaagtgcatccgcagcaccccagagtactttgctgagcggctcttcaaggccatgaagggcctgggcacccgggacaacaccctcatccgcatcatggtgagccgctctgagctggacatgctggacatccgggagatcttccgcaccaagtatgagaagagcctgtacagcatgatcaagaatgacaccagcggggagtacaagaagaccctgctgaagctgtctggaggagatgatgatgctgctggccagttcttccctgaggccgcccaggtggcctaccagatgtgggagctgtctgctgtggcccgggtggagctgaagggcaccgtgcggcctgccaatgacttcaacccagatgctgatgccaaggccctgaggaaggccatgaagggcctgggcacagatgaggacaccatcatcgacatcatcacccacaggagcaatgtgcagaggcagcagatccggcagaccttcaagagccacttcggccgggacctgatgacagacctgaagtctgagatcagcggggacctggcccggctcatcctgggcctgatgatgcccccagcccactatgatgccaagcagctgaagaaggccatggagggcgccggcacagatgagaaggccctgattgagatcctggccaccaggaccaatgctgagatccgggccatcaatgaggcctacaaggaggactaccacaagagcctggaggatgccctgagcagtgacaccagcggccacttccgccgcatcctgatcagcctggccaccggccaccgggaggagggcggggagaacctggaccaggccagagaagatgcccaggtggccgctgagatcctggagattgctgacaccccatctggggacaagaccagcctggagacccgcttcatgaccatcctgtgcaccaggagctacccccacctgcggcgggtcttccaggagttcatcaagatgaccaactatgatgtggagcacaccatcaagaaggagatgtctggagatgtgagagatgcctttgtggccatcgtgcagagcgtgaagaacaagcccctcttctttgctgacaagctgtacaagtccatgaagggagctggaacagatgagaagaccctgacccgcatcatggtgagccgctcagaaattgacctgctgaacatccggcgggagttcatcgagaagtatgacaagagcctgcaccaggccattgaaggagacaccagcggggacttcctgaaggccctgctggccctgtgtggcggggaggactag

SEQ ID NO: 74159 - DNA, 1926 bp, Artificial Sequence
  derived and/or modified sequence
atgaagggcttcggcagcgacaaggaggccatcctggacatcatcacatcccggagcaacaggcagagacaggaagtgtgtcaatcctacaagagtctctacggcaaagacctgatcgccgatctgaagtatgagctgaccggtaagttcgaacgactgattgtcggcttgatgaggcccccggcttactgtgatgccaaggaaatcaaggacgctatcagcggaatcggaaccgatgaaaagtgtctgatcgagatcctcgccagcagaactaatgagcagatgcatcagctggtcgccgcatacaaggacgcctacgaaagggacttagaggccgacattatcggagatactagtggtcattttcagaagatgctggttgttctgctgcaaggaacaagagaagaggacgacgtggtctcagaagaccttgtccagcaggacgtgcaggacttatatgaagccggtgagctgaagtggggaacggacgaagcccagttcatctatatcctcggaaacaggtccaaacagcatctgcggttggtcttcgacgaatatctgaaaacgacagggaaacccatcgaggcctcaatccggggagaattatctggggacttcgagaaacttatgctggcagtggtcaaatgtatcagatccactccggaatacttcgctgaacggctcttcaaggccatgaagggactcggcacccgagacaacactctgatacggatcatggttagccggtcagaacttgacatgctcgacattagggagatctttcgtaccaagtatgagaagagtctgtatagcatgatcaagaacgacacgagtggagagtataagaagacattgctaaaacttagcggcggggacgatgatgccgcaggacagtttttccccgaggccgcacaggtagcctatcaaatgtgggaactcagtgctgtcgcgcgcgtggagctgaaagggaccgtgcggcccgcaaatgatttcaatccagacgctgacgcaaaagcattgcgcaaagcgatgaagggcctaggaacagacgaggacaccatcatcgacatcattacacatcgttccaacgtccagagacagcagatccgccagacctttaaaagtcattttgggagggacctgatgacagaccttaaaagcgagattagcggggatctggcgcgactcattctcggccttatgatgccccccgcccactatgatgctaagcagctgaagaaagccatggagggtgcaggcactgacgaaaaagctctgatcgagatccttgccacccggactaacgctgagattcgggccatcaacgaagcctataaggaagactatcataaatccctggaagatgctctgagtagcgacacctcaggtcatttcagacgtattttgatttcactcgcaaccgggcaccgtgaagaagggggagagaatcttgaccaggccagggaagatgcacaggttgctgccgagatactcgagattgccgatacccccagcggagacaaaaccagcttagaaacacggtttatgaccatcttatgcacgaggagttatccgcatctgagacgggtgttccaggagttcattaaaatgactaattacgatgtggaacacactatcaaaaaggagatgtccggggatgttcgcgatgccttcgtggccattgtgcagtccgtgaaaaataagccactcttctttgctgataaactgtataagtccatgaaaggcgcaggaactgacgaaaaaactctgacacggattatggtaagtaggtccgagatcgacctattaaacataagaagggaattcatcgaaaaatatgacaaaagcctgcaccaggcaattgagggtgacacttctggagatttcctaaaggcgctgctggccttatgcggcggagaggattag

SEQ ID NO: 74160 - DNA, 1644 bp, Artificial Sequence
  derived and/or modified sequence
atgcaccagctggtggccgcctacaaggacgcctacgagcgggacctcgaagctgacatcatcggggatacttccggtcacttccagaaaatgcttgtcgtcctgctgcagggaacacgcgaagaggacgatgtcgtgtccgaggatttagttcagcaggacgtccaggacttgtacgaggctggggaactgaagtggggcaccgacgaggctcaatttatttatatcttaggaaaccggtccaagcagcacctgcgacttgttttcgatgaatacctgaagaccacagggaagccaatcgaggctagcattcgcggcgagctcagtggggactttgagaagctgatgttggctgtcgtcaagtgtattaggtccacccccgaatatttcgccgagcggttgtttaaggcgatgaaaggcttgggcactagggataatacactgattagaataatggttagtaggtcagaattagatatgctggatattcgagagattttccgcaccaaatacgagaagtcactgtattctatgatcaagaacgacacctccggagaatacaagaaaacactcctcaaactgtctggtggcgatgacgacgccgctggacagttttttccagaagccgctcaggtcgcctaccagatgtgggaactcagcgcagtggcccgggtggaattaaagggcactgtgcggccagctaatgatttcaacccagatgccgatgcgaaggccctgcggaaagccatgaagggattagggaccgacgaggataccatcattgacattatcacgcacagatccaatgtacagcgtcagcagatccgtcagactttcaagagccacttcggacgtgatctgatgaccgatctcaagtccgaaattagtggagaccttgcacggctcattctaggcttaatgatgcctccggctcattacgatgctaagcaactgaagaaagcgatggagggagccggcacagacgaaaaggccctcatcgagatactcgctacaagaactaatgcggaaattcgagccatcaacgaggcatataaggaagactaccacaaatcactggaagacgctctgagcagtgatacgagtggacacttccggagaatcctgatttcattggcgaccggccatcgcgaggaaggaggggaaaacctagatcaggcgcgggaagatgctcaggtagcagctgagattttggaaatcgctgacaccccaagcggcgataaaacatcactggagactcggttcatgacaattctgtgcacacgctcttacccacatttgaggcgagtgttccaggagtttatcaaaatgaccaattacgatgtggagcacactattaagaaggagatgagtggtgatgtccgcgacgcctttgtcgctatcgtgcaatccgtcaaaaacaagccgctattctttgccgataaactatataaaagtatgaaaggtgcgggtactgacgagaaaaccctaactcgcatcatggtgtccagatctgaaatcgatttgcttaatatcaggagggaatttatcgagaaatacgacaagtccctccatcaggcgattgagggggacacaagcggcgatttcctaaaggcattgcttgctctgtgcggtggtgaagactag

SEQ ID NO: 74161 - DNA, 2013 bp, Artificial Sequence
  derived and/or modified sequence
aacgggctccgatccagcgagcgctgcgtcctcgagtccctgcgcccgtgcgtccgtctgcgacccgaggcctccgctgcgcgtggattctgctgcgaaccggagaccatggccaaaccagcacagggtgccaagtaccggggctccatccatgacttcccaggctttgaccccaaccaggatgccgaggctctgtacactgccatgaagggctttggcagtgacaaggaggccatactggacataatcacctcacggagcagatgcaccagctggtggcagcatacaaagatgcctacgagcgggacctggaggctgacatcatcggcgacacctctggccacttccagaagatgcttgtggtcctgctccagggaaccagggaggaggatgacgtagtgagcgaggacctggtacaacaggatgtccaggacctatacgaggcaggggaactgaaatggggaacagatgaagcccagttcatttacatcttgggaaatcgcagcaagcagcatcttcggttggtgttcgatgagtatctgaagaccacagggaagccgattgaagccagcatccgaggggagctgtctggggactttgagaagctaatgctggccgtagtgaagtgtatccggagcaccccggaatattttgctgaaaggctcttcaaggctatgaagggcctggggactcgggacaacaccctgatccgcatcatggtctcccgtagtgagttggacatgctcgacattcgggagatcttccggaccaagtatgagaagtccctctacagcatgatcaagaatgacacctctggcgagtacaagaagactctgctgaagctgtctgggggagatgatgatgctgctggccagttcttcccggaggcagcgcaggtggcctatcagatgtgggaacttagtgcagtggcccgagtagagctgaagggaactgtgcgcccagccaatgacttcaaccctgacgcagatgccaaagcgctgcggaaagccatgaagggactcgggactgacgaagacacaatcatcgatatcatcacgcaccgcagcaatgtccagcggcagcagatccggcagaccttcaagtctcactttggccgggacttaatgactgacctgaagtctgagatctctggagacctggcaaggctgattctggggctcatgatgccaccggcccattacgatgccaagcagttgaagaaggccatggagggagccggcacagatgaaaaggctcttattgaaatcctggccactcggaccaatgctgaaatccgggccatcaatgaggcctataaggaggactatcacaagtccctggaggatgctctgagctcagacacatctggccacttcaggaggatcctcatttctctggccacggggcatcgtgaggagggaggagaaaacctggaccaggcacgggaagatgcccaggtggctgctgagatcttggaaatagcagacacacctagtggagacaaaacttccttggagacacgtttcatgacgatcctgtgtacccggagctatccgcacctccggagagtcttccaggagttcatcaagatgaccaactatgacgtggagcacaccatcaagaaggagatgtctggggatgtcagggatgcatttgtggccattgttcaaagtgtcaagaacaagcctctcttctttgccgacaaactttacaaatccatgaagggtgctggcacagatgagaagactctgaccaggatcatggtatcccgcagtgagattgacctgctcaacatccggagggaattcattgagaaatatgacaagtctctccaccaagccattgagggtgacacctccggagacttcctgaaggccttgctggctctctgtggtggtgaggactagggccacagctttggcgggcacttctgccaagaaatggttatcagcaccagccgccatggccaagcctgattgttccagctccagagactaaggaaggggcaggggt

SEQ ID NO: 74162 - DNA, 1926 bp, Artificial Sequence
  derived and/or modified sequence
atgaaaggcttcggctccgacaaggaagcaattctggatatcatcaccagcaggtcgaataggcagaggcaggaagtatgtcagtcctacaagtctctgtacgggaaagatctgatagctgatctaaagtatgagttaacaggaaaattcgaaagattgatagtggggttgatgcggcctccagcatactgcgacgccaaggaaataaaggacgctatctccgggatcggcacggatgaaaagtgcctgatcgaaatactcgccagtagaacaaacgagcagatgcaccagctggtggccgcttataaagacgcctatgagcgggacctggaggcagacattattggcgacacttcaggacactttcaaaagatgttggtcgtcctgttgcaagggacaagagaagaagatgatgttgtttccgaggatttggtacagcaggatgtccaggacctctacgaagctggggaactcaagtggggcactgacgaagctcagttcatctacatcctaggaaaccgctcaaagcaacatctacggctggtgttcgatgagtaccttaaaaccaccgggaagccgatcgaagcttccattagaggggagctgagtggggactttgagaagctcatgctcgcagtcgtgaagtgtatccgctctacaccggagtattttgctgaacgtttgttcaaggcaatgaaagggctcggcacccgggataatacactgattcggataatggtttcgagatctgaattagacatgctggacatccgcgagatcttccgaactaagtacgaaaaaagcctgtacagcatgattaagaatgacactagcggcgagtacaagaaaacgctgttgaagcttagcggcggagacgacgacgccgcaggccagttctttcctgaggctgcccaagttgcgtatcagatgtgggagctgtccgccgtggctagagttgagctgaaaggcaccgtgcgtcctgcaaatgatttcaatccggacgcggacgccaaggctttgaggaaggcaatgaaggggcttggaacagatgaggatactattatcgatattattactcacagaagcaacgtgcagcgccagcagatacgccagactttcaagagccattttgggagggatctcatgactgatctgaagtcagagatcagtggagacctggcacggctgatcctagggctgatgatgcctccggcacattatgacgccaaacagctgaaaaaggctatggagggggctggaacagatgaaaaggccctcatagaaatcctggctacgcgaactaacgccgagatcagagcaataaatgaagcctacaaagaggactaccataagagcctggaggatgcgctttcgagcgataccagcggccattttcgtcggatcttaatctccttagcaacaggtcacagggaagaggggggagagaatttggaccaggcccgtgaggacgcgcaggtagcggctgaaatcctcgagatcgcagacacaccttccggagataagacttctctagagactcgctttatgaccatcctgtgcacgcggagctacccacacttgcggagggtttttcaggagttcatcaaaatgaccaactacgacgtcgaacatacaattaagaaggagatgtcaggagacgttagggacgcatttgtggcgattgtacaatctgttaaaaataaaccgctgttcttcgcagacaagctatacaagagcatgaagggcgcagggaccgatgagaagaccctgacacggatcatggtgtctagatccgagattgacctgttaaatattagacgggaattcatcgagaagtacgataagtcactccaccaagctattgagggtgatacaagcggggattttctgaaggccttactggcactgtgtggcggagaggactag

SEQ ID NO: 74163 - DNA, 1644 bp, Artificial Sequence
  derived and/or modified sequence
atgcatcagctggtggcggcatataaagacgcatatgagcgcgacctcgaggcagatatcatcggggataccagcggccattttcagaagatgctggttgttctcctacaggggacacgggaagaggatgacgtcgtatcggaggatcttgtccaacaagacgtacaagatctctacgaggccggagagctgaagtgggggaccgacgaagctcaattcatttatatcttgggcaataggagcaaacagcacctgagactcgtatttgatgagtatttgaagaccactgggaaacctattgaagcctcaatccgcggagaacttagtggcgactttgaaaagcttatgttagccgtggttaagtgcataagatctacccccgagtatttcgcggagagactattcaaggcgatgaaaggccttggcacccgggacaacacactgattcgaattatggtatcaaggagcgagttagatatgctcgacattagagagatcttccgtaccaagtatgaaaaatcactgtattcaatgatcaagaacgacaccagcggcgagtacaagaaaacccttctgaaattatccggaggcgatgacgatgcggctggtcaattttttccagaggctgcccaggtggcctaccagatgtgggagcttagcgccgtggcacgcgtggagctcaaaggaacagtgcggccagccaatgatttcaatcctgatgctgacgccaaagctctgcgaaaggctatgaaagggctcgggaccgacgaagatacgataatcgatattatcacacacagaagtaacgtacagaggcagcaaattcgtcaaactttcaaatctcattttggcagggatctcatgacagatttaaagagtgagatttcaggagacctggcccgacttatcctcggccttatgatgccgcctgctcattacgatgctaaacagttaaaaaaggctatggaaggcgcaggcaccgacgaaaaggctctgattgagatcttggcgacacgcaccaatgctgaaatacgcgcaataaatgaggcttataaggaagattaccacaaaagcctggaagacgctctgagttccgacacatctggccacttcagaaggattctaatctctctcgcaaccggacacagggaggagggtggcgagaatcttgaccaggctagggaagacgcccaggtggcagccgagatcctggaaattgctgacacaccttcgggggacaaaaccagcctggagaccaggttcatgacgatcttgtgcacaagatcatacccacacctgcgccgtgtgttccaggagtttattaaaatgactaactacgatgtcgaacataccatcaaaaaggaaatgtcgggcgatgtccgagacgctttcgtagccatcgtccagagtgtcaaaaacaagccattgttttttgccgacaaactgtacaagtccatgaaaggcgcaggaacagacgagaagaccctgactagaatcatggtcagccgttctgaaatcgatctgctcaatattcggcgagaattcatcgagaagtacgacaaaagcttgcaccaggcaatcgaaggcgatacctctggagacttcctgaaggccctgctggccttatgtggaggggaagattag

SEQ ID NO: 74164 - DNA, 1926 bp, Artificial Sequence
  derived and/or modified sequence
atgaagggcttcggcagcgacaaggaggccatcctggacatcatcaccagcagaagcaacagacagagacaggaggtgtgccagagctacaagagcctgtacggcaaggacctgatcgccgacctgaagtacgagctgaccggcaagttcgagagactgatcgtgggcctgatgagaccccccgcctactgcgacgccaaggagatcaaggacgccatcagcggcatcggcaccgacgagaagtgcctgatcgagatcctggccagcagaaccaacgagcagatgcaccagctggtggccgcctacaaggacgcctacgagagagacctggaggccgacatcatcggcgacaccagcggccacttccagaagatgctggtggtgctgctgcagggcaccagagaggaggacgacgtggtgagcgaggacctggtgcagcaggacgtgcaggacctgtacgaggccggcgagctgaagtggggcaccgacgaggcccagttcatctacatcctgggcaacagaagcaagcagcacctgagactggtgttcgacgagtacctgaagaccaccggcaagcccatcgaggccagcatcagaggcgagctgagcggcgacttcgagaagctgatgctggccgtggtgaagtgcatcagaagcacccccgagtacttcgccgagagactgttcaaggccatgaagggcctgggcaccagagacaacaccctgatcagaatcatggtgagcagaagcgagctggacatgctggacatcagagagatcttcagaaccaagtacgagaagagcctgtacagcatgatcaagaacgacaccagcggcgagtacaagaagaccctgctgaagctgagcggcggcgacgacgacgccgccggccagttcttccccgaggccgcccaggtggcctaccagatgtgggagctgagcgccgtggccagagtggagctgaagggcaccgtgagacccgccaacgacttcaaccccgacgccgacgccaaggccctgagaaaggccatgaagggcctgggcaccgacgaggacaccatcatcgacatcatcacccacagaagcaacgtgcagagacagcagatcagacagaccttcaagagccacttcggcagagacctgatgaccgacctgaagagcgagatcagcggcgacctggccagactgatcctgggcctgatgatgccccccgcccactacgacgccaagcagctgaagaaggccatggagggcgccggcaccgacgagaaggccctgatcgagatcctggccaccagaaccaacgccgagatcagagccatcaacgaggcctacaaggaggactaccacaagagcctggaggacgccctgagcagcgacaccagcggccacttcagaagaatcctgatcagcctggccaccggccacagagaggagggcggcgagaacctggaccaggccagagaggacgcccaggtggccgccgagatcctggagatcgccgacacccccagcggcgacaagaccagcctggagaccagattcatgaccatcctgtgcaccagaagctacccccacctgagaagagtgttccaggagttcatcaagatgaccaactacgacgtggagcacaccatcaagaaggagatgagcggcgacgtgagagacgccttcgtggccatcgtgcagagcgtgaagaacaagcccctgttcttcgccgacaagctgtacaagagcatgaagggcgccggcaccgacgagaagaccctgaccagaatcatggtgagcagaagcgagatcgacctgctgaacatcagaagagagttcatcgagaagtacgacaagagcctgcaccaggccatcgagggcgacaccagcggcgacttcctgaaggccctgctggccctgtgcggcggcgaggactag

SEQ ID NO: 74165 - DNA, 1644 bp, Artificial Sequence
  derived and/or modified sequence
atgcaccagctggtggccgcctacaaggacgcctacgagagagacctggaggccgacatcatcggcgacaccagcggccacttccagaagatgctggtggtgctgctgcagggcaccagagaggaggacgacgtggtgagcgaggacctggtgcagcaggacgtgcaggacctgtacgaggccggcgagctgaagtggggcaccgacgaggcccagttcatctacatcctgggcaacagaagcaagcagcacctgagactggtgttcgacgagtacctgaagaccaccggcaagcccatcgaggccagcatcagaggcgagctgagcggcgacttcgagaagctgatgctggccgtggtgaagtgcatcagaagcacccccgagtacttcgccgagagactgttcaaggccatgaagggcctgggcaccagagacaacaccctgatcagaatcatggtgagcagaagcgagctggacatgctggacatcagagagatcttcagaaccaagtacgagaagagcctgtacagcatgatcaagaacgacaccagcggcgagtacaagaagaccctgctgaagctgagcggcggcgacgacgacgccgccggccagttcttccccgaggccgcccaggtggcctaccagatgtgggagctgagcgccgtggccagagtggagctgaagggcaccgtgagacccgccaacgacttcaaccccgacgccgacgccaaggccctgagaaaggccatgaagggcctgggcaccgacgaggacaccatcatcgacatcatcacccacagaagcaacgtgcagagacagcagatcagacagaccttcaagagccacttcggcagagacctgatgaccgacctgaagagcgagatcagcggcgacctggccagactgatcctgggcctgatgatgccccccgcccactacgacgccaagcagctgaagaaggccatggagggcgccggcaccgacgagaaggccctgatcgagatcctggccaccagaaccaacgccgagatcagagccatcaacgaggcctacaaggaggactaccacaagagcctggaggacgccctgagcagcgacaccagcggccacttcagaagaatcctgatcagcctggccaccggccacagagaggagggcggcgagaacctggaccaggccagagaggacgcccaggtggccgccgagatcctggagatcgccgacacccccagcggcgacaagaccagcctggagaccagattcatgaccatcctgtgcaccagaagctacccccacctgagaagagtgttccaggagttcatcaagatgaccaactacgacgtggagcacaccatcaagaaggagatgagcggcgacgtgagagacgccttcgtggccatcgtgcagagcgtgaagaacaagcccctgttcttcgccgacaagctgtacaagagcatgaagggcgccggcaccgacgagaagaccctgaccagaatcatggtgagcagaagcgagatcgacctgctgaacatcagaagagagttcatcgagaagtacgacaagagcctgcaccaggccatcgagggcgacaccagcggcgacttcctgaaggccctgctggccctgtgcggcggcgaggactag

SEQ ID NO: 74166 - protein, 193 aa, Artificial Sequence
  derived and/or modified sequence
MPNWGGGKKCGVCQKTVYFAEEVQCEGNSFHKSCFLCMVCKKNLDSTTVAVHGEEIYCKSCYGKKYGPKGYGYGQGAGTLSTDKGESLGIKHEEAPGHRPTTNPNASKFAQKIGGSERCPRCSQAVYAAEKVIGAGKSWHKACFRCAKCGKGLESTTLADKDGEIYCKGCYAKNFGPKGFGFGQGAGALVHSE

SEQ ID NO: 74167 - protein, 170 aa, Artificial Sequence
  derived and/or modified sequence
MPNWGGGKKCGVCQKTVYFAEEVQCEGNSFHKSCFLCMVCKKNLDSTTVAVHGEEIYCKSCYGKKYGPKGYGYGQGAGTNPNASKFAQKIGGSERCPRCSQAVYAAEKVIGAGKSWHKACFRCAKCGKGLESTTLADKDGEIYCKGCYAKNFGPKGFGFGQGAGALVHSE

SEQ ID NO: 74168 - DNA, 1970 bp, Artificial Sequence
  derived and/or modified sequence
ggagggcagcaccgccgggcttcgcgccatgacatcagccctggagtggtgcagtgtgcaaagcccactggttggcgtggcccgggacacgccttccgcggagcggaacaaaacggcgcgcaggccgggcgcacccagccgccacttccgagagcgcctgccgcccctgcgccgccgagccagctgccagaatgccgaactggggaggaggcaagaaatgtggggtgtgtcagaagacggtttactttgccgaagaggttcagtgcgaaggcaacagcttccataaatcctgcttcctgtgcatggtctgcaagaagaatctggacagtaccactgtggccgtgcatggtgaggagatttactgcaagtcctgctacggcaagaagtatgggcccaaaggctatggctacgggcagggcgcaggcaccctcagcactgacaagggggagtcgctgggtatcaagcacgaggaagcccctggccacaggcccaccaccaaccccaatgcatccaaatttgcccagaagattggtggctccgagcgctgcccccgatgcagccaggcagtctatgctgcggagaaggtgattggtgctgggaagtcctggcataaggcctgctttcgatgtgccaagtgtggcaaaggccttgagtcaaccaccctggcagacaaggatggcgagatttactgcaaaggatgttatgctaaaaacttcgggcccaagggctttggttttgggcaaggagctggggccttggtccactctgagtgaggccaccatcacccaccacaccctgcccactcctgcgcttttcatcgccattccattcccagcagctttggagacctccaggattatttctctgtcagccctgccacatatcactaatgacttgaacttgggcatctggctccctttggtttgggggtctgcctgaggtcccaccccactaaagggctccccaggcctgggatctgacaccatcaccagtaggagacctcagtgttttgggtctaggtgagagcaggcccctctccccacacctcgccccacagagctctgttcttagcctcctgtgctgcgtgtccatcatcagctgaccaagacacctgaggacacatcttggcacccagaggagcagcagcaacaggctggagggagagggaagcaagaccaagatgaggaggggggaaggctgggttttttggatctcagagattctcctctgtgggaaagaggttgagcttcctggtgtccctcagagtaagcctgaggagtcccagcttagggagtcactattggaggcagagaggcatgcaggcagggtcctaggagcccctgcttctccaggcctcttgcctttgagtctttgtggaatggatagcctcccactaggactgggaggagaataacccaggtcttaaggaccccaaagtcaggatgttgtttgatcttctcaaacatctagttccctgcttgatgggaggatcctaatgaaatacctgaaacatatattggcatttatcaatggctcaaatcttcatttatctctggccttaaccctggctcctgaggctgcggccagcagagcccaggccagggctctgttcttgccacacctgcttgatcctcagatgtggagggaggtaggcactgcctcagtcttcatccaaacacctttccctttgccctgagacctcagaatcttccctttaacccaagaccctgcctcttccactccacccttctccagggacccttagatcacatcactccacccctgccaggccccaggttaggaatagtggtgggaggaaggggaaagggctgggcctcaccgctcccagcaactgaaaggacaacactatctggagccacccactgaaagggctgcaggcatgggctgtacccaagctgatttctcatctggtcaataaagctgtttagaccagaaaaaaaaaaaaaaaa

SEQ ID NO: 74169 - DNA, 582 bp, Artificial Sequence
  derived and/or modified sequence
atgccaaactggggaggcgggaaaaagtgtggcgtgtgtcagaagaccgtgtatttcgccgaggaggttcagtgcgaggggaattccttccacaaatcgtgctttctttgcatggtgtgtaagaaaaatctggattctaccactgtggctgtgcatggcgaggaaatttactgcaaatcatgttacggcaagaaatacgggcctaaaggatatgggtacggacaaggtgctggtacattatctacagacaaaggcgagagcctcggaatcaaacacgaggaggcacctggccatagaccaaccacaaaccctaacgcttccaagttcgctcagaagataggcggatcggaacggtgtccacgttgctcacaggccgtttacgctgccgaaaaggtaattggagctgggaagtcttggcataaagcctgttttcggtgcgccaaatgtggaaaaggactggaatcaaccacgctggctgacaaggacggcgaaatttattgcaaagggtgctacgcgaaaaatttcggacccaaggggttcgggttcggacagggtgccggagctctggttcattctgaatag

SEQ ID NO: 74170 - DNA, 582 bp, Artificial Sequence
  derived and/or modified sequence
atgcccaactggggcgggggaaagaagtgcggagtttgccagaagaccgtatatttcgccgaagaagtgcagtgtgagggtaatagtttccacaaaagctgttttctgtgtatggtctgtaagaagaatttggacagcaccaccgttgctgtgcacggcgaagaaatctactgtaagagctgctacggtaaaaagtatggcccgaaggggtacggttacgggcaaggggcaggaaccctgagcactgacaaaggagaatcacttggaataaaacatgaagaagcgccaggccaccgtcccaccactaaccccaatgcttccaagttcgctcagaagataggagggagcgaacggtgcccccggtgttcccaggccgtgtacgcagcagagaaagtaatcggcgcaggcaagtcttggcacaaagcctgcttccgttgcgcaaaatgtggcaaaggtttagaaagcaccaccctggctgataaagacggagagatatactgcaagggctgctacgcaaagaacttcggccctaaaggtttcggattcggacagggggcaggcgccctggtccactcagagtag

SEQ ID NO: 74171 - DNA, 582 bp, Artificial Sequence
  derived and/or modified sequence
atgccaaattgggggggcggcaagaagtgcggagtatgtcagaaaacggtttatttcgccgaggaagtgcagtgtgaggggaacagctttcataagtcctgttttctctgtatggtgtgcaagaaaaacctggactcaactaccgttgctgtgcacggcgaggaaatttattgtaaatcctgttacggcaagaaatacgggcctaagggatatggctacgggcagggcgccgggactttgagcaccgacaaaggggagagcctgggcattaaacacgaagaggccccggggcacaggcctacgaccaaccctaatgccagtaagtttgctcagaaaattggaggaagtgagcgctgtccaaggtgctcacaggcagtttatgcggctgaaaaggttattggcgcaggcaaatcatggcacaaagcctgttttagatgtgctaagtgtggcaagggcctggagtctacaacgttggctgacaaagatggggagatttattgcaaagggtgttatgccaagaatttcgggccaaaaggatttgggtttggccagggcgctggcgcactggtgcactctgaatag

SEQ ID NO: 74172 - DNA, 582 bp, Artificial Sequence
  derived and/or modified sequence
atgccaaactggggaggcggaaaaaaatgcggagtatgccagaagactgtgtacttcgcagaggaggtgcaatgtgaaggaaattcctttcataagtcatgcttcctctgcatggtctgcaaaaagaacctggactcaacaactgtcgcagtgcacggggaagagatttattgtaagagctgctacgggaagaagtatggccccaagggctatggttatggccaaggggccgggaccttgagtacagacaagggcgagagtctaggtatcaagcacgaagaagcaccgggtcaccggcccactactaatcccaacgccagtaaatttgcgcagaagattggggggagtgaacgctgtcctcgctgttcacaggcagtatacgctgctgagaaagtcataggcgctgggaagtcctggcacaaggcatgcttccgatgtgccaaatgtgggaaaggcttagagagcaccaccttggccgataaagacggagaaatttactgtaagggatgctacgccaagaacttcgggcccaagggattcggctttggtcagggcgctggcgccctggtgcacagcgagtag

SEQ ID NO: 74173 - DNA, 513 bp, Artificial Sequence
  derived and/or modified sequence
atgcccaactggggtggagggaagaagtgtggcgtgtgccagaagacagtttactttgcagaggaagttcagtgcgaaggcaatagctttcacaagagttgttttctgtgtatggtctgcaagaagaacctagatagcactactgttgcagtgcacggagaggagatctattgcaaatcttgttacggcaaaaagtacgggccaaaagggtacgggtatggacagggcgccggtacgaatcccaacgcttccaaattcgcacagaagattggcggctctgaaagatgtccccgttgtagtcaggctgtgtacgccgcagaaaaggtcatcggtgcaggcaaatcatggcacaaagcatgcttcagatgcgctaaatgcggaaaggggctggaaagtacaacactggctgacaaagacggtgaaatctattgcaagggctgctacgcaaagaactttggacctaagggctttgggtttggccaaggtgccggagctcttgtccactctgaatag

SEQ ID NO: 74174 - DNA, 582 bp, Artificial Sequence
  derived and/or modified sequence
atgcccaactggggcggcggcaagaagtgtggggtgtgccagaagacagtgtactttgctgaggaggtgcagtgtgagggcaacagcttccacaagagctgcttcctgtgcatggtgtgcaagaagaacctggacagcaccaccgtggccgtgcacggggaggagatctactgcaagagctgctacggcaagaagtatggccccaagggctacggctacggccagggcgccggcaccctgagcacagacaagggggagagcctgggcatcaagcatgaggaggcccctggccaccggcccaccaccaaccccaatgccagcaagtttgcccagaagattggaggcagcgagcgctgcccccgctgcagccaggccgtgtatgctgctgagaaggtgattggagctgggaagtcctggcacaaggcctgcttccgctgtgccaagtgtgggaagggcctggagagcaccaccctggccgacaaggatggagagatctactgcaagggctgctacgccaagaactttggccccaagggcttcggcttcggccagggcgctggggccctggtgcacagcgagtag

SEQ ID NO: 74175 - DNA, 513 bp, Artificial Sequence
  derived and/or modified sequence
atgcccaactggggcggcggcaagaagtgtggggtgtgccagaagacagtgtactttgctgaggaggtgcagtgtgagggcaacagcttccacaagagctgcttcctgtgcatggtgtgcaagaagaacctggacagcaccaccgtggccgtgcacggggaggagatctactgcaagagctgctacggcaagaagtatggccccaagggctacggctacggccagggcgccggcaccaaccccaatgccagcaagtttgcccagaagattggaggcagcgagcgctgcccccgctgcagccaggccgtgtatgctgctgagaaggtgattggagctgggaagtcctggcacaaggcctgcttccgctgtgccaagtgtgggaagggcctggagagcaccaccctggccgacaaggatggagagatctactgcaagggctgctacgccaagaactttggccccaagggctttggatttggccagggcgctggggccctggtgcacagcgagtag

SEQ ID NO: 74176 - DNA, 582 bp, Artificial Sequence
  derived and/or modified sequence
atgcccaactggggcggcggcaagaagtgcggcgtgtgccagaagacggtgtacttcgctgaggaagtgcagtgtgaaggtaactctttccacaagagctgtttcctgtgcatggtgtgcaaaaagaatctggacagtaccactgttgctgtgcacggcgaggagatttactgcaaatcttgttacggaaagaagtacggccccaagggatatggttatgggcagggtgctggcacattaagtacagataagggagaatcccttggcatcaagcatgaggaagcgcccgggcatcgtcccacaaccaatcctaacgccagcaagttcgcccagaaaatcggcggttccgagagatgtcccagatgctcacaggccgtttacgccgcagagaaagtcatcggcgctgggaagagctggcacaaggcctgcttcaggtgtgcaaagtgtggcaagggcttggagtccacaaccctggccgataaagatggcgaaatctattgtaaaggctgctatgccaagaactttggccccaaaggttttggattcggccagggtgctggggccctcgtgcacagcgagtag

SEQ ID NO: 74177 - DNA, 582 bp, Artificial Sequence
  derived and/or modified sequence
atgcccaactggggcggcggcaagaagtgcggcgtgtgccagaagactgtctactttgctgaggaagtccagtgcgagggaaattcctttcacaagtcttgctttctgtgtatggtatgcaagaaaaatcttgatagcacaacggtggctgtgcacggggaggagatttattgcaaaagctgctacgggaagaagtatggtccaaaaggatatggctacgggcagggggccggcactctaagcacggataagggggaatctttaggcatcaagcatgaggaagcgcctggccatcgcccgaccacaaaccccaatgcctccaaatttgcacagaaaatcggcgggtcagagcgatgccctcgctgctctcaggcagtctatgcagctgaaaaggtcatcggagcgggaaagtcctggcataaagcatgcttccgctgcgccaaatgcggaaaaggactggagagcacgaccttggctgacaaggatggggaaatttattgcaaagggtgctacgccaaaaacttcgggcctaaaggattcggtttcgggcagggagccggagccctggtacacagcgagtag

SEQ ID NO: 74178 - DNA, 582 bp, Artificial Sequence
  derived and/or modified sequence
atgcccaactggggcggcggcaagaagtgcggcgtgtgccagaagaccgtatactttgccgaagaggtgcaatgtgaaggtaacagtttccataagtcttgctttctgtgtatggtatgcaaaaagaacctggatagtaccaccgtggcggtgcacggagaagagatctattgcaaatcatgctacggcaagaagtacggaccaaagggctacggctacgggcagggagcgggtaccctgtccactgacaaaggtgagtctctcgggatcaaacatgaagaagctccgggccataggcccacgaccaaccccaacgcatcaaagttcgctcagaaaatcggagggtctgaaaggtgcccacggtgctcccaagcggtctatgctgctgaaaaagtgattggggccggaaaatcctggcataaagcatgcttccgatgtgctaaatgcgggaagggcctggagagcacgacactagctgacaaggacggggagatttattgcaagggatgctacgccaagaatttcggccccaagggctttggatttggtcaaggcgccggggcacttgtacactccgaatag

SEQ ID NO: 74179 - DNA, 582 bp, Artificial Sequence
  derived and/or modified sequence
atgcccaactggggcggcggcaagaagtgcggcgtgtgccagaagaccgtgtacttcgcagaagaggtgcagtgcgaaggaaatagctttcataaatcctgctttctgtgtatggtctgtaaaaagaaccttgatagtacaacagtggccgtgcacggggaggagatatactgcaagagctgttacggcaaaaagtatggcccgaaggggtacgggtacgggcagggcgcaggtactttgtcaactgataaaggcgaaagcctgggcatcaaacacgaggaggcccccggtcaccgacccaccactaaccctaacgcctccaaattcgcccagaagatcggggggtcagagaggtgtcccaggtgctctcaagcagtctatgcagccgaaaaagtgatcggggcaggtaaatcctggcacaaggcctgcttccgatgtgctaaatgtggaaaaggactcgagagtaccacccttgccgataaggacggtgagatttactgcaaaggctgctacgcgaaaaatttcgggccgaaggggttcggttttgggcagggagcaggggccctggtgcactcggaatag

SEQ ID NO: 74180 - DNA, 513 bp, Artificial Sequence
  derived and/or modified sequence
atgcccaactggggcggcggcaagaagtgcggcgtgtgccagaagacagtctatttcgctgaagaggtgcaatgcgagggcaattcatttcataaaagttgctttctgtgcatggtatgtaaaaagaatctcgacagtactaccgtggccgtgcacggggaagaaatctattgtaagagttgttacggcaaaaaatacggtcccaaagggtacggctatgggcagggggctgggacaaatcctaatgcaagcaaatttgcacagaagattggcggcagcgagcgctgtcctcgatgttctcaagcagtgtacgctgccgagaaggttattggcgccgggaaaagctggcacaaggcctgcttcagatgcgcaaagtgcggcaaagggctggaatccacaacgctcgcagacaaagacggagagatctactgtaaaggttgctatgcgaagaattttggcccaaaaggcttcggcttcgggcagggggccggcgcactggtgcacagcgaatag

SEQ ID NO: 74181 - DNA, 582 bp, Artificial Sequence
  derived and/or modified sequence
atgcctaattggggtggcggaaagaagtgcggtgtgtgccagaagaccgtgtatttcgctgaagaagttcagtgtgaagggaattcattccataaatcctgcttcttatgcatggtgtgtaaaaagaaccttgattcgacaacagttgcagttcacggggaggagatttattgcaaaagttgctacggcaaaaaatatggtcctaaaggctatggctacgggcagggggctggaacactgtccaccgacaagggtgaatcattgggaataaagcacgaggaggcacctggccacaggccgactaccaatcccaatgctagcaagtttgcccagaagataggtgggtctgagaggtgccccagatgttcacaggctgtctatgctgcggaaaaggttattggagcaggcaaatcatggcacaaggcgtgcttcaggtgcgcgaaatgcggtaaaggactcgagagcactactttagctgacaaagatggcgagatatattgcaaggggtgttatgccaaaaactttgggcctaaggggtttggttttggccaaggagccggtgcactagtacattccgagtag

SEQ ID NO: 74182 - DNA, 582 bp, Artificial Sequence
  derived and/or modified sequence
atgccgaattggggaggaggaaaaaaatgtggtgtgtgtcagaagaccgtatactttgccgaagaagtccaatgtgagggtaatagcttccataagtcctgctttctatgcatggtgtgcaagaagaatctcgattcgactactgtggctgttcatggagaggaaatctattgcaaaagctgttatggaaaaaaatacgggccaaagggctatggttacgggcagggcgcaggtaccctttccacagataagggcgagtcacttggcataaaacacgaggaagccccaggccataggccaacgaccaaccccaatgcttccaagttcgcacaaaagatagggggttccgagagatgccccaggtgcagtcaagcagtgtacgctgccgaaaaggtaattggtgccggtaagtcctggcacaaggcctgctttagatgcgccaagtgtggcaagggcttggagagtactaccctcgctgataaggacggagaaatctactgcaagggctgctacgcaaaaaatttcgggccaaaaggattcgggttcggccagggggcaggagcactggtgcattctgaatag

SEQ ID NO: 74183 - DNA, 582 bp, Artificial Sequence
  derived and/or modified sequence
atgcctaactgggggggagggaagaaatgcggagtgtgtcaaaagacagtgtattttgcagaagaggtgcagtgtgagggcaactcctttcacaaatcctgctttctctgtatggtttgcaaaaagaatctggattctactaccgtcgcagtgcacggcgaagagatatactgtaagtcatgctatggaaagaaatacggtcctaaaggatatggatacggccagggcgcaggcacactctcaacagataaaggcgaatcccttggcattaagcacgaggaagcaccaggtcataggcctactaccaaccccaacgcttccaaatttgcccagaagattgggggtagcgagagatgcccgaggtgttcgcaggccgtctatgccgcagaaaaagtgattggcgcagggaagtcttggcataaagcttgcttccgctgcgctaaatgcggtaagggattggagagcaccactcttgcagacaaggatggcgaaatttattgcaagggttgttacgccaaaaatttcggcccaaaaggcttcgggtttggccaaggggctggtgctctggtccatagtgagtag

SEQ ID NO: 74184 - DNA, 582 bp, Artificial Sequence
  derived and/or modified sequence
atgcctaactggggcggaggaaagaagtgtggagtgtgtcagaagaccgtttatttcgccgaggaggttcagtgtgagggtaactcattccacaagtcttgctttttgtgcatggtttgcaaaaaaaacctagacagtacgaccgtggcagtgcatggggaagagatctattgcaaaagttgctatggcaaaaagtatgggcctaaaggctacggctacgggcagggtgcaggcacgctctctactgataagggggaaagtttgggcataaaacatgaggaagccccaggccaccgaccgacaactaaccctaacgcatccaaatttgcccagaaaataggcggtagcgaaaggtgtccacgctgctctcaggcggtttatgcagcagagaaggttatcggagctggtaagtcgtggcataaagcctgttttcgttgtgctaagtgtggcaagggacttgagagtaccactttagccgacaaagatggggagatttattgcaagggttgctatgcaaagaattttggtccaaagggatttggctttggtcagggtgccggtgcattggtacacagcgagtag

SEQ ID NO: 74185 - DNA, 513 bp, Artificial Sequence
  derived and/or modified sequence
atgcccaactgggggggaggcaagaagtgtggagtctgtcagaaaacagtttattttgcagaggaagtgcaatgtgagggtaatagtttccataaaagctgttttctgtgcatggtgtgcaagaagaatctggatagcacaacagtggccgtgcacggcgaggaaatctactgcaaaagctgctatggaaaaaagtacggcccaaagggttatggatacggccaaggggctggcacaaaccccaacgcgtctaaattcgctcagaagataggtggttcagagcgatgcccaagatgcagccaggccgtgtatgcagctgaaaaagtaattggtgccggaaaatcatggcataaagcatgctttcggtgcgccaaatgtggcaaaggccttgagtccactacactggcggacaaggatggagagatatactgtaaaggctgctatgccaaaaattttggccctaaggggttcgggttcgggcagggcgcaggagccctcgtgcacagtgagtag

SEQ ID NO: 74186 - DNA, 1952 bp, Artificial Sequence
  derived and/or modified sequence
ggagggcagcaccgccgggcttcgcgccatgacatcagccctggagtggtgcagtgtgcaaagcccactggttggcgtggcccgggacacgccttccgcggagcggaacaaaacggcgcgcaggccgggcgcacccagccgccacttccgagagcgcctgccgcccctgcgccgccgagccagctgccagaatgccgaactggggaggaggcaagaaatgtggggtgtgtcagaagacggtttactttgccgaagaggttcagtgcgaaggcaacagcttccataaatcctgcttcctgtgcatggtctgcaagaagaatctggacagtaccactgtggccgtgcatggtgaggagatttactgcaagtcctgctacggcaagaagtatgggcccaaaggctatggctacgggcagggcgcaggcaccctcagcactgacaagggggagtcgctgggtatcaagcacgaggaagcccctggccacaggcccaccaccaaccccaatgcatccaaatttgcccagaagattggtggctccgagcgctgcccccgatgcagccaggcagtctatgctgcggagaaggtgattggtgctgggaagtcctggcataaggcctgctttcgatgtgccaagtgtggcaaaggccttgagtcaaccaccctggcagacaaggatggcgagatttactgcaaaggatgttatgctaaaaacttcgggcccaagggctttggttttgggcaaggagctggggccttggtccactctgagtgaggccaccatcacccaccacaccctgcccactcctgcgcttttcatcgccattccattcccagcagctttggagacctccaggattatttctctgtcagccctgccacatatcactaatgacttgaacttgggcatctggctccctttggtttgggggtctgcctgaggtcccaccccactaaagggctccccaggcctgggatctgacaccatcaccagtaggagacctcagtgttttgggtctaggtgagagcaggcccctctccccacacctcgccccacagagctctgttcttagcctcctgtgctgcgtgtccatcatcagctgaccaagacacctgaggacacatcttggcacccagaggagcagcagcaacaggctggagggagagggaagcaagaccaagatgaggaggggggaaggctgggttttttggatctcagagattctcctctgtgggaaagaggttgagcttcctggtgtccctcagagtaagcctgaggagtcccagcttagggagtcactattggaggcagagaggcatgcaggcagggtcctaggagcccctgcttctccaggcctcttgcctttgagtctttgtggaatggatagcctcccactaggactgggaggagaataacccaggtcttaaggaccccaaagtcaggatgttgtttgatcttctcaaacatctagttccctgcttgatgggaggatcctaatgaaatacctgaaacatatattggcatttatcaatggctcaaatcttcatttatctctggccttaaccctggctcctgaggctgcggccagcagagcccaggccagggctctgttcttgccacacctgcttgatcctcagatgtggagggaggtaggcactgcctcagtcttcatccaaacacctttccctttgccctgagacctcagaatcttccctttaacccaagaccctgcctcttccactccacccttctccagggacccttagatcacatcactccacccctgccaggccccaggttaggaatagtggtgggaggaaggggaaagggctgggcctcaccgctcccagcaactgaaaggacaacactatctggagccacccactgaaagggctgcaggcatgggctgtacccaagctgatttctcatctggtcaataaagctgtttagacc

SEQ ID NO: 74187 - DNA, 2129 bp, Artificial Sequence
  derived and/or modified sequence
ggcttgttcctgtttgcatgacaggaaactcctgaaatgcccctcgcacgtgcaagacgttttccgcggtggcggcgacagggcgcacagtgggaccgcagcacgagctcggagcacccccagagtcggcgactcctgcccccgcccctgccggccggccttcccggggcctaggagggcagcaccgccgggcttcgcgccatgacatcagccctggagtggtgcagtgtgcaaagcccactggttggcgtggcccgggacacgccttccgcggagcggaacaaaacggcgcgcaggccgggcgcacccagccgccacttccgagagcgcctgccgcccctgcgccgccgagccagctgccagaatgccgaactggggaggaggcaagaaatgtggggtgtgtcagaagacggtttactttgccgaagaggttcagtgcgaaggcaacagcttccataaatcctgcttcctgtgcatggtctgcaagaagaatctggacagtaccactgtggccgtgcatggtgaggagatttactgcaagtcctgctacggcaagaagtatgggcccaaaggctatggctacgggcagggcgcaggcaccctcagcactgacaagggggagtcgctgggtatcaagcacgaggaagcccctggccacaggcccaccaccaaccccaatgcatccaaatttgcccagaagattggtggctccgagcgctgcccccgatgcagccaggcagtctatgctgcggagaaggtgattggtgctgggaagtcctggcataaggcctgctttcgatgtgccaagtgtggcaaaggccttgagtcaaccaccctggcagacaaggatggcgagatttactgcaaaggatgttatgctaaaaacttcgggcccaagggctttggttttgggcaaggagctggggccttggtccactctgagtgaggccaccatcacccaccacaccctgcccactcctgcgcttttcatcgccattccattcccagcagctttggagacctccaggattatttctctgtcagccctgccacatatcactaatgacttgaacttgggcatctggctccctttggtttgggggtctgcctgaggtcccaccccactaaagggctccccaggcctgggatctgacaccatcaccagtaggagacctcagtgttttgggtctaggtgagagcaggcccctctccccacacctcgccccacagagctctgttcttagcctcctgtgctgcgtgtccatcatcagctgaccaagacacctgaggacacatcttggcacccagaggagcagcagcaacaggctggagggagagggaagcaagaccaagatgaggaggggggaaggctgggttttttggatctcagagattctcctctgtgggaaagaggttgagcttcctggtgtccctcagagtaagcctgaggagtcccagcttagggagtcactattggaggcagagaggcatgcaggcagggtcctaggagcccctgcttctccaggcctcttgcctttgagtctttgtggaatggatagcctcccactaggactgggaggagaataacccaggtcttaaggaccccaaagtcaggatgttgtttgatcttctcaaacatctagttccctgcttgatgggaggatcctaatgaaatacctgaaacatatattggcatttatcaatggctcaaatcttcatttatctctggccttaaccctggctcctgaggctgcggccagcagagcccaggccagggctctgttcttgccacacctgcttgatcctcagatgtggagggaggtaggcactgcctcagtcttcatccaaacacctttccctttgccctgagacctcagaatcttccctttaacccaagaccctgcctcttccactccacccttctccagggacccttagatcacatcactccacccctgccaggccccaggttaggaatagtggtgggaggaaggggaaagggctgggcctcaccgctcccagcaactgaaaggacaacactatctggagccacccactgaaagggctgcaggcatgggctgtacccaagctgatttctcatctggtcaataaagctgtttagaccagaa

SEQ ID NO: 74188 - DNA, 1469 bp, Artificial Sequence
  derived and/or modified sequence
atcctttagagtgcctagcacagggctgaaaatgcagcagctgctctgtaaagacctgttgattagattggggggaggaaatccccgagaacgtgcgaggctgctgtcgagagctagcagaaagtgctctgccaggcctggtggccccccagaatgccgaactggggaggaggcaagaaatgtggggtgtgtcagaagacggtttactttgccgaagaggttcagtgcgaaggcaacagcttccataaatcctgcttcctgtgcatggtctgcaagaagaatctggacagtaccactgtggccgtgcatggtgaggagatttactgcaagtcctgctacggcaagaagtatgggcccaaaggctatggctacgggcagggcgcaggcaccctcagcactgacaagggggagtcgctgggtatcaagcacgaggaagcccctggccacaggcccaccaccaaccccaatgcatccaaatttgcccagaagattggtggctccgagcgctgcccccgatgcagccaggcagtctatgctgcggagaaggtgattggtgctgggaagtcctggcataaggcctgctttcgatgtgccaagtgtggcaaaggccttgagtcaaccaccctggcagacaaggatggcgagatttactgcaaaggatgttatgctaaaaacttcgggcccaagggctttggttttgggcaaggagctggggccttggtccactctgagtgaggccaccatcacccaccacaccctgcccactcctgcgcttttcatcgccattccattcccagcagctttggagacctccaggattatttctctgtcagccctgccacatatcactaatgacttgaacttgggcatctggctccctttggtttgggggtctgcctgaggtcccaccccactaaagggctccccaggcctgggatctgacaccatcaccagtaggagacctcagtgttttgggtctaggtgagagcaggcccctctccccacacctcgccccacagagctctgttcttagcctcctgtgctgcgtgtccatcatcagctgaccaagacacctgaggacacatcttggcacccagaggagcagcagcaacaggctggagggagagggaagcaagaccaagatgaggaggggggaaggctgggttttttggatctcagagattctcctctgtgggaaagaggttgagcttcctggtgtccctcagagtaagcctgaggagtcccagcttagggagtcactattggaggcagagaggcatgcaggcagggtcctaggagcccctgcttctccaggcctcttgcctttgagtctttgtggaatggatagcctcccactaggactgggaggagaataacccaggtcttaaggaccccaaagtcaggatgttgtttgatcttctcaaacatctagttccctgcttgatgggaggatcctaatgaaatacctg

SEQ ID NO: 74189 - DNA, 1149 bp, Artificial Sequence
  derived and/or modified sequence
gtgcgtgacccagggcgacccggctccccgcaaccgcctgcaagtcgggcagaacaatcggcgattctgcgcgccactgacgctcattgtatggcagagagatgagggcatccgtgccaccccctccctcaccctcctgctggggagaaaatgcccgcgggcggggtggggcaaacatctgggcctgaccttggacatctgtgtccctgagcgcagaatgccgaactggggaggaggcaagaaatgtggggtgtgtcagaagacggtttactttgccgaagaggttcagtgcgaaggcaacagcttccataaatcctgcttcctgtgcatggtctgcaagaagaatctggacagtaccactgtggccgtgcatggtgaggagatttactgcaagtcctgctacggcaagaagtatgggcccaaaggctatggctacgggcagggcgcaggcaccctcagcactgacaagggggagtcgctgggtatcaagcacgaggaagcccctggccacaggcccaccaccaaccccaatgcatccaaatttgcccagaagattggtggctccgagcgctgcccccgatgcagccaggcagtctatgctgcggagaaggtgattggtgctgggaagtcctggcataaggcctgctttcgatgtgccaagtgtggcaaaggccttgagtcaaccaccctggcagacaaggatggcgagatttactgcaaaggatgttatgctaaaaacttcgggcccaagggctttggttttgggcaaggagctggggccttggtccactctgagtgaggccaccatcacccaccacaccctgcccactcctgcgcttttcatcgccattccattcccagcagctttggagacctccaggattatttctctgtcagccctgccacatatcactaatgacttgaacttgggcatctggctccctttggtttgggggtctgcctgaggtcccaccccactaaagggctccccaggcctgggatctgacaccatcaccagtaggagacctcagtgttttgggtctaggtgagagcaggcccctctccccacacctcgccccacagagctctgttcttagcctcctgtgctgcgtgtccatcatcagctgaccaagacacctgaggacacat

SEQ ID NO: 74190 - DNA, 1749 bp, Artificial Sequence
  derived and/or modified sequence
agccgccacttccgagagcgcctgccgcccctgcgccgccgagccagctgccagaatgccgaactggggaggaggcaagaaatgtggggtgtgtcagaagacggtttactttgccgaagaggttcagtgcgaaggcaacagcttccataaatcctgcttcctgtgcatggtctgcaagaagaatctggacagtaccactgtggccgtgcatggtgaggagatttactgcaagtcctgctacggcaagaagtatgggcccaaaggctatggctacgggcagggcgcaggcaccaaccccaatgcatccaaatttgcccagaagattggtggctccgagcgctgcccccgatgcagccaggcagtctatgctgcggagaaggtgattggtgctgggaagtcctggcataaggcctgctttcgatgtgccaagtgtggcaaaggccttgagtcaaccaccctggcagacaaggatggcgagatttactgcaaaggatgttatgctaaaaacttcgggcccaagggctttggttttgggcaaggagctggggccttggtccactctgagtgaggccaccatcacccaccacaccctgcccactcctgcgcttttcatcgccattccattcccagcagctttggagacctccaggattatttctctgtcagccctgccacatatcactaatgacttgaacttgggcatctggctccctttggtttgggggtctgcctgaggtcccaccccactaaagggctccccaggcctgggatctgacaccatcaccagtaggagacctcagtgttttgggtctaggtgagagcaggcccctctccccacacctcgccccacagagctctgttcttagcctcctgtgctgcgtgtccatcatcagctgaccaagacacctgaggacacatcttggcacccagaggagcagcagcaacaggctggagggagagggaagcaagaccaagatgaggaggggggaaggctgggttttttggatctcagagattctcctctgtgggaaagaggttgagcttcctggtgtccctcagagtaagcctgaggagtcccagcttagggagtcactattggaggcagagaggcatgcaggcagggtcctaggagcccctgcttctccaggcctcttgcctttgagtctttgtggaatggatagcctcccactaggactgggaggagaataacccaggtcttaaggaccccaaagtcaggatgttgtttgatcttctcaaacatctagttccctgcttgatgggaggatcctaatgaaatacctgaaacatatattggcatttatcaatggctcaaatcttcatttatctctggccttaaccctggctcctgaggctgcggccagcagagcccaggccagggctctgttcttgccacacctgcttgatcctcagatgtggagggaggtaggcactgcctcagtcttcatccaaacacctttccctttgccctgagacctcagaatcttccctttaacccaagaccctgcctcttccactccacccttctccagggacccttagatcacatcactccacccctgccaggccccaggttaggaatagtggtgggaggaaggggaaagggctgggcctcaccgctcccagcaactgaaaggacaacactatctggagccacccactgaaagggctgcaggcatgggctgtacccaagctgatttctcatctggtcaataaagctgtttagaccag

SEQ ID NO: 74191 - DNA, 582 bp, Artificial Sequence
  derived and/or modified sequence
atgcccaactggggcggcggcaagaagtgcggcgtgtgccagaagaccgtgtacttcgccgaggaggtgcagtgcgagggcaacagcttccacaagagctgcttcctgtgcatggtgtgcaagaagaacctggacagcaccaccgtggccgtgcacggcgaggagatctactgcaagagctgctacggcaagaagtacggccccaagggctacggctacggccagggcgccggcaccctgagcaccgacaagggcgagagcctgggcatcaagcacgaggaggcccccggccacagacccaccaccaaccccaacgccagcaagttcgcccagaagatcggcggcagcgagagatgccccagatgcagccaggccgtgtacgccgccgagaaggtgatcggcgccggcaagagctggcacaaggcctgcttcagatgcgccaagtgcggcaagggcctggagagcaccaccctggccgacaaggacggcgagatctactgcaagggctgctacgccaagaacttcggccccaagggcttcggcttcggccagggcgccggcgccctggtgcacagcgagtag

SEQ ID NO: 74192 - DNA, 513 bp, Artificial Sequence
  derived and/or modified sequence
atgcccaactggggcggcggcaagaagtgcggcgtgtgccagaagaccgtgtacttcgccgaggaggtgcagtgcgagggcaacagcttccacaagagctgcttcctgtgcatggtgtgcaagaagaacctggacagcaccaccgtggccgtgcacggcgaggagatctactgcaagagctgctacggcaagaagtacggccccaagggctacggctacggccagggcgccggcaccaaccccaacgccagcaagttcgcccagaagatcggcggcagcgagagatgccccagatgcagccaggccgtgtacgccgccgagaaggtgatcggcgccggcaagagctggcacaaggcctgcttcagatgcgccaagtgcggcaagggcctggagagcaccaccctggccgacaaggacggcgagatctactgcaagggctgctacgccaagaacttcggccccaagggcttcggcttcggccagggcgccggcgccctggtgcacagcgagtag

SEQ ID NO: 74193 - protein, 1153 aa, Artificial Sequence
  derived and/or modified sequence
MQLKIMPKKKRLSAGRVPLILFLCQMISALEVPLDQKSTEVMVQPPTITQQSPKDYIIDPRENIVIQCEAKGKPPPSFSWTRNGTHFDIDKDPLVTMKPGTGTLIINIMSEGKAETYEGVYQCTARNERGAAVSNNIVVRPSRSPLWTKEKLEPITLQSGQSLVLPCRPPIGLPPPIIFWMDNSFQRLPQSERVSQGLNGDLYFSNVLPEDTREDYICYARFNHTQTIQQKQPISVKVISVDELNDTIAANLSDTEFYGAKSSRERPPTFLTPEGNASNKEELRGNVLSLECIAEGLPTPIIYWAKEDGMLPKNRTVYKNFEKTLQIIHVSEADSGNYQCIAKNALGAIHHTISVRVKAAPYWITAPQNLVLSPGEDGTLICRANGNPKPRISWLTNGVPIEIAPDDPSRKIDGDTIIFSNVQERSSAVYQCNASNEYGYLLANAFVNVLAEPPRILTPANTLYQVIANRPALLDCAFFGSPLPTIEWFKGAKGSALHEDIYVLHENGTLEIPVAQKDSTGTYTCVARNKLGMAKNEVHLEIKDPTWIVKQPEYAVVQRGSMVSFECKVKHDHTLSLTVLWLKDNRELPSDERFTVDKDHLVVADVSDDDSGTYTCVANTTLDSVSASAVLSVVAPTPTPAPVYDVPNPPFDLELTDQLDKSVQLSWTPGDDNNSPITKFIIEYEDAMHKPGLWHHQTEVSGTQTTAQLKLSPYVNYSFRVMAVNSIGKSLPSEASEQYLTKASEPDKNPTAVEGLGSEPDNLVITWKPLNGFESNGPGLQYKVSWRQKDGDDEWTSVVVANVSKYIVSGTPTFVPYLIKVQALNDMGFAPEPAVVMGHSGEDLPMVAPGNVRVNVVNSTLAEVHWDPVPLKSIRGHLQGYRIYYWKTQSSSKRNRRHIEKKILTFQGSKTHGMLPGLEPFSHYTLNVRVVNGKGEGPASPDRVFNTPEGVPSAPSSLKIVNPTLDSLTLEWDPPSHPNGILTEYTLKYQPINSTHELGPLVDLKIPANKTRWTLKNLNFSTRYKFYFYAQTSAGSGSQITEEAVTTVDEAGILPPDVGAGKAMASRQVDIATQGWFIGLMCAVALLILILLIVCFIRRNKGGKYPVKEKEDAHADPEIQPMKEDDGTFGEYSDAEDHKPLKKGSRTPSDRTV

SEQ ID NO: 74194 - DNA, 3462 bp, Artificial Sequence
  derived and/or modified sequence
atgcagttgaaaatcatgccaaagaagaagcgcctgtccgcaggccgcgtcccgttgatattgtttttgtgccagatgattagcgctctggaagtcccactggatcaaaagagcaccgaggtgatggttcagcctccaacaataacccaacagtcccccaaggattatatcatagaccccagagagaacattgttatccagtgcgaggccaaaggcaagccaccccccagtttttcctggaccaggaatggaacgcactttgacatcgacaaggatcctctagttacaatgaagcccgggacaggcactctgataataaacatcatgtctgaaggcaaagcagaaacctacgagggcgtctatcaatgcactgcaagaaacgaacgcggcgcagctgtaagcaataatattgtagtccggccctcacgttcacctttgtggactaaagagaagttggagcccattaccctccagtctggccaatccctggtgctgccctgccgacctcctatcggcctgccaccccccattatcttctggatggataatagctttcagagactgcctcaatcggagagagtatcccaaggactaaacggggacctctactttagcaatgtgctaccagaagacacacgcgaggactacatctgttacgcgcgtttcaaccatactcagaccatacaacaaaaacagcccatcagtgttaaagtcatctccgtggacgagctgaacgacaccattgccgcaaatttgtctgacacagagttttacggcgctaagtctagccgagaacgacccccaaccttcctgacacccgaaggcaacgccagcaataaggaggaactgagaggaaacgttttgagtttggagtgcatcgcagaaggcctgcctactcccatcatttattgggccaaagaggatggcatgctgcctaagaaccggactgtatataagaacttcgagaaaactctgcaaataattcacgtgtctgaagctgactccggaaattatcagtgcattgcaaagaacgcgctcggggctattcatcacactatctccgtgcgagtaaaggccgctccatattggatcactgcaccacagaatttggtccttagtcccggagaggacggtacactgatctgccgagcaaacggcaaccctaagcctcggataagctggctgactaatggcgtgcctatcgaaatcgcccctgatgatccctcaagaaagatcgatggagatacaattattttcagcaacgtgcaggaaaggtcaagtgccgtgtatcaatgtaacgctagtaacgaatacggatacctgctggccaatgcgttcgtgaacgttctggccgaaccaccgcgcatcctcacacccgcaaatactctgtaccaggtaatcgccaaccgaccagctctgcttgactgcgcgttttttgggtccccattgccgaccattgagtggtttaagggggccaagggatctgctctgcatgaagacatctacgttctccacgagaatggaacactggaaatcccagtggctcaaaaggactccactgggacctatacttgtgtcgcacggaacaagctggggatggccaaaaatgaggtgcacttggagattaaagatcccacctggatcgttaagcagcccgaatatgcagtggttcagaggggcagcatggtgagcttcgagtgcaaggtgaaacacgaccacaccctgagcctaacggtcctgtggctaaaggataatcgggagctgccatcagatgaacgtttcacagtggacaaagatcacctggttgtagccgatgtctcggacgacgattcaggtacctacacatgcgtcgccaacaccaccctcgactccgtgagtgccagtgcagtgctcagcgttgtagcccccacccctacccccgccccagtgtacgacgttccaaacccgccattcgacctcgagctgacagatcaactcgataaatctgtccagctgagctggactccaggggatgacaacaactcccctatcacaaagtttatcattgagtacgaggatgcgatgcataagccgggactttggcatcatcagacagaggtgtctggcacccaaacaaccgctcagctgaagctttcaccgtacgtgaactactcattcagagtgatggctgtcaattctattggaaagtctttgccctctgaagccagcgagcaatatttaaccaaagcgtccgaacccgataagaaccccaccgccgtggaggggctgggtagtgagcccgataatctggttatcacctggaagcctctgaacgggttcgagagcaatggaccaggtctgcagtataaggtatcctggcgtcagaaggatggtgacgacgaatggaccagcgttgttgttgctaacgtgtccaagtatattgtgagcggcacgccaacctttgtgccctacttaatcaaggtacaggccctgaacgatatgggtttcgcccccgaaccggcagtggttatgggacattctggagaggatctgcctatggtggcgcccgggaacgtgcgggtgaatgttgttaactccactctcgccgaagtccattgggaccccgtcccgctgaaatctattagagggcacttacaagggtaccgaatatattactggaaaacgcagagttcttcaaagagaaaccgccgacacatagaaaagaagattttgacctttcagggcagcaagacgcacggaatgctaccgggtctggagcccttctcacactatacactgaatgtccgggttgtgaatggaaagggtgaggggcccgcttctccggaccgggtatttaacacaccagaaggtgtgccatcggcccccagttctctgaagattgtcaaccccactcttgattctttgacgctggaatgggatcccccttctcaccccaacggtattctgactgaatacacattgaaataccagccgattaatagcacacatgaattgggacctttggtcgacctgaaaatacctgccaataagactcgctggacgctgaaaaacctgaattttagtactcggtataagttctacttttatgcacagacctccgccggctccggttcacaaatcacagaagaagctgtcacaaccgtggatgaagccggaatcctccctccagatgtaggcgctgggaaagccatggcatcccgacaggtggatattgcaacgcagggctggttcatcggattgatgtgcgctgtggccctgctcatcctcatcctcctgattgtgtgctttataagaagaaataagggcggaaaataccctgtaaaggagaaggaggatgcacatgccgaccctgagattcagccaatgaaggaggacgacgggaccttcggagaatattccgatgcggaggatcataaacctctcaagaaaggtagtaggactcctagtgatcggacagtgtag

SEQ ID NO: 74195 - DNA, 3462 bp, Artificial Sequence
  derived and/or modified sequence
atgcagctgaagatcatgcccaagaagaagaggctgtctgctggccgggtgcccctcatcctcttcctgtgccagatgatcagcgccctggaggtgcccctggaccagaagagcacagaggtgatggtgcagccccccaccatcacccagcagagccccaaggactacatcatcgacccccgggagaacatcgtcatccagtgtgaggccaagggcaagcccccacccagcttctcctggaccagaaatggcacccactttgatattgacaaggaccccctggtgaccatgaagccaggcaccggcaccctcatcatcaacatcatgtctgagggcaaggccgagacctatgaaggagtgtaccagtgcacagccagaaatgaaagaggagctgctgtgagcaacaacatcgtggtgcggcccagccgcagccccctgtggaccaaggagaagctggagcccatcaccctgcagagcggccagagcctggtgctgccctgcaggcctcccatcggcctgcccccacccatcatcttctggatggacaacagcttccagaggctgccccagagcgagcgggtgtcccagggcctgaatggagacctgtacttcagcaatgtgctgcctgaggacacccgggaggactacatctgctacgcccgcttcaaccacacccagaccatccagcagaagcagcccatctctgtgaaggtgatctctgtggatgagctgaatgacaccatcgccgccaacctgagtgacacagagttctacggggccaagagcagccgggagaggcctcccaccttcctgaccccagagggcaatgccagcaacaaggaggagctgcggggaaatgtgctgagcctggagtgcatcgccgagggcctgcccacccccatcatctactgggccaaggaggatggcatgctgcccaagaacagaacagtgtacaagaactttgagaagaccctgcagatcatccacgtgtctgaggccgacagcggcaactaccagtgcatcgccaagaatgccctgggcgccatccaccacaccatctctgtgcgggtgaaggccgccccctactggatcacagccccccagaacctggtgctgagccctggagaagatggcaccctcatctgccgggccaatggaaaccccaagccccgcatctcctggctgaccaatggagtgcccattgaaattgccccagatgaccccagcaggaagattgatggagacaccatcatcttcagcaatgtgcaggagaggagcagcgctgtgtaccagtgcaatgccagcaatgaatatggctacctgctggccaatgcctttgtgaatgtgctggccgagcccccacgcatcctgaccccagccaacaccctgtaccaggtgattgccaacagacctgccctgctggactgtgccttcttcggcagccccctgcccaccatcgagtggttcaagggggccaagggcagcgccctgcacgaggacatctacgtgctgcatgaaaatggcaccctggagatccctgtggcccagaaggacagcacaggcacctacacctgtgtggccaggaacaagctgggcatggccaagaatgaggtgcacctggagatcaaggaccccacctggatcgtgaagcagccagaatatgctgtggtgcagaggggctccatggtgtcctttgagtgcaaggtgaagcatgaccacaccctgagcctgactgtgctgtggctgaaggacaaccgggagctgcccagtgatgagcgcttcaccgtggacaaggaccacctggtggtggctgatgtgtctgatgatgattctggcacctacacctgtgtggccaacaccaccctggacagcgtgtctgccagcgctgtgctgtctgtggtggcccccacccccaccccagcccctgtgtatgatgtgcccaaccccccatttgacctggagctgacagaccagctggacaagtctgtgcagctgtcctggaccccaggagatgacaacaacagccccatcaccaagttcatcatcgagtatgaagatgccatgcacaagccaggcctgtggcaccaccagacagaggtgtctggcacccagaccacagcccagctgaagctgagcccctacgtgaactacagcttccgggtgatggctgtgaacagcatcggcaagagcctgcccagcgaggccagcgagcagtacctgaccaaggccagcgagccagacaagaaccccacagctgtggagggcctgggcagcgagccagacaacctggtgatcacctggaagcccctgaatggatttgagagcaatggacctggcctgcagtacaaggtgtcctggaggcagaaggatggagatgatgagtggacctctgtggtggtggccaacgtgtccaagtacatcgtgtctggcacccccacctttgtgccctacctgatcaaggtgcaggccctgaatgacatgggctttgcccctgagcctgctgtggtgatgggccacagcggggaggacctgcccatggtggcccctggaaatgtgcgggtgaatgtggtgaacagcaccctggccgaggtgcactgggaccctgtgcccctgaagagcatccggggccacctgcagggctaccgcatctactactggaagacccagagcagcagcaagaggaacagaagacacatcgagaagaagatcctgaccttccagggcagcaagacccacggcatgctgcccggcctggagcccttcagccactacaccctgaatgtgcgggtggtgaatggcaagggggagggccctgccagcccagacagagtcttcaacaccccagagggcgtgcccagcgcccccagcagcctgaagatcgtgaaccccaccctggacagcctgaccctggagtgggacccccccagccaccccaacggcatcctgacagagtacaccctgaagtaccagcccatcaacagcacccatgagctgggccccctggtggacctgaagatcccagccaacaagacccgctggaccctgaagaacctgaacttcagcacccgctacaagttctacttctacgcccagaccagcgctggcagcggcagccagatcacagaggaggccgtgaccaccgtggatgaagctggcatcctgcccccagatgtgggcgctgggaaggccatggccagccggcaggtggacatcgccacccagggctggttcatcggcctgatgtgtgctgtggccctgctgatcctgatcctgctgattgtgtgcttcatcagaagaaataaaggaggcaagtaccctgtgaaggagaaggaggatgcccatgctgaccctgagatccagcccatgaaggaggatgatggcacctttggagagtacagtgatgctgaggaccacaagcccctgaagaagggcagcaggacccccagcgacagaacagtgtag

SEQ ID NO: 74196 - DNA, 3462 bp, Artificial Sequence
  derived and/or modified sequence
atgcagctgaagatcatgcccaagaagaagcggctgagcgccggcagggtccccttaattctattcctgtgccagatgatttccgcactggaagtaccactggaccagaaaagcacggaagtgatggtacagccccccactattacccaacagtctcccaaagactatataatcgatccccgagagaatatcgttatccagtgcgaggcgaaagggaagccaccgccatccttctcctggacgcgaaacgggacgcactttgatattgataaagatccgctggtgactatgaaaccgggcacaggcacactgatcatcaatatcatgtcggaaggtaaggctgagacctacgagggagtctaccagtgcaccgcacgaaatgaaagaggcgcagccgtgtccaataacatcgtagtgcgcccaagtagaagcccactgtggactaaagaaaagctggaaccgatcactttgcaatccggccagagtttagttttgccttgtcgccctcccatcggcctgccccccccaattatcttttggatggataattcgtttcagcgtctacctcagtccgagcgtgtgtctcaaggactcaatggggatctctatttctcaaacgtgctcccagaggatacccgtgaagattatatctgctacgcaagattcaatcatacccagacaatccagcaaaaacagcccatcagcgtaaaagtcatttccgtcgatgaactcaacgataccatagcagccaacctttctgatactgagttctacggggccaaatcaagcagggagaggccacctacgtttctaactccagagggcaatgcatctaacaaagaggaactgagggggaatgttctcagccttgagtgcatagccgagggtttgcccacgccaattatctactgggcgaaggaggatggcatgcttcccaaaaacagaactgtttataagaacttcgagaagacactacagattattcatgtctctgaggcggattcaggtaattaccagtgtattgctaaaaatgccctcggagccatccatcatactatctctgtgagagtgaaggcagctccatattggattacagccccgcagaacctagtgctatctcccggggaggacggcacactaatctgtagggccaacggaaatcctaagcctagaatctcctggcttaccaatggcgtgcctatcgaaatagcaccagatgacccaagccgcaaaatcgatggcgacaccataatcttctcaaacgtccaggaacgctccagcgcagtctaccagtgtaatgcctcaaacgagtatgggtacctgcttgcgaatgcattcgtgaacgttctggctgaacctccacggatcctcaccccagctaacaccctatatcaggttatcgctaatcgccctgcacttcttgactgcgccttttttggatcacctctccccacaatcgagtggtttaagggagctaagggctcagctttacatgaagacatctatgtgctgcacgaaaatggcactctggagatccccgtggctcaaaaggactcaacaggaacctacacctgtgtggctaggaacaaattgggtatggctaagaatgaagtccacctagagattaaggaccccacttggattgtgaagcagcccgagtatgccgtagtgcagagaggaagcatggtgtcatttgagtgtaaggtgaagcacgaccatacactttctcttactgtcctttggctgaaggataatagagagctccctagcgatgaacgtttcaccgtggacaaagatcacttggtcgtagctgacgtttctgacgacgacagcggcacctatacttgcgtagctaatacgactctcgattcagtgtccgccagcgcagttctgtctgttgtcgccccaacgcctacacctgcacctgtatatgatgtccccaatccgcctttcgatctcgagctaacagatcagctcgataaatctgtccagttgagctggacaccaggcgacgacaataattcccccatcaccaagttcatcattgagtatgaggacgccatgcacaagcccggcctctggcatcaccagaccgaggtttcgggcactcagactaccgctcagctgaagctctctccatacgtgaattactccttcagagtcatggccgtcaattccattggcaagtcgctcccctctgaagccagtgagcagtatctgaccaaggccagcgaacctgacaagaatcccaccgcagtcgaggggctgggctccgagcccgacaacttagtcatcacctggaagccgctaaatggcttcgaatccaacgggccaggtctgcagtacaaagtgtcctggcgtcagaaagacggagatgacgagtggaccagcgtcgtcgtcgcgaatgtgagcaagtatatcgtgtctggcacgccaacctttgttccctacctgatcaaggtgcaggccctcaacgatatgggcttcgctcctgagcccgctgtcgtgatgggccattcaggagaggacttgcctatggtggctccaggcaatgtgcgcgttaatgtggtcaacagcaccctcgccgaagtgcactgggatcccgtaccactcaagagtattcgcggacatctacaggggtaccgtatctattattggaagacccaatcctcctccaagagaaacagacggcatattgaaaaaaagattctgactttccagggttccaagacgcacggcatgctgcccggtctcgagccattcagccactacacgttgaatgtgcgtgtcgtcaatggtaaaggagaagggccagcgtccccagatcgcgtgtttaatactcctgagggggttccttctgcccccagctcactcaagatagtgaaccccaccttggacagtctgaccctggaatgggacccaccatcccatccaaacggcatcttgacggagtacaccttgaaatatcagcccatcaattccactcacgaactgggacctttagttgacctgaagataccggccaataagactagatggacgctgaagaacctcaacttttctacgcgttacaagttttacttctatgcacagacaagtgccgggagtggatcccagattacagaagaagccgtcacaaccgttgatgaggctgggatcctgccgcctgacgttggagcgggcaaagccatggcctcaaggcaggtggatatcgcaactcagggctggttcataggacttatgtgcgctgtggcactcctgattctcatacttttgattgtctgcttcattcgcagaaataagggtggtaagtaccctgtgaaggagaaagaagacgcgcatgccgaccctgagattcaacccatgaaggaggacgacggcacatttggagagtactccgacgctgaggaccacaagccgttgaagaaagggtcccggactcccagtgacaggactgtttag

SEQ ID NO: 74197 - DNA, 6380 bp, Artificial Sequence
  derived and/or modified sequence
cgcgcgggcgcgggggacggcgcaggggccgcctggctggagcagccagaggggatagcttcgtcgagaacggaggacaccggcggtccagggtcctgggcagtcgcgccagagctgagcggagggcgcggcgcgagaacgaatctttgtgacattctctctcagcattctttatcccctgtttgctgaagacttcgacaaaagctggtcttagctgttggcattctcctgagaaaaggatagcttcagaaatcagaaaaacatttgggaggtgtctagcccagtggaccttctgaagagcaatgctaagaagacgtttggtttaaagaattaaaaggaagaacaacttaagagcttcttcaaagtttcccgcatgaaaattacttaaacgttgcacacaacgtttcacaaaatcttttgtgaaagaagaaaaggaaattcagtgtgtgagtctcagcaggagttaagctaatgcagcttaaaataatgccgaaaaagaagcgcttatctgcgggcagagtgcccctgattctcttcctgtgccagatgattagtgcactggaagtacctcttgatcaaaaatctactgaagtaatggtacagcctccaaccatcacccaacagtctccaaaagattacattattgaccctcgggagaatattgtaatccagtgtgaagccaaagggaaaccgcccccaagcttttcctggacccgtaatgggactcattttgacatcgataaagaccctctggtcaccatgaagcctggcacaggaacgctcataattaacatcatgagcgaagggaaagctgagacctatgaaggagtctatcagtgtacagcaaggaacgaacgcggagctgcagtttctaataacattgttgtccgcccatccagatcaccattgtggaccaaagaaaaacttgaaccaatcacacttcaaagtggtcagtctttagtacttccctgcagacccccaattggattaccaccacctataatattttggatggataattcctttcaaagacttccacaaagtgagagagtttctcaaggtttgaatggggacctttatttttccaatgtcctcccagaggacacccgcgaagactatatctgttatgctagatttaatcatactcaaaccatacagcagaagcaacctatttctgtgaaggtgatttcagtggatgaattgaatgacactatagctgctaatttgagtgacactgagttttatggtgctaaatcaagtagagagaggccaccaacatttttaactccagaaggcaatgcaagtaacaaagaggaattaagaggaaatgtgctttcactggagtgcattgcagaaggactgcctaccccaattatttactgggcaaaggaagatggaatgctacccaaaaacaggacagtttataagaactttgagaaaaccttgcagatcattcatgtttcagaagcagactctggaaattaccaatgtatagcaaaaaacgcattaggagccatccaccataccatttctgttagagttaaagcggctccatactggatcacagcccctcaaaatcttgtgctgtccccaggagaggatgggaccttgatctgcagagctaatggcaaccccaaacccagaattagctggttaacaaatggagtcccaatagaaattgcccctgatgaccccagcagaaaaatagatggcgataccattattttttcaaatgttcaagaaagatcaagtgcagtctatcagtgcaatgcctctaatgaatatggatatttactggcaaacgcatttgtaaatgtgctggctgagccaccacgaatcctcacacctgcaaacacactctaccaggtcattgcaaacaggcctgctttactagactgtgccttctttgggtctcctctcccaaccatcgagtggtttaaaggagctaaaggaagtgctcttcatgaagatatttatgttttacatgaaaatggaactttggaaattcctgtggcccaaaaggacagtacaggaacttatacgtgtgttgcaaggaataaattagggatggcgaagaatgaagttcacttagaaatcaaagatcctacatggatcgttaaacagcccgaatatgcagttgtgcaaagagggagcatggtgtcctttgaatgcaaagtgaaacatgatcacaccttatccctcactgtcctgtggctgaaggacaacagggaactgcccagtgatgaaaggttcactgttgacaaggatcatctagtggtagctgatgtcagtgacgatgacagcgggacctacacgtgtgtggccaacaccactctggacagcgtctccgccagcgctgtgcttagcgttgttgctcctactccaactccagctcccgtttacgatgtcccaaatcctccctttgacttagaactgacagatcaacttgacaaaagtgttcagctgtcatggaccccaggcgatgacaacaatagccccattacaaaattcatcatcgaatatgaagatgcaatgcacaagccagggctgtggcaccaccaaactgaagtttctggaacacagaccacagcccagctgaagctgtctccttacgtgaactactccttccgcgtgatggcagtgaacagcattgggaagagcttgcccagcgaggcgtctgagcagtatttgacgaaagcctcagaaccagataaaaaccccacagctgtggaaggactgggatcagagcctgataatttggtgattacgtggaagcccttgaatggtttcgaatctaatgggccaggccttcagtacaaagttagctggcgccagaaagatggtgatgatgaatggacatctgtggttgtggcaaatgtatccaaatatattgtctcaggcacgccaacctttgttccatacctgatcaaagttcaggccctgaatgacatggggtttgcccccgagccagctgtagtcatgggacattctggagaagacctcccaatggtggctcctgggaacgtgcgtgtgaatgtggtgaacagtaccttagccgaggtgcactgggacccagtacctctgaaaagcatccgaggacacctacaaggctatcggatttactattggaagacccagagttcatctaaaagaaacagacgtcacattgagaaaaagatcctcaccttccaaggcagcaagactcatggcatgttgccggggctagagccctttagccactacacactgaatgtccgagtggtcaatgggaaaggggagggcccagccagccctgacagagtctttaatactccagaaggagtccccagtgctccctcgtctttgaagattgtgaatccaacactggactctctcactttggaatgggatccaccgagccacccgaatggcattttgacagagtacaccttaaagtatcagccaattaacagcacacatgaattaggccctctggtagatttgaaaattcctgccaacaagacacggtggactttaaaaaatttaaatttcagcactcgatataagttttatttctatgcacaaacatcagcaggatcaggaagtcaaattacagaggaagcagtaacaactgtggatgaagctggtattcttccacctgatgtaggtgcaggcaaagcgatggcaagccggcaggtggatattgcaactcagggctggttcattggtctgatgtgtgctgttgctctccttatcttaattttgctgattgtttgcttcatcagaagaaacaagggtggtaaatatccagttaaagaaaaggaagatgcccatgctgaccctgaaatccagcctatgaaggaagatgatgggacatttggagaatacagtgatgcagaagaccacaagcctttgaaaaaaggaagtcgaactccttcagacaggactgtgaaaaaagaagatagtgacgacagcctagttgactatggagaaggggttaatggccagttcaatgaggatggctcctttattggacaatacagtggtaagaaagagaaagagccggctgaaggaaacgaaagctcagaggcaccttctcctgtcaacgccatgaattcctttgtttaatttttaagctctttgccaatattccatttctctagaatgtttatcctaagcacttgtttgtcagccctctcatactatgaacatatgggtagagagtatattttctgctgtatgttagtattatgagaatagttacagcaaaaacataactcagtcaaatgatatgttaatatgaactggaatgcaaagtgcatactttttcattcaaaatgggtattcttgatttcctcagaactgataaaaaataatgcaacatcaccaacagatcctgttatttcctctgcaggatacagttcaatatgatgcatgaaaaatgctccacatttaaaggacatacccgtgtatgttatgaaaacatggtttgatactttgtttatactaccctcagctgaacccctatatatgaattccgttttcattgtcaagaatgttactgtagtattctctagaacttcaatgtctttgtggacattgttgtgaaattggtgactatgtatagctgtcgttagtctttttgggagactgttaggaacagtttgtacagtatatacttgctaaatgagttcattatgacagtcacattgctgatgcttactgagaactattacctactcttggctcctgttactccgtaggcttcttaatcttccaggcattacagcagcacagtgttctactttttacatcatttctatgttcggttgtttttaggcataaacaatgtgtattgcagtgcatttcggcatttgtgccatactgaaagaatcaaaaacaaatcatccaaattaaatttcaaacattatttcagagaacacagggcaagacacatacagtgccttcagatattaagcattccacaacatcgtgcattctgtatcagctggtccagtccattctgggtcctagattactgtcattgtctaaaagtaacttttaaaaagcagagttcatgaaaactgcaatgctgggaaaagaaggaaacatgaaaataaaaataagacagtttattagaaatagcatttcctcataagcataaaaagaaaatctttgttgccaactgaagcacatgatgattttgtggtcctttatggtttctattacattcagtaagaaagatgtcaacatgctagaaaattaattttaaaactaagttattccaacactaaaagcatacaacagcatgccaacagtaatatattattctccaagactttacctatgtaagtgttcaaaactctgcagcattaaacaacgtgtatgcaaattgttatggatacatttcagaatctaagaaatcaggcaagtgcttaaaaggccaacggtccaagggattacatctgcagtttaaaaagtaaatatatattctatcgtattcataaacaatatctatcaaatgggttacctccaaatatgaaaatctataacaacctatggttgaaggaatgctcagtttcatttgccaataaattggtttctcataacttgcatcaagtttaattttaagtaaagctttttatatgtagatattttgttgaatttgtaaatacacttaaaatgtagatgctatatgcttataggtgttacatacaaataaacatgcaatgtttatgttgtactgtataagaggtaagctaattaatgcagtgaatgggattggaaagcatctacttaaatatctattgggttcccccctccccccaccttttttgctgtgaaactgaaatagtgaacttttctacgtattgacagcagatttttcgatgaaatcttcagagctttgcctatggggcacagtaggcctagtaacctggcatgtttgatatatgtaggtaaagcataatttaaagtaatcccaggtaaagatggccctaaatactttcatgtctctatattcatttttcacagatccacctgtctcttgaaaatataaaaagacaaaacaggtttgccttggcatcagagagcacaaagattaaaagttactttaaatttgccaatattttgggagaacaataaaactacattttttcctcttccatactggtagatgcgaaatttatctgtgcatgaaagggtcacttctgtaatagtgcaacagatttggtattaaaaattaaatgtggttttaaaagttcctctctcttttgtaatttatgttcccaattgagtgtgaatgtccaagtaatggtgtatgtaatggtacaggcaaatgtgactggatttccctcaaaaaagtaactattaaacagtcttgatctctttgtgacttttaa

SEQ ID NO: 74198 - DNA, 3462 bp, Artificial Sequence
  derived and/or modified sequence
atgcagctcaagattatgccaaaaaaaaagaggctgtccgccggtcgcgtacctctgatcttattcctgtgccaaatgataagcgccctggaggtaccactggaccagaaatccaccgaggttatggtccagcctccaaccattactcagcagtcacccaaggattacatcattgatcccagagaaaacattgtgattcagtgtgaggctaagggcaagccccctccttctttctcctggacgaggaatggaacccactttgacattgataaggatcctctcgtgactatgaaaccaggtaccgggaccctgatcataaacatcatgtctgaaggaaaggcagagacctacgagggtgtgtaccagtgtaccgcccgaaatgagaggggtgccgcagtgagcaataacattgtcgttcggccttctagaagtcctttatggactaaggagaaactggagcctattacgctgcaatctggccagtctctggttttgccctgccgccctcccattggcctgccgccaccgatcatattttggatggacaactcctttcagcgccttcctcagagcgagcgggtgtcccagggtctaaatggggacctttacttctccaacgtgctgcccgaggatactcgtgaggattacatctgctacgcacggtttaaccatacccaaaccattcagcaaaaacagcccattagcgtgaaagttatttcggtggacgagcttaacgacacaatcgctgccaatttgtcagacacagagttttatggcgcaaagagctcgcgcgagagacctcctactttcttgactcccgaaggcaatgcgtctaataaagaagagttgcgtgggaatgtcctgtcactcgagtgcatcgccgaggggctgccgacccctattatctactgggcaaaggaggatgggatgctgcctaagaaccgaacggtctacaaaaacttcgaaaagactctgcagatcatacatgtgtccgaggctgattctggcaattatcagtgcatcgcaaagaacgcactcggcgctattcaccatacaatttcggttagggtgaaagccgctccgtactggataaccgctccgcagaatctggttctctctcctggagaagatgggaccctaatctgtcgcgctaatgggaacccaaagcccaggatcagctggctgaccaatggggttcccattgagatcgccccagatgacccatctaggaagattgacggcgatacgattattttttctaatgtccaggaacggtcttctgcagtctaccagtgtaacgcgtctaatgagtacggatatctgttagcgaatgccttcgttaacgtgttggctgagccaccaagaattcttacccccgcaaatacgctctatcaggtgatcgcaaaccgtcctgccctgctagactgcgcatttttcggatctcccctccccacgattgagtggtttaagggtgccaaaggctccgccttgcatgaggatatctatgtgctccacgagaatggaactttggaaattcccgtggcgcagaaagacagcacaggcacatacacttgcgtagctaggaacaagctgggcatggctaaaaacgaggtacacctggaaattaaggacccgacatggatcgtcaagcagccggaatatgcagtcgtgcagcgaggcagtatggtctcattcgagtgtaaagtgaaacacgatcataccctcagcctgacagtcctgtggcttaaagataaccgggaactaccgtccgatgaacgttttactgtcgataaggaccatctcgttgtcgctgatgtgagcgatgacgactcaggcacatatacttgtgtcgccaacaccacactcgacagtgtgtccgcttctgccgtcctgtctgtggtagctcccacccccactcccgcacccgtgtatgacgtgcccaatcctcccttcgaccttgagctaacggatcagctagacaagagtgtccagctttcctggacacctggggacgacaacaattccccaatcacgaagttcattatcgagtacgaggatgccatgcacaaaccagggctgtggcatcatcagactgaggtgtccgggacccagaccaccgctcagctgaaactgtcaccttacgtcaattactccttcagagtgatggcagtgaatagtatcggaaaatccttgccgtcggaggcctcggaacaatacctgactaaagccagcgagccagataaaaacccaaccgctgtcgaggggctaggtagtgagcccgataatctggtaatcacatggaagcccctgaacggatttgagtctaatggacctggcctgcaatacaaggtttcttggcggcaaaaagatggggatgatgaatggacatcagtggtcgtagcgaatgtgtccaaatacattgtgtccggcactcccacattcgtgccctatctgattaaggtccaggcactcaacgatatgggatttgctccagaacctgcagtcgtgatgggccacagcggggaggacctgccaatggttgctcccggtaatgtgagggtcaacgtggtcaactcaaccctcgcagaggtccattgggatccagtacccctcaagtcgatcagggggcatctgcaagggtacaggatttactactggaaaacccagagtagctcgaagaggaatcgacgacacattgaaaagaagatcctgacatttcaaggatctaaaacccacggcatgttgcccggtctggagccattctctcactacaccttaaacgtgcgagttgtaaacgggaaaggcgaggggcctgcaagtcctgatagagtgttcaatacccctgagggggtaccaagtgctcctagctccttgaaaatcgtcaatccaaccttggactctctgaccctggaatgggatcctcctagccatcccaatggcattttaaccgagtacactcttaagtaccaaccaataaattccacccacgaacttggaccccttgtcgacctgaagatacccgctaataaaactagatggacactcaagaacttaaatttctccacccgctataagttctatttttacgctcagacgagtgctggcagcggcagtcagatcacagaggaagccgttaccactgtcgatgaggcgggaatcttacccccagatgttggcgctgggaaagcaatggcgagtaggcaggtggacattgcaacacaggggtggtttatagggttgatgtgcgccgtggcgctgctaatactgatcctcctgatcgtatgcttcattcgtcgcaataaaggaggtaaatatcctgttaaagagaaagaggacgctcacgcagacccagaaattcagcccatgaaggaagacgatggcacgttcggtgaatacagcgacgcggaagatcacaaaccgctcaagaagggaagtcgcaccccaagcgaccgaaccgtgtag

SEQ ID NO: 74199 - DNA, 3462 bp, Artificial Sequence
  derived and/or modified sequence
atgcagctgaagatcatgcccaagaagaagagactgagcgccggcagagtgcccctgatcctgttcctgtgccagatgatcagcgccctggaggtgcccctggaccagaagagcaccgaggtgatggtgcagccccccaccatcacccagcagagccccaaggactacatcatcgaccccagagagaacatcgtgatccagtgcgaggccaagggcaagcccccccccagcttcagctggaccagaaacggcacccacttcgacatcgacaaggaccccctggtgaccatgaagcccggcaccggcaccctgatcatcaacatcatgagcgagggcaaggccgagacctacgagggcgtgtaccagtgcaccgccagaaacgagagaggcgccgccgtgagcaacaacatcgtggtgagacccagcagaagccccctgtggaccaaggagaagctggagcccatcaccctgcagagcggccagagcctggtgctgccctgcagaccccccatcggcctgcccccccccatcatcttctggatggacaacagcttccagagactgccccagagcgagagagtgagccagggcctgaacggcgacctgtacttcagcaacgtgctgcccgaggacaccagagaggactacatctgctacgccagattcaaccacacccagaccatccagcagaagcagcccatcagcgtgaaggtgatcagcgtggacgagctgaacgacaccatcgccgccaacctgagcgacaccgagttctacggcgccaagagcagcagagagagaccccccaccttcctgacccccgagggcaacgccagcaacaaggaggagctgagaggcaacgtgctgagcctggagtgcatcgccgagggcctgcccacccccatcatctactgggccaaggaggacggcatgctgcccaagaacagaaccgtgtacaagaacttcgagaagaccctgcagatcatccacgtgagcgaggccgacagcggcaactaccagtgcatcgccaagaacgccctgggcgccatccaccacaccatcagcgtgagagtgaaggccgccccctactggatcaccgccccccagaacctggtgctgagccccggcgaggacggcaccctgatctgcagagccaacggcaaccccaagcccagaatcagctggctgaccaacggcgtgcccatcgagatcgcccccgacgaccccagcagaaagatcgacggcgacaccatcatcttcagcaacgtgcaggagagaagcagcgccgtgtaccagtgcaacgccagcaacgagtacggctacctgctggccaacgccttcgtgaacgtgctggccgagccccccagaatcctgacccccgccaacaccctgtaccaggtgatcgccaacagacccgccctgctggactgcgccttcttcggcagccccctgcccaccatcgagtggttcaagggcgccaagggcagcgccctgcacgaggacatctacgtgctgcacgagaacggcaccctggagatccccgtggcccagaaggacagcaccggcacctacacctgcgtggccagaaacaagctgggcatggccaagaacgaggtgcacctggagatcaaggaccccacctggatcgtgaagcagcccgagtacgccgtggtgcagagaggcagcatggtgagcttcgagtgcaaggtgaagcacgaccacaccctgagcctgaccgtgctgtggctgaaggacaacagagagctgcccagcgacgagagattcaccgtggacaaggaccacctggtggtggccgacgtgagcgacgacgacagcggcacctacacctgcgtggccaacaccaccctggacagcgtgagcgccagcgccgtgctgagcgtggtggcccccacccccacccccgcccccgtgtacgacgtgcccaacccccccttcgacctggagctgaccgaccagctggacaagagcgtgcagctgagctggacccccggcgacgacaacaacagccccatcaccaagttcatcatcgagtacgaggacgccatgcacaagcccggcctgtggcaccaccagaccgaggtgagcggcacccagaccaccgcccagctgaagctgagcccctacgtgaactacagcttcagagtgatggccgtgaacagcatcggcaagagcctgcccagcgaggccagcgagcagtacctgaccaaggccagcgagcccgacaagaaccccaccgccgtggagggcctgggcagcgagcccgacaacctggtgatcacctggaagcccctgaacggcttcgagagcaacggccccggcctgcagtacaaggtgagctggagacagaaggacggcgacgacgagtggaccagcgtggtggtggccaacgtgagcaagtacatcgtgagcggcacccccaccttcgtgccctacctgatcaaggtgcaggccctgaacgacatgggcttcgcccccgagcccgccgtggtgatgggccacagcggcgaggacctgcccatggtggcccccggcaacgtgagagtgaacgtggtgaacagcaccctggccgaggtgcactgggaccccgtgcccctgaagagcatcagaggccacctgcagggctacagaatctactactggaagacccagagcagcagcaagagaaacagaagacacatcgagaagaagatcctgaccttccagggcagcaagacccacggcatgctgcccggcctggagcccttcagccactacaccctgaacgtgagagtggtgaacggcaagggcgagggccccgccagccccgacagagtgttcaacacccccgagggcgtgcccagcgcccccagcagcctgaagatcgtgaaccccaccctggacagcctgaccctggagtgggacccccccagccaccccaacggcatcctgaccgagtacaccctgaagtaccagcccatcaacagcacccacgagctgggccccctggtggacctgaagatccccgccaacaagaccagatggaccctgaagaacctgaacttcagcaccagatacaagttctacttctacgcccagaccagcgccggcagcggcagccagatcaccgaggaggccgtgaccaccgtggacgaggccggcatcctgccccccgacgtgggcgccggcaaggccatggccagcagacaggtggacatcgccacccagggctggttcatcggcctgatgtgcgccgtggccctgctgatcctgatcctgctgatcgtgtgcttcatcagaagaaacaagggcggcaagtaccccgtgaaggagaaggaggacgcccacgccgaccccgagatccagcccatgaaggaggacgacggcaccttcggcgagtacagcgacgccgaggaccacaagcccctgaagaagggcagcagaacccccagcgacagaaccgtgtag

SEQ ID NO: 74200 - protein, 1192 aa, Artificial Sequence
  derived and/or modified sequence
MQLKIMPKKKRLSAGRVPLILFLCQMISALEVPLDPKLLEDLVQPPTITQQSPKDYIIDPRENIVIQCEAKGKPPPSFSWTRNGTHFDIDKDPLVTMKPGTGTLIINIMSEGKAETYEGVYQCTARNERGAAVSNNIVVRPSRSPLWTKEKLEPITLQSGQSLVLPCRPPIGLPPPIIFWMDNSFQRLPQSERVSQGLNGDLYFSNVLPEDTREDYICYARFNHTQTIQQKQPISVKVISAKSSRERPPTFLTPEGNASNKEELRGNVLSLECIAEGLPTPIIYWAKEDGMLPKNRTVYKNFEKTLQIIHVSEADSGNYQCIAKNALGAIHHTISVRVKAAPYWITAPQNLVLSPGEDGTLICRANGNPKPRISWLTNGVPIEIAPDDPSRKIDGDTIIFSNVQERSSAVYQCNASNEYGYLLANAFVNVLAEPPRILTPANTLYQVIANRPALLDCAFFGSPLPTIEWFKGAKGSALHEDIYVLHENGTLEIPVAQKDSTGTYTCVARNKLGMAKNEVHLEIKDPTWIVKQPEYAVVQRGSMVSFECKVKHDHTLSLTVLWLKDNRELPSDERFTVDKDHLVVADVSDDDSGTYTCVANTTLDSVSASAVLSVVAPTPTPAPVYDVPNPPFDLELTDQLDKSVQLSWTPGDDNNSPITKFIIEYEDAMHKPGLWHHQTEVSGTQTTAQLKLSPYVNYSFRVMAVNSIGKSLPSEASEQYLTKASEPDKNPTAVEGLGSEPDNLVITWKPLNGFESNGPGLQYKVSWRQKDGDDEWTSVVVANVSKYIVSGTPTFVPYLIKVQALNDMGFAPEPAVVMGHSGEDLPMVAPGNVRVNVVNSTLAEVHWDPVPLKSIRGHLQGYRIYYWKTQSSSKRNRRHIEKKILTFQGSKTHGMLPGLEPFSHYTLNVRVVNGKGEGPASPDRVFNTPEGVPSAPSSLKIVNPTLDSLTLEWDPPSHPNGILTEYTLKYQPINSTHELGPLVDLKIPANKTRWTLKNLNFSTRYKFYFYAQTSAGSGSQITEEAVTTVDEAGILPPDVGAGKAMASRQVDIATQGWFIGLMCAVALLILILLIVCFIRRNKGGKYPVKEKEDAHADPEIQPMKEDDGTFGEYSDAEDHKPLKKGSRTPSDRTVKKEDSDDSLVDYGEGVNGQFNEDGSFIGQYSGKKEKEPAEGNESSEAPSPVNAMNSFV
